United States Patent Application Publication US 2005/0228172 A9 - sequence listing, part 206

SEQ ID NO: 933238 - DNA, 606 bp, Homo sapiens
ttgcatgaattactttttctctattgcagttccttgtcttgatgaattggctctgtctacgcagtgggcaaggtgaaccccttgggcagttacagtgttggcccagattacttgaggtcaggagtgcaagaccagcctagccaacagggtktgtgtgtgactatgcccggttaattttggtatttttagtggagactgggccacctgcctcagcctcccaaagtgctgggattacaggcatcagccactgtgcctggctcctttttttttttttttttttttttttgagaaggagtttcgctcttgttgctgaggctggagtgcagtgatgtgatctcggctcactgcaacctccgcctcctgggtttaagctattctcctgcctcagcctcctgagtagctgggatgacaggcatgtgccaccacgcctggctaattttgtatttttagtaaagacgggatttctccatatttgtcaggctggccttgaactcccgacctcaggtgatccacccgccttggtctcccaaagtgctgggattacaggagtgagccactgtgcctggcccatttaaaaattcttagttggctttgtgattctcaaat

SEQ ID NO: 933239 - DNA, 614 bp, Homo sapiens
gaggcgcccacttcccagatggggcggccgggcagaggcgctcctcacttcccagacggggcggccaggaagaggggctcctcacatcccagacgatgggcagccaggcagagacacttctcacttcctagacagggtggcggccgggcagaagcactcctcacttcccagacgggggcggccaggcagaggcgctcctcacttcctcccagacggggcggccaggccgaggcgctcctcacatcccagacgatgggcggccaggcagagacgctcctcactttctagayggggtggcggccgggcagaggcacttctcacttcccagatgggtcgggcgggcagaggggctcctcacatcccagacgatgggcggccaggcagagacgctgctcacttcctagacggggtggcgggcgggcagaggctgtaatcttagcactttgggaggccaaggcaggcggctgggaggtggaggttgtagtgagccgagatcacgccactgcactccagcctgggcaacattgagcaatgagtgagcgagactccatctgcaatcccagcacctcgggagaccgaggtgggcagatcacccgaggccaggagctggaaac

SEQ ID NO: 933240 - DNA, 614 bp, Homo sapiens
gaggcgcccacttcccagatggggcggccgggcagaggcgctcctcacttcccagacggggcggccaggaagaggggctcctcacatcccagacgatgggcagccaggcagagacacttctcacttcctagacagggtggcggccgggcagaagcactcctcacttcccagacgggggcggccaggcagaggcgctcctcacttcctcccagacggggcggccaggccgaggcgctcctcacatcccagacgatgggcggccaggcagagacgctcctcactttctagatggggtggcggccgggcagaggcactyctcacttcccagatgggtcgggcgggcagaggggctcctcacatcccagacgatgggcggccaggcagagacgctgctcacttcctagacggggtggcgggcgggcagaggctgtaatcttagcactttgggaggccaaggcaggcggctgggaggtggaggttgtagtgagccgagatcacgccactgcactccagcctgggcaacattgagcaatgagtgagcgagactccatctgcaatcccagcacctcgggagaccgaggtgggcagatcacccgaggccaggagctggaaac

SEQ ID NO: 933241 - DNA, 610 bp, Homo sapiens
gctagggaggttgaggcatgagaatcacttgaacccaggaggcggaggttgcagtgagccgagattgcaccactgcaccccagcctgggcaatagagcgagactccatctcaaaaaaaaaattagttttcaatttacatacagtaaaattcactcttgttgctgtgcagctactttaagtcttgacaaatgcatagtcatgtgactgccactacaaatcaagatacagggacactcttcatggtgcctaaacatttcccaaggctctagccaacactttcccctactacttgttcctcgcagccactgagctgttctctatctccacagttttgcctttctagaatgtcatataaaagttcagtgggctggggrtcgtggctcatgcctgtaatcccagcactttgggaggctgaggcaggtgaatcacgaggtcaggagttcaagaccagcctggtcaagatagtgaaaccccatctctactagatatacaaaaaattagccaggtgtcgtggcaggagcctgcaatcccagctactcgggaggctgaggcaggagaatcacttaaacccgggaggtggaggttgcagtgagctaagattgcaccactg

SEQ ID NO: 933242 - DNA, 579 bp, Homo sapiens
aagcagattctctcccgtgcctggctcggtgggtcctacacccacagagccttgctcactgctagcacagcagtctgacatcgaactgtgaggcagcagcctgggttgggaaggggcatccaccattgctgaggcttgagtaggtaaacaaactggccaggaagttcgaactgggcasagcctactacagctcagcaaggcctctgcctctatagactccacctctgtgagcagtctgtagctgaacaaagggcagcagacagcttctgcagacttaaacgtccctgtctgacagctctgaagagagcagtggttctcccagcatggtgtttgagctctgagaacagacagactgcctcctcaagtgggtccctgaccctcgtgtagcctaactgggagacaccttccagtagggtccaacagacacctcatataggcgggtgcccctctggaactaagcttccagaaggagtatcaggcagtaatatttgctgttctgcaatatttgctgttctacagcctccgcgggtgatacccaggcaaacagcgtctggagtgggcctacaacaaactccaaca

SEQ ID NO: 933243 - DNA, 620 bp, Homo sapiens
attcccgcctaataaattttggtcagaccggttgatcccaaaaccctgtctcctgataagatgttatcaatgacaatggtgcccgaaacttcattagcaattttaatttcgccttcgtcctgtggtcctgtgatctcgccctgcctccacttgccttgtgatattctattaccctgttaagtacttgatgtctgtcacccacacctattcgcacactccctccccttttgaaaatctctaataaaaacttgctggtttttgtgggctgtggggcatcacggatcctaacaacgtgtgacgtctccctcggatgcccagctttaaaatttctctcttttgtactctgtccctttatttctcaagccggccgacgcttaggaaaaatagaaaagaacctacgtgattatcgggrcaggtcccccaatatcctttgatgtgcgctctctccccctcatctgagtactcttccccaacccaaataaaaccaaaagaccaatccggtgaggtgagcagtggtgtgtagaggcccaggaacagagatagaaattcctgtataaaaggtaggaacagggtgcaggtagagaagttgctgagagccatacctgcagcaaatatggaga

SEQ ID NO: 933244 - DNA, 544 bp, Homo sapiens
aattttattcttaaaacctttgtttaataaggtatatagaggaactataattacacaggtgaggaattggagactcagaaaggttaaataatttgcccgaggtcatgaagctggtaggtggtagaactgggttgcaagtaaccaggtgtgctttgtccctggattgcattctgttttcacttgacaataacgcctctcggaaagagcaaataacctccacatgcagggtctttgtcttatctctcagaggtatttgtctccccactgcctcacatacactcagctctcaagatatttgaccccaagagaattggccagatagagatgtgagracgtgtgagttgaagcccaatgttattactctctggcacataaagggccacaatgtctgagtaatactggaatcagaagacatgaataaacagaggtcaaggtggtggtttaatcccaacgacatgtaaacaaactcacttttaaaagttagtactattaactcgtggagtaaagctcttattcgacagcaagttaaatttactttgttttt

SEQ ID NO: 933245 - DNA, 662 bp, Homo sapiens
tttcttttgacggtctccctctgttgctgaggctggactgtactgccctgatctcggctggctgcaacctccctgcttcgggctcccgtgattctcctgcccccgcctgccgagtgcctgggattgcaggcaagcgccgccacgcctgactggtttttctatttttggtggagacggggtttcgccgtattggccgggctggtctccagctcctgacctccagtgatctgcccgcctcggcctccggaggtgctgggattgcagacggagtctcgctcactcaatgctcaatgttgcccaagctggagtgcagtggcgtgatctcggctagctacaacctccacctcccagccgcctgccttggcctcccaaagtgctaagattacagcctctgcccggctgccaccccgtctaggaagtgaggagygtctctgcctggccgcccatcgtctgggatgtgatgagcccctctgcctggccgcccatcgtctgggatgtgaggagcacctctgcccggccgcccatcgtctgggatgtgaggagcgcctctgcacggccgccccgtctgggatgtgaggagcgcctctgcccagccgccaccctgcctgggaagtgaggagcgcctctgcccggccaccctgtctgggaagtgaggagtgcct

SEQ ID NO: 933246 - DNA, 529 bp, Homo sapiens
cagaagagattaggggccaatattcaacattcttaaggaaaagaaattccaacccagaatttcacgtctggccaaaccaagcatcctaagtgaaggagaaatacgactcttctcagaaaagcaaatgctgagggaatttgttaccaccagacatgctttacaagagcttcctcagtgaggaagcactaaatatggaaaggaaagactgttaccagccactacaaaaacacactgaagtacacagaccagtgacactataaagcaaccacataaacaagtctacaaaataacgaactaacatcatgatgaaaaggtcaaatccacacatcaatactaaccttaaatataaatgggctagatgtcccaattaaaagacayagagtggcaagctggataaagaaccaagacccattggtatgctgtctttaggagacccatctcacatgcaaagacacagataggctaaaatataaagggatgaagaaaaatctaccaagtaaatggaaaaccaaaaaacgcagggattgca

SEQ ID NO: 933247 - DNA, 856 bp, Homo sapiens
tgcagtgtggcaccacttgaggagcccagcccccaccttgcatcttgccctggagcccaacagactctgcgcatctccccattcctggagcccccactgacacctgcctgtgtccacccagaatactggagtgacatgacactggttagacacagcagtacagccgggtagccaacataatgtcctatactctgggaaataggcagtgcagcgcactagggaggctgccctcaggacacaggatgctgaagtgtgcgttcaccagagcctgagagctacttgcctgaggccactgccactgagagcaaccttattcccctaatctcagcagcaaggmtgcaacacatgccctgaggataggctctccccacacaccactgccccagtcgctgccacttgagcatgccacccaggagcctggggatagccctgctctgcccaccatagcctgcatctgtacataccactggaggacctgagggcaggcctccccagcctggtattgccaccattactgccatcactcacaccacacacactgcctaggggcccgaggacctgcacacaaaccccgcccactgctgtcactgctggcacctaagtaagccacttgcaggccaaggaattggcctgataccactgacactggtacccacattcactgcacagaggcccaagaacaggcacacttgggcttccactgccaccactgaggcctaaggattgtcccatctggtgcctgggttcccagcaaagtctcaccacagtctgtattaacaacttcagcctaagccactaaggaaatcacaaacactactggtactgtttacagttgaaaaatcagagactacactac

SEQ ID NO: 933248 - DNA, 854 bp, Homo sapiens
gcttctgagggatacgttttcaatgacctttttcattttcaaagccttcgcaatgttatttggatcttttctgggcatatatcacccaatgtcccatctgggacctaggtggaggtctatcatgggattcagtcctcaaagtctttgttatgttgtgttggagcactatatgcatatttgagggtcaatctaggagttcataaacaactgtgtatatatggtaagtttctctaccaactcctatgcactatctaatttctgagactttcttttggttctgtgattacaaagctgtggaattatttattttactctataatgacttcccaccagtatgttttagcttgaggtcaagcagcaggagaaaagagagagagagagagacagacagacacacacacacacacacacacacacacacacaaagagacatattttccacacctatttgtgaccatagcttctgatgagaaattgaagttcatctccctcagagttttaggtaactgtggattccagatgctaccagttttgcttataggacccccatttctcagtctttgagcctgagctatgtattacccagtgtccagtctcactctctgagcctgagctataatgccyttctgaagctctctctgttcatgcccatgaccacttgtcagtttttggcagccttgagagaaggccaggggatactagaggatgaaaaaacaattatctctgactcagtggaatttcaaattctactcttctctaatatgcctactactattgacttttctgagtcctcaaatagttccttcatgcatctgcccaaggtttataagcacatttcatgagatagacaagct

SEQ ID NO: 933249 - DNA, 613 bp, Homo sapiens
agaaaagggtgtgtgtgtgtgtgtgtgtgtgtgtgtgtgtgtgtgtgtgtttcatttcaggccaattcaaaactaacagagatagtcatgaggtagtttacatcatgatataacctcatgggttctgcaaccatggtttttgttcagtaatcactagttgagtatttactgtgtgccaggcactgaaataggcattatgaaggatacaaaatattacagagacaaaaaaaggaagtccacaactgactgttaccaatttagtcttaaagggagtggcaatttgccacttggtcgactgtagcaatggrggtaaaagttgaggttcagggtcatgtacaaaggctgctgattgtccctgagtaactcttcttcttcttgaggaggtctgtgatgaggaaataatcacagattgctttgtggaatgaatgaatgattggaggagatcacctttcagtggcttcaataagcagctatagttctcatatgctttcagtgacttttctctgttatctgaccctccagatagaatattcaagtacagagttatacagcatgcagtcagcacacctttgttctttgtaccatttttatgaatctacctgttctcacagtg

SEQ ID NO: 933250 - DNA, 485 bp, Homo sapiens
ataatcagtaggaagttattgaggggtttggaacagcaaagatactgtagtaaaatgtatccatcaggaaaatatgagatagattagagcagagattcccaaactcaattcaaggttcccttcatgtttcagtaattttttatagccctcttaggccaaaaamtacctaacgattctattaagtagacagaaaagtaatagccacagaagagtaatagccatcaacaaatatcaccatgtttcccttgaacatttaaaatatcccaaggggcatctcagtaagttcaatgtggtgcctcaatacaacttgcttatatttcttcactacaagactaaaagtatgtaaataggaagacttgcaacaggaaggtcatttggaacaggaactgacaaattatgacccataggcccaatctgatctactacctgtttttgtaaacaaagttttattgagacacatgtattgtttatgtactgtttttaag

SEQ ID NO: 933251 - DNA, 613 bp, Homo sapiens
aaggggtgggggtttctcgccctccagaaaagcagagaatgggttgggacactgaaataagggattggggcacagagataagaagttggggtgtggaaataagggattggggtgcagagatataagaggtaggggtgcggaaagaagggattggggcacagagatataagaggttggggcatggaaataagggattgggtgcagagataagaggttggggcacggaaataagggattgggggttcttgccccctagaaaagcgggacttgccgctaagggtgaaggagaaggsgttgaggagtacttgcccctctcccagaaaagcagaacaggggtagagacaaggagagaaggggttggggtacttccctcttctccagaaaagcgggacttgccgctaagggtgaaggaccaaggcaggcgtccctgcgtggtctgacacctttgaaacgtgggtgaatagtcagagaggtgtccctgcaatgattaaacaccaagggaaggctgccttcccagtccatgactggcgcccgagttttgggtccacggataaaatgtgtctcctttgtctctaccagaaaatgaaaggaattgaaattaagggagagattg

SEQ ID NO: 933252 - DNA, 581 bp, Homo sapiens
gtggcttatgcctataatcccagcactttgggaggccgaggcgggtggatcacctgaggtcaggagttcgaaaccagcctcaacatggagaaaccctgtctctactagaaatacaaaattatccgggcatggtggtgcatacttgtaatcccagctactcaggaggctgaggcaggagaattgcttgaacctgggaggcggatgttgcggtsagccaagatcgcgccattgcactccagcctgggcaacaagagtgaaactccatctcaaaaaaaaaaaaaaaaaaaactctcagcaaaattggcctacaagggacacacctcagtgtaataaaagccatctatgacaaacccacagccaacataatactgaatggggaaaagttgaaagcattcgttctgagaactggaacaagacaaggatgcccactctcactactcctcttcaacatagtactggcagcctagccagagcaatatgacaagggaaagaaataaagggcatccaaatcggcaaagaagaagtcaaactgtcactgtttgctgacaatatgatcatttacctcaaaaaccctaaagact

SEQ ID NO: 933253 - DNA, 591 bp, Homo sapiens
ggttgggcaactgcaagtgggggaacttacaagtcatgggtggattcaaagatttcctgattggcaattggttgaaagggttaagctctgcctgaagagttgaaatcagcttgagataaggtaagggggttgttgtggaagccaaggttcttgtcacgtagatgaatcctccaggtagttgtcttcagaaagaatagatgtgactgtctcttattgaaggtgtcagactgctagagagacctagtaaaggaargagattctttacagaatgcaaaatttcacctccaagagacagctttgcaggaccatttcaaaatatatgtttctttaagtacccggctgtctgtcatgttatgctataccagagtcaggttggaatttggtatcttatggttatagagtctcttctgtcggtcttaggatctctattttaatgttaatggtggtcagtagtatgcctgaactccaaagagaggtgagtataatgaggtgcgtataatgagtataatgagtctcattgttggctcctcttggcctgtcagttgggaggcttagaattttatttttggttaacatatgttttaaggaaga

SEQ ID NO: 933254 - DNA, 728 bp, Homo sapiens
  misc_feature 4: n = A,T,C or G
tagnatcccctcttattgattttttttttcagataattcactattagtgtatagaaatgctattgactttggtatgttaatttggtatcctgcaagtttactgatttgtttcttagatctaatcatttttctgacgtgggctttggagttgtctatatttaagatcatgtcatttgcaaacagggacaamttaatttcatttctgatttagatgacttttttttttttaagacggagtcttgctctgtcgcccaggccagagtgcactggcatgaacttggctcgctgaaagctctgccactcagattcacaccattctcctgcctcagcctcctgagtagctgggactacaggcacctgccaccacacctggctaatttttttgtatttttagtagagatggggtttcaccatgttagccaggatggtctcgatctcctgacctcgtgatctgcccacctcggcctcccaaagtgctgggattacaggcgtgagccaccgcgcccggccattttcatttctttctgttgcctaattgttctaagatctccaataccatattgaataaaagtggtaaaagtggatacccttgacttattcctgatcttagagaaaaagctttcaactttccccctaggtatgttacctatgggtttgtcatatatgacctttaatgtgttgaagtatattcttttgttgtttccataggttttgggggaacaagtggt

SEQ ID NO: 933255 - DNA, 582 bp, Homo sapiens
atggccaagatacagaatcaacacaagtgtccttcagtggattaatggataaagaaaatgtggtacatgcatgcaagggaatactattaatacagcctttaaaaggagggaaatcctgccattttcaacaacatagatgaatctggaagacattatgctaagtgaaataagccaggcacagaaagacagataccacatgatttcacctacatgtggaatctaaaaatgttcaactcacaaaagtagcatagactgatggttaccagaggtcagaggagctgaaaaaagagggaatagggaattgttgatcaaagggcagagtttcagacagaaagaacaggttttgaaatctaytgcacagaacagtcgctatactcagtaataacgtactaaatcaaatgtctgaccctaagaaatcataggtaatcaaattgatgaatgctaattcggttgatttaattattccacattctatgcatgtatcaaaacactgcatttcaccccataaatgtgtatttgttaattaacaacaataataaaaaattaaaaattgaacctaggacttccaggtagctgaagaaa

SEQ ID NO: 933256 - DNA, 582 bp, Homo sapiens
atggccaagatacagaatcaacacaagtgtccttcagtggattaatggataaagaaaatgtggtacatgcatgcaagggaatactattaatacagcctttaaaaggagggaaatcctgccattttcaacaacatagatgaatctggaagacattatgctaagtgaaataagccaggcacagaaagacagataccacatgatttcacctacatgtggaatctaaaaatgttcaactcacaaaagtagcatagactgatggttaccagaggtcagaggagctgaaaaaagagggaatagggaattgttgatcaaagggcagagtttcagacagaaagaacaggttttgaaatctattgcacagaacagtcgctatactcartaataacgtactaaatcaaatgtctgaccctaagaaatcataggtaatcaaattgatgaatgctaattcggttgatttaattattccacattctatgcatgtatcaaaacactgcatttcaccccataaatgtgtatttgttaattaacaacaataataaaaaattaaaaattgaacctaggacttccaggtagctgaagaaa

SEQ ID NO: 933257 - DNA, 679 bp, Homo sapiens
tattgtgttgaagtatgttccttctgaaatgagagaagttcccccttttccacttgcagggtgttcaacagggatgtggctctcttcttcagtgccccactgctcaaacccctaggggggacatgcagacagatagttgcagaggtcatggggaacgtttttgggctccaaccccaaggcagtgtgtaggggtatttacagctcctgaagcccgagttggcatgtgttatggtgcactctttcagctttgccatgtgcaggcggctagtgttaatcacctcaattagaccctctgccttatcgcaaggacagagggttttctgtatcctgggttcttgccctagtgtactggaaaaaatcggatcacatatgggcttggagaatgagtgcaagattttattgagtggtagaagtagctctcagcaagttggatggggagctagaagggggwtggaatggaaagattgtcttcccctggagtcaggacgaccagcagccggactttcccccgactggccccagctgaattcccctcagtgttagcgttgttctgccgtcactgacctgccagtgtctgctggtgtctgtcagtgtgttcttctgctcctctcaacattcagctgcctgtgtctgtgcccgctagggtctcagatttttatgggtaaaggatagggggcat

SEQ ID NO: 933258 - DNA, 728 bp, Homo sapiens
acctgggagtaccatctgcaagtctatagtgggtgtcttagagatggcagcagtgggtgaggcagtgtcagcctctcagtcatttctacagctttagtaacattcgcaatttgcaagactaatttatgcgcactgttttgttttttgtttttaaagatatgtaagttagagttgccagagagaatctcctgaaaaatgtcaagcctcaggacctaccctagaccacctgaagcagagttcttgggacagtagtggtcagagaatgggatttcaggccctgagaactgagtttttccacaacctcctcttgtggcctggagcttcctcattactaaaatgggaacaatacctttttgtgagagtgaaaacatatgaaagtgctttggaaaggcctatgcagatgcagagggatgctcttatcaaattccttaaagaaatttaaaaaatcttagcaggagaaactrcgaaggaagcaatggggtgggtatcaagcacacacagcaccgagaaaggcctatgaaagatgctacgctgagccactttgagattcagacagttgattattcatataacgaatggaagagtagccaagggttccagatccctgggcacttgtcccacaccagaaaagatgacattgaaacaaaaggggccagatggctgcagtgggagctgtggaatacccagatgccgaggggccaattctaccttcagcaaagaggacttag

SEQ ID NO: 933259 - DNA, 583 bp, Homo sapiens
tacccatattttaactcttttcattgttatttctttatttctaatgtttcaagtttccttctttttatttttttttagacgaagtcttgctctgtcatacaggctggagtgtagtggcatgatcttggctcactgcaatctccgcytcctgggttcaagcgattctcctgcctcagcctcctgagtagctgggactacaggctcatgccaccatgcccacctactttttgtacttttagtagagatcaggtttcgccatgttggccaggctagtctcaaactcctgacctcaggtgatccaccaactttggcctcccaaagtgctgggattacaggtatgagccaccacacccagccttcaagttttcttctttaatcatttctttctgtttcaagatattctttaggaattcttttatgataagcctgctgataacaaattatcttagttttccttcacctgagaatgtcttgatttaaccctcattcctgggtataaaattctaggttgacagttttttttctttcaacacttgaaaagtgtcatgacactcctcccctccatggtttccagtgagaaatc

SEQ ID NO: 933260 - DNA, 719 bp, Homo sapiens
gcaagaggcttcagagcaaaagctagcatatttagatgtatattattatatcatgtcactcatagtgagtttctgtaataatccttgtaataacctaataaccaaatccattttctaagcattatccaaaatgctttccctcatactgtcccactgagcctttgcaacagctctgagaggtgggctaataatattaaccccattttacaaagaaagctgtggaagtgagttgctttcargtctcacagcgcaggagagacagagctggggctccaagttagagccagcttcctttgaattctgtgcttggttcagagtgactcactttagtagactgcaagtaatctgtgcctaaaatatgggataaagaaaaagaacaggttaggcacggtggctgtaatcccagccctttgggaggctgaggcaggaggatcacttgaggccaggagttcgagaccagcctgggcaacatggcaaaaccccatctctactaaaaatacaaaaaattagccaggcatggtggcacatgcctgtagttccagctatttgggaggctgaggtgagagaatcacaggtcaaggctgctagtaagcccagattgcgccactgcactccagcctggccaacagagtgagaccttgtctcaaaaaaaagaaaaaaaaaaaagaaaaagaaaaaccctttcaggtgaggtacaggtagaattttgctctggttaa

SEQ ID NO: 933261 - DNA, 571 bp, Homo sapiens
agtgtaaattagatcacagagaagaccatagaacctttgagagagagagattgactgacagagactcatgaacttaacgtttgggcagtctaaagcttaaatggttactccacagtataattttstttaaatcctgtaatttctctctgctgttcttggaaatagcctttatctacatgattcagatggctcttcagttcttctacattttaattaggtcatagggaaagggagaaaggggttagaaaaggtataagtatgccttgaaaatttcatgtattacttagattcacacctcattggtcaaaacttagttaatggccatacacagcttaaaaggaggctaagaaatgcagtcttcatttgagacagccataaggctatgctaataaatgaagatgttattatataaggcatgaagaaaaaaatatctgtttggggattatttgtagtcactgccacagtgctatcttgtaggcagctcaagaaggttgacaggagcagactggtttaggtgattcagtatgggcagaaagaataagaccacacaaaggttaagaggaaggggagg

SEQ ID NO: 933262 - DNA, 607 bp, Homo sapiens
ggagcagagctgcttgcagcccacgtggctggagaagcctcacaatcatggcagagggcaaggaggaacaagtcacatcttatgctgatggtggcaggcaaagagaggagtgcttgtgcagggaaactcccctttttaaaaccatcagatctcatgagactcaatcactattttaagaacagcrcaggaatgcccgcccccataattcaatcacctcccactgggttcttcccacaacaagttggaaatgtgggagttacaattcaagattagatttgggtggggacatagataaaccatatcattcatatttgcaaatttattttttattttcttttccttttaaatatatttttcttgtgcattggtattattaataccaatatttgcaaaacatgtagctttaaagtggttttctgtacttctaacaaaacttcttcctaagatggttggtaacccttgattgtcaattaaaatttatttgtgagatctgtgactgatttgggggacactatcgactttggactactgcagatccctctaaaatcatcatgtaatgaatgtttcataaattataactgttctttgttgtaggtccaatgcttac

SEQ ID NO: 933263 - DNA, 719 bp, Homo sapiens
gctggagtttgctggaggtccactcccgaccctgtttgcctgggtatcactagcagaggctgcagaacagcaaagattgctgcctggtctttcctctggaggcttcgtcccagaggggcacctgccagatgccagccagagctctcctgtatgaggtgtctgtcagcccctactgagaggtgtctcccagtcaggatacatgggggtcagggaccgacttgaggaggcagtctgacccttagcagagctcgaacgctgtactgggaggtctgctgctctcttcagagccatcaggcagggacactaaagtctgctgaagctgcacccatagcckcccccttcgccaggtgctctgtcccagagagatgggagttttatctataagtccctgactgaggctgctgcctttttttcagagatgccctgcccagagaggagaaatctggcagtctggccagagcagccttgctgagcagcagtgggctacacctagttcaaacttcccagtggctttgtttacactgtgagtgtaaaaccacctactcaagcctcagcaatggcggacgtccctcctcccaccaagctagagcatcccatttggatctcagactgctgctgtgctggcagtgagaatttcaagccagtggatcttagtttgttgggctccatgggggtgggacctgctgagacagaccacttggctccctggcttcagcacc

SEQ ID NO: 933264 - DNA, 682 bp, Homo sapiens
ccagagcagccttgctgagcagcagtgggctacacctagttcaaacttcccagtggctttgtttacactgtgagtgtaaaaccacctactcaagcctcagcaatggcggacgtccctcctcccaccaagctagagcatcccatttggatctcagactgctgctgtgctggcagtgagaatttcaagccagtggatcttagtttgttgggctccatgggggtgggacctgctgagacagaccacttggctccctggcttcagcacccctttccaggggagtgaatggttctgtcttgctggcattccaggcgccactggggtatggaaaaactcctacagctagttcggtgtctgcccaaatggctacccagttttgtgcttgaaacccagggccctggtggggtaggcaccggagggaatctcctggtttgtgggttgtgaaaatcataggacaagcacagtttctgtgccagagttcctcagggctcagtccctcatggtttcacttgggttggggagaaaattctcygacgccttgcacttccagggtgaggtgatgtcccactctgcttcggctcaccctccgtgggctgcacccactgtccacccattctcagtgagatgaaccgagtacctcagttggaaatgcagaaatcacccaccttctgcgttgatctcactg

SEQ ID NO: 933265 - DNA, 587 bp, Homo sapiens
aaattgaagaactgattagaaaattcttatgaagttgcaaggcactcagaatagtcaaaacaatattgaaaaaaaaagaacaaatttgagaactcacacttcttgatttcaaaacttactacaaagatatagtcatcaagattatgtagtactggcataaggacagatacatagatcaatgaagtagaatggagagttcataaataaacctatgcatctatgatcaactgatttttgacatgggtaccaagaccactcaaggggcaggggaagaatcatcttttcaatgcwtgatactgggaaaacaggatggccatatacaaaaaaaaaaaaaaaagatagacccccacctcattccatatacaaaaataaataaatgtaggttatagacataaatataagagctagaactacaaagctctcagaagaaaacagaagtaaatagtcaacaggcacctgaaaagatgctcaacatcattagtcatttgggaaataaaaattaaaactacaatgagaaataacttcatagtcactgagatggctgtaattaaaacaagaagtcttagtgaaggtgtggagaaattggg

SEQ ID NO: 933266 - DNA, 614 bp, Homo sapiens
ttgaggtatgttttttctatgcctaatttcttgagggtgtttttatcaagaagagatgccggattttatcaaatgccttttttgcatctactaagatgcttatatggtttttgtctttaattctgtttatttggtaaatcacatttattgatttacaaatgctgaaacatccttgaatccctggaatagaacccacttgattactgtgtattattactattattattattgagatggagtctcactctgtcttccaggctggagtgcaatggcgcaatctctgctcactgcaacctcctcctcccagattcaagcgattttcctgcctcagactcccgagtagctgggactacaggcaagcgccaccacgcccagctaatttttgtatttttagtagagacgggggrgttttaccattttggccaggatggtttcgatctcttgacctcatgatttgcccacctcagccttccaaagtgatgggattacaggtgtgaaccactgcgcctggccatctttttgatgtgccggtaaatttgatttgctagtattttgttgaagatttttgcatttatgtaaatcagggatattggcctgtaggtttacatttttgt

SEQ ID NO: 933267 - DNA, 577 bp, Homo sapiens
gcaccactcatgaaacaattttttcctcctgggcctctgggcctgtgatgggaggggctgccataaaggtctctgacatgccctggagatatattccccattgtcttggtgattaacatttgcctcctcattaattatgcaaatttctgcagctgacttgaaattctcctcagaaaatgggattttctttattatcrcattgtcaggctgcgtattttccaaacttttatgctctgtttcccttttaaaatggaatgcttttgtattagtccattttcatgctgctgataaagacataccctggactgggaagaaaaatagttttaatggactcatagttccacgtggctcagaaagcctcaaaattatggtggaagacaaaaggcccttcttacatagtagcagcaagagaggatgagaaagaagcagcagcagaaacctcttataaaaccatcagctctcatgagacttattcactaccacaagaaaattatgggggaaactgcctccatgattcaattttctcccaccaggtccctcccacaacacatgggaattatgggagtacagttcaaga

SEQ ID NO: 933268 - DNA, 566 bp, Homo sapiens
ccaagctgtacatgagccttttttttttttttttttatgaggtggagtcttgctctgtcacccaggctggagcgcagtggtgcgatctcagctcactgcaagctccacttcccaggttcacgccattctcctgcctcagcctcctgagtaggggactacatgtgcccaccgccatgcccrgctaatgttttttgcatttttagtagagacagggtttcaccatgttagccaggatggtctcaatctcctgaccttgtgatccgtctgcctcggcctcccaaagtgctgggattacaggtgtgagccactgcacccagccacatgagccattttaagaagtgactagagctagagtgaccaggatatgtggagaagtgtcctaaggctgtgtggggcagcagatccctgggcctggctcatgaaaccatcctttcctcttagggccctgggtctgtaatgggaggggctgccttgaagttctccaaaatgcccttgaagccttccctgcctctcccattgtcttagctatcagcgcttggcttctttttagttatgcaaatatctct

SEQ ID NO: 933269 - DNA, 574 bp, Homo sapiens
cacttgctagagatatttgcataactaaaaagaagccaagcgctgatagctaagacaatgggagaggcagggaaggcttcaagggcattttggagaacttcaaggcagcccctcccattacagacccagggccctaagaggaaaggatggtttcatgagccaggcccagggatctgctgccccacacagccttaggacacttctccacatatcctggtcactctagctctagtcacttcttaaaatggctcatgtggctgggtgcagtggctcacacctgtaatcccagcactttgggaggccgaggcagacggatcacaaggtcaggagattgagaccatcctggctaacatggtgaaaccctgtctctactaaaaatgcaaaaaacattagcygggcatggcggtgggcacatgtagtcccctactcaggaggctgaggcaggagaatggcgtgaacctgggaagtggagcttgcagtgagctgagatcgcaccactgcgctccagcctgggtgacagagcaagactccacctcataaaaaaaaaaaaaaaaaaggctcatgtacagcttgg

SEQ ID NO: 933270 - DNA, 741 bp, Homo sapiens
atgcctttcactcatagggttctttcttcattctccatgccctcttacctccatccacccatcacctctcatgttgcaaggcttagctaagagatcaccatctattggaagtgcttcctggcccttcaattagaattgtgcagtgctgaggtttcagggatcatggcggacgggatgcaggactaaattgcatctccgactcgggtggacagagcagtgtgtggaggcttacgtcttgaatgtttgctccagagcaactgcaggaataaatcaggaaacctgagaaggctcacagaccccctgaaggaaggctattgctactgcaggacccaggagacaccccaaatactgtgagtacccatactgtggaagtgggaaagggaaatcatccattgccgaacacacacccccactggggaaactgaaggcctagattactggagaagattttgaccttacctggagctgagtccatttagagagctgagagaaatacaggggtagaggaagcagcaggaaaagtcctgggagcttgctgtgttccccatcaagtgggttttgcctrgcctcataggagtccttcaagaggacggccagagggtctgagaaaaggccacaggacaaaggaaatttccatgtgaacattgtaacaatttgaaccgactgagaagcctcctggccagaacttgggggagggcgtgaatccagtgtgcagattccacaggtcggggaagaaggaaa

SEQ ID NO: 933271 - DNA, 588 bp, Homo sapiens
ccactgactcaaatgttaagctccttaggcaacaccctcacagacacacccaggatcaatactttgtatccttcagtgggatcaagttgacactcagtattcaccatcacagtatcaaagggattttttggtgtggtcagtcactgaggtatggagtccctacatgcacctacatgactgaatagctagagtcaatcatgtaggtgctgcactccatacccacctgactcaccctaggtattcagtctccaattttctccccccttccagaggtcaaactgataaacagtgggccccagggtcaaaggagggaaaaaaaaaaaaaaagcccgttccatcccaatcattgtamacaggcggaggctgggcggggtgggaatggggtgctggaggccggcctggggcacagcgcaggaggcagctacagtggctgcagcagcagcagcctgagtgccaggaggcggcagccgtggcagcggggcagtcggttgcatggtggcaggcacaggtgtaatggagaggtaacagagaagacctcctcccttcctagtcagggcattagcaagactgaatgcttcctgcccccac

SEQ ID NO: 933272 - DNA, 575 bp, Homo sapiens
gttttttggttgttttgtgatcttctttcctttcttcctgtcttccatataatgaaggtaattttatctggtgatgtacttcactttcttgctcttttttttgtgcgtatccattgtatgtttttagatttgtggttaccatgaagctttgcaaatagtatctcatatcttattattttaaactgatgactccttaacactgattgcatgagcaaacaagcaaataataaaaactaaaagcaaaaagaaactaaaaaatctaaaaaaaagaaacaaaaagaaaactaatagaaatgctactctttaacttcatctccctgctttataacttttgttgtctctatcttattttactgtctatgtcttgaaaarttgttgtagttattattttatcttttcatatttctacttaagcgtggttcacacaccacagttacaatgttataatagtctgtgattttctgttttgtacattcaaatgatttttttgttgctcattacaaactttttcttgcatactgaagtactccctttagcatttattgtcagacagttctgatgttgatgaaatccct

SEQ ID NO: 933273 - DNA, 461 bp, Homo sapiens
accacaatccagattcagagctgtcccatcaccaaaaacaccgcccatatgttcccctttataatcacacctacacccacctccctaccatccttaactgctgaaaacccctaatctcttttccatctctgaaatgttgtcatttccaraatattatataaataaaacaatacagtatgagaccttttgagatctatttgttttgtatgtaccaagagtttattcctttacattgctaagcagtattccatgttacagatgtaacagatgagtgtttgtttaaacactcatctattgagggatgtttgtattattttcagtttggggctattaatacagctgatgtgaataaacatatatacatctttatgcaagcataagtgtttatttctttggcataaatgcccaggagtgcaatcgtgctggtcatatggtatgtttgcatgtttagttttgttatt

SEQ ID NO: 933274 - DNA, 584 bp, Homo sapiens
ctctggggccggcagtcatttctgcttcttcctcagaactaaagattttttttttctctccccttccatagcagtaatgggttttaccagtgcactaagagtggcagattatattgcccttctacaaattaaatctcttattccatatagtgaaatttggaagggtcccagtgaagacttttatcatccctaaactacaccatgaaaagcaactcttcagtactctcaacaagttgggcccatgtaacaaaagttgkcaagagggtgcaaattccccttgcattttcagctccatggattcccccactctcttagcaacccacatttacctccatcaactgttaactattctagctaaattgttcttactggattgagttgtgtctgcctcagataaacatgtgttctcatactgtctatttctgcagcctcctgtctctttgcgatcctggatcatctttccctaaccccccttatccttcccagcaggaaacagaagcctgtctttatatctaaataattattgtgtccctgaagttcagttgttcagtgcaatatgtcttggtttaaagagtctacattaa

SEQ ID NO: 933275 - DNA, 584 bp, Homo sapiens
ctctggggccggcagtcatttctgcttcttcctcagaactaaagattttttttttctctccccttccatagcagtaatgggttttaccagtgcactaagagtggcagattatattgcccttctacaaattaaatctcttattccatatagtgaaatttggaagggtcccagtgaagacttttatcatccctaaactacaccatgaaaagcaactcttcagtactctcaacaagttgggcccatgtaacaaaagttgtcaagagggtgcaaattccccttgcattttcagctccatggattcccccactctcttagcaacccacatttacctmcatcaactgttaactattctagctaaattgttcttactggattgagttgtgtctgcctcagataaacatgtgttctcatactgtctatttctgcagcctcctgtctctttgcgatcctggatcatctttccctaaccccccttatccttcccagcaggaaacagaagcctgtctttatatctaaataattattgtgtccctgaagttcagttgttcagtgcaatatgtcttggtttaaagagtctacattaa

SEQ ID NO: 933276 - DNA, 646 bp, Homo sapiens
caggagacccccaaatgctgtgagtgccccaactgcggaagtgggaaaagaagattcactgctcccgaacacatacccccactggggaaaataagggtctagtttgcaggagaagtttctgaccttgcctgaagctgagtcaatttagagagccaagcaaaatacaggggtagagcaagcagcgggaaaggccctgggagcttcccgggtccccargtaggccactcttgcctggcaccacagggatccttcaagagggcagccagaggtgtggggggaaatgccacaaacagaaggaaatctttagctaaactttgtaacaatttgaaccaggcaagaagcctcctggccagaactcggggcagaacaagaatccggcatgcagactccacaagcaggggaagaaccaaagtccttttctttccaagctgggaggcaggtagcctggggcaagttctcaagccctgcttgcccactgcctggacacagactcggggctgtttgtgggggttcatggtggaagtgagaccgcccttcagattgcgtgggagctgggtgaggcctgtgattgccagctttccccacttccctgacaacctgcatgactcaacagaggtagtgataatcctcttaggtacgcaactcc

SEQ ID NO: 933277 - DNA, 560 bp, Homo sapiens
agttacaagtcctttattttgacatgagttttgcaaacatttccccccagtctgttgcttgtctgtttatttttgttatgatgtattttgaagtgcaaacgttttaaattttgatgaggtctaatttttcaatttttttcttgtaatgactgtgcttttagtgtcatatctaagaaatmtttgcctaatccaaggtcttgaagattttctcctatattttattctaaaagttgtatttttagctcttacatttaaatctataatccataataatttttgtatatggtgtgaggtgaggatctaagttcatcttttttgcatctggtttgcatctggtcccagcaccatttgttaaatgtaatcttttgcccagtgaattgccttgacacctttgccaaaactcaattgacttaaaatatagagatttatttctggattctcaattctgttccagatgtatatgtttatcttgatcctagtcctactgtctttacaactgtgactttataataagtttctacatgaagatgtgaaagtccttcaaccttgttctttttcaa

SEQ ID NO: 933278 - DNA, 576 bp, Homo sapiens
ctgcattaaatgctggttctgttttaagttctttgagaaatctccaaactgctttccacagtggctgaactaatttacattctcaccaacagtgtataagcattcccttttctccacaacctcaccagtatctgttgtttgttgactttttttttttttttttgagacagagtcttgctgtgtcacatttgttgacttcttaatagccattctgactggtgtgagatggtaaccctttgtggttttgattttcatttctctggtgattaatgatgttgaacattttttcattttttcattgttgcccacttgtatgtcttcttttgagaagtgcctgttcatgtcttttgccagctttttaatggagttatttatgttttgctggttgacytgtttaagtttcttatagattctggatattagacttttgttggacgcatagtttgcaaatatttcctcccattctgtaggctctctgtttaagctgttggtaatttcttttgctgtgctgaagctatttagtttacttaggtcacacttgtcaatttttgttgttgttgcaattgcttttgagaa

SEQ ID NO: 933279 - DNA, 777 bp, Homo sapiens
gctgctggccggggtgctaagcccctcactgcctggggccggcggcaccagccggccactcctaggtcggggcccgccaagccctcactggcccgcgagctctccctccacacctccccacaagcggagggagcccgctttggccttggccagtccagagaggggcttccacagtgcagcggcgggctgaagggctcctcaagcacagccagagtggatgccgaggccaaggaggcgccgagagcgagtgagggctactagcacattgtcacctctcatttggataacctgatgacaatatgcctagatgaagatctttttgcaatggatttctcaggtgttctttgtgcttctcgtatttggatgtctaggtctctagcaaggccggggaagttttcctcgattattcccccaaatatgttttccaagcttttagatttctcttcttcctcaggaacaccrattattcttaggtttggtcgtttaacacaatcccagacttcttggaggctttgttcatattttcttattcttttttgtctttgttggattgggttaatttgaagaccttgtcttcgagctctgaatttctttattctacttgttgaattctattgctgagactttccagagcattttgcatttctaaaaatgtgtccaaagtttcctgaattttttattgttttttctttaagctatctatttccctgagtgatttctcccttcacttcttgtatcattttttggatttccttacattgggcttcacctttctct

SEQ ID NO: 933280 - DNA, 631 bp, Homo sapiens
tagcacgcgctcatagtcctagctactcaggaggatcacttgagcccaggaattttaggctacagtgagctatgattgcaccacggcacaccagcttgggcaacaaagcaagacccccacctttaagaaaaaaaaattgtggctgggcgmggtggctcacacctgtaatcccagcactttgggaggcagaggcgggcagatcacaaggtcaggagatcgagaccatcctggctaacacagtgtaaccccgtctctactaaaaatacaaaaaattagcctggcgtggtggcgggtgcctgtagtcccagctactcaggagactgaggcagaagaatggcgtgaacccgggaggcggagcttgcagtgagccgagattgcaccactgcactccagcctgggtgacagagcgagactccgtctcaaaaaacgaaaaaaaattgttcaaattacatgaacatgtatgacaaacttccactattgatacagtcctgtctgctaaaaatatcttttctattttctggcaaagcttccgaccttaagagtttagtagtcttataacattacagatgggaagaaagtcagtgtcattagaatatagtgtgctttgtttatttcaattttctacaggcaa

SEQ ID NO: 933281 - DNA, 631 bp, Homo sapiens
tagcacgcgctcatagtcctagctactcaggaggatcacttgagcccaggaattttaggctacagtgagctatgattgcaccacggcacaccagcttgggcaacaaagcaagacccccacctttaagaaaaaaaaattgtggctgggcgaggtggctcacacctgtaatcccagcactttgggaggcagaggcgggcagatcacaaggtcaggagatcgagaccatcctggctaacacagtgtaaccccgtctctactaaaaatacaaaaaattagcctggcgtggtggcgggtgcctgtagtcccagctactcaggagactgaggcagaagaatggcgtgaacccgggaggcggagcttgcagtgagccgagattgcrccactgcactccagcctgggtgacagagcgagactccgtctcaaaaaacgaaaaaaaattgttcaaattacatgaacatgtatgacaaacttccactattgatacagtcctgtctgctaaaaatatcttttctattttctggcaaagcttccgaccttaagagtttagtagtcttataacattacagatgggaagaaagtcagtgtcattagaatatagtgtgctttgtttatttcaattttctacaggcaa

SEQ ID NO: 933282 - DNA, 621 bp, Homo sapiens
gcaggagatgaagcttgagaagtcaagccacatcattcaagtctgtgggcttccaagacgattgagagatggtttttcaacaaatgtttctaggccaactggatatttacataaaaaagaataaagtttggtgtctacctcacaccacgtacaaaaattaastagagcggccaggtgcagtggctcatgcctataatcccagcactttgggaggccaaagcgggtggatcacgaggtcaggagagcaagaccctcctggctaacatggtgaaaccccatctctactaatacaaaaaaaaaaaaattagctgggcgtggtggtgggtgcctgtaatctcagctactcaggaggctgaggcaggagaatcacttgaatccaggaggtggaggttgcagtgagccgagatcgcgccactgcactccagcttgggtgacagagcgagactctgtctcaaaaaaaaaaaaaaaaaaaaaaaaaaaattaactcgaatgaatctgaaacctaaatataagagctaaatgtataaaacttagaagaaaacaaaggcttgaattttgtggctttggattaggcaatggtttctcagatgtgacatcaaaagaaaaagcaatgaaagaaa

SEQ ID NO: 933283 - DNA, 823 bp, Homo sapiens
caggacccttgacatcatgtttactgcccccagcttcttctacgggccttcacctcccaaaggaatctccaatgctggtgaggccttagcatcaccatagatatctccatcgtacctggtgtggaccttgaacttggctggcactcgctgagcaaaaaaaattaaaaagatgctctgccatcatttcaaaaatcaagccaatkcattttagtcttttatttttccagatttgggataaattttttctttcttggtaacaaagaatttttgaatgaaaaatcattttaaattaggagaaagccaagggagacgagtgtgttgaagcaagaactccagtcgtaagagttctgctttcttttgtggaactaagggaactttgtctgacagaagcagtattctcttccaaaaggaatttgtatttattaaaatgttttaccaaaagttaactgagagccatcaactgtgtcttgagcctgtacgtttcagtgatgctgaccagaatagacccaaaccaggccataatggctggggtgaaatgtgagaaacaagaagttggggaatgcaaatggggctgttgagaacattcaaagatgtggttggaaattatactggaaaggtatgttagggtgaaactatgaaaggttttgaatgtccaagaaaaaaaaaaaaagtctagaattaacaccctaaacaataaagggccattgaagtttttaagcagatcagtttctagagttcagagcctaggctgctccagctcccttctcacgctgctcagggccctggagctcacctgtaatgagagagagcaagccctgcgcct

SEQ ID NO: 933284 - DNA, 704 bp, Homo sapiens
tacctaatcaaacaactaacttggcaatgacaggtgcccctcccccagcctcactgccaccttgcagtttgatctcggactgctatgctagcaatgagcgagactccctgggagtaggaccctccgagccaggtgcgggatataatctcctggtgtgccattttttaagcccgttggaaaagcacaatattagggtgggagtgagccgattttccaggtgccctctgtcactgctttctttgactaggaaagggaattccctgaccccttgcgcttcccgggtgaggtgatgcctcgccctgcttcggcttgcgtgtggtgcgctgcacccactgtcctgcacctactgtctggcactccccagtgagatgaacccggtacctcagttggaaatacagaaatcacccgtcttctgcgttgctcacaatgggagctgtagaccggagctgttcctatttggccatcttggctcctccccccttttttttctttttttaagatgcagtctcactctgtcacccagrctggagtggagcagcatgacctcggctcactgcaacctccgcctcctgggttcaaacagttctgtctcagcctcccaagtagctgggactccaggcacctgccaccatgcccagctaatttttgtatttttagtagagatagggtttcacattgttggtcaggctggtcttgaactcccg

SEQ ID NO: 933285 - DNA, 599 bp, Homo sapiens
gggatctggcttcttaccagaaacaatgaaggccaaaagatgagagaacatctcttaagttctataaaatatgtcaacccagaattacttttccatcaaaaatataattcaaaaattagggaaaaataaagtcattttcaggtaagtgtaactgagagaatttgtcaccctcagatctgtattataaaaaagaagtataacagctaaagataaatatatgagatgaaatatgggtctacagaaacagcactgataatgctaaatatgtgagtaaatataaaaatgaaaattctctcttaattcatttaaaagatatcactgtttaaagaaaaaaaaagtggccacgtgcagtgactcatgcctgtaatcccagcactttgggaggccgaggtgggtggatcacaaggtcaagaggttgagaccatcctggcyaacatggtgaaaccccgtctctaccaaaattacaaaaagtagctgggcgtggttgtgcgcgcctgtagtcccagctactcaggaggctgaggcaggagaatctcttgaacccgggaggtggaggttgcagcgtcactgcactccaacctggcggcacagtgagactc

SEQ ID NO: 933286 - DNA, 616 bp, Homo sapiens
ccaacattgtttatatttaatcagcattgcttaaattctcttatcatggaaaatgtttaaaacatgactattccaagtgaacaggcaatctacagagtgggagaaaattttcgcaatctatccatctgacaaaggataatatccagaatctgcarggaacttaaacaaatttacaagaaaaaaacaaacaaccccatcaaaaagtgagtgaaggatatgaacagacacttctcaaaaaaagacatttatgcggccaagaaacatatgaaaaaaagctcatcatcactggtcattagagaaatgcaaatcaaaaccacaaggagataccatctcatgccagttagaatggcaatcattaaaaagtcagaaaacaacagatgctggaaaggttgtggagaaataggaatgcttttacactgtttgtaggagtgtaaattagtttaaccattgtgaaagacaggatggtgattcctcaaggatctagaaccagaaataccatttgacccagccatcccattgctgggtatatacccaaaggatcacaaatcattctactatagagacacatgcacacatatgttttttcacagcactattcacagtagcaaagacttgg

SEQ ID NO: 933287 - DNA, 754 bp, Homo sapiens
cccatgaggccatcagtgcaggttgggggagagaaggcagggtggcaagagtggagaccatgggcatttgagccacttcctcgtgtaacttacttgtgccttcaggacctgcttgagcccaatcacatatataccactttcatttggtgatggaatgctgctgtgcatgacccactttatggctagatgggtccgaaagcatgcagttcattataggtagttcaggtcgcgtggtgacttgataacccatagtcaaatgttcattttctaccaaaccccagtaacagtccaaaagckgtctctcaaaaggagagtagttatctgcagaagatggcaggggcttgctccataattctagagccctccactgtgactaatcaatgggggcctaccaaaaactccaaatggcatccctatctgccactgacacctcaagcatcattggatctgctgggtcatacggcccaagtggcagagcggcttgcacagcagcctggacctgttgcagagccttcttctgttttggactccactcaaagctggtagcctttcgggttactagataaatgggtcagagtaacacaaccaaatgagaaatgtgttgcctccaaaatccagataggtccaccaggcattgtgccttttttttggttacaggaggggccaaatgcagcaacttattcttcactgcagaaggaatatctcgacaagccccacacgatttgacccctagaaattttactgaggtagaagg

SEQ ID NO: 933288 - DNA, 594 bp, Homo sapiens
ggctcatgcctataatcccagcactttgggaggccaaggcagggggattgcttgagcctaggagttcaagaccaacctgggcaagatattgagacccccatctctaaaaaaaaaaaaaaatttttttttttttaattagctgggcatagctamgcacctctgtagtcttagctatttggtagcctgaggtgggaggatcgcttgagcccacatgttcaaggttgcagtgagccatgattgcaccactgcactctagcctgggtgacagagcgagaccttatttcaaaaaaagaaaaaagaaagaaagagaaagaaagagagagagaaagagagaaagaaaaaagagagaagaaagacgaacagatatcccatctgacacatgtaattcatgtagcaagttccccagacacttatcaggtgccaagcactcttctgggtactaggggtgcagcagtaaacccattggattatatccctgccttcctagagtatacattccagtcatgggtgacaaacagacagtaaacaaataagcaaattaatctgataattccagtgaaatcttcatagaagaaataaagcaatggtgaggaa

SEQ ID NO: 933289 - DNA, 594 bp, Homo sapiens
ggctcatgcctataatcccagcactttgggaggccaaggcagggggattgcttgagcctaggagttcaagaccaacctgggcaagatattgagacccccatctctaaaaaaaaaaaaaaatttttttttttttaattagctgggcatagctacgcacctctgtagtcttagctatttggtagcctgaggtgggaggatcgcttgagcccacatgttcaaggttgcagtgagccatgattgcaccactgcactctagcctgggtgacagagcgagaccttatytcaaaaaaagaaaaaagaaagaaagagaaagaaagagagagagaaagagagaaagaaaaaagagagaagaaagacgaacagatatcccatctgacacatgtaattcatgtagcaagttccccagacacttatcaggtgccaagcactcttctgggtactaggggtgcagcagtaaacccattggattatatccctgccttcctagagtatacattccagtcatgggtgacaaacagacagtaaacaaataagcaaattaatctgataattccagtgaaatcttcatagaagaaataaagcaatggtgaggaa

SEQ ID NO: 933290 - DNA, 689 bp, Homo sapiens
agctaatttcttgggttttgactcttgtatctaacctctgacctctgaaatctccggtcaagaggtggattgatcgcttgagccgaggagttggagaccagcctggccaacatggcaaaacctcatctctacaaaaaatattttaaaaatatacccggatcgggcgcggtggctcacgcctgtaatcgcagcactttgggagttaaggcsggcagatcacatgaggtagggagttcgagaccagcctggccaacatggtgaaaccctgtctctactaaaaatacaaaaattagccgggtctggtggcgcatgccagtagtcccacatactcgggaggctgaggcgggagaatcgcttgaacctgggaggcagaggttgcaatgcactgcagcctaggcgacagagtgagactctgtctcaaaaataataataataataataataataataataataataataaaataaataaaaataaaaatttagccagtagtaggggcaagcacctgtagtcccagctactggggaggctgaaatgggaggatcacttgagtacaggaggcccaggctgcagtcagccatgaacatgccactgcactccagcttgggcaatagagcgagaccctgtctaaaaaaaaaaaaaaaaaattaaagtagaaacgggctgggcgcgctagctcacgcttgta

SEQ ID NO: 933291 - DNA, 752 bp, Homo sapiens
aggtgacagggccaagcagcaaacggaaccctgtgctagttcgtgtactcctctgttgcaggcatgcgtgccatttggccacaatctgtttctgggcattcccagattttggtttctggaaggtgtcctactttcgactaggataaaggctaaggcctcaggatcccgataagagcaatggtggctgagtgtctggagactggcggccacatatagagctagctaactatatattggtcacctaagaatgcacaggctggctgggcgtggcggcttaygcctgtaatcccaacattttgggaggccaaggtgggcggatcacctgaggtcaggagtttgagaccagcctggccaacatggcaaaaccctgtctctactaaaaatacaaaaattaggtgggcgtggtggcgggcacctgtaatcccagctaacctactatggggtactgggtatgtactagcatgggaacccctttggaacatcttccacttgctgtaaggcataacacgtagtgcagaattatagctccctgacactgtaacttcagtccccttccatagctggaaccagaatcctaaaggtacaagtttgtgtccttgcctttgccactggtcccagttggcccccttcttgactaagtggtacagtggcctaaggagttgagccaaatgggaaataaaaggacaccacggccttagaagaactaagaaggtttgcagccactttggtggtgtaggatgtgggtaggcctg

SEQ ID NO: 933292 - DNA, 591 bp, Homo sapiens
cagctgtttgtgacaatgaaaaatgtcacatgacaggccaagtgcagtggctcacgcctgtaataccagcactttgggaggccgaggtgggcggatcatgaggtcaggagatcgagaccatcctggctaacatggtgaaaccctgtctctactaaaaatacaaaaaattagccaggcgtggtggcgggcgcctgtagtcccagctactcaggaggctgaggcaggagaatggcgtgaacccgggaggcggcgtttgcagtgagccgagatcacgccactgcactccagcctgagtgatagagmgagactcagtctcaaaaaaaaaaaaaaaaaaaaaaaaagtcatatgacattaccaaatgtccctggaagaggtgggaaatcaccctcggttgagaatcattcattgtgttaaggatattaacaacaataacaaaagctacagctaacatcatactaaatgatgaaatactgaatactttccccaatactgaaaacagggaagggaaatccctttacaccacttctgttcaacactatagtgaagttcctagccagtgaaagaaggcaagaaaaagatataaaaagcat

SEQ ID NO: 933293 - DNA, 591 bp, Homo sapiens
cagctgtttgtgacaatgaaaaatgtcacatgacaggccaagtgcagtggctcacgcctgtaataccagcactttgggaggccgaggtgggcggatcatgaggtcaggagatcgagaccatcctggctaacatggtgaaaccctgtctctactaaaaatacaaaaaattagccaggcgtggtggcgggcgcctgtagtcccagctactcaggaggctgaggcaggagaatggcgtgaacccgggaggcggcgtttgcagtgagccgagatcacgccactgcactccagcctgagtgatagagcgagactcagtctcaaaaaaaaaaaaaaaaaaaaaaaaagtcatatgacattaccaaatgtccctggaagaggtgggaaatcaccctcggttgagaatcattcattgtgttaaggatattaacaacaatracaaaagctacagctaacatcatactaaatgatgaaatactgaatactttccccaatactgaaaacagggaagggaaatccctttacaccacttctgttcaacactatagtgaagttcctagccagtgaaagaaggcaagaaaaagatataaaaagcat

SEQ ID NO: 933294 - DNA, 677 bp, Homo sapiens
ccacacaattacatgtaaactgaataacctgctcctaaatgaattttgggaaagtaataaaattaaggcagaaagcaaggagttctttgagactaatgagaccaaagacaacataacagaatctctgggacacagctaaggcagtgttaatggggaaatttatagtagtaaatgtcsacatcaaaaagttagaaagatttcaagttcacaacctaacattacaactaaaagaactgcagaaccaagaacaaaaaaatttcgaatctagcagaagacaagaaataaccaatattatagctgagctacaggagtttgagacacacaaaaaacatacaaaagatcaacgaatccaggagctggttctttgaaaaaattaataaaatagactgctaacttgactaatacagaagaaaagagagaagattaaaataaatccaatcagaatcaataagggggatatcaccactgacacaacagaaatataacaaccatcagagaatataatgaacacctctatgtgcgtaaactagaaaatccagaagaaatggataaattcctggacacatattgttccaagactgaaccaagaagcagttgaattcctgaacagaccactagtgagctctgaaattgaggcagtaataaacagccaatcaaacaaaaaaaaagcacagaac

SEQ ID NO: 933295 - DNA, 591 bp, Homo sapiens
ttcagagatgacacaaacaactggaaaaacatttcatgctcatggatatgaagaatcagtataattaaaatcatcatactgctcaaagcaattcacagaatcaatgctattcctatccagctatcaatgacattcttcactgaaaaaaaaaaactatttcaaaattcatatggaacaaaaaaaagagctgaaatagccagggcaattctagcaaaactggagacatcatgttacctgatatctaactatactatagggctacaataaccaaagcagcatggtactgatataaaaagagacgcagacgaatgaaatagaatagagaacccaggaataagactgcacacctgcaactttctaatcttcaacaaacctgacaaagcaatggggtaaatgatttcctattcaataaatggkgcttggataactggctaaccatatgcagaagactgaactggacccctccttacaccatatacaaaaatcaactcaagattaattaaagatgtaaatgtaaaaccccatactataaaaaccctggaagacaacctaggcaataccattcaggtcataggcatgggcaaagatttt

SEQ ID NO: 933296 - DNA, 551 bp, Homo sapiens
ttctggggccattcttcaaaacgagctttaacccacctcacagaatggaagcaagacagggggatgaacttcccacagaggataaaaaactgtagggaggggcttcctgaagctaggtgtcaggggatccttatccagagaccgggctcaacagggagggaagggccctccacccgcaagcagagaakgaaagtcaagagaactcgctcatagaaaccaagggattgggcaaattaacacccccagccccagttttctcatttgtaaaatggaaattggggaataaccatgaattaaccagagagaggtcaatcggctcagaggtaaggagaagcgatgagatggcccaggaggggccaaaagaggcacccagaaggggtctgaggaccaggaacccctctcccgccttcagactttgctttcgccaaggttggggagggaagaacccagcctctgcagctccaagtggacgtgcgcacacagtcccagcccgcctcctgattggctgggagatgtcgccaccaatacatgtacgctggggccgtgattgg

SEQ ID NO: 933297 - DNA, 773 bp, Homo sapiens
cagctcaataacccttaggggactgagagttgtggaaggaggccagattcaacatcaaggatggcgagagaggtggcggctaggctggctggcagcaggaccatgaagaacttcatggtggagctgtagcaggatcagtttttcctgggggaggctgcttagagttgctgaagaggcagcctggcaggggctttatttattttggggtagggatggactctggggaaactggacctgggaacatactaggtttcccctcctgagtttcccattctgaataggtttgtttttgggaactggagtttctgggaaaccggttaactggaaagtaaggcccccagccttccccctggctcggaccatgctgaaggtgtgtcggctccagcttttacccccagaagtccatggaataaggacatgggtgtgagtttccctctttcatggtactcattactgtgtaattttactttcattagtatgatcatttaattaacatctatctcctccagaagaatgaaacttccaaaatggctgggattatatctgttttgcttgccattgtttttccagtacctagcaggtatstggcacatagtagagttctaggaaatattagtggagtgaatgaatcaaggaacggtcaggctgtcctctagggcagcggtccccatcctttttagcaccagggaccagtttcatggaagacaatttttccacagccagggggaggatggggatagtttcaggatgaaactgtttcacctcagatcatc

SEQ ID NO: 933298 - DNA, 646 bp, Homo sapiens
cagcattaactcagcacggcagggtaagtcagattataaaccaataatagagtagtatcctcataccaccctcaacgtcttcctgcttcaccaaaaaaccaataaaagactgaatgtggccctttatcagctagacctcaaaatcttctttgctttctatgcgtatttccaataaaaaagtacaaggrttgttaaaagtccttatttatttatttatttatttatttatttatttatttatttttagaaccagggtctcactctgttgcccaggctggagttcagtggtgcagtcatagctcagtgcagcctccaactcctgagctcaagtgatcctcccacttcagcctccagagaagttgggactacaggtgcatgctaccacgccaggctaatgcttttggttttttaagagttttgttgagtcagggtcttgctatgttgcccaggctggtctcaaattcctagcttcaagcagtcctcctccctcagcctcccaaagggttggtattacaggcatgaaccactgtgcctggccttaaagtccttttgaaacacaagacaagaaacatttggccgcgcacagtggctcatgcctgtaatcccagcactttgggaggccaaggcaggtagatcatgaggtcag

SEQ ID NO: 933299 - DNA, 646 bp, Homo sapiens
cagcattaactcagcacggcagggtaagtcagattataaaccaataatagagtagtatcctcataccaccctcaacgtcttcctgcttcaccaaaaaaccaataaaagactgaatgtggccctttatcagctagacctcaaaatcttctttgctttctatgcgtatttccaataaaaaagtacaagggttgttaaaagtccttatttatttatttatttatttatttatttatttatttatttttagaaccagggtctcactctgttgcccaggctggagttcagtggtgcagtcatagctcagtgcagcctccaactcctgagctcaagtgatcctcccacttcagcctccagagaagttgggactacaggtgcatgctaccaygccaggctaatgcttttggttttttaagagttttgttgagtcagggtcttgctatgttgcccaggctggtctcaaattcctagcttcaagcagtcctcctccctcagcctcccaaagggttggtattacaggcatgaaccactgtgcctggccttaaagtccttttgaaacacaagacaagaaacatttggccgcgcacagtggctcatgcctgtaatcccagcactttgggaggccaaggcaggtagatcatgaggtcag

SEQ ID NO: 933300 - DNA, 732 bp, Homo sapiens
agctgacagacacatgaaaaaatgctcatcattactggtcatcacagaaatgcaaatcaaaaccaccagataccatctcacaccagttagaatggcaatcattaaaaagtcaggaaacaacaggtgctggagaggatgtggagaaataggaatgcttttccactgttggtgggagtgtaaactagttcaaccattatggaagacagtgtggtgattcctcaaggatctagaactagaaataccatttgacccagtgatcccattactgggtatatacccaacggattataaatcatgccactataaagacacatgcacacgtatgtttattgtggcactattcacaatagcaaagacttggaaccaacccaaatgtccatcaatgatagactggattaagaaaatgtggcacatatacactatggaatactatgcagccataaaaaaggatgagttcatgtcctttgcaggggcatagatgaagctggaaaccatcattctgatcaarctatcacaaggatagaaaaccaaacaccgcatgttctcattcataggtgagaactgaacaatgagaacacttggacacagggcggggaacatcacacaccggggcctgtcatggagtgggggcctgggggagggatagcattaggagaaatacctaatgtaaatgacaagttaatgggtgcagcaaaccaacatgatacatgtatacctgtgtaacaaacctgc

SEQ ID NO: 933301 - DNA, 585 bp, Homo sapiens
aaaaagaaaagaccataactaggtaacacttccacctgacatgatgcaactaacatgatacagctatcctgcatgcaaccaaaatcgcaataactgtgattttgggggttttagacttcagggattttgatctttagaaattttgatctttaaggatttcaacrttcgagattatggtgtttgggattgtgtttttcagggttatgatcagcactttcacttagcataacattttcaaggcttatccatgttgtagcatgtatgcatacttcatgaccctttatggtcaaataatattctgccatatggatagatcacattttgtttatccattcatcagttgatggatatttgggttgttttcacattttttgctattgttatgaacattcgtgtacatgtgttttatgcagacatatgtcttcaagtctcttgggtatacctaggagtcacagtgctttcttatcacttagaatttttgtttgtgttatttaaaaagcacttttagagttatttagacatcaattttaatcacatatcactctgcacatacttttttttgaaaaaagaaaagacaagtaaaat

SEQ ID NO: 933302 - DNA, 741 bp, Homo sapiens
agccacggcgcccagcctaatttttgtatttttagtagagacggggtttcacatttgccaggctggtctcgagctcctggcctcaggtgatccacccacctcggccttccaaagtgctggtgagaggtgatagcgtgccggcagtcctcgcccactctcggcgcctcctctgcctgggctcctactttggcggcacttgaggagtccttcagcccaccgctgcactatgggagcccctttctgggctggccaaggccacagccggctccctcagcttgcagggaggtgtggagggagaggcgcgagcgggaaccsgggctgcgtgcggcgcttgcgggccagctagagttccaggtgggcgtgggcttggcgggccccgcactcggagcagccggccggccctgccggccccgggcagtgagggacttggcacccgggccagcggctgcggagggtgtactgggtcccgcagcagtgccggcccaccggcgctgtgctcgatttctcgccgggccttagctgccttcccgcggggcaggcctcgggactgcagcccgccatgcctgagccttcccccgcctccgtgggctcctgtgcagcccgagcctccccgacgagcgccgccccctgctccacagcgcccagtcccatcgaccacccaagggctgaggagtgcgagcgcatggcgcaggactggcaggcagctccacctgcagccctggtgcgggatccaccgggtga

SEQ ID NO: 933303 - DNA, 741 bp, Homo sapiens
agccacggcgcccagcctaatttttgtatttttagtagagacggggtttcacatttgccaggctggtctcgagctcctggcctcaggtgatccacccacctcggccttccaaagtgctggtgagaggtgatagcgtgccggcagtcctcgcccactctcggcgcctcctctgcctgggctcctactttggcggcacttgaggagtccttcagcccaccgctgcactatgggagcccctttctgggctggccaaggccacagccggctccctcagcttgcagggaggtgtggagggagaggcgcgagcgggaaccggggctgcgtgcggcgcttgcgggccagctagagttccaggtgggygtgggcttggcgggccccgcactcggagcagccggccggccctgccggccccgggcagtgagggacttggcacccgggccagcggctgcggagggtgtactgggtcccgcagcagtgccggcccaccggcgctgtgctcgatttctcgccgggccttagctgccttcccgcggggcaggcctcgggactgcagcccgccatgcctgagccttcccccgcctccgtgggctcctgtgcagcccgagcctccccgacgagcgccgccccctgctccacagcgcccagtcccatcgaccacccaagggctgaggagtgcgagcgcatggcgcaggactggcaggcagctccacctgcagccctggtgcgggatccaccgggtga

SEQ ID NO: 933304 - DNA, 639 bp, Homo sapiens
ccccaagttcacgggtcatactttactttccagagctcaatagtagcatttagatgatgtcagtccttagtcagactcaatgcccctttttataatagaaaaattttatagcaccctctttactctctggaaatgattttcacagataatataatctatatatacatataacttcaaaaaatcagtattacgtcctaacagtattataatagagaataaagtgaaaacacttacagtaagatagtacctrtatagtatttcaatatgtcagtgttgcataggactctaccataaaacataatgataacgccaaataattacttctatatataaaatctctgagagccacaactacaaacacaaacttgtacagatgtgttgtgtcacctatcatgcgcagggctgctatccatgacctgattttctgaaacagcacacaacttttattaaagctcttaacaaaacgaagattaatccttgatcaattgacctagtagttgtatccctttacaactcaatgtctacttaaaccatgcagaaatttttaagagggtttatatgtacaagggagttagagttaggctcagacgattatgatgaatttgttttttacagatgtgcatgtttgggaggatattt

SEQ ID NO: 933305 - DNA, 693 bp, Homo sapiens
ggttctcccagcatggagtttgagatctgagaacggacagattgcctcctcaagtgggtccctgacccccgagtagcctatctgggaggcacccccgagtaggggcagactgacacctcacacggccgggtacccctctgggacgaaatctccagaggaacgatcagacagcaacatttgctgttcagcaatattcgctgttctgcagcctccgctgttggtacccaggcaaacagggtctggagtggacctccagcaaactccaacagacctgcaggtgagggtcctgactgtaagaaggaaaactaacaaacagaaaggacatccacaccaaaaccccatctgtacgtcaccatcatcaaagaccaaaggtagataaaaccacaaagatggggmaaaaatagaacagaaaaactgaaaattctaaaaatcagagcacctctcctcctccaaaggaatgcagctcctcaccagcaacataacaaagctggacggagaatgactttgacaagttgagagaagaaggcttcagacggtcaaatttctccgagctaaaggaggaagttcgaacccatcgcaaagaagttaaaaaccttgaaaaaagattagacgaatggctaactagaataaccaatgcagggaagtccttaaaggacctgatggagctgaaaaacatggcatgagaactacgtg

SEQ ID NO: 933306 - DNA, 657 bp, Homo sapiens
agtggtttgcaaacaaagtagccatttttacaaccattaaaacagacttcaaaccagcaacagtaaaataaaggacattatataatgataaagggttcaatacaataagaaaatttaactatcctaaatatatgtgtatccaacatcagagaacccagattcataaaacaagtactattagataaagaaaatagattgacagcaattcaagaatggtgggggagttcagcactccactgaaaacattaggcrtgtcatcaaggcagaaagtcaataaaaaaactgtgaacttaaactgggctctacaccgaatggaactaatagacatttgcagaacattctacccaacaaccacagaagatacattttccttatctgtgcacaaaacattctcaaaaattgaccatatacttattcataaagcaaacttcgacaaattcaaaaaatgaaatcatatcaagtatattttcagaccacaatgtaataaaatcagaaatcaataacaaaagcaactctcaaaactatacaagtacatggaaatgaaacaacttgctcctgaatgactttcaggtaaacaatgaaattaagccaaaaataaaaaaaaattcaaacaaagaaaaatagagatacaatataccaaaacctctagtgtacagc

SEQ ID NO: 933307 - DNA, 579 bp, Homo sapiens
ataattgggctttttttactttttggctacttgaataaaactactataaacattcacatacagatttttgtgtggacataggttatcatttctcttgggcatttatcttaggaatggaatttctttgtcatatggtaagtctatgtttaacattttgaaaaaactaccaatctgtttcccaaaatgactgtaccattccacaatcccaccagtgatgtatgagtgttctaacatttctacctcctcacaacacttgttattgtccttattttagccatcctaggagatgtgcagtagtatctcattattgttgtgacctgcttttctctaattactaatattgctctcaggtggttactggacatttgtataccttctctacagaaacatctattgaaatattgtgcctatttttaaaarttacatatatgtgtatatacttttattacattttaagttctggggtacatgtacagaatgtgcagttttgttacataggtatacacatgccatggtggtttgctgcatccatgaacctgtcacctaaatgaggcatttctcctaatgttattcctcccc

SEQ ID NO: 933308 - DNA, 602 bp, Homo sapiens
agaatactgatatacagaaaacaaaaattaggtgtggaaacaactggattggttatggctcagcatgtgccatatttaaaaatagcttaaggccgggcgcggtggctcatgcctgtaatcccagcactttgggaggcccaggcgggcagatcacgaggtcaggagatcgacaccatcctggctaacgcattgaaaccccgtccctactaaaaatgcaaaaaaattagccagatgtggtggcrggcacctgtggtcccagctactcaggaggctgaggcaggagaatggtgtgaacctgggatgcagagcttgcagtgagccaagatcacaccactgcattccagcctgggtgacagagtgagactccgtctccaaaaagaaaaaaaaaaaaaatagcttaaacagttggccactcataattgggtgaaacttggctgctgtgattggctgagactcagctacttgctacaagagtaggttacagtctgtttacacatcaagttagtttacagttcactgtgcatggagaaacttttagtccagacttaaactacctatggaggcaggtttaggacaaacttaattcaattaaacatgtcctt

SEQ ID NO: 933309 - DNA, 617 bp, Homo sapiens
tgcaaacacaagagtggttgttcatcctgctaaccatcctcttcgagcattctatcaggaagggaggccactgggaaccatggagtctgaatatgcatggagaagtggacctgcatggtgcaaggggtggactttggacgccatgtargtgtgtttctcagatcttccttcaagcaagaaattgccctgaagggttcacttgctgagatgccttagggatctgctgcagcattcaagtcagagacacattcttcctgggaagttgatgaccaagcacagtggaagttttaggacctggccacttctttccagttggagacttttcttacaggtagtctctgccctgagctgtccactaaaccggcctagactttctctagctgtacagtcctctgaggctcttacgcattcctcctttccctctcctttcataggtggcaaatcatcacaagcatgaaggttttccctcccttttcctacatcttcttccatttatctctcttccctttatcttttaccctctgtacatttcttgtacttctaattttatctcgacatctgcttcccagatgaccaaactaactcatatagccacttgattggtgacaaagatacaa

SEQ ID NO: 933310 - DNA, 768 bp, Homo sapiens
ccagaaatgactgagatgttgaaactatcagtcagcaactttaaaagaactataacttatgtgttaaatggtttagtgtaaaaggtggacaacatgtattaataaatgggaaatttcatcagagatgaaatcgctaaaaaagattcaaatagaaaatccagtgtatacataatggagaattctttccaggcttatcagcagactggacacaatagagaaaagaatcagtgaacttgaagataggctgatagaaattatccaaactcaaccacaaagaaaaatagtaaggaaaaaagaacagattatcccaaagatgtggggccatcaaatggtcttgcatacatatacttggagtaccagacaaaatatagaaaggggaggacaggacagaaagagtatctgamgaggtaagcttcaaaattaatgaaagaaaacaaaccatagatccaagaagttcagagaatctaagcagtataaataccaagccaagcacatcacagtcaaactgctaaaaccatacataaagggaaaatcttgaaggtaaccagagaaaaaaagaaacatttccagcagaggcacaaagataggaattagcacaattttttttatcagaaatcatgtaagcaatagacaatggaataacatcatgaaagaattgaagggaaaaaatctgtcaagccagaattctgtttctagtgaaaatacctttctaaaatgagggtgaaatgaattttttttttcagacaaacaaaatctgagagtaattat

SEQ ID NO: 933311 - DNA, 748 bp, Homo sapiens
gtatgagaaaatggccttatagaacacccagaagcaatgaaactggaacaattaggtggaggaataaatggagaaaaaaaaagtggatggagagggagagtggccttagagatgagtcagccgaggagtcagcacattctcacaggagaagtgacttggccacggccctgtctcctcagagtgtgttccaacaggaatgtggtgacaaatatgtacagagtaaatgagatgaggaaaaaatgaagaagttcaaagtgaggagaaattaattcaaaagaaagaagaaagaggggagccttggaattttacctacttctactcattagtgtttgacttcactaagggtaagagaaggctgacagggaagaaatgagaggcaagagacagcccaaatcttggtgggagagtcggctgtgccctgaaccacaggacaatttgttcttaggacaagaaccaaagaaaagtcagtcaaggattacgatgtgggaaccctgatgataaacacactcaggataaaagaatgagggattccccccgtcaatattgtgggtacaaaaattgaaaacagggtgacataattcttagaaatggaacaatttgagattcagytcaatattaattaaactcctgctatatgccaggcactgatgatacagtctatgctcccgcggagctatactctaaaggagaaacactttctcaacaggtgatcaaaagagaagagagcaggtgagactgaggagatgct

SEQ ID NO: 933312 - DNA, 605 bp, Homo sapiens
ttgtccattacataggattcgagaacactgctacgaggttctgaactattttccatcacgtaggattccagaacactcctgctgtcgtctgaatgtttgtccctcacttatgattatagaacactgctgttggtttcttagtgtttgtccctcacgaacgattccaacactgctacttgggtatraatgtttgtctgtcacataggatttcagaactctcctgctgtggtctgaatatttgtccctgtcttaggattccagaactctgctgctgtggtctgaatgtttgtccctcacagaggattccagaacactgctgctgtggtctgaaagcttttccctcacataagattctgaacagtgttacgagggtctgaatgtttctcccacactcaggattccagaacacactagctgtggtctgaatgactgtccctcatataggattccagaacactgcatctgggttctgagtgtttctccctcacaaaggattccagaccactgctacggggttctgaatatctgtccttcacataagattccagaacacggcttcatgtgtctcaattttggtccctcacataagatttcaaaacactgct

SEQ ID NO: 933313 - DNA, 574 bp, Homo sapiens
catcaggtcctggactttttttgttggtaggctattaattactgcctcaatttcagaacttgttattggtctatttaggattcaacttcttcctggtttagacttcggagggtgtatgtgtccaggaatttatccatttcttctagattttctagtttatttgcatagaggtgtttataatattctctgacggtagtttgtatttctgtgaaattggtggtgatagcccctttatcatttttttattgcatctatttgattcttctctcttttctgctttattagtcttgctggcattctatctattttgttgatcttttcaaaaaaccaactcctgtattcattgattttttgaaggattttttgtgtctctatctccttcagttctgctctgatctyagttatttcttgtcttctgctagcttttgaatttgtttgttcttgcttctctgcttcttttaattgtgatgttagggtgtcgattttagatctttcctgctttctcttgtgggtatttagtgctataaatttccctctacacactgctttaaatgtgtcccagagattctggtac

SEQ ID NO: 933314 - DNA, 615 bp, Homo sapiens
tgtctattttagacatatttgagaaaaaaaaataaccttgcctgttactgattttatattaaaacaaacatggatatggcatgaaattaaatgaaattttgaataaattgttaaaataaaacatgacatgttaaagaaagagactgcaagatggccgaataggaacagctccagtctacagctcccagcgtgagcgrcgcagaagatgggtgatttctgcatttccaacttaggtactgggttcatctcactggggcttgtcagacagtaggtgcaggacactggatgcagcgcaccaagcgtgagccgaagcagggcgaggcatcgcctaatccgggaagtgcaaggggtcagataattccctttcatagccaagcaaagctgtgacagactgcacctggaaaatcaggtcactcccacactaatactgcgcttttccaatggtcttagcaaacagcacaccaggagattatatcccgtgcctggctcggagggtcccacgcccacggagccttgctcattgctagcatagcagtctgagatcaaactgcaaggcagcagccaggctcggggaggggcgcccgccattgctgaggcttgagtaggtaaacaaag

SEQ ID NO: 933315 - DNA, 631 bp, Homo sapiens
ggtcactcccacactaatactgcgcttttccaatggtcttagcaaacagcacaccaggagattatatcccgtgcctggctcggagggtcccacgcccacggagccttgctcattgctagcatagcagtctgagatcaaactgcaaggcagcagccaggctcggggaggggcgcccgccattgctgaggcttgagtaggtaaacaaagcgaccaggaagcttgaactgggtggagcccactgcagctcaaggaggctggcctgctctgtagactccacctctgggagcagggcgtagccgaacaaaaggcagcagaaacctctgcagacttaaatgtccctgtctgacagccttgaagagagtagtggttcttccagcacagagtttgagatctgagaatggacagactgcatcctcaagtgggtccctgaccmccaggtagcctatctgggaggcacccccccagtaggggcagactgacatctcacatggccgggtacccctctgagacaaaacctccagaggaatgatcagacagcaacatttgctgttcagcaatattcactgttctgcagcctccactgctgatatccaggcaaacagggtctggagtagaactcccgcaaattcca

SEQ ID NO: 933316 - DNA, 631 bp, Homo sapiens
ggtcactcccacactaatactgcgcttttccaatggtcttagcaaacagcacaccaggagattatatcccgtgcctggctcggagggtcccacgcccacggagccttgctcattgctagcatagcagtctgagatcaaactgcaaggcagcagccaggctcggggaggggcgcccgccattgctgaggcttgagtaggtaaacaaagcgaccaggaagcttgaactgggtggagcccactgcagctcaaggaggctggcctgctctgtagactccacctctgggagcagggcgtagccgaacaaaaggcagcagaaacctctgcagacttaaatgtccctgtctgacagccttgaagagagtagtggttcttccagcacagagtttgagatctgagaatggacagactgcatcctcaagtgggtccctgacccccaggtagcctatctgggaggcacccccccagtaggggcagactgacayctcacatggccgggtacccctctgagacaaaacctccagaggaatgatcagacagcaacatttgctgttcagcaatattcactgttctgcagcctccactgctgatatccaggcaaacagggtctggagtagaactcccgcaaattcca

SEQ ID NO: 933317 - DNA, 663 bp, Homo sapiens
tgactttacagtccgagttttacacaactgttttacaaactgggaagagggtcttttgtgacaaatcctttgtcaggcagtagaatggggggagagaaagccagttccaagacttggtgcattttaatgaatatgcagatagacacacaaccctttgccttggtaaagggggtatgtaacagagatgggcggctggctggaaggagagagagcaggctcacttcttgctcttgggacaatttagtatgaggagcaactgctctttcaacactagtttctgcttcgaacagacctcgactccatgaaagccttcattcctcttgtatgaagggcagttagttaagagctttatgtcctagggtcagtactctgtaggcaggtgttatgcaattgggaaaacaagaaaagtatgcctttgggaggcaaaagcaagwccctttatgatttgaagctcgtactcacatgtgagaagacatgagacaaaataaaaagagcacagagttttgaatcagacagacgtggctccaaagttaactgactttgacataactcactattaacaatatgttacattaaaatttctatttcttaaaacagaaatctttgatatgacaacatctctattaaccagaagtcgattaatcaaaaattttaagtaattaa

SEQ ID NO: 933318 - DNA, 581 bp, Homo sapiens
agttcatgaaaagccttctaatttaatttacttagaataactttacttattttacattactcttgtggaatatattactgttctactctttgtgtagaaatacaggacaaacttactgaatgttttcttaaacatttattaatattccagatatcaccttttgtcaaaactcaagagttgtgaatagaccttaagatactgatactttctttttttcttttttctttttttttttttttttgagtgggagtctcattctgtcacccaggctggagtgcaatggcacaatcttggctcactgcaacctccayctcctgggtttgagcaattctccctgcttcagcctcccgaatagctgggattacaggctcctgccaccacacccggctaatttttgtatttttagtaaagatggggtttcaccatgttggccaggctggtctcatactcctgacttcaggtgatccaccttcctcagcctcccaaagtgctgggattacaggcatgagccaccgcgcccagccaccatagcgatactttctgattgaactcctctctaccctgaatgcaagaaacgctca

SEQ ID NO: 933319 - DNA, 615 bp, Homo sapiens
actgagagaaaatgagtctgctaatttccttattttatttttattttttttagacagagtctcgctctggcgccaagctgtagtgcagtggtgctctctcagctcactgcaacctccacctcctgggttcaagtgattctcctgcctcagcctcccgagtagctgggactacaggtgcatgccaccacgcccagctaatttttgtatttttagtagagacagggtttcaccatgttggccaggatggtctcaagcttttgacctcttgatttgcccacctcggcctcccaaagtgctggggttacagacgtgagccactgagcccagtctgctaatctcctttctaaaagccaacaattcatccttaaatatgagaaagatacagtcatcccttggtatccatggggcattcggtctggtacctccttcagatatcaaaatccacagatgctcaagttcatggtataaaatggyatagtatttgcatataatctatgcacatcctcttgtaaattttatatcatctctggaatacttataatacccaatacactgtaaatgctatgcaaatagttgtgctgtattggttttttttttttttttttttttttttga

SEQ ID NO: 933320 - DNA, 620 bp, Homo sapiens
agttcctggagttaggggattacctttcaagtattccattatcactgaccaccacataccctgctattcaaagtcgtttttctacaaaggaacttccatcagtatacaagttgaggttgggatcagtgaagggatcctctaaaacctcccctctagtggtgtatgtttgagcaatcacttgttgacagttatgttctatcttttctttattgtctggaagaaatgtagctgggttaagagttgcacaagtgcrcattcacagcactagcacttcaaataatagagcctgatatttaagtaaaaagttgtctgacagccacaagtctcctttagcagtgagtatgctgttcacatcatgagatgtccacacagtaagatcccttccttgtattattttaactgctaaagatacctagattgttactgctgccactatccataaacaatgaggacaaccctttgccactgcatcaatttccttactcaggtatgccatgggttccaagctcatctctcagacctatgtaaggactcctggagctattcttgtttttttctgtgacatataaagaaaagtcttgccctgttgggaagcttaacactggggcttaagttagggc

SEQ ID NO: 933321 - DNA, 397 bp, Homo sapiens
tatctgtgaaatggctttgtgaggtatgcattcatctcacagaattaaaactttcttttgattcagcatgttttaaacactcttttggtagattctgtgaagagacatttaagagcccattgagacctattggaaaaaaactgaatatatccaggtaaactagaaagaagctacctgtgaaactgctttrtgatatgttgatacatctcacagagttaaacctttcttttgattctgcagtttggaaacattgtttttgtagaatctgtgaagggacatctaggagctcattcaggcataaggagaaaaagcaaatatccctagataaaaaccagaaagaagctctctgtgaaactgctttgtgatatgtgggttcatctcaaagaattaaactttt

SEQ ID NO: 933322 - DNA, 623 bp, Homo sapiens
tggttggaaaaactctttatggagaatccatgaggggacatttgggagcccactgtggcctttggtgaaaaacagaatgtcctcaggtaaaaagtacaaataagctatctgtgaaactgccatgtcatgtgtagaatcatctcacacagttaagccactgttttgattaagcaggttaaaaacactctggacaatttgtgaaagacatttgggatccatttgcagcctatgtggaaaaacagaatagccacaggtagaaactagaaagatgcttgytgtgaaactgctttgtgatgtgtggattcatctcacagagttccctttgattcaacaggttggaaacactctttctggagaatacacgaggggacatttgggagcccattgaggcctatggagaaaaacaaaatatccccagataaaaattagagagaagctatctgtgaaactgctttgtgatgtgtggattcatgtcacagagtgagacctttcttttgattctgcaggttggaaaccctctttttggaggatctgcaaagggccatttgcgatcccattgaagcctaaggggaaaaactgaatatcccaagataaaaactataaaaaagctttctgtgagactg

SEQ ID NO: 933323 - DNA, 609 bp, Homo sapiens
ttgtccttttgtgatcggcttattttgctcagcacagtgtcctcagggtccatccatgttgtggcatgtgtctgaatttcctttcaaggctgaataacactccattgtgtggatggactccattttatcaatgcacgcatctgtggatggacacttggtttgcctccmccttttcactattgtgagtaatgctgccgtgaacatgggggtacacatgcctctcccttcttttgttcttttgggtatatacccagaagtggaattgctggatcatatggtcattctgtgtttaatgttttgaggaactgaggaacgttcttttttgggatggggagacagtgtggctgtgtttgctcatgggtgggaggactgagtagagacagagtggaggcaggggaggggataacccctggagcgggccctggaggagccagtggtgctgggattcaggaaaaggagggagagcgatgatggcagccctgaggcagaggatggtgacagtggaagaggcagggaggccccttgtcatcctgggcccagccgaccctgtggtgagaggcaggacgggaaccacaggtgaattgagtatgattgaggaacaggaacaca

SEQ ID NO: 933324 - DNA, 786 bp, Homo sapiens
gttgatggctttgttttctatcttactggaaaactgaggccattagcagagaccttctgaaatccttctactcatctaaccagtaagatgtgaacccacactccttgctccaggaggtccccgtgcttctatctaagcctaacacctgtgcacgtgaagtagatcccatcacctatcaccacttaaagatatttccccagaaattatcctcctcctctccaatttcaccactattacacttctttactgaatccttcccaagaggaaacaggctttatttctcttgttttaaaaakacaactctgaattgacctcattttttcctcaccagttctctgattttctttacaaatttctcaaaagaatgatcttctccaatcctcatcctatctcctcttgaagtctactgcaatcagacttttattcataccacttcagcaaaccgctcttgaaaatatcaataataaccttggtattactaaatgtaatgatcagttctcagtcttactcaacaattggcagcatttggcccaagtgatcactgcatcctccttgatacactttcttccctttacattttctgtactcttctgttttccttctacctcattggctgttctttctcagtctctttagctgtttcttccctgacttctttactacaggtgctccagggcgtggttcttatacctcttcttccttccacttatattgctctctctttgggtgacacaatccagcctcatatccttaaataccagttatatgttgataactctcaatttt

SEQ ID NO: 933325 - DNA, 786 bp, Homo sapiens
gttgatggctttgttttctatcttactggaaaactgaggccattagcagagaccttctgaaatccttctactcatctaaccagtaagatgtgaacccacactccttgctccaggaggtccccgtgcttctatctaagcctaacacctgtgcacgtgaagtagatcccatcacctatcaccacttaaagatatttccccagaaattatcctcctcctctccaatttcaccactattacacttctttactgaatccttcccaagaggaaacaggctttatttctcttgttttaaaaagacaactctgaattgacctcattttttcctcaccagttctctgattttctttacaaatttctcaaaagaatgatcttctccaatcctcatcctatctcytcttgaagtctactgcaatcagacttttattcataccacttcagcaaaccgctcttgaaaatatcaataataaccttggtattactaaatgtaatgatcagttctcagtcttactcaacaattggcagcatttggcccaagtgatcactgcatcctccttgatacactttcttccctttacattttctgtactcttctgttttccttctacctcattggctgttctttctcagtctctttagctgtttcttccctgacttctttactacaggtgctccagggcgtggttcttatacctcttcttccttccacttatattgctctctctttgggtgacacaatccagcctcatatccttaaataccagttatatgttgataactctcaatttt

SEQ ID NO: 933326 - DNA, 786 bp, Homo sapiens
gttgatggctttgttttctatcttactggaaaactgaggccattagcagagaccttctgaaatccttctactcatctaaccagtaagatgtgaacccacactccttgctccaggaggtccccgtgcttctatctaagcctaacacctgtgcacgtgaagtagatcccatcacctatcaccacttaaagatatttccccagaaattatcctcctcctctccaatttcaccactattacacttctttactgaatccttcccaagaggaaacaggctttatttctcttgttttaaaaagacaactctgaattgacctcattttttcctcaccagttctctgattttctttacaaatttctcaaaagaatgatcttctccaatcctcatcctatctcctcttgaagtctactgcaatcagacttttattcataccacttcagcaaaccgctcttgaaaatatcaataataaccttggtattactaaaygtaatgatcagttctcagtcttactcaacaattggcagcatttggcccaagtgatcactgcatcctccttgatacactttcttccctttacattttctgtactcttctgttttccttctacctcattggctgttctttctcagtctctttagctgtttcttccctgacttctttactacaggtgctccagggcgtggttcttatacctcttcttccttccacttatattgctctctctttgggtgacacaatccagcctcatatccttaaataccagttatatgttgataactctcaatttt

SEQ ID NO: 933327 - DNA, 725 bp, Homo sapiens
agtcagtctgccattcaccccctcaaacatcgccctcactccaccaccataatgtccaggcagggtgctgacacttcaccgttcacctcccaccctgccccgggctgtcctccaaatgtgtgtcagacacagtgctgggggacttatacttctgtcatagtctctgtcttcagtagcatatggtaagagccaggatccgctattaaacatgctgtgagtgggtagagacaaagtcttgtcttgtagggtgagcaggcagtgaggtcagaaagggcatcacaggtagaggaaaaagcatgggcagaggtctggaacccagtccctcttcataccacccgctgaccctttcccctcccccccacatgagatttctcyccctctcttctctcttctctccctcaacaattccagggttgcccacctgaaaacaagctccctggaccaccttcccttgcagctctctgttccttctctcttttttttttttttttttttttgagacggaatctcactctgtcacccaggcaggagtgcaatggtgtgatctcagctcactgcagcctctgcctcccaggttcaagtgattctcctacctcagcctcacgagtagctgggattacaggtgcccaccaccacacccagctaatttttgtatttttactagagatggtgtttcaccacattggccaggctggtctcgaactcctgacctcaggtgatccacc

SEQ ID NO: 933328 - DNA, 725 bp, Homo sapiens
agtcagtctgccattcaccccctcaaacatcgccctcactccaccaccataatgtccaggcagggtgctgacacttcaccgttcacctcccaccctgccccgggctgtcctccaaatgtgtgtcagacacagtgctgggggacttatacttctgtcatagtctctgtcttcagtagcatatggtaagagccaggatccgctattaaacatgctgtgagtgggtagagacaaagtcttgtcttgtagggtgagcaggcagtgaggtcagaaagggcatcacaggtagaggaaaaagcatgggcagaggtctggaacccagtccctcttcataccacccgctgaccctttcccctcccccccacatgagatttctccccctctcttctctcttctctccctcaacaattccagggttgcccacctgaaaacaagctccctggaccaccttcccttgcagctctctgttccttctctctyttttttttttttttttttttgagacggaatctcactctgtcacccaggcaggagtgcaatggtgtgatctcagctcactgcagcctctgcctcccaggttcaagtgattctcctacctcagcctcacgagtagctgggattacaggtgcccaccaccacacccagctaatttttgtatttttactagagatggtgtttcaccacattggccaggctggtctcgaactcctgacctcaggtgatccacc

SEQ ID NO: 933329 - DNA, 594 bp, Homo sapiens
gaccctgagttcttggaatcagggaccccaagaacctgcttggtgctctaccctcccgtggcagtgttggtatctgaaaccaggaagtctcagaagctcaccaaggccctcaatgtagtgcctgggtatcactgctgtttattcaggtcctaagaactcttcagttagcagatgatgaatgctgccaggtctggatcctttccttcaaggcagtaggttccgttctggcccagggtgtgtctagaaatgtcatctgggagctgtaacagaggcctcatgacgctgactgatgcctgatcctgatatgcctgagctgatatccaagatgcaagacaaggtcctctccactctttcctctcctctcttcrggtagatgggaagggtctcttttggagccttgagctgtgcatcctggatttaaaggaagggtgatgccagcactcccttggctgtcccaggtggtgtctcagtatgtcacatgccccacccagtccactgtcaccgggcctagttcagcactgggactctcccaggagtcacagtttttatggcctagactgcctttcaagtttaaatgttccctctgtgagtggg

SEQ ID NO: 933330 - DNA, 657 bp, Homo sapiens
agttcattcatgatttggctttctgcttgcctgttgttggtgcatacgaatgctagtgatttctgcacattgattttgtatcctgagactttgctgaagttgcttatcagcttaagaagcttttgggctgagacgggagggttttctagatttaggatcatgtcatctgcaaacaaagataatttcacttcctctcttcctatttgaataccctttacttatttgtcttgactgattgccctggccagaacttccaatactatgttaaataggagtggtgagagagggcatccttatcttrtgctggttttcaacaggggtcctttcagattttccccattcagtatgatattggctgtgggtttgtcatacatggctcttattttgaggtatgttccttcaatacctagtttattgagagtttttaacatgaggggatgttgaattttatcgaaggccttttctgcatcttaaaatacattaataactgaagaaattaagtacctttcaaatattttttaagatttggaaacatgcaaaaaacaaggtcagaaggagccaagtcagaactgtaaggttaatgcctagcgatttcccatcaaaactcttgcaaaattgtcctcatttgatgaggaattggcagaagcattgttgtgg

SEQ ID NO: 933331 - DNA, 677 bp, Homo sapiens
ttcattcatgatttggctttctgcttgcctgttgttggtgcatacgaatgctagtgatttctgcacattgattttgtatcctgagactttgctgaagttgcttatcagcttaagaagcttttgggctgagacgggagggttttctagatttaggatcatgtcatctgcaaacaaagataatttcacttcctctcttcctatttgaataccctttacttatttgtcttgactgattgccctggccagaacttccaatactatgttaaataggagtggtgagagagggcatccttatcttgtgctggttttcaacaggggtcctttcagattttccccattcagtatgatattggctgtgggtttgtcatacatgrctcttattttgaggtatgttccttcaatacctagtttattgagagtttttaacatgaggggatgttgaattttatcgaaggccttttctgcatcttaaaatacattaataactgaagaaattaagtacctttcaaatattttttaagatttggaaacatgcaaaaaacaaggtcagaaggagccaagtcagaactgtaaggttaatgcctagcgatttcccatcaaaactcttgcaaaattgtcctcatttgatgaggaattggcagaagcattgttgtggtggaggaggactctctggtgaa

SEQ ID NO: 933332 - DNA, 824 bp, Homo sapiens
ctgtaaaatcacaagcaacttaattacttcttagatacaatggaggtacaggtactgggtaaatatagccatttcaaatggaagaaattggccaaaacaaagaggctataggccccaggcaagtccaaaatccagcagggcagtcaaatatttaagctctgaaatgatctctgttgactccatgtctcacatctgggtcatgctgatgcaagaagtgggttctctggtcttggacggctctgcccctgtggctctgcagggtgtagcctccctcccagctgctttcatgtgctggtgttgaatgtctggcttttccaggctcatggtgcaagctgtcagtggatctaccattctggggtctggagaatactggccctcttctcacagttccactagttgttgcccaagtagagactctgtgtgagggctgtgaccccacatttcccttccataatgccctagcagaggttctctatgagagccctgcccctgtagcaaacttctgcttggatatccaggtrtttccatacatcctctgaaatctaggcagagatttcctaacctcaattcttgacttctgtgccccaacaggctcaaaaccacgtggaaacttccaagccttggggcttgtaccctctgaagccacagcctgaactgtaccttgcccccttttagtcaaggggtggagcaactgggaggcagggcaccaagtccctaggctacatgcagcacggggaacttggcctggcccacgaaaccattttttcctactaggcctgtaggaaacgtaatgggaggggctgctgcaaagacctctgacatgc

SEQ ID NO: 933333 - DNA, 614 bp, Homo sapiens
gtaggtgttactctgcaggggcagagcttcccaaggccatggaagccaacctcttgcgtcagcatgccctggatgtgagacatggaatcaaaggagattgttttggaagtttaagttttaatgactgctcttttggatttcagatttgtgtgggacatgtagccccttcgttttggccaatttcttccatttggaatggctgtatttaccctatgcccatacctccattgtatctaggaagtaaytaacttgcttttgattttacagattcacagatgggaggtacttgccttgtttcagatgaggctttggatttggacttttgggttaatactggaatgagttaagactctggagaacttttgaaagggctgggttttgaaatgttaagacatgaaatttaggaggggatgtggaaaaatgatatggtttggctttttgtcctcacccaaatctcattttgaattgcgatcgtgtaatccccacatatcatgggacagactctgtggaggtaattgaataaggagcagtttcccctatgctgttcttgtgatagtgagtgagtctcacaaaatctgattgttttataaggttctggcatttctcccacttgc

SEQ ID NO: 933334 - DNA, 449 bp, Homo sapiens
tatgcggaatgggggaaaactggaagtcttttgtctaagatctggaacataacaaggttgcccactgtcaccactgtttctcaacatagtcctggaaatgtcagctagaacaatcatagaaaaaaaattaaggtcatccagtttggaaaggaaaaaatcatattatccttctttgcagttaatatgatcttatatttggaaaaacctaaagcctccaccaaaaacctattagaactgataaataaattcagtaaagttgcaaaatacaaaatcaacatacaaaaatcagtagcatttctatatgccaacagtgaacaatctgaaaaagaaaatttaaaatttaatcccttgtacaatggccacaaataaaattaaatacctggaaattaactttactraatctgggaaagatgtctacaattaaaacaataaaacactggtgaaagaaa

SEQ ID NO: 933335 - DNA, 698 bp, Homo sapiens
atttaggttttggaggcaacacattcctcgtttagtgtgttactctggcccatttattgggtgacccgaaagtctgccaattatgagtgggatacagaacaggagaaggctctgcaacagatccaggcttctgtgcaagctgctctgccacttaagccacatgacccagtagatccaacggtgcttgaggtgtcagtggcagacagggatgttgtttggagccttttgcaggccaccataggtgaatcacagtggaggcctctatgattttggagcaatgccctgccatcttctgcatataattactgtccttttgagaggcagctcttggcctgttactggactttggtggaaactgaacatttgactayatgtcaccaagtcaccatgcgacctgtactgcctatcattaactggttgctttctgacccatctagccataaagtgggtcatacacagcagcgttctatcatcaaatagaagtggttatatatatgatcaggctctagcaggtcctgaaggtacaagtaagttacatgagaaagtggctcaaatgcccatggtctccactcctgccaccctgccttctcttccccagtctgcactgaaggcctcatgggaggttccctatgatcagttgacagaggaagagaagactcgagcctggttcacagatggttctgcacgatattcaggca

SEQ ID NO: 933336 - DNA, 530 bp, Homo sapiens
taaagacagaagcagagcaactggtttggtggagagatccgataacaaaaggttgggaaataggtaaaataataacttggggtagagactatgcttgtgtttctccaggactgaatcaacagccaatttgggcaccatcgagacatctaaagccgtactatgagccagctacccaggaagaggttttgggaggatcccaaagacccatcattggcagcattgctcaagttcatgctgaggaggaccccaactgtcacgagcaacacccgttgaacacagccacctacctggggacagatcaagaagctgtygcagatggtggaagaaaacctgaggaaagcaggacaaccagtcacaatgagtaacttaatgatagctatgatagtggtgatcacattgcctagagtattcctttaacaagggctgacacagagaacaattatacttattgggcatatttaccttttccaccacttctacggcctgtaacttggctggaccccccagtggaggtatacactaatgatagc

SEQ ID NO: 933337 - DNA, 604 bp, Homo sapiens
gagtaacttaatgatagctatgatagtggtgatcacattgcctagagtattcctttaacaagggctgacacagagaacaattatacttattgggcatatttaccttttccaccacttctacggcctgtaacttggctggaccccccagtggaggtatacactaatgatagctcttggatgttcagtcctacagatgatagaggcccatctcacccacakgaggaaggaactgttatgaatatttctttaggatttgaacatctgcctatctgtttgggaaaggccactagttgcctacaccttcactatcaatcttggctggcaataatgcctggatgtaatcactctatgacacagttacacttgctttctggtcttagtatttaccataataaatctgctcctataactgaggcataccacatcaaaaacctatttgtaaacaggattggacctggtcagaaaaaataaatgtgcttgtttgggaagattgcattgcagaacaggcagaggtgctgcacaataattcccatggaatcattactgaatagtcccctaagggatgtttagcttgaattgcccttctccatctgcatgccatggc

SEQ ID NO: 933338 - DNA, 570 bp, Homo sapiens
aaacacaacataccaagcctatggaatgcagcaaaggcaattctaagacagaagtttgtagcaataaattcctacattaaaaaagaagaaagctccaaaataaatagtctaacataatgcctcaaggaactaaaaaataaagaaaaagctaaagccaaaattagcagaagaaaggaaaaaaaatcaaaatctgagcaaaaataaatcaaatagagaaaggaaaaactataaaaagaatcaataaaatgagtttcatttttgaaaaaataagattgacaaacccttaactagtctaaraaaataagagagatgactaagataagtaaaataaaaaatgaaagtagagaaattacaacaggtgtatcagaaataaaaaggatcatagggactattatgaacaattatctacaagcaatttgggtagcctggaagtagataaattcttagaaaaatacaacctaccaaaattgagtcagaaagaattagaaagcctgaacagaccaaaaacaaataaagaaattgaagaagtaatcaaaacctcccaacaaagaaaagcctaggataaggtgg

SEQ ID NO: 933339 - DNA, 582 bp, Homo sapiens
cctaggagatcatatacctgtcaaactccgccatttgactctctcagtgtgcatttgtgagcccacttgcccaactcctgagatcttatcgggaagctgctgatcaccagcttcagatatttctttttttttttgagatggaatctcactttgtcacccagactggagtgcagtgatgcaatcttttttttttttttttttttttgaggkggagtctcactctgttgcccaggctggagtgccgtggcacaatctcggctcactgcaagctctgcctcctgggttcacgccattctcctgactcagcctcccgagtagctgggactacaggcgcccgccaccacacctggctaattttttgtattttgtttagtagagacggggtttcaccatgttagctaggatggtctcgatctcctgacctcgtgatccgcccgcctccacctcccgaagtgctggaattacgggcgtgagccaccacgcccggctgacgcaatcttgactcactgcaaactccgtctccaggcttcaaatgactctcctgcctcagcctcccgagtagcaaggactacaggcatgcac

SEQ ID NO: 933340 - DNA, 801 bp, Homo sapiens
agatcatatacctgtcaaactccgccatttgactctctcagtgtgcatttgtgagcccacttgcccaactcctgagatcttatcgggaagctgctgatcaccagcttcagatatttctttttttttttgagatggaatctcactttgtcacccagactggagtgcagtgatgcaatcttttttttttttttttttttttgaggtggagtctcactctgttgcccaggctggagtgccgtggcacaatctcggctcactgcaagctctgcctcctgggttcacgccattctcctgactcagcctcccgagtagctgggactacaggcgcccgccaccacacctggctaattttttgtattttgtttagtagagacggggtttcaccatgttagctaggatggtctcgatctcctgacctcgtgatccgcccgcctccacctcccgaagtgctggaattacgggcgtgagccaccacgcccggctgacgcaatcttgactcactgcaaactcygtctccaggcttcaaatgactctcctgcctcagcctcccgagtagcaaggactacaggcatgcaccactatgctcagctaatttttatatttttagtagagatggggtttcagcattttagccaggctggtctcaaactcctggccccaagtgatccacccacctcggcctcccaaagtgctgggattacaggtgtgggccactgtgcccagccaggtgtttctgtttattgtgagtctgcctttccctggagctgactatgaccaactattattttagagagaccgtta

SEQ ID NO: 933341 - DNA, 726 bp, Homo sapiens
ttctttactaaactttatgttctaggttgcatttaccatagattagcttctatgttcattttaatctaactcacataaaatggctagattcggaagaggaggttttctattttctctaagcatagatgtgtcctgggtagataaaagagccttgcattaagaaccaaaagaacctagcaggtcctgttcatagcagcactattcacaatggccaaaatgtggagacagcagaaatgttcatcggcagacaagagataaacaaattgtagtatacacagaaaatgcaatattattcatctatggaaaaaatgcagtactgatatatgctacaatgtgaatgaacatccaaaacattatactaagtgaaagaagctagacacaaaataccacgtactgtgtgatttcatttatatggaaggtccaaaatagataaatccatacagagacaacacagatgggtggttgccaggggaaagggggagaaactgcttagtaggcaagagtttgactttggagagacaaaaatgkttttttttttttttttttttgagacggagtctcgctctgtcgcccaggctggagtgcagtggcgggatctcggctcactgcaagctccgcctcccgggttcacgccattctcgacaaaaatgttttgaaactagacataggtggcgcttcacaacattttgaatgcactaaatatcaatgaattgctcactaaaaatg

SEQ ID NO: 933342 - DNA, 637 bp, Homo sapiens
ggatcaatgatgaaatcaaaatggaaactaaaaaatttttcaaaataaataataaccagtgacacaagttatcaaaatctctggaacacagcaggagtgctatgtggggagtttatagtgctaaatgcttacatcaaaaaggccaaacaatcacgaattgacaacccaacatcacacctcacagaactaaaaatacaagaacaaacyaaacccaaagctagcagaagaaaagaaataacaaagctcagagcaaaactaaatgaaactgaaaccaaaaaatcacaatacaaagactcaatgaaacaaaatttgattatttgaaaagataaacagaattgataggccaatagctaaattaaccaaaaaagagagagaggattcaagtaaactcagtcagaaataaaaagaagacattatcactgataacacaaaaatacaaaagatcatccaagactactatgaatacctctatgcacacaaactagaaaatcttgaagagatgaataaattcctggaaacatacaatcccccaagcttgaatcaggaagaaaagcaatcctggacagaccaatgacaagtagtgagattgaatccataataaaaaaatctccccctccacacccccagaaagctcaag

SEQ ID NO: 933343 - DNA, 605 bp, Homo sapiens
tgaagaaactgacaagctgatcttaaaattcatatggaaatgcaagtgacccagaacagccaaaaccaccttaaaaatttttttggaggattcatactttctgatttcaaagcttactaaacagctacagtaatcaagagtgtgccactggtataaggacagatgaatagataacagaacagaatccagaaataaaccttcacatatacagtcaatcgatcttcagcaagggttccaagacaattcaatggggaaagaataagcttttcaacagatagcgctgagacaactggatgtttcgatgcaaaacaatgaagctataccccctacttcatgccacatgcaaaaattaactcaaatggataaaatagctaaatctaagagatactaataaaactataaaactcttagaagaaaacataggcagaaacttttrtgagctgggagtagcaatggtttttttagatattacaccaaaagcacaagcagcaaaaaacacaaacgaaaaaagataaattggactatatcaaaatttaaaacttttgtgcttcaaaggacaccatcaagaaagaaaaaagacaatccagaaaaagggagaaaattgt

SEQ ID NO: 933344 - DNA, 767 bp, Homo sapiens
aacattaaacagagaccttaagactgacaaaacagacttttttgcagcaataagataccaacatggcagcaggccccaaaagacattgaagtattttatcctgatatatatatacacacacatagacaaacacacacacacatatactcttatgtatacatatatactcatatacgtatatatatatatattttttttgagacagtctcgctgcatcacacagactagagggcagtggcgcaatctcggctcactgcaacctccacctcctgggttcragtgattctcctgcctcagcctcccaagtagctgggattacaggcgtgtgccaccacaccagctaatttttgtatttttagtagagacagggtttcactgtgttggccaagctcatcttgaactcctgacctcaggtgatccacccgccttggcctcccaaagtgctgggattacaggtgtgagccaccgtgcctggccaaatatatttatttgacatattttgaaatggccttgcagagctatctcttctggggggaatctacattctgtaaagaatccccttgtctttccaggtcttttccctgatgctggagagaattaactgagaacctgacacctgttttaagtctgataagaaacatttacaatctattctctctgaaacctgctacatagaggcttcatctgcagaacaagaaccctggtctctgcaacctcttatctcaacccagacactgccttctattggctccaggtctttatataat

SEQ ID NO: 933345 - DNA, 619 bp, Homo sapiens
tccattttcttttgttttgttttgtttttgagacagagtctcactctgtcgcccaggcaggagtgcaatggcacaatcttggctcactgcaacctccacctcctgggttcaagcaattctcctacctcagcctcccacgtcgctgggattacasacgcatgctgccacgcccggctactttttttgtgttttagtagagacggggtttcaccatgttgcccaggctggtctcgaactcctgagctcaggcaatccacctgccttggcctcccaaagtgctaggattacaggtgtgagccaccgcagccagtggtcagagtccattttcaaaaccaagggtcacagaatcatatatgtgaagaggctggtcatggtactttaaagtttatcaaacttcccgaccatacagtattaagctctggcatgcacaaaaggctttactgaatatctgcaactctcagtgagtttaaatgactgttcgccctccaatgcctttcttacttgagccccaaagggtaaaaaaagaactgtcccttgcagaaaaactggccacctatctgcttactctccttggctctcttatgagctatatggtgctacagaacaatcgcatctataa

SEQ ID NO: 933346 - DNA, 596 bp, Homo sapiens
aaaagctttaaggctctgaatagtcagcaggaatgcccaggcagtacttgccatgggccttgggtgagactcacagatgtgctggcttcaacaaattcccagttgtggtagccataggaagagacttcactgcttgtggaaaaaagagagaagagtrggaagaactttgtcttgtggcttgggtccagctcaggcacagtagaatagaacaccaggtagattcctaaggtttctgactccaggccctggctctgaaataccatttctgagcttgtctgggaagaggaagcaactcaccatcctgaagaaaaggacaaaagcctggctggctttagcacttgctgattgtaaagcccttgaaccttgagtgaacacaggtggtactcaggcagtggttgctgtgagctttcggtgaggcacaaggctgggctggctttaggtctgacccagcgcagtctcattggtagtggccacaggggtacttgtgtcactcttcctcaaccccaggcagtcccacacagacagaaagagagagacagagactccatttgtttgggagagaataaggaaagagaacaagagtctctgcctagcaa

SEQ ID NO: 933347 - DNA, 600 bp, Homo sapiens
ctgccatgttcagtggttgtaaatatactgtggaactatgaatggaaaataggtggaaacaaataaatgtatgctcagcaaattaaaaaattctaaccatgttcttactgctaagaactttctacctgcatatattcctggagtgtcaaacctgaaaatgatcttctgcaacatcagtttatttatattaatttgtatctattagacttaggaaaatagtataaaaacaggaaggaattccatgagggactaaatgaaatataaattcgtaatattttttatacctataaaaatgaggccaggtgcagtggctcatgcctgtaactccagcactttgagaagccgaggcaggcggatcacgaagtcaagagattgagaccatcckggccaacatggtgaaaccctgtctctactaaatgtacaaaaattaactggcagtggtggcatgagcctttagtctcagctactcaggaggctgaggcaggagaatcgcttgaacccgggaagcagaggttgcagtgagccgagattgctccactgcactccagcctggcgacagagcaagactccatttcaaaaaaaaaaaaaaaaaaaaaaaaa

SEQ ID NO: 933348 - DNA, 600 bp, Homo sapiens
ctgccatgttcagtggttgtaaatatactgtggaactatgaatggaaaataggtggaaacaaataaatgtatgctcagcaaattaaaaaattctaaccatgttcttactgctaagaactttctacctgcatatattcctggagtgtcaaacctgaaaatgatcttctgcaacatcagtttatttatattaatttgtatctattagacttaggaaaatagtataaaaacaggaaggaattccatgagggactaaatgaaatataaattcgtaatattttttatacctataaaaatgaggccaggtgcagtggctcatgcctgtaactccagcactttgagaagccgaggcaggcggatcacgaagtcaagagattgagaccatccgggcyaacatggtgaaaccctgtctctactaaatgtacaaaaattaactggcagtggtggcatgagcctttagtctcagctactcaggaggctgaggcaggagaatcgcttgaacccgggaagcagaggttgcagtgagccgagattgctccactgcactccagcctggcgacagagcaagactccatttcaaaaaaaaaaaaaaaaaaaaaaaaa

SEQ ID NO: 933349 - DNA, 578 bp, Homo sapiens
accactgctctcttcaaagctgtcagacagggacatttacgtctgcagaggttactgctgtctttttgtttgtctgtgccctgcccccagaggtggagcctacagaggcaggcaggcctccttgagctgtggtgggctccacccagttcagttggagcttccyggctgctttgtttacctaagcaagcctgggcaatggcgggcgcccctcccccagcctcactgccaccttgcagtttgatctcagactgctgtgctatcaatcagcgagactctgtgggcataggaccctctgagccatgtgcgggatataatctcctggtgtgctgttttttaagccctttggaaaagtgcagtattagggtgggagtgacctgattttccaggtgccgtctgtcacccctttctttgactaggaaagggaactccctgaccccttgcacttcctgagtgaggcaatgcctcgccctgcttcggctcgcgcacagtgcgcgcacccactgacctgcacccactgtctggcacttcctattgagatgaacctggtacctcagatggaaatgcagaaatcactggtc

SEQ ID NO: 933350 - DNA, 756 bp, Homo sapiens
gggtatgtctttatcagcagcgttaaaatgaactaataccataaattagtaccaggagtaggtgttgctgaaaagatacccaaaaatgtggaagcgactttggaactgggtaacaggcagaggctggaacactttggagggctcagaagaagacagaaaaatgtgagaaagtttggagcctcctagagacttgttgaatggctttgacaaaaatgctgatagtgatatgaacaataaggtccaggctgaggtggtctcagatgaggacaaggaacttgttgggaactggagcaaaggtgactcttattatgttttagcaaagagactggtggcatacttcccctgccctagagatttgtggaactttgaacttgagagagatgatttagggtatctgggggaagaaacttctaagcagcaaagcactcaaaaggtgacttgggtgctattaagagcattctgttttaaaagggaaacggagcataaawgttcagaaaatttacagcctgatgatgcagtagaaaagaaaaacccatttttttgagaagaaattcaagctggctgccagaatttgcataagtagcaaggagcctaatgttaatccccaagaccacggggaaaatgtctccagaccatgtcagagaccttcacggcagcccctcccatcacaggcctggaagcccaggaggaaaaagtggttttgtgggtcaggcccagggtccccatgctgcgtgcagcctaggaacttggtgacct

SEQ ID NO: 933351 - DNA, 636 bp, Homo sapiens
taagtttcttaaattctttctctatgattcagttttgtcatctgtagaacagcgataataatactttctgtttgtaggattgaggtacaaacaggattgatgtagaaatgtaggattgataaggtaatatatctactgcacatagaactgggttggtcacataagtacccaataattgttagttatcattgttattactaccatttattatttctgggggatttttttttttcttgagataggatttctccctagtcgcccaggctggagtgcagtggcgtgatctccgctcactgcaacctctatagagtgttagaaaacactctagaaagttttttatccrttaactcttataatactttttacagaattgcatttcagaataagaacatttaaatatctacctgctgtttcctccttatcactcatcaatgtattctcccactgtcaaaactactcctaaagacaagattagaaaatttcagccaggctcggtggctcacatctgtaatcccagcactttgggaggctgaggcggacagatcacctgaggtcaggaattggagaccagcctggccaacttggtgaaaccccatctctactcaaaatacaaaaattaaccaggcatggtggcac

SEQ ID NO: 933352 - DNA, 611 bp, Homo sapiens
cacagctgtaatccaagcactttgggaggccaaggcgggccaatcacctgaggtcaggtgttcgagaccagcctggccaacatggtgaaacgccgtctctactaaaaacacaaaaattagcctggcatgacggcagscacctgtaatcccagctactcaggaggctgaggcaggagaatggtttgaatctaggatcagaagttgcagtgagccaagatcatgccaccgcactccagcctgggtgacagggtgagactctgtctcaaaaagaaaaaaaaaaaaaagacctcaaactataaaaatcttagaagaaaacctaggaaatacccttctcaacactggctttggcaaagaacttatggctaagtcctcaaaagcaactgcaacaaaaacaaaaattgacaaatgggacttaatgaaactaaagatcttctgcatagcaaaagaaattattaacaaagtaaacaggcaacctacagaatgagagaaaatattcacaaactatgcatctaacaaaggtctaacattcagaatctataaggaacctaaacaaatcaaacaaaaaacaaatcaatttaaaaacgggcaaaggacagacacttctcaaaaga

SEQ ID NO: 933353 - DNA, 611 bp, Homo sapiens
cacagctgtaatccaagcactttgggaggccaaggcgggccaatcacctgaggtcaggtgttcgagaccagcctggccaacatggtgaaacgccgtctctactaaaaacacaaaaattagcctggcatgacggcaggcrcctgtaatcccagctactcaggaggctgaggcaggagaatggtttgaatctaggatcagaagttgcagtgagccaagatcatgccaccgcactccagcctgggtgacagggtgagactctgtctcaaaaagaaaaaaaaaaaaaagacctcaaactataaaaatcttagaagaaaacctaggaaatacccttctcaacactggctttggcaaagaacttatggctaagtcctcaaaagcaactgcaacaaaaacaaaaattgacaaatgggacttaatgaaactaaagatcttctgcatagcaaaagaaattattaacaaagtaaacaggcaacctacagaatgagagaaaatattcacaaactatgcatctaacaaaggtctaacattcagaatctataaggaacctaaacaaatcaaacaaaaaacaaatcaatttaaaaacgggcaaaggacagacacttctcaaaaga

SEQ ID NO: 933354 - DNA, 611 bp, Homo sapiens
cacagctgtaatccaagcactttgggaggccaaggcgggccaatcacctgaggtcaggtgttcgagaccagcctggccaacatggtgaaacgccgtctctactaaaaacacaaaaattagcctggcatgacggcaggcacctgtaatcccagctactcaggaggctgaggcaggagaatggtttgaatctaggatcagaagttgcagtgagccaagatcatgccacygcactccagcctgggtgacagggtgagactctgtctcaaaaagaaaaaaaaaaaaaagacctcaaactataaaaatcttagaagaaaacctaggaaatacccttctcaacactggctttggcaaagaacttatggctaagtcctcaaaagcaactgcaacaaaaacaaaaattgacaaatgggacttaatgaaactaaagatcttctgcatagcaaaagaaattattaacaaagtaaacaggcaacctacagaatgagagaaaatattcacaaactatgcatctaacaaaggtctaacattcagaatctataaggaacctaaacaaatcaaacaaaaaacaaatcaatttaaaaacgggcaaaggacagacacttctcaaaaga

SEQ ID NO: 933355 - DNA, 611 bp, Homo sapiens
tttctcaggaagcttatacagaagcaacaatacagaaacatttttgtcctccaccaaaaaagagaaaaccaagttggaaaaaggcgaatgatccagaagacagaagagcctacacatgagaaagcaaagctacttcccaggaggctggtaaaargaaatcctgataacacccatgcaaccagtctaaactacaacaaatacacaaggggtttcagaagttgtatcaccaataattttttttaaaatagtaaagtaaataaatgtattcatagcatactatgtggttcagctctctagataatatacaaggaggtgaaaacagtgaatattggtttaaacaatactgtgatataatattggaaacatctgtgtggtaggcagagtatgggggagaattctaagcaaacaaaatattcatctttcagtagggagggagttgatggtacctaaactggaaaagtcaggaaataccagtaatggtcgggtgtggtggctcatgcctgcaatcccagcactttgggcggccaaggcgagtgaattgcttgagcccaggagtttgagatcagcctgggcaacatggcaaaaccccatctgtacaaaaaaatacaaaa

SEQ ID NO: 933356 - DNA, 784 bp, Homo sapiens
agggagagatgcgagggccggccccccaagacagcgaatcagcagccagcggccgctcccggcgtctgcagggaagagccagcaccaaggccagagtccccagagccatccgcgtcgagggcacgagcgtgaagaagaagcagggactcaggccatcctgcatccaggccggacccacgggccccttcggcctcgcagtagttgcccacagtcaccatggcaatgcgtggacgccggccgaggctgcgggcactgcgggaccggaggccgggactkgtcactcggagagcggcgcggacatccgggtgccttgctcacgtagccgctgggcccaagctgcgggggtcccgggaaggagcacgtggaccaggcctcaccgcccactcccctagcgcacgcgcgccgccacgcactcacgcagggcacgtacgccgtctcagcacggccccgctggctctgggccgggaccctcctgccaactgcaggcccacgggaatgctcggtgttggactcgcaccgcctccacggctgtagcccgcccacagcccctacccacggctcccattggccaaatgtctccgaggggggagcggggggaatggtgcaggcaacgaatgcaaattagagaagcagagccggcttggtcacgtgcccagggcgggaaatctgacgaccaggccgagctggaaacctccacggaatcgtggctcggggctggaaacagacctcacggaatcctggctcggggcaggacacagacctccacggaactgtgggtcggaag

SEQ ID NO: 933357 - DNA, 564 bp, Homo sapiens
ctgcactccccctgggcgacagagagagactccgtctcaaaaaaaaaagagaagaaaagaaaaagttctggcgctatatagtagtaatgtttgtataatatcgtgaaatgtactatagtgccactgaactgtattytttaaatgacttaaatggtaaatttagttttttaaccacaatatttaccacaattttttaaatcagtgatgttgagatttcagggaaatacggtaataatagaagaaatacggtaataaatagccaaagtgaaggagcacggccaagttgcagaccatcccagacgcccttaccctcctcgcctgccatggccccaactagtgccccagttccccctccccccacaccccacggtccaccggggatccagggccccagcgtgcaagtcgcgccaggtgcccgggctcctggagcccctccctatctagtccaagaacgccccgggtctgacaccttctcttcggttctccgcaggggacgtcgtcgtgcaggcgcccacccaggtgcccggcttcttgggcgactccgtgacgctgccctgctaccta

SEQ ID NO: 933358 - DNA, 647 bp, Homo sapiens
gaagaagccagatctttgactaccaagcttttccttcaaccactaaacaaagctgctcccttacaacccaggcggatactgcctcgtccaggaagccctccctgacccccaagcatgagccaagcatccactaggctctcccactccagccttgcccattctgggtcatcaccgtgggggacttgtttgtcatccccagtggactgtgagccccaagatagcagacctgaggctgtcactgtcatgactgtgccccaggaccrcctaccactgggccgggcataaaagaggcactcgaggaagtgtttgctgagtgattcaatgtgtcagctccagagccagactgcctgtatctgggccctaaagctactgcttgattagtgatgtcaccataggcaaatagcttaagctgtatgactcagtttcctcatctgtaaaatggggtgatggtacctaataatacagtagagcacttaacacagtaggtggcacatggtaagccacatactgagtatgtatttgctatgattgttattgctattattactattattgttattattaacataaactgcacaagagcaggctttttgtttgtttgtttgtgttttgttttgagacaagatcttgctctgttgcccagactg

SEQ ID NO: 933359 - DNA, 602 bp, Homo sapiens
agaaatcatagatgacacaaacaaatttcaacatgtctcatgcttatgaactggaggaatcaatattgtgaaaaggactgtactgcccaaagccatctacagattcaatgtaattcccgtgaaaatggcaacattatttttcacagaattagaagtactatcrtaaaattcatatggaaccaaaaaagagcccaaataacccaagccattttcagtcaaaagaataaatctgggtgcatcacattacttgaattcaagttatactgtaacagtataatcaccaaaacagcatggtactgatataaaagtaggcacatagaccaatggaacaaaatagagaacacagaaataaagccaaatacttaaaaccaactggtcttcgacaaagcatacaaaaacataaattagggaaatgacacctaaataaatgttactacaaaaactggctagcttcatgtaaaagaatgagactggatctctgtctctcaccttatggaaaaatcaactcaaagttgatcaaagacttaaatctaagacccaaaaccatgaaatttctagaagataagcttgcaaaatctcttttggacattggcctaggcaaa

SEQ ID NO: 933360 - DNA, 694 bp, Homo sapiens
ataaacattgaggcacacctccaccagaaaaaagataggagttactgaaggcttagataattgttagtgttttaatgcaatcaagtatttttaaaataaggcatgtattttattttattttatttatttatttatttatttatttatttatttatttatttattttttgagacacagtctcactctgttgcccaggctggagtgcaatggcacgatctcagttcactgcaacccctgcctcttgggttcaagtgattcttctgtctcagcttccagagtagctgggattacaggttcctgtcatcatgcccagctaattttattttatttttgtatttttgtagtgacgggttttcaccacgttggtcaggctggtcttgaactcctgacctcaggtgatccacctgcctcagcctcccaaagtgctgggattacaggcttaagtcacatgccccaaagcatgtattttttatacataatgctattgcatakaatagactacagtatgatgcacttatagcttttgtatgcactgggaaaccaacaaatttgtataacctgctttattgtgatatctgctttattgtggtggtctggatccaaacctgtactatctcttcggtatgcctgtagtctctcctcagttacctataatcaactatagcctaaaaatgaaactgacccaatactccca

SEQ ID NO: 933361 - DNA, 694 bp, Homo sapiens
ataaacattgaggcacacctccaccagaaaaaagataggagttactgaaggcttagataattgttagtgttttaatgcaatcaagtatttttaaaataaggcatgtattttattttattttatttatttatttatttatttatttatttatttatttatttattttttgagacacagtctcactctgttgcccaggctggagtgcaatggcacgatctcagttcactgcaacccctgcctcttgggttcaagtgattcttctgtctcagcttccagagtagctgggattacaggttcctgtcatcatgcccagctaattttattttatttttgtatttttgtagtgacgggttttcaccacgttggtcaggctggtcttgaactcctgacctcaggtgatccacctgcctcagcctcccaaagtgctgggattacaggcttaagtcacatgccccaaagcatgtattttttatacataatgctattgcatataatagactacagtatgatgcacttatagcttttrtatgcactgggaaaccaacaaatttgtataacctgctttattgtgatatctgctttattgtggtggtctggatccaaacctgtactatctcttcggtatgcctgtagtctctcctcagttacctataatcaactatagcctaaaaatgaaactgacccaatactccca

SEQ ID NO: 933362 - DNA, 607 bp, Homo sapiens
aggtggggtaacccaaactgttattctgaaagggctattttcaaaagtcctactttttttgtttgtttatactatcattaatcttaacttttggatgtgaaagtactaagaggtatccctagagactcccaggagttccacatggattcctcttcgcctccattgtaaaactgcaaatctatttcagcttcataatcattatcattatgamtatgatatataatcatattcatataattatgaatataatatataatcatattcatataattatgaatataataaaccagaagaataatcactttctgtatttgttaagtcgatgacataaggagcacaaaatgtccaggaggcattctcatgtgtcaattcaatggaaacaatgtgtatctgagtagtagcagtcttcctttaggaaaaaaaagaattccacactagcagaactcaaagttcttgatacaagaaccaaaattttcacaaatagactattaggtatgctagtgaggagtctttcccacttcctctccttaattctcagacccatgtattccggcaataaaggagacaggaacataaaatggtttctgattgagtttagcattgtctt

SEQ ID NO: 933363 - DNA, 607 bp, Homo sapiens
aggtggggtaacccaaactgttattctgaaagggctattttcaaaagtcctactttttttgtttgtttatactatcattaatcttaacttttggatgtgaaagtactaagaggtatccctagagactcccaggagttccacatggattcctcttcgcctccattgtaaaactgcaaatctatttcagcttcataatcattatcattatgaatatgatatataatcatwttcatataattatgaatataatatataatcatattcatataattatgaatataataaaccagaagaataatcactttctgtatttgttaagtcgatgacataaggagcacaaaatgtccaggaggcattctcatgtgtcaattcaatggaaacaatgtgtatctgagtagtagcagtcttcctttaggaaaaaaaagaattccacactagcagaactcaaagttcttgatacaagaaccaaaattttcacaaatagactattaggtatgctagtgaggagtctttcccacttcctctccttaattctcagacccatgtattccggcaataaaggagacaggaacataaaatggtttctgattgagtttagcattgtctt

SEQ ID NO: 933364 - DNA, 607 bp, Homo sapiens
aggtggggtaacccaaactgttattctgaaagggctattttcaaaagtcctactttttttgtttgtttatactatcattaatcttaacttttggatgtgaaagtactaagaggtatccctagagactcccaggagttccacatggattcctcttcgcctccattgtaaaactgcaaatctatttcagcttcataatcattatcattatgaatatgatatataatcatattcatataattatgaatataatatataatcatattcatataattatgaatataataaaycagaagaataatcactttctgtatttgttaagtcgatgacataaggagcacaaaatgtccaggaggcattctcatgtgtcaattcaatggaaacaatgtgtatctgagtagtagcagtcttcctttaggaaaaaaaagaattccacactagcagaactcaaagttcttgatacaagaaccaaaattttcacaaatagactattaggtatgctagtgaggagtctttcccacttcctctccttaattctcagacccatgtattccggcaataaaggagacaggaacataaaatggtttctgattgagtttagcattgtctt

SEQ ID NO: 933365 - DNA, 607 bp, Homo sapiens
aggtggggtaacccaaactgttattctgaaagggctattttcaaaagtcctactttttttgtttgtttatactatcattaatcttaacttttggatgtgaaagtactaagaggtatccctagagactcccaggagttccacatggattcctcttcgcctccattgtaaaactgcaaatctatttcagcttcataatcattatcattatgaatatgatatataatcatattcatataattatgaatataatatataatcatattcatataattatgaatataataaaccagaagaataaycactttctgtatttgttaagtcgatgacataaggagcacaaaatgtccaggaggcattctcatgtgtcaattcaatggaaacaatgtgtatctgagtagtagcagtcttcctttaggaaaaaaaagaattccacactagcagaactcaaagttcttgatacaagaaccaaaattttcacaaatagactattaggtatgctagtgaggagtctttcccacttcctctccttaattctcagacccatgtattccggcaataaaggagacaggaacataaaatggtttctgattgagtttagcattgtctt

SEQ ID NO: 933366 - DNA, 652 bp, Homo sapiens
atggtctccaactccatccaggttgctgtgaatgacattttgttcatttttaaggctgagtggtattttctttatccactcgttagttgatgggcatttagactgattccacatttttgaaattgtgaattgtgctgctataagcatgtgtgtgcaaatgtcttttgaatatagtgacttcttttcctttgggtagatacccagtagtggaattgctggattgaatggtagttctactttcagttttttaaaggcatctccacactgcacactgttttccatagtagttatactagtttacattcccatcagcagtgtaaaagtgttccctcttctccacatccacttcaacatcgagtattttttgtttttttaaattatgtccattcttgcaggaataaggtggtattttaaatttgcatttgcctgatagtgatgagcattttttcatatgttttttggccatttgtrtatcttcttttgataattgtctattcatgttctttccccacttttaaatgagattatttgtgggttttttttttttttttttttttttgctgatttgtttgagttccttatagattttggatattagtcctttgtgggatgcacagtttgtgaagatttcctcccactctgtgggttatct

SEQ ID NO: 933367 - DNA, 652 bp, Homo sapiens
atggtctccaactccatccaggttgctgtgaatgacattttgttcatttttaaggctgagtggtattttctttatccactcgttagttgatgggcatttagactgattccacatttttgaaattgtgaattgtgctgctataagcatgtgtgtgcaaatgtcttttgaatatagtgacttcttttcctttgggtagatacccagtagtggaattgctggattgaatggtagttctactttcagttttttaaaggcatctccacactgcacactgttttccatagtagttatactagtttacattcccatcagcagtgtaaaagtgttccctcttctccacatccacttcaacatcgagtattttttgtttttttaaattatgtccattcttgcaggaataaggtggtattttaaatttgcatttgcctgatagtgatgagcattttttcatatgttttttggccatttgtgtrtcttcttttgataattgtctattcatgttctttccccacttttaaatgagattatttgtgggttttttttttttttttttttttttgctgatttgtttgagttccttatagattttggatattagtcctttgtgggatgcacagtttgtgaagatttcctcccactctgtgggttatct

SEQ ID NO: 933368 - DNA, 389 bp, Homo sapiens
aatgctggcatcacccttttcccaaccccaagaagcacagctcacagctatgggagagatttctttcctctgcttgaaaagaggagaggggagaataaacagggtttgtcttgcaacttggataccagctcagccacagtagaatagggcacygggcagaattctgtggcccacatttcatgtcctagctagcatgacaattctagacacaccctaggccaaaagggaacctgctgccttgaggggaaagacctactcctagcaggattcattacatgctgactcaagaatccacgggccttgaatatacactagcggtacccaggcagcactcacagtgggctttgggtaagacccagggccatggtggcttcaagcgtgactcagct

SEQ ID NO: 933369 - DNA, 389 bp, Homo sapiens
aatgctggcatcacccttttcccaaccccaagaagcacagctcacagctatgggagagatttctttcctctgcttgaaaagaggagaggggagaataaacagggtttgtcttgcaacttggataccagctcagccacagtagaatagggcaccgggcagaattctgtggcccacatttcatgtcctagctagcatgacaattctagacacaccctaggccaaaagrgaacctgctgccttgaggggaaagacctactcctagcaggattcattacatgctgactcaagaatccacgggccttgaatatacactagcggtacccaggcagcactcacagtgggctttgggtaagacccagggccatggtggcttcaagcgtgactcagct

SEQ ID NO: 933370 - DNA, 614 bp, Homo sapiens
  misc_feature 603, 604, 605, 606, 607, 608, 609, 610, 611, 612, 613, 614: n = A,T,C or G
ataacaaaattaaggcagaaatcaagacgttctttgaaaccaagaagaacaaagagacaacataccaaaatctctgggatgcagctaagggcagtgttaagagggaaatttataccactaaatgcccacatcagaaagctaaaaagatctcaaatcaacatcttaacatcacaattaaaagaactagaggagcaagagcaaacaaatccaaaagctagcagaagacaagaaataactaagatcagagcagaactgaaggaaatagagacacacaaaccctctgaaaaaytaatgaacctaggaggtttattgaaaaaattaacaaaatagatagaccactagctagactaataaagtagaaaagagagaagaatcaaatggacacaataaaaatgataaaggggttattatcactgaccccacagaaataaaatctaccatcagagaatattataaacacctctatgcaaataaactaggaaatatagaagaaatggataaattcctggacacatacagcctcccaagactaaaccaggaagaagttgaatccctgactagaccaatactaggttctgaaattgaggctaccgacaaaaaaannnnnnnnnnnn

SEQ ID NO: 933371 - DNA, 652 bp, Homo sapiens
caggcccatgtggcaaggaactgagggcagcctctgaccaacagtcggagagaagctgaggggtcctcagttctataactggagaggaactgaaacctcccaatagccatgtaagtgaaggagtgcagggaatttcaccccaaaatatggctccctggtataatgagtattttgaattaaagttcttaagagatcaacagatgctgggaatgactttttccttatccacatgaagactagacagacccaccaagaagaacaattagtttttcttcctctccctgttatcacactagctattgcagagaaaaagaccaagaagtaaccagacctgattataccccttcacgaaatatctmtccctcaggctcattccatttccaaagagaatcatttataagttaatctctgttcccctatccattcatcctcccaagtattctttcattctcccttataatcatttattgccccttaacagaattacctatattcccatcactctcctcccctctaaaataaggctatataaatatttgaaccccattgggatgttgagtaatcattcttgattctccctcatggtatgtgaataaatttgtgtgccatttctcctattaatctgcctttgtcaattgatttttttcagcaa

SEQ ID NO: 933372 - DNA, 616 bp, Homo sapiens
cagcaaagtttcagattcaaaatcaatgtgcaaaaattactagttcctatacaacaacaacagccgagacaagaaccaaatcaggaaggcaaccccctttacaactgccacagaaagaataaattacctaggaatacagctaaccagggaggtgaaagatctctacaatgagagttacaaaacactactcaaagaaatcagagaagaaacaaacaattggaaaaacagcccatgctcattgatagaaagaatcaatattattaaaatgatcatactgcccaaagcaatctacagattcaagggctattcctatcaaactaccaacaatattcttcacagaactagaaaaggctattttaaaattgataygaaaccaaaaaagagcccaaacagccaaggcaatccttagcaaaaagaacaaagctgaagtcatcaaggtacctgacttcaaactatactacagggctatagtaaccaaaagagcatggtacaaaaacagacacatagaccaatggaacagaatagagagcccagaaagaaggccacacacctataaccgtctgctctttgacaaagctgacaaaaacaagcaatggggaaaaggctctattcaata

SEQ ID NO: 933373 - DNA, 633 bp, Homo sapiens
ggtgaaaaaggagaacccttattagagaaagctgcaaaagaccgaagcaaaagaaaaaaatctccagactcactggtgtccttaaaaaaccagctctggttctcggcctgtctagagggctttcaatgacagaaagcctgaccctgccgtgaacttcgtgtttcaggtgtctgccgattggtctgctggcttgcaggggtgggcctgtgtccctggccaccgctggacctgtgggtttcagggctgggacccaggactacaggcagagttctgttccaccagagaggggactgagtgtgctcacaggggtgaggggttttyggtggcccagccaaacagcaccttctctcaagggccctgacctcgtaccagaagtggttgttttcctcctgcggtctctgaaggacacagggcatggctctgggacagagccatgtggtgacgactgtaacgggagtatgcctgtctccaacaacagggctgtggcttgaaggtcaccttaagaggcacccctgtcctttgatgtcaccctggaggcccagagtaactcttctggaagccccatcacgtccatgcccgacagtgtccattgttcccttttcccagagccaagagctgggtagagctgcaagg

SEQ ID NO: 933374 - DNA, 711 bp, Homo sapiens
ttttttgtttacttatttttttttttttgtagagatggtgtcttgctatgttgtgtaggctggtctcaaacacatgggctcaagcgatcctcctgccttggtctctcagatgaaatgggaaaagttctgttgtccccctcgaagggcatgcgatgcgggtgtggttcgtttattcagtgccccactgctcaaacctctaggagagcatgcagacaggcagggagacccatggcagtgtccaggggtgaatgttcatagttgaagccccagtgggcgtgtgttacagggtgctcttttagtttagccgtctgtaggtagcttgtgttagtcggctcaattagacccctgccttattgcaaggagagagggctctctttgtcccggggttcttgycttggtgtaccagaagtggtgtgatctcagctcactgcaagctcctactcctgggttcacgccattctcctgcctcagccttccaagtagctgggactacaggcactcgccaccacgcctggctaatttttttgtatttttagtagagatggggtttcactgtgttagccaggatggtctggatctcctgacctcgtgatctgcccgcctcggcctcccaaagttctgggattacaggcgtgagagtgcaaggttttattgagtggaagtatctctcagcagatgggcgtgccagaagggagatggtttacccctgga

SEQ ID NO: 933375 - DNA, 788 bp, Homo sapiens
ggattatgaagattttatggacatttattagttccccaaattaatacttttgtaatttcttatgcctgtctttactgcaatctctaaacataaattgtgaagatttcatggacacttatcacttccccaatcaatacccttgtgatttcctatgcctgtcattactttaatctcttaatcctgtcagtcgagaaggatgtatatcgtctcaggacctgtaataattgcgttaagtacacaaattgtacatcatgtgtgtttgagcaatatgaaatgtgggcaccctgaaaaaagaacaggataacagcaattgttcagggaattagagagataaccttaaactctgaccgctggtgagccaggcagaacagaaccatatttctcttctttcaaaagcaaatgggagaaatatcgctgaattccttttctcagcatggaacgtccctgagaaagagaatgcgcacctaggggtaggtctctgaactggcccccggggcktacctgtcacttatggtcgagattgcagaggtgaaataaactccagtctcccacagcactcccaggcttattaggaagagaaaattcccgcctaataaactttggtcagaccggttgatctcaaaaccctgtctcctcataagatgttatcaatgacaatggtgccaaaactttattagcaattttaatttcacttccatcctgtggtcctgtgatctcaccctgtctccacttgccttgtgatattctattaccctgttaagtacttgatgtctgtcacccactcctat

SEQ ID NO: 933376 - DNA, 623 bp, Homo sapiens
ctcagagactgagatatattccaaccaactcaaccctgtggaagtgccaagttttcctcagtgccactcttgaaaccgcatcaccaactgaccctttaatatatttttgcactatataacatttatttcttagagtaagtgcttccctagaaaagaagcagtttggacatgtatattaaagccgkcacctagaatattatcttctcattgctaggaggtggccttcaagatggctgactagaggtaccaggcactgtgtcctcccaaagaaagaccaaaacagcaagtagataatcataccttgaagagggcatgaaagagggcactagaattcagcagcaaagtgacgaggaatctctgaggcatggaaggaaaggaaaatgaagcagcagcccagccagaatcagcttaaagccaggacaggctctgcagtgtggtgaaaaggtaaaaaagagagccccagtggtccatattcccactgtggacactgcaatcctagccaagggacggtctctcagccctcgcaggccctgagactactatagggagctgcctggagtgtatgtgatggtcattgtcccagagaaggagttggcactggatcatctgcacctgcccccaga

SEQ ID NO: 933377 - DNA, 811 bp, Homo sapiens
ggcatttgggttatttcacgtttttttactattatgaataatgctgctatgagaattcattgagaatttttcaactcttaggtagaaactattttcttaagtatatacctaagagtagaattgctgggttatatggtgactctatttttaattctttaagaaatgccaacctgtttttcaaactacctccaccattttatgtttccatcagaaatgtatgagaatccaatttctccacattttccacaacacttgttattttccatctttcttgatgatagttattccactcgatatcaaatggtatctcattgtggttttgatttycatttccctttcatgtgcttatagcccacttaaatatctttttcaaaaaactattcaaatcttttgatcatttcttagatcatttgtgttttattgtcgttgttgctgctgctgatttgtagtagttctttatatattctggatattaatccaattttcaaatatttttctcatattcattgggcttttttccccttccttggcagtatcctttaatgcactcaaatttttaacttaaatgaagtccaatttaactattttttgtcgctatgtttttggtgtcatatttaagaaagcattgcctaatctaaggtcacaaatatttgtaccattttttcctaaacatttacaattttagttatcacattaaggtctttggtcagttttgaattaattctcatatatggcatgaggtagacaaatttttccttttacatgtggatatccagttgtcccagcaccatttgttgaagactattcgttc

SEQ ID NO: 933378 - DNA, 650 bp, Homo sapiens
tttgttccttctgatgctcggatgtgttcagagtttcttccttctggtggttttgtggtctcgctggcttcaggagtgaagctgcagaccttcaaggtgagtgttacaactcttaaggtggggcgtctggagttgtttgttcctcccggtgggttcatagtctcgctggcttcaggagtgaagctgcagaccttcgaggtgagtgttacagctcataaaggcagtgtggacccaaagagtgagcagcagcaagatttattgcaaagagcaaaagaacaaagcttccacagtgtggaaasggaccccaatgggttgccactgctggctggggcagcctgcttttactcccttctctggccccacccacatcctgctgattggtccattttacagtgagcctattggtctgttttgacagggtgctgattggtacatttacaatccctgagctagacacaaaaggtcaccaaatccctactagattagctagatacagagtgtcgactggtgcattcacaaaccctgagctagacacagggtgctgattggtgtgtttacaaaccttgagctagatacagagtgacaatttgtgtatttacaatcccttagctagacataaaggttctcaaagtccccaccagactcaggag

SEQ ID NO: 933379 - DNA, 650 bp, Homo sapiens
tttgttccttctgatgctcggatgtgttcagagtttcttccttctggtggttttgtggtctcgctggcttcaggagtgaagctgcagaccttcaaggtgagtgttacaactcttaaggtggggcgtctggagttgtttgttcctcccggtgggttcatagtctcgctggcttcaggagtgaagctgcagaccttcgaggtgagtgttacagctcataaaggcagtgtggacccaaagagtgagcagcagcaagatttattgcaaagagcaaaagaacaaagcttccacagtgtggaaacggaccccaatgkgttgccactgctggctggggcagcctgcttttactcccttctctggccccacccacatcctgctgattggtccattttacagtgagcctattggtctgttttgacagggtgctgattggtacatttacaatccctgagctagacacaaaaggtcaccaaatccctactagattagctagatacagagtgtcgactggtgcattcacaaaccctgagctagacacagggtgctgattggtgtgtttacaaaccttgagctagatacagagtgacaatttgtgtatttacaatcccttagctagacataaaggttctcaaagtccccaccagactcaggag

SEQ ID NO: 933380 - DNA, 568 bp, Homo sapiens
gctatggacaccagcacctgccctggtggaggtagcaggggagtgaaattgactctatgagggtttttggttgtgtttttgtttagtgcactggttttgtgttggttggaagtgcacctccagccaggaggggatgmtttcaagagcgcatcagttgtggtcctatagggaatatgcaaatttgccctagggatacctggttaagtattggggtttctcagaaggtaggcagggccatagagctcccaaaacattatgactattgtctgcagctaccatggtgaatacagaaagactaccaggttggggcagggataggtgtgtctcagcccagcctctccttgtgtggggcttgttgtgactactgtatgggatgggggtgtggttctcagtctaatgaaattatattcccagggggattatagctgcctctgctgcatcatataggtcaccagggaaataggggaaagccggcagtcacaggcctcaccctgctcccacacagcctgcagtcctaaaggctggtctcactcccaccatatcccctcagcagcactgagaatatttc

SEQ ID NO: 933381 - DNA, 602 bp, Homo sapiens
tcattgtagcactattcacactaaccaaaatatggaatcaacctcagtgtccatcagtggatgaatatggaatgggaaagcttcccctgtccccctcacacggcatgtggctcgcttcttcagtgccttgctgctcaaacctctcggggagcatacagaggggcaggctttggggatccggcaccacggcagcgtctaggggcgaatatcatagctcccagtgggtgtgggttacagggtgctcttttagtttcgctctttgtttgccatctataggtggcttgtgttaaccagctcagttagaccctctaccttgttacaaggacagagggctttctgtatcctgagttcttgccttggtgtactggaasaattagatcacacgtgggcttggagaatgagtgcaaggttttattgagcggaggtagctcttagcagatgggggaagtcaagaggggatggagtgggaaggttttcccctggagtcaggcgctcagcggcctgggctctccctctgactgccccaggcaaactctgcgtcattctgctggttggtggcctgccgggatgctggtgcctgtcggtgtgtgtgttcctctgga

SEQ ID NO: 933382 - DNA, 814 bp, Homo sapiens
tcttgataaacatcttaagcaacagaaaacagggttcaagagcagagaaccagtctgacctcaaattcaccagggtggggttttttcccccatcctaataagcctgagggtactgcaggagatcagggtgtatttcagtccttatctcaaccacataagacagacactcccagagcggccatttattgacctccctccaggaatgcattccttccccccaggatattaactattaatattccttgctaggaaaagaattcaacggtctcttccctacttgcatgtccatttataggctctctgcaagaagaaaaatatggctctattctgcctgaccctgtaggcagtcagcccttatggttgtcttcccttgttccctaaaattgctgttattctgttctttttcaaggtgcmctgatttcatattgttcaaacacacatgttttacaatcaatttgtacaatagtggtcctgaggtgacgtacattctcagcttacgaagataacaggattaagagactaaagtaagacaggcataagaaattataagagtattatttgggaactgataaatgtccatgaaattttcacagtttatgttcagatattgcagtaaagacaggcataggaaattataaaagtattaattttgggaactgataaatgtccatattaaaatgaaatcttcacaatttatgttcctctgccagagctccagccagtccctctgttcaaagtccctgacttcctgcaacagttgtcgttgttgctgttatagagatggagtctctctctgttgcccagggtggagtgc

SEQ ID NO: 933383 - DNA, 646 bp, Homo sapiens
cagctgctatgaacacttccatctaggaaaatgacagcacattgtggacatggcatctaaccttctcctaacttccttatctcctcataggagagccaggatttggatcgttgtcgttgatagtacttttgagtgtgtagcataacatgaagcagggtgtggacactagaagttgtgggctgccttggccgggtgcggtgctcacacctgtaatcccagcactttgggaggctgaggcaagcggatcacaaggtcaggagatcgagccaatcctggctaacacggtgaaaccccgtctctactaaaatataaaacrtggtggctcgtgcctgtagtccgagctactcgggaggctgaggcaggagaattgcttgaacctgggaagcggaagttgcagtgagccgagattgcgctatgcactgcagcctacgtgacagaacgagactccatctcaaaaaaaaaaaaaagttgcaggctgcccttaaattttttttctggagttaagtggagtaaaaataaatagaaatataattaatagatagttcttaaccccaaaggccttagaatattctcaggagaattttaaattcagtgtactatcctttttagtttctcctggaccttaatggggtttcccttgtttttt

SEQ ID NO: 933384 - DNA, 429 bp, Homo sapiens
ctggggtcaattatcttctgaatgaataaacctccaactactctctggtctggaccaccatcccctccttgcccccgcaaaaaagttcctggccagtggctcacctctgtaatcgcagcactttgggggactgggatgagcggaccacctgaactcaggagttcaagaccagcctgggcaacatggtgaaaccctrtctctacaaaaaattaaaaaattagccaggcgtggtggcatgtgcctgtagtcccagctactcaggaggctgagctgggaggattgcttgagcccagaagcttgaggctgcagtgagccgtgatcatgccattgcactccagcctggatgacagagcaagaccctgtctgaaaaaataaataaataaaaattaaaaatcaggtagttgccaggcacagtggctcacatctata

SEQ ID NO: 933385 - DNA, 429 bp, Homo sapiens
ctggggtcaattatcttctgaatgaataaacctccaactactctctggtctggaccaccatcccctccttgcccccgcaaaaaagttcctggccagtggctcacctctgtaatcgcagcactttgggggactgggatgagcggaccacctgaactcaggagttcaagaccagcctgggcaacatggtgaaaccctatctctacaaaaaattaaaaaattagccaggcgtggtggcatgtgcctgtagtcccagctactcaggaggctgagctgggaggattgcttgagcccagragcttgaggctgcagtgagccgtgatcatgccattgcactccagcctggatgacagagcaagaccctgtctgaaaaaataaataaataaaaattaaaaatcaggtagttgccaggcacagtggctcacatctata

SEQ ID NO: 933386 - DNA, 567 bp, Homo sapiens
aatcaatgcccatatagaagcaacttaataataactactacatttaaaatgtgcatacttttaaacctaaccaactatacacacacatacacacacaacccacatttatatccacacatttataaagtgataaagttaagactattcattaattacattataatataaagtagcaaagtggcagaagtaccttaaaagtcaatcaggagtaggcaggttgaataaattatggcactccatataatggaatggaatgcaaaagagctgtttaaaccaacaaactamaattaaggaggctccttatgttctaatgtgcagcagaaattaacataggccaggcacagtggctcacacctgtaatcccagcactttgggaggctgaggtgggaggatcccctgagcctagtttgagaccagcctggacaacatagtgacagcctgtctctacaaaaaaattaaaaattagccagcatggtggcatgtgcctgtagtccaagctactctggaggctgaggtgggaggatcacttgaccccaggaagttgaggctacagtgagctgtgttcac

SEQ ID NO: 933387 - DNA, 567 bp, Homo sapiens
aatcaatgcccatatagaagcaacttaataataactactacatttaaaatgtgcatacttttaaacctaaccaactatacacacacatacacacacaacccacatttatatccacacatttataaagtgataaagttaagactattcattaattacattataatataaagtagcaaagtggcagaagtaccttaaaagtcaatcaggagtaggcaggttgaataaattatggcactccatataatggaatggaatgcaaaagagctgtttaaaccaacaaactacaattaaggaggctccttatgttctaatgtgcagcagaaattaacatagsccaggcacagtggctcacacctgtaatcccagcactttgggaggctgaggtgggaggatcccctgagcctagtttgagaccagcctggacaacatagtgacagcctgtctctacaaaaaaattaaaaattagccagcatggtggcatgtgcctgtagtccaagctactctggaggctgaggtgggaggatcacttgaccccaggaagttgaggctacagtgagctgtgttcac

SEQ ID NO: 933388 - DNA, 582 bp, Homo sapiens
tttgtttgaggcaggacttcagcaaatataacaagcaaacacatatttgatcttcctttccagaggtatcatctataaaaatgaaccactacttttaagtaattgagatggaagtcttctgcctcactccaggcagctgcaaccactggaaatagatattccatggatcttgttggattggatgatggtttcttaactactcttctttctcaatccaggcatatgaacatcatggtgataygtcaagatgtaccacagagaaatgataatgtaccacagcaaaaagagaactgtgttctgatatcaaaatggttgtggctatttgattatctatgcttaatgctctaaaacactgtttctagtcagaagcttaggtagatactctctcatctactgatttaacatggctgaatttacagttacagtggatatttgcaaagttgtagattacagcaattgatagcccaatctctggagtgaaatagaattggatatgaatcctgaccttattttagttttgtgatcttaggtaagttgctacttagttgcatcttcagttttttcatatatacatctcagctt

SEQ ID NO: 933389 - DNA, 664 bp, Homo sapiens
ttttgcatcagtgttcatcagagatattggcctgaagtttgttgtggttgttgttgtatctctgacaggttttggtaaaaggatgatgctggcctcatagaatgaattagggagaagtccctccttttcaattgtttgggatagtttcagtagaaatggcaccagctcttctacctcttgaagaattcagctgtgaatccgtctggtcctgggcctttttttgattggtaggctatttattattgcctcaatttcagaactcgttattggtctgttcagggattcagtgtcttcttgattcagtcttgggatggtgtatatttccagaaattcatccatttcttctagattttctagtttatrtgcatagagattatagtcttgtctgatggttgtttgtatttctgtggggtcagcggtgatattcctcttattatttctgattgtgtttaatacttctttattagtctagttagcagtctatctattttactatttttttaaaacagctcctggattgatattttgaagggtttttcatgtctctccttcagttcagctctgtttttggttatttcttgtcttctgctagccttggggtttgtttgctcttggttttctagttcttttagttgtgaggttgtcgatttgagatctttctagc

SEQ ID NO: 933390 - DNA, 644 bp, Homo sapiens
tattccccttgaataaaggggaggcctggtccctttgaggaaggaccccactacactactgacaatttatactgctaatctttctcccatgcttccccaaggagacctccggtcttttaccagggtaactggtcccctttcggggactactggacactggacactggctctgagctgacaatgattccaggggacccaaaacatcactgtggtcctccagttagagtaagggcttatggaggtcagrtaattaatgaagtttcagctcaggtctgacttacagtgggtcccggattcatcctgtggtcattttcccagtgccagaatgtataattgacacagacatacttagcaactggcagaatccccatattggctgactggtagtgtgaggcctattatggtgggaaaggccaaatggaagccattagagctgcttctacctagaaaaacagtaaatcaaaaacaatactgcatccctggagggactgtggagattagtgccaccatcaaggacttgaaagatgcaggggtggtgattcccaccacatccccattcaactttcctatttggcctgtgcagaagtcagatagatcttggagaacgacagtggattatcataagctgaaccaagtggtgacga

SEQ ID NO: 933391 - DNA, 634 bp, Homo sapiens
aaacctggcaagcttcctaccctctctgtgcctcagtctccacatatgaggactggacatgctaatggtctctatctctcgagttatcgttaggattaaatgagaaaatgtatatgtcaagtccctggtatatagtaaagatacagtaaatgtcaggcgttcattcattccacactcaataaatatttgttgcatatctgctatgcaaatgccactgttctaagctctccaggttcattagcaatacagacaaaagaaattcctstctctgggagcctacattccaatagaatgtgtgtgtgtgtgtgtgtgtgtgtgtgtgtgtgtgtgtgtatttaagtgtttgttgaatgggtggcggaactcattggcaatatgctggtttaatggtgctgggcctccttcctctaacactgagaagtttcctgttacaagggggggatactataaatatgcaggcctgtcttttatgtgggagactccgtttcctttaccagcaaaagaaaaagaaagggcaatggccactagatggcagtcttcagtgccggtaggtacagggcacaggaagggactggcctggggcagaggccctcactgaagcttccagcaaaggtgtgttgcagctggtcagtcc

SEQ ID NO: 933392 - DNA, 634 bp, Homo sapiens
ggtaaatacctagaagtgggattactgactcatggtaagtgaatatttatttttataaaaaactaccaaaatgttttccaatgtagatgtaccatatggcactcccaccagaaatatgagatttctagtttctccatatcttcactagcttttggtatgatccagcatttggtgtattgcttatttattttgctttaattttagccattccagtaggtgcatagtgatatctcattgtggctttacctgcatttccctgatgaccaatgatattaagcattttccatgtgttcatttgccatctgtattttttctttgttgaagtgtttattcacatcttttgccccttaaaaacatggttgtttgtctctttacaatataagtgttatgtcttttagatacagatctattatcagaaatgtgcttttcaaaactttcaagtctggagcttgttctttcctaaagtkcccttggaaaagctgatatttttaattttgaataagtcaaagttatcaatttttattcttttatggcttatactgtatgtcttatgtaagaaaccttcatctaacccaagctcacaaaggctttctttctcctatgttttcttttagatatttaagttttgaatttt

SEQ ID NO: 933393 - DNA, 609 bp, Homo sapiens
gggtgtaataccttctgcatgtgcagggtaatataaggcctttactgtgtcaccccatagagactggagctctgtgagaactgacatgttctataaataacaaatggtctgttctctcatccagatacttatttcctgtcagaatctgaacatatatattcatatatataaaatatatgcttacatattcatatattatatatgcttatatattatacaacatattaaattatttatattataaatacrtacatatttaacactaaaatattgtgttaaaaatgttgtattgcacatcataatccaatctccctaaacattcatttcacctttccccagcacaattacatagcaaccgtacgtttaacagagtcaggtttgtattcagtaaaactattcacgagattcctttatttttgttgttattgttgttgttggttggttcagaagcattgccttaaatcatcagcacaagggttttttctggaaatacaggttggttcaggaacaggtaatgacccacttaaggctcattatttagaaggagaattttgctgggaattatgaaaaatcttctacctcttaagagagtcatagaaagctccacac

SEQ ID NO: 933394 - DNA, 609 bp, Homo sapiens
gggtgtaataccttctgcatgtgcagggtaatataaggcctttactgtgtcaccccatagagactggagctctgtgagaactgacatgttctataaataacaaatggtctgttctctcatccagatacttatttcctgtcagaatctgaacatatatattcatatatataaaatatatgcttacatattcatatattatatatgcttatatattatacaacatattaaattatttatattataaatacgtacatatttaacactaaaatattgtgttaaaaatgttgtattgcacrtcataatccaatctccctaaacattcatttcacctttccccagcacaattacatagcaaccgtacgtttaacagagtcaggtttgtattcagtaaaactattcacgagattcctttatttttgttgttattgttgttgttggttggttcagaagcattgccttaaatcatcagcacaagggttttttctggaaatacaggttggttcaggaacaggtaatgacccacttaaggctcattatttagaaggagaattttgctgggaattatgaaaaatcttctacctcttaagagagtcatagaaagctccacac

SEQ ID NO: 933395 - DNA, 586 bp, Homo sapiens
agacaccaagtccctagactgcgcacaaaacagggaacctggtcctggcccacaaaaccatttttcttcctaggcctataggcctgtgatgggaggggctgctgtgaagacttctgacatgtcccggagacattttccccattgtcttggggattaacattcggctccttgtttcttatgcaaatttctgcagycagtttgaattgcttcttaggaaattggattttcttttctatcacattttcaggctgcaaattttctgaaattttatgccctgcttcctttataaaactgaatgccttgaacagcacccaagtcacatcttgaatgctttgttgcttggaaatttcttctgtcagataccctatatcatctctctcaagttcaaagttctacaaacctctagggcaggggaaaaatgccaccaggctctttgctgaaacataacaagagtcacctttgttccagttcccaacaagcccctcatctccatctgagaccacctcagcctggaccttattgttcatatcactatcagcatttttgtcaaagctgttcagcaagtctccaggaagtttcaaacttt

SEQ ID NO: 933396 - DNA, 586 bp, Homo sapiens
agacaccaagtccctagactgcgcacaaaacagggaacctggtcctggcccacaaaaccatttttcttcctaggcctataggcctgtgatgggaggggctgctgtgaagacttctgacatgtcccggagacattttccccattgtcttggggattaacattcggctccttgtttcttatgcaaatttctgcagtcagtttgaattgcttcttaggaaattggattttcttttctatcacattktcaggctgcaaattttctgaaattttatgccctgcttcctttataaaactgaatgccttgaacagcacccaagtcacatcttgaatgctttgttgcttggaaatttcttctgtcagataccctatatcatctctctcaagttcaaagttctacaaacctctagggcaggggaaaaatgccaccaggctctttgctgaaacataacaagagtcacctttgttccagttcccaacaagcccctcatctccatctgagaccacctcagcctggaccttattgttcatatcactatcagcatttttgtcaaagctgttcagcaagtctccaggaagtttcaaacttt

SEQ ID NO: 933397 - DNA, 591 bp, Homo sapiens
gaattgtactcccataattcccatgtgttgtgggaggtaatttgaatcatgggggtggtttcccccatactgttctcatggtagtgaataaatctcaggagatctgatggttttattaggggtttccactttgtatcctcrttttattttgctgccaccatataagaagtgccttttgcctcccgccatcattctgaggcccctcagccatgtggaactgtaaatccaattaaaccttcttttcgtcccagttttgggtatgtttttatcagcacgatgaaaatggactaatacagtaaattggtaccagtagagtggggcgttactgaaaagatacctgaaaatgtggaagtgactttggaactgggtatcaggcagaggttggaacagtttggagggctcagaagaagacaggaaaatgtcggaaagtttggaacttgccagagacttgttgaatggctgtcacaaaaatgctgatagtgatatgaacattaaggtccaggctgaggtggtctcagatggagatgaagaacttgttggtaactggagcagaggtgactcctgttacaacaaagagactggtggcatttt

SEQ ID NO: 933398 - DNA, 566 bp, Homo sapiens
aaggcaaagatccccaaaattaagagcgccatttttttttactggctcctggatccccaaaaggagggaaacactacgggagaagacagtgcagcgcttttactttgcatttcagtgcaaggcaagccaaagccaatcagccggtttagtagtcagcccatccctcatgggagtcttacctttcagtgggggctggggatggttccttatcttccaggtggccaagarcatgcttctctgatccaagagtgcaaagagtcaaagagtcaagtatccctccataactactattagctatcacttaaagtatatttcctacctaggtattacaaaccaaagcactctcataatgtgaagtaatttctgataccccccaaactcagataacgcgatgcaaaggatgcaaaaagcagaacagagcctttgattttgagagggatctatttgcttttaattcctgggatttcatgaggggaaaaaaaggttttttgttgttgttgttttgttttttccctaaaactgggtctgtggtgcctcttctgtttttcccaaggagtcccaggcta

SEQ ID NO: 933399 - DNA, 647 bp, Homo sapiens
accattatagagaaaatatttgcaaacatatgtctggtaagggactaatatccaaaatacagagagaacatcaagctaggtacagtgactcatgcttgtaatcttaacactttgggaggctaaggtgagaggatggcttgaggacagaagttcaagaccagccctgaacaatgtagtgagaccctgtctatataaaaaatcaaaaaaattagccaggcatggtggcatgtgcctgcagtactagccactcaggagcctgaggtagaaagatcacttgagttcaggaatttgaggttgcagtgagctatgatcatgccactgcacttcagtctgggtaacagagtgagatcctgtatctaaaacaaacaaataaacaataaccacaaaatccaattaaataatgaacaaaggacttgaatagacactactccaaagaatatatacaaatgaccaatagcacatgaaaagatgctcaatatcactaaacactagggaartgaaaatcaaaaccacaatgagttactacttgatacccattaggttggctgttataaaatatatatatataagattatgagtgttgacaaggatgtgaagaaattggaacctttgtgcattgctggtgggaatgtaaaatagtgcagctg

SEQ ID NO: 933400 - DNA, 595 bp, Homo sapiens
ggctgaggcaggagaattgcttgaacatgggagacgaaggtcgttcctcaacaaattaaacagaattatcacatgatctggcaattcctcttctgggtatatacccaagaatcgaaagcataggcttaaacagatatttgtatactactgttcasagcagcattaattcaccgtagccaaaaggtagaaacaccatccacgtgttcatgaacagataaatgaatgaacaatgtggtatattcgtatgaagaaatattatccagccttatgaaattctgacacatgctgcaacattgatgaactaagtgaaataaaccaaacacacaaaaagataaatattgtatgtttccatttacacaaggttcctaaaataggcaaattcagagagacaaaaagtagaatagtcattagcatgggcttggagaaggaggaaatgttcttgcttgttggatacagagtttcagtttggaatgacgaaaaatatctgaagatagataatgtttgcataataatgtgaatgtacttcataccagtgaattgtacacttaatgatggttaaaatgataaaccttacattatgtatattttaccataa

SEQ ID NO: 933401 - DNA, 646 bp, Homo sapiens
gatttctttccttgtttccttctaggcagggataatagaggaggcttatcattaataggaaggggagttatagggaggctaggatatgggggtaagctgagaggtcctcttgtgggatgtaaattagaagctttgmatagttgtggattctccttcaatgaaaagaaagcttggacataaggtatttcactccatttgccttccctcttacagaaaaggtcaagctcgctgacttcaagaatgaagctgcgggcctcacagtgagtgttacagctcttaaaggtggtgcatccgcagtttgttccttccagtgggttcatggtcacgcagacttcaggaatgaagccgcagacactcgcagtgagtgttacagctcataaaggtagtgcggacacaaacaatgagcagcagcaagatttattatgaagagtgaaagaacaaagcttgcacagcatggaagggaacctgagtgggttgccactgctggctcaggtggccaacttttattcccttatttggccccacccatgtcctactgattggtccattttacagagtgctgattggtccatttttacagaatgctgattggtgcatttacaatcctccagctagacagaaaagttctccaagtccccacctgacc

SEQ ID NO: 933402 - DNA, 670 bp, Homo sapiens
tacaaacagagatatttagactttctctctttccatttggatgccctttatttctttctcttgcctgactgatctggccaggacttccaatgatatgttgaataggagtggtaagagagagcattcttttcttgtgccaatattcaaaaggaatgcttccagcttttgaccattcagtatgatgttggctgtggatttgtcacagatggctcttattattttgaagtatgttccttgcacacttagtttattgagtttttacatgaaggggtgttgaattttattgaaagcctcttctgcctctattgagatgagcatgtggcttttgtctttagttttgtttatgtgattaatcatatttattgatttgcatacgttgaaccaaccttgcatcccaggtatgaagcctatttgaacatgatgaaatagctttytgatgtgctgctggatttggtttgcaaatgtttttgttttttgttttgtggggattctttcatagatactcatcaaggatattattggcctgaggttttctttttttgttgtatctgtacctggtttgggtgtcaggatgttgcttcatgggatgagttggggagaagtccttcctccttaatttttggaatagtttcagtagaaatggtaccagttcttctttgtacagccggta

SEQ ID NO: 933403 - DNA, 670 bp, Homo sapiens
tacaaacagagatatttagactttctctctttccatttggatgccctttatttctttctcttgcctgactgatctggccaggacttccaatgatatgttgaataggagtggtaagagagagcattcttttcttgtgccaatattcaaaaggaatgcttccagcttttgaccattcagtatgatgttggctgtggatttgtcacagatggctcttattattttgaagtatgttccttgcacacttagtttattgagtttttacatgaaggggtgttgaattttattgaaagcctcttctgcctctattgagatgagcatgtggcttttgtctttagttttgtttatgtgattaatcatatttattgatttgcatacgttgaaccaaccttgcatcccaggtatgaagcctatttgaacatgatgaaatagctttttgatgtgctgctggatttggtttgcaaatgtttttgttttttgttttktggggattctttcatagatactcatcaaggatattattggcctgaggttttctttttttgttgtatctgtacctggtttgggtgtcaggatgttgcttcatgggatgagttggggagaagtccttcctccttaatttttggaatagtttcagtagaaatggtaccagttcttctttgtacagccggta

SEQ ID NO: 933404 - DNA, 700 bp, Homo sapiens
ctcaacccacggaggcccctccaaggctttcaatcccgcctttcagccgtcaccccgcgagtgtgcccggcggctcctggagccccacagcacagggcaccagacaagggtgccgaagccccgggggggccgcgccatctgtccccccaggaggaggagagggctccatcctctgctgccccgattcactgtttgctggggctgctgctttttcgaacaatagctttattgagatgtaattcacatattgtacaagtcactcacctgcagtgtaccgttcagaatatgcgagaacagtggggtgttttgtgtattcgcagagctgtgcagccgtcagcacagtccatcttagaacattttcatcacctcaaaaagaaaggctgccargtgtggcggctcacacctgtaatcccagcagtgtgggaggccgaggtgggcggatcacctgaggtcgggagttcgagaccagcctgaccaacatggagaaaccccatctctactaaaaatacaaaattagtcaggtgtggtggcaggtgcctgtaatcccggctactcaggaggctgaggcaggagaatcgcttgaacatgggaagcagaggttgcaatgagcccagattacaccactgcactccagcctgggtgacagagcaagactccatctcaaaaaaaaagaaagcctatgtcctcagtcacctcccca

SEQ ID NO: 933405 - DNA, 700 bp, Homo sapiens
ctcaacccacggaggcccctccaaggctttcaatcccgcctttcagccgtcaccccgcgagtgtgcccggcggctcctggagccccacagcacagggcaccagacaagggtgccgaagccccgggggggccgcgccatctgtccccccaggaggaggagagggctccatcctctgctgccccgattcactgtttgctggggctgctgctttttcgaacaatagctttattgagatgtaattcacatattgtacaagtcactcacctgcagtgtaccgttcagaatatgcgagaacagtggggtgttttgtgtattcgcagagctgtgcagccgtcagcacagtccatcttagaacattttcatcacctcaaaaagaaaggctgccaggtgtggcggctcacacctgtaatcccagcagtgtgggaggccgaggtgggcggatcacctgaggtcgggagttcgagaccagcctgaccaacatggagaaaccccrtctctactaaaaatacaaaattagtcaggtgtggtggcaggtgcctgtaatcccggctactcaggaggctgaggcaggagaatcgcttgaacatgggaagcagaggttgcaatgagcccagattacaccactgcactccagcctgggtgacagagcaagactccatctcaaaaaaaaagaaagcctatgtcctcagtcacctcccca

SEQ ID NO: 933406 - DNA, 756 bp, Homo sapiens
tcactatctgccgtgtagtgttggcgtgcacacacaagtcactatctgccgtgtagtgttggcgtgcacacacaagtcactatctgccgtgtagtgttggcgtgcacacacaagtcactatctgccgtgtagtgttggcgtgcacacacaagtcactatgctgtgtagtggcgtgcacacacgtcactatctgctgtgtagtgttggcgtgcacgcacatgtcactatctgctgtgtagtgttggcgtgcacgcacaagtcactatctgctgtgtagtgttggcgtgcacacatgtcactatctgctgggtactgttggtgtgcacgcacgtgtcactgctgtgtagtgttggcgcgcacgcacaagtcactatctgctgtgtagtgttggcgtgcacacatatgtcactatctgctgtgtactgttggtgtgcacgcacacaygtcactctggcaactccatggggcaggttttagtatcccaatttacaagtgaggaaacagtgacctctttcaggggggttaagctcttatgaaaattgtaattaatacttattgagcatgaacaatttcctaatagccgatatacccagctcccatttcccaaatgactaaattaataggttcctggtgggttgctggcagcatgggaaggcggcgcccatgtgtcccgagcctccatccgtaacatgcccctctttttccaccattcgtgtaaggacccctggcgtttgacagtcgtgtaccccacattct

SEQ ID NO: 933407 - DNA, 597 bp, Homo sapiens
gttggtggatctggtagaactcagcttatgaagggctgttgtggctgcatagccacttgacgtcttctggtcagatgttcagtttctatcgtgctctttagctgctagtagtcattttttgaatggtgtattagtctctgctgtacacggcatggccctgctacagaattctagtggtctacattttgattctcctattaggatttgctrtaatctccacatggtatattttcccttcacaaatatctctagtaccatagggtctgccaggtctatggcacaagcattaagcctccttgcatacctgactgacctgctgaagtaccctttcctggtctgggccccattcaaacctggtgccttccattttagccatgcagtggattggcatagtattctcaagtgtgacatatgcttcctttagcatcagaagaagtatattaagcactgtgcttccattttattgctggaacatgggagaagccataatttgccctttactttggagggaatgtcctagcatgccccagacacttggacccctaatattttcgctaatgttacaagtcccttaatcttcctagctttctgcaggtc

SEQ ID NO: 933408 - DNA, 747 bp, Homo sapiens
acctgatttcttcaaggttccatttcagtgactgtaaaattcagctactaccagctattttgtggggttattacaaagcttaaatgagacaaggttctgcaagtaccctgcaaattatgaaatacaacccagatgccagtggttggtgtctgccactgagccatgcctgctgggtagaaaggaaacccaaactccccggtggcacagtcccacccgctggtgggtggcagccatggtgagagttgcccccgcagcattcacacccacaggcgaggaaccctttcttgcaagccctggagtcctggccccctcagagcctggccttcacaggctgaagagcaaagtgtgagcgctggggcaggcgggggagaggtcaagcgaggcttgcagrtgttttctgcaggaagctctgttctgcctagcttctcccatcctcgcggggccaaccgcagaccaattcctttcagatgcttgaaacaggcttccctccagtctgtgccaacaggacagctcccaaaccaaggctcagcttcttgctctggccttctgcagcaggacaaccccctcacaggtcacctaagggtcccatggtgatgggatgccatctgcccctggatggtggggggagtgggaggggctaacaatggaacatgggcagggggatgtcactcaaccttgaataagaccctagagggatgccctctagggtcctgcctatgagcaaaggctctggggcctgactgtcag

SEQ ID NO: 933409 - DNA, 629 bp, Homo sapiens
ctgtccggcatttgtctatacatcctgacccttgaccctccagtttccccataatagccgggacaacacttcctgcacagagaggatggtcactgattcagtgaccttaagctggaattttccatcacaagacacatgagataaaggcgagacatatgacaagggatggctggctggtctgcagaggaggcagacacacaggaagggctaagacaggtgagtgaacctaggtcatgccctgtgcctgggtcacactgcaggcctgtcatgccatggtcccagtggtcacaggaggcagacactgttcctccccaatgtattctatctaaattcctccatttaacatttgaaaactccacctaatatgctcagaagccatttctgggactacgagacaatctcctatattgtttgactaacaarcaatgtgcctgaccttcctgggcttgtaagtggtggaacaggactcgaaactaggtcggctccaagcccagtccgtaacaccacccaacgctggtgctctttccatggtgggtgagaaccctggagggacctgaaccaaggcgagggcacagggcgagtggaaagaaggtcccaaacacgtgggaccttcttttccgctgatgcag

SEQ ID NO: 933410 - DNA, 653 bp, Homo sapiens
gtgtctcagggtgaatattcatatgcttttcctgattccactctttatataatcccagcactttgggaggcggaggtaggcagatcacaaggtcaggagtttgagagcagcctgaccaacatagcaaaacccctctctactaaaaatacaaaaattagctgggcgtgatggtgcgcgcctgttgtcccagttactcaggaggctgaggcaggagaattgcttgaacctgggaagcagaggtgccagtgaaccgagatcgcgccattgcactccagcctgagtgacagagcgaaactccrtcccaaaaaaaaaaaaaaagatttacaattcggatgtttgaataatctaaggcagggtcagcaaatccaaggcagggtcagcccttctgtaaagggccagatagtatattcttcaggctttgcaggccacacaacctctgttgtaactatgtaactctgccccagtgtggcaaaaaaggctgttcctgctaaaggtggccagtctcacctgctttttgtgaccagtctcaaagcagccacagctcttgcctgagtgctgagggtctcaagatctgctggcacactggctgggaagcttggtctagagataagcctttctagaagacactttcaacccctacctcaccctctctc

SEQ ID NO: 933411 - DNA, 475 bp, Homo sapiens
gaacttttatttataaattactcagtctcagatattctgttataacaatagaaaacaaactaagacagaaaattggtaccaaaaattggggttgttgctataacagataccttaaaaggtggaagcagctttggatctgggtaatgagtaggggctggaagggattggaggatcagcctagagaaaatctgtattgctgtaaacagaacattaagggcaattttggtgargagttagaagaagactagaccagtgtgctcaggatgcagaaaaagcagtcagaggaaattattttccagctttaagactaaacattgttttgtctgttgggttttggacttacttggcctgctactcctttcttcttacctatttctcccttttggaatgggaatgcctatcctatgcctgtcccaccataatattttaaaagtaggtataatattttaaaagtaggtaacttgtttacatgtac

SEQ ID NO: 933412 - DNA, 637 bp, Homo sapiens
gttcatcccaatctttcctgactctcagctctgtctccatgactctggagaacacttgattccacgtagctccactctcggttccgtagcctggaaatactcttgattcaataacctgggacaattgtaaggcttctctaatttgtttcttatctttcatggatcactggcatttgttgtcttatgtccattaacttgaaaagtattgttccrtatattttacattttttgtttgtttcatgtgaagtgtagacttgctccctctaattccatcttggatagaagcaggagttcttcacatattcttaaaatacaaatatttacatggttgcaattagagaatatgtctcatattacttgcaaataaacatatctcagacatttgcaatacttctaaatagtttcataattgccattttaatagctgcaaaatatttcacagtgtgccaaatctacttgagcacagtgtatacattaatgagtgatttatgtcccatctcttactaaaaatgaatttcagatggcttactgacaaaaaggcctactcaataagagtaatagagtatgcattagaaggaaaaataagattgaaagaaaagaaggaagtaataatgccagttatgatagtatctgctgt

SEQ ID NO: 933413 - DNA, 681 bp, Homo sapiens
tttccccagggttattgcttgctgagaaaagaattcagtgatatttctcttattcactttctgcaagaagaaaatatgactctgttctgcccggccctgtgggcagtcagaccttgtggttatctcccttgttccctgaaaatcgctgttatccttttctttttcaggatgaccagagttcatatcgttcaaacacacgtttgataaacaatttgtacagttaaagcaaccatcacagggtcctgaggtggcaaacatcctcagcttacaaagatggtgggattaagagattaaagtaaagacaatcataggaaattataagagtattgattggagaagtgataaatgtccatgaaatcttcacaatttatgttcttctgccacagcttcagccggtacctccgttcagggtccctgacttcccagaacagacattggctcattcarcagccaccacatgcccctctccagggatctacttcataaccacccagaaaaggtcattttgctacaggagctaaaaagaagttatttaggcagatagtgagggtaaaggagtccttggcaaggcttgccttttaacaaaaagcaaccccaaataatttcttttctaacaaagagcagcctgtaaaatcgagctgcagacacagataagcaagctggaagcttgcgcagggtgaa

SEQ ID NO: 933414 - DNA, 622 bp, Homo sapiens
ggctcaggacaaaaacagaagagaagacaatgttatttttattgtcttattgatacaattgcaatgctaatttttgtaggcaaatctaatttaccaaaggaaaaaccagaggatcaatatatagcatacagtttttaaaaaatttctcctgcaaagaagtcagcttgtgattatttttgtcttgagatttattttcagggaaatataatgagataactggctaggtgmtacttttcagttacttctctaatactgtggtgcaagcttaggaattggttttataaacacttccaaaccatacctcccatccctcagttgcattcctttatgtgggcaataaacaccacttgcagcgttatgaatagagtgagttttagtgggtgtcctccaggagctcatctactcttctatctttagtggcccagggctgattaaaggtctgcactggctaacataatataatatttatcaagagtctagtaagcatgtttaagtgtcagaatgacctgggtttgatatctagttctagttctgtctagctgtgtgaccgtaagctacttaaccttgctttgctgccattttcttacattgcacttcacaggttggttatgaatattaaatg

SEQ ID NO: 933415 - DNA, 589 bp, Homo sapiens
ttgggaggttgaggcgggaggatcacttgaacccaggatgcagaggttgcagtgagctgagatcacgccactgcactagagaggctggatgcaatggttcacatctgtctgtaatcccagcactttggaaggccaaataggaggactgcaaagaaaaggaagagagtgaccagtagctctgagaggtgatgggggtattattggatgccaggatgattgtttttaaaggtgaaacagatctaagtatctttaaaagacagacagataggccaggtaagatggctcatgcctttaatcccagtattttgggaggctgagggagctggattgcttgaactcaggaattcaagactaacctgagtaacatartgagaccctgtctctacaaaaaataaaaaattagctgggcctggtggtatgcacctatagtcccagctactcaaggagtctaaggtgggaggatcacttgagcccaggaggttgaggcaacagtgagctgtgttcatgccactgcaccctatcctggatgacagagcacaattctgtctcaaaaaagaaaaaaatacaaataagcaattaaaaataccaa

SEQ ID NO: 933416 - DNA, 572 bp, Homo sapiens
cctgggagacagaggttgcagtgagccgagattgcatcactgcactccagcctgggtgacagaggtgagactccatctaaaagaaaaagcaaacaaacatcaaatcagttgtttataagaggcaagtgacataattttgctacttaatactaaagatgatttctttgtcttcctattttttctattttaggggaaacaatagtaaatgtcttagactttaagaaggatgctgggctgtggcacggcatgtttgcggtaagctactcagatttaaggcccttagtgtaaattgtgcttgagataaggccagcatgttgtataactggagcatctctcagtgcttgtttgaaatttaaatccccaaaaggtcagtaatattttccagaggcyatataacctttccactggacagaatgttttgaatgactgccatgcataagctgcatgctgcaactgaagaagagtaacaaggtagatggggattctccccatcagagaggaacaggtagcatactatgggtgttagaaaaaggtgacttccttctaggtctgggcttcaaggcagtttttgt

SEQ ID NO: 933417 - DNA, 602 bp, Homo sapiens
acctgactgttaggaggaaaactaacaaacagaaaggaatagcatcaacatcaacaaaaaggacatccacaccaaaaccccatctgtaggtcaccaacatcaaagaccaaagttagataaaaccacaaagatggggagaaaccagagcagaaaagctgaaaattctgaaaatcaaagcgcctcttctcctccagaggatggcagctcctcgccagcaacagaacaaagctggatggaaaatgactttaacaagttgatggaagtaggcttcagaagatcggtaataaaaaacttatccaagctaaaagagcatgttcaaacccactgcaaggaagctaaaaaccttgaaaaaaggttaaatgaatggctaactagaataaacagtgtagagtagaccttaaatgacytgatggagctgaaaatcatggcacaagaacttcatgatgcatgcacaagcttcaatagacgattgaattaagtggaagaaagggtatcagtgattgaagatcaaatgaatgaaataaagggagaagacaaggttagacaaaaaagagtaaaaagaaatgaacaaagcctccaagaaatatgggactatgtgaaaa

SEQ ID NO: 933418 - DNA, 807 bp, Homo sapiens
agatctacaaggaaaactacaaacccctgctcaaagaagtcagagatgacacaaacaaatagaaaaacattccatgctcatggataggaagaatcaatatcattaaaatggtcatactgcccaaagcaatttatagactcaatgctattcctattcaactaccattgacattcttcacagaattagagaaaactattttaaaatgcatgtggaaccaaataagacctgcatagccaaggcaatcctaagcaaaaagaacaaagctggaggcatcatgctacctgacttcaaagtatagtacaaggctacagtaaccaacacagcaaggtaccggtgaaaaagcagacacatagacaaatagagaacagaatagagaacccagaaaaaagaccacactcctgcaactatctgatattcaacaaaggtgacagaaacaagcaatggagaaatgactcctgattcaataaatggtagtgggataactggcyagccatatgtagaagactgaaactgaacccattccttatgccacatacacaaatttattcaagatggactaaagatttaaatgtaaaacttgaaactatgaaaaccctggaagacaacctaggcaataccatttaggacacagacacaggcaaagatttcatgatgaaggcacccacagcaattgcaactaaagcaaaacattgctaaatgggatataattaaactaaagagtttctgcacagcaaaagaaactatcaacagagtaaacctacaaaatgggagaaacaacctaaaaaatgggagaaaattttgcaaact

SEQ ID NO: 933419 - DNA, 807 bp, Homo sapiens
agatctacaaggaaaactacaaacccctgctcaaagaagtcagagatgacacaaacaaatagaaaaacattccatgctcatggataggaagaatcaatatcattaaaatggtcatactgcccaaagcaatttatagactcaatgctattcctattcaactaccattgacattcttcacagaattagagaaaactattttaaaatgcatgtggaaccaaataagacctgcatagccaaggcaatcctaagcaaaaagaacaaagctggaggcatcatgctacctgacttcaaagtatagtacaaggctacagtaaccaacacagcaaggtaccggtgaaaaagcagacacatagacaaatagagaacagaatagagaacccagaaaaaagaccacactcctgcaactatctgatattcaacaaaggtgacagaaacaagcaatggagaaatgactcctgattcaataaatggtagtgggataactggccagccatatgtagaagactgaaactgaacccattccttatgccacatacacaaatttattcaagatgsactaaagatttaaatgtaaaacttgaaactatgaaaaccctggaagacaacctaggcaataccatttaggacacagacacaggcaaagatttcatgatgaaggcacccacagcaattgcaactaaagcaaaacattgctaaatgggatataattaaactaaagagtttctgcacagcaaaagaaactatcaacagagtaaacctacaaaatgggagaaacaacctaaaaaatgggagaaaattttgcaaact

SEQ ID NO: 933420 - DNA, 782 bp, Homo sapiens
cacaaagtcttagcttattccagtattaaccaaaaaattcaagtccaaagtctcatctgagacaaggtaagtcccttctgcctacgagcctggaaaattgaaagcaagttagttacttcctacatagagtgagggtataggcattgagtaaatacacctgttccaaatgggagaaattggccaaaacaaaggggctacaggccctatgcaagtcagaaatccaatagggcagtcattaaaccttaaagttttaaaatgatctcctttcactccatgtctcacatccagatgatgctgatgcaagaggtggtctcccatggccttgggcaactctgcccctgtggctttgcagggtacagccctcctccgggctgcttttacaggctggcattgagtgtctgtggcttttccaggcatgtggggcaatctgtcagtggatctactactctggggtctgaaggacggtrgccctcttctcacagctccactaggcagtgccccagtggggactctgtgtggtggctcccaccctacatttccctctgcactgccctagcagaggttctccatgaaggctccacccctgcagcatacctctgcctggacatccaggtatttccatgcatcctctgaaatctaggtggaggttccccatcctaattcttgacttctgtgcacctgtgggcccaacaccatgtgtaagctgccaaggcttgaggcttgcaccctctgaagcaatggcctgaggtataccttggtcccttatagccacagatggagct

SEQ ID NO: 933421 - DNA, 643 bp, Homo sapiens
gaatgactcttctccaaatgattgcaactcctctccagcaagggcacaaacctggatggagaatgagattgacgaattgacagaagtaggactcagaagatgggtaataacaagctcctctgagctaaaggagcatgttctaccccaatgcaaggaagctaagaaccttgataaaaggttacaggaactgctaactaaaataaccagtttagagaagaacataaatgaccagatggagctgaaaaacacagcacaagaacttcgtgaggcatatacaagtatcaatagctcaatcaatcgagtggaagaaaggatatcagggattgaagatcaacttaatgaaataargtgtgaagataagattagagaaaaacagaaagaaaagaaacaaacaaagcctccaagaaatatggaactatgtgaaaagaccaaacctacgttagattggtgtacctgaaagtgacaaggagaatggaatcaagctggaaaacacacctcaggatattatccaggagaacttctccaacatagcaagacaggccaacattcaaattcaggaaatacagagaacaccactaagatactccttgagaagagcaaccccatgacacataatcatcagattctccaaggttaaaacaaa

SEQ ID NO: 933422 - DNA, 643 bp, Homo sapiens
gaatgactcttctccaaatgattgcaactcctctccagcaagggcacaaacctggatggagaatgagattgacgaattgacagaagtaggactcagaagatgggtaataacaagctcctctgagctaaaggagcatgttctaccccaatgcaaggaagctaagaaccttgataaaaggttacaggaactgctaactaaaataaccagtttagagaagaacataaatgaccagatggagctgaaaaacacagcacaagaacttcgtgaggcatatacaagtatcaatagctcaatcaatcgagtggaagaaaggatatcagggattgaagatcaacttaatgaaataaggtgtgaagataagattagagaaaaamagaaagaaaagaaacaaacaaagcctccaagaaatatggaactatgtgaaaagaccaaacctacgttagattggtgtacctgaaagtgacaaggagaatggaatcaagctggaaaacacacctcaggatattatccaggagaacttctccaacatagcaagacaggccaacattcaaattcaggaaatacagagaacaccactaagatactccttgagaagagcaaccccatgacacataatcatcagattctccaaggttaaaacaaa

SEQ ID NO: 933423 - DNA, 601 bp, Homo sapiens
tgcaaaggatgcaagatttcattcttttttaatggctgtgtactattgatgaatatgtacaacattttctttatccagtccaccattggtgggcatcttcgttgattccatatcttagttattgtaaatagtgctgtgaggaaagctcctagagctgataaacaacttcagtaaggtttcaggatacaaartcaacgtacaaaaatcagcgacatttccaaacacccataaggtccaagctgagagtcaaatcaacaagtgctattctttagagcctttgggaacctgcaattcattctcttcagaaagggcaggacatttctatgtgtgtgtagagcacctttccacattttccagtatttcttcttttattcttgtaagcagtaaaggctccctgtaagcgatcatcacaattatcagggaagctaatttggtataggcaaaggtaagaaaatgtaacacactgactcttttcctgaggtttataacacctaagaaaagataaggttcatgaactatcttggtttcttctctttttgcaagaatgtagtatattaatttgaaaaaaatccagagtaattccacgaccaattttctccat

SEQ ID NO: 933424 - DNA, 601 bp, Homo sapiens
tgcaaaggatgcaagatttcattcttttttaatggctgtgtactattgatgaatatgtacaacattttctttatccagtccaccattggtgggcatcttcgttgattccatatcttagttattgtaaatagtgctgtgaggaaagctcctagagctgataaacaacttcagtaaggtttcaggatacaaagtcaacgtacaaaaatcagcracatttccaaacacccataaggtccaagctgagagtcaaatcaacaagtgctattctttagagcctttgggaacctgcaattcattctcttcagaaagggcaggacatttctatgtgtgtgtagagcacctttccacattttccagtatttcttcttttattcttgtaagcagtaaaggctccctgtaagcgatcatcacaattatcagggaagctaatttggtataggcaaaggtaagaaaatgtaacacactgactcttttcctgaggtttataacacctaagaaaagataaggttcatgaactatcttggtttcttctctttttgcaagaatgtagtatattaatttgaaaaaaatccagagtaattccacgaccaattttctccat

SEQ ID NO: 933425 - DNA, 785 bp, Homo sapiens
gattcccttcagttaaaggtcctggaagaggtgtatgagccctaatgtgagtgatattaaaaagagtgcattctagtcctaactgctgtttgcaattgggtaaataaagtcatcagttgttcatctgtatcaaatcataactgagcattttcaattaattgtgtggaatgaaccacatatgaagaatcagaaatcacattaataggcataataaaagcagtcaatacctcaattacagctacaagctcggctttttgagctgaagtatagggagtctgaaaaaccttacctttcaagccagaataagaagatttaccattactagacccatctgtaaaaacattttcagcaccttcaattggtttaaatttaattttagggagaatccaattagttaatttcaaaaattgaaataattttgttttcggaaagtgattttcaagaacacccgtgaaatcagctaaatgggtttgccaagtaagactatttataaaggcttgctgtatttgtgccttcgtgagagggacgacaatttttccaggatcatatccatgtaaattaacaatccaagttctcccatttcctatcatagtagcgatttgatytaaataaggagttagagtccatgaattagtatgtggaagaaaaagccattctactaagtcctgctcttagacaataacaccagtaggttaatgctgagttggaaaaatcagcaaatctagagtcttctctggttctgttctatttatttgagtcttatgcacttgcttctcaatcagctg

SEQ ID NO: 933426 - DNA, 584 bp, Homo sapiens
aacctagaaagtaacctgtcctaggttttataccccagcagtcacataaagtgctgagctgaagcattgaagaacatcctgtttctaggggggactggaacactgctcaggccgttctggtcaatccctccttatctcaggattttgcattcccagcaagttctacagttattcccaagaactacaagcagaaaatagggaggaactgggttgatccaaggccacatggaaaattggcctgtagtataaaatactgttctctctccttaagtaaattcttcattttaaggttaggcagcttctagctgcatagttatttttctgtactttttcaaaaacctcagtttctgaacctctctgcttctgtgggatcttgcaaagcactgaattgyccaattttaaatatgttttgtatctgtttgtttttatgtgtttctgttgttgcaagaaacatcattggaacacaagtgggtaattgttgtattagatttcaatgaagaaaatatgttaatatataaagacttttatttgctgaaaaggcagatgaaaaatttgcaatcaatgttaactcgacataaggtaga

SEQ ID NO: 933427 - DNA, 615 bp, Homo sapiens
aggcaggagaatcgcttgaacgcgggaggcggaggtttgcagtgagctgagatcgcgctactgcactccagcctggcaacagagtgagattccgtctcaaaaaaaataaaataaaataaaaaataagtcactaaggcccagagtgtgagagtgcgtgtgtgtgttgtgtgtttgtgcacacgtgcaagcgagtgaaaaagtgakactcagattatcctccataataaccataataaccagatgtgtatatctatctggagtgttttttctgccttccttcataattagtttaaagtcatattaaacagattttccagtctcaaagaaaacaaattttccctagatgctgtcagatggacactcgagcttcaaacctaacaatgcctaatatcaccctctctttcccaaccccctctgtgttggtgtgtgtgcatatgcgtgtgtatgtgtgttgtcatgagcctgtgaatgaatgaatagatgcatacattaaagcataaaatgtagttgatatggtgggacttagcatagtataaatgctatatattttagcatttatgcatagtatatattagcatttgtacatagtataaatattaggattaaacatttcta

SEQ ID NO: 933428 - DNA, 696 bp, Homo sapiens
cacatctggccatgttttcttagccaaccacatctttatcgcaaaagaatgacatttcaagcagtagcttcttagatttccattcagtcttggtccgtttttctggccttctgtgggtgtgctgtggggatgatgtctatgactttttcttaattatccagaaaattctggccaagcaccttttcttgcagaggggagaaggtgaagaggtttcaggagagaaaagtatatgtgtgggggcgtcagaacatggcattctgatgaatgtggtcttatgctgggaagaaacctccagggctgaaatcaccaggaactcaatatctgtttacaaaactggccttgaggattgaagctcagaacacaagactcttgccagttgttctaagaaagcttctgctctttcccagtcattcaaactgcaccaccttatcgacttcccctcacggtgaatgctcaggatctccttggcaacgtgggtgaagatacctgctggctctcttgacagttctcgtctttggcttggccaataaaccccctttakggaagtagaaagatggtggcaacagacagctcctcagctccacctgccttcccttcttcaggggagcttatgaccatcagggtggctgtgatgcttccctggatgtttggctcacagtgaagaagcatgaggacaaatacacagacaacaaaaac

SEQ ID NO: 933429 - DNA, 743 bp, Homo sapiens
ggagacccaaagtcagtagctccattctggagccaggtcattctgaagattgtccagctcttggaggagaggagacccatagtgggtagctcctttccacaggcaggtcatcctgataaattgaggagactaaaaatgggtagcttcttcccagagctggtagtcccaacatccttgtgagtctgtctcatacaccctgagtccagggtttttatgggcccagaagggaggaaktgtgtgttgacgggttcgcaggcaggcccaggaaaagtactataatttctcactccagaccacggactccacttggaactggcagcccagctctcaggcttcaggctgtccctggcttgaaggtggggtttcactagcgacccatcctttccttccagaaacttgtctccctctcacaatcaacatgccatccacagcacccagcctgtttatgctgaggggcacctgcaggcccatgatgagcttccctcaccccccttcaaccttcttttgcttcttgacacccaaagtctggagggggtcaaggcagcaggggctggaatgtcagcaccaccccatgtgtgcacacacctgcccagatctcaatagtgcctgggcttggccacatattcgctccacactggaatgggcaccaggaacagggagatgccagagaatgggagaaagcacttctgagcctgcacgggcagggatttttccaggccccggaaaatgcaggaatgcctggg

SEQ ID NO: 933430 - DNA, 743 bp, Homo sapiens
ggagacccaaagtcagtagctccattctggagccaggtcattctgaagattgtccagctcttggaggagaggagacccatagtgggtagctcctttccacaggcaggtcatcctgataaattgaggagactaaaaatgggtagcttcttcccagagctggtagtcccaacatccttgtgagtctgtctcatacaccctgagtccagggtttttatgggcccagaagggaggaagtgtgtgttgacgggttcgcaggcaggcccaggaaaagtactataatttctcactccagaccacggactccacttggaactggcagcccagctctcaggcttcaggctgtccctggcttgaaggtggggtttcactagcgacccatcctttccttccagaaacttgtctccctctcacaatcaacatgccatccacagcacccagcctgtttatgctgaggggcacctgcaggcccatgatgagcttccctcaccccccttcamccttcttttgcttcttgacacccaaagtctggagggggtcaaggcagcaggggctggaatgtcagcaccaccccatgtgtgcacacacctgcccagatctcaatagtgcctgggcttggccacatattcgctccacactggaatgggcaccaggaacagggagatgccagagaatgggagaaagcacttctgagcctgcacgggcagggatttttccaggccccggaaaatgcaggaatgcctggg

SEQ ID NO: 933431 - DNA, 585 bp, Homo sapiens
agtgctgacataggatctacatgttagaaaatatttacgtttccctatgtgattgatattagtacaatgctaaagtaattttctgaaaaaatacaaatataaatgcactcattcaatttcttaagtcaaaataattttgctgatctaatggcaaaggctcttcaaaagcagggtgaagggcataatcaccaggccccaacttgcctgatatagtaactccataaccactcttaccaaggtctataggctatttaattgctttctattttaggttgtagctgtattctttagaatttcaaataaggttttcaggccaaaaggcaatgggagtggctyatcaaaattcagagaattcagatttctttggtgtttgcaggttaatccctttgttatacaaagttgattgacacggaggattttccttaaatcaccaagccgtgcaaggacagtgctaggactacagttgaggtattcagaatccaagaacacctcatgctgacctttaattcctgatccttacaattggttgcatgctgcattttatctagtttcaaaagataataaggcaataaaattaaatattca

SEQ ID NO: 933432 - DNA, 585 bp, Homo sapiens
agtgctgacataggatctacatgttagaaaatatttacgtttccctatgtgattgatattagtacaatgctaaagtaattttctgaaaaaatacaaatataaatgcactcattcaatttcttaagtcaaaataattttgctgatctaatggcaaaggctcttcaaaagcagggtgaagggcataatcaccaggccccaacttgcctgatatagtaactccataaccactcttaccaaggtctataggctatttaattgctttctattttaggttgtagctgtattctttagaatttcaaataaggttttcaggccaaaaggcaatgggagtggcttatcaaaattcagagaattcagatttctttggtgtttgcaggttaatccctttgytatacaaagttgattgacacggaggattttccttaaatcaccaagccgtgcaaggacagtgctaggactacagttgaggtattcagaatccaagaacacctcatgctgacctttaattcctgatccttacaattggttgcatgctgcattttatctagtttcaaaagataataaggcaataaaattaaatattca

SEQ ID NO: 933433 - DNA, 603 bp, Homo sapiens
ctggctgctttcacagtctggtgttgagtgtgcagcttttccaggtgcacagtgcaagctgttggtggatctatcattcttgggcctggaggatggtggccctcttcttacagctccactaggcagtgccctggtggggaatctgtgagggggtccaatttcacatttccctttcacactgccctagcagaggttctccatgaggtctctacctgtgaagcaaacttctgcctggacatccaggtgtttccatacatcctctgaaatcgaggcagaggttcccaaacctcaattcttgacttccatgtgcctgcagacccaacacyatgtgaagtcaccaaggctcgggcaatgaccaagcaatggcctgagtatattggcaccttttaaccatagctgggacacagggcaccaagtcccaagacaggcacccaagtcccaaaactgcaaggcctggggcccagcctgctaaaccattttttcctccttggcctacgtgcctgtgatgggaggggctgccaccaacatctctgaaatgccctggagacattttccccattgtcttggccattgacatttggctccttgttatttaagcaaatt

SEQ ID NO: 933434 - DNA, 638 bp, Homo sapiens
taggaatatacattgcaaataaatcacatgtgactcctactcccagggaatctatagtatagtgttgatgaagaaaaagtttcaggtgaaatagaatactccactggagaggtagagaacgtcgatggtggagatatttaggagacatcagcatccaagtgacaagttaacattttgtaattggataaggtagtcaatggagattaaaaagagtaagatcaaggagtggttcaagaacagaatactctttaaccasgtgtggaggctcatgcctgtaatcccagcaatttgagaggctgaggtgggcagatcacttgaggagtttgagaccagcctggccaacatagtgaaacctcgtctcgactaaaaatacaaaaattaattaggtgtggttgcaggcatctgtacttgggaggctgaggaaggagaatccaggaggtggaggctgcagtgagctgagatcacaccactgcactccagcctgtgcaacacagcgagactccgtctcaaaaacaaacaaacaaacaaacaaaaaaccagaatactctggatgccccattgtctgtttttttggtgagctcagtattagtagttacttttcttactgggccctgaaagcagagactatttgccaaaat

SEQ ID NO: 933435 - DNA, 427 bp, Homo sapiens
agccaccatatttgttattggttgttttctagcttcttggtggaaggaagtgatctttaaaatttttgttttgtaaacaccgattccttgatttaatttatcaccaccatgactgctctcattcaccaattcaccaaaattgggtaaatccytaccttacttgttttgattcttcttttcttaaatatatgtatagctcaatttttaacattagaaatgtgttgggtctttatttagaagtttggtgatgtttttgtgaccagaaatatgccactggagtatgttttttttacaccagttagcccatggtaaaattggttttgttttacattgtttcacttaaagttgttaattctgagactaaaatcagtgtgcaggaagtttgaactcagaatcagaacatgcagggaaggcagagagagaaatc

SEQ ID NO: 933436 - DNA, 427 bp, Homo sapiens
agccaccatatttgttattggttgttttctagcttcttggtggaaggaagtgatctttaaaatttttgttttgtaaacaccgattccttgatttaatttatcaccaccatgactgctctcattcaccaattcaccaaaattgggtaaatccttaccttacttgttttgattcttcttttcttaaatatatgtatagctcaatttttaacattagaaatgtgttgggtctttatttagaagtttggtgatgtttttgtgaccagaaatatgccaytggagtatgttttttttacaccagttagcccatggtaaaattggttttgttttacattgtttcacttaaagttgttaattctgagactaaaatcagtgtgcaggaagtttgaactcagaatcagaacatgcagggaaggcagagagagaaatc

SEQ ID NO: 933437 - DNA, 718 bp, Homo sapiens
ctggaggaggccccagagcctccgtgcccagagccgcggcagagcctggagccagaggtgcccgcccccacagagcaggaggtgcctgcccccacagagcaggaggtgcccgccctcaccgcaccccgggcccccgcctcccggacctccaggatgtgggatgccgtgctgtaccgcatgtcagtggcggaggcccaagggckcctggcagggcccagcggtggggagcacaccccagccagcctcacccgcctgcccttcctgtaccggcctcgcttcaacgcccggaagctgcaggaggccacccggccccctcccacagtccgctccatcctggagctgagcccccagcccaagaacttcaaccgcacagcgactggctggaggctccagtgaagtggccagaatggcccccagagcccaggaccatgggatggacagaagaaggggctgaggctctagctgggggcccatagttgctgcatgaagatgcaccagggcccaaggggcatggggtgcagggcagcctgggaagggcacatggggtgctgagggaagtctgcatggttaggagggtggtcaggtggacggggcagagaggacgagctggagcccctgggctgcagtggtgtgaggggaacagagaaggggtctgcgtcgggatgtaggatgggggccttgggatgaaaactttaggtaagatggcagaggactgcat

SEQ ID NO: 933438 - DNA, 573 bp, Homo sapiens
cactgtactggtattagtgggaccaggcaaaatgattttgagaactccagttggcttgctcagatgcctgtagtggcagcagcaagccaggtgggtggacaagttcttgcacccctgcgcagcaggtgtggcatggatgatgacagtagcagtaggaaacaatcttctgggtcggaagcagtgagcactggtgctggtgattactgcaatgggctgagtgkgtcagtctcaggcccacaactggtacatgcaggtaggtgccaactgtggtggtagcagcggagtgggcaggcccaacttcaggccccatggagaagtgctcaaatgctaacaacagtagactggctaggcaatcccctggcccctggactgtgtgctctggtactggctgtggaatcaaagccaagccagtaaggcttgtactcagttcctccaggtgtgtgtatagtcagtgactgcagtaggaaggtgcagagtgatttacagtcccctggtgaaatgcttaggttgggggctgcagcaattgtgctgtggccctgctaccggggagggtgcggtttctttcagtggcag

SEQ ID NO: 933439 - DNA, 730 bp, Homo sapiens
atatagaatgtagtagctccactgctggaggcagcagggttgcaggcaatgtcctgcacttggccccactgacagcaatcagccacagtgtagctccaggtagggaatgttggtcggggtccaaggatgtggagatgcaagcactgttgggcttcaggacagagtgcagtctgttgagagctgggctttcaaaatggtactttactctagctgcgtaagactttggacacagcatgagtgggacacagcatgagctccctctctggagcagtgccattgcttactctccagtctccaggcagtttcctatgttagyttcagagcctatgaagtttaaggggctctctcgtggctggtattgcagttcacagtgggaatttcaaccactgaggagtacttcacttatccttttcccacactggggagtctctccaagctcatagctgatccccgccaagcaggctgcttcacttccctctcctttttcgctttaggtgtttcctgtcacatccctattgaattccagtgttatccaatgatctattgaaaatgtgattacctactcgctaattagtctcctttttacagaagaggtgagtacaagatgtctagttagccatcttggagcccgtctggtttgctactattttgttgagaatttttccatttatactcatcaggaatattagcctgtaattttgttttgttttgttttgttattcttgtaatg

SEQ ID NO: 933440 - DNA, 583 bp, Homo sapiens
aatatgagatcccacaggctccactagctgaatatacttcaacaggatgcccgagtcatttactttcctatctgtttctctagtgatgctgcaaaatttggaaagggtttccagacagacagctagggttaagtggtgtggggatgagggagataggaagtctaaaagacatcgcacaactctgaaaaaacagtttgataagactggaaacacaggactcggactctaaccttatttctttttctataaccatcatggaaggctacacctatggtgaactctccctttataccatttktcagttcattttttttttctttgagacaggctctctctctctttctgtctctctctctctctctccctctctctctctctctctgttacccaggctggaatacagtggcacaattacagctcactgcagcttcaacctctccaggctcaggcgttcctcccatctcagcctcccaagtagctgggactacaggaaggtgccaccacgtccgactaatttttgtatttttttgtagagacagggtttcattatgttggctaggctgggctcgaattcctgacttca

SEQ ID NO: 933441 - DNA, 606 bp, Homo sapiens
gaacataatccttcatgaaccgatgcagaaataaaaatcaaacaccaggccaggcgtggtggctcacgcctgtaatcccagcactttgggaggccgaggcaggtggatcatgaggtcacgagttcaagaccagcctggccaagatggtgaaaccccatctctaagaatacaaaaattagcctgcgcagtggcgggcgcctgtaatcccagctacttggggaggctgaggcaggagaattgcttgaacctcggcggcagaggttgcagtgagccaagattgtgccactgcactccagcccgggtgacagacagactccgtctcaaaaaaaaaaacaacaaaaaaaacaaaaaacaacacaaaaaaaaccacgttttcactcataagagggagctaaaaattgagtacacatggacataaagatgagaacataaacactgagtacacacagacatagacactggggagtttcgaagagaggaggtgggggcaagggttgaaaaactaacttttgtatactatgcccrctacctgggtgacaggaccactcatacaccagacctcagcaatatacaatttacccatataacaaacctgcatacacaata

SEQ ID NO: 933442 - DNA, 598 bp, Homo sapiens
aaaagtaactccttccttctgcttgaggagaggagagtgaacagtaaagaatgctttgtcttacactggatatcagctcagccacagtagagtaagggcaccagacaagccataaggaccccattctaggccctagttcccagatgacatttctagactaataccaatcctactcaaactatttcaaaaaaaagtagaggtggagagaatacttctaaaactcattctacaaggccaatactaccctgataccaaaaacaggaaaagacacattaaaaaaaaagaaaactacaggctaatatctctgatgaatatcaatgaaaaaatcctcgataaaatactaagcaaaccaaattcaacaatacttttaaaaagatcatttaccatgaccaagtgggatttactcaaggtatgcaaggatgtcttaacataygcaaatcaatcaatatggactatcatataaacagaatgaaggacaaaaagcatatgatcaattaatgctgaacactcatttgataaaattcaacatttcttcttgataaaatccgcccaaaactagatatagaaaaaacacaccccaatataaaaaaaagctgta

SEQ ID NO: 933443 - DNA, 522 bp, Homo sapiens
aatgaagataataaaaacaccactttgcatattaatttggtttatgaatgaagtaccactaaatgactcccagaaaattatactacatgtgtgtgtacatgtatgtgtgtgtatatatatatatttctacaaatatcccttgtagaaatgtgtatgtatgtgtgtgtatatatatatttttttttttctacaagtatccctgtatttctagtatccctacaaatacagggatactagaattctagtatccctacaaatacagggmtactttaaaactttagaattactgcttcagatataaagcattccctggtttagggtacctaattatgcctgttctctctgtttctcaactaaccaaaatactgctaaaatttttggaggcaagagaggagaattaaagtctgtggggcatggtgtaggcagggctggactgtaagtctaggcagacagtatctgaagtccgagatgcccaagggttagcccaaatagcagaattgatctttgcccctaagagagtct

SEQ ID NO: 933444 - DNA, 522 bp, Homo sapiens
aatgaagataataaaaacaccactttgcatattaatttggtttatgaatgaagtaccactaaatgactcccagaaaattatactacatgtgtgtgtacatgtatgtgtgtgtatatatatatatttctacaaatatcccttgtagaaatgtgtatgtatgtgtgtgtatatatatatttttttttttctacaagtatccctgtatttctagtatccctacaaatacagggatactagaattctagtatccctacaaatacagggatactttaaaactttagaattactgcttcagatataamgcattccctggtttagggtacctaattatgcctgttctctctgtttctcaactaaccaaaatactgctaaaatttttggaggcaagagaggagaattaaagtctgtggggcatggtgtaggcagggctggactgtaagtctaggcagacagtatctgaagtccgagatgcccaagggttagcccaaatagcagaattgatctttgcccctaagagagtct

SEQ ID NO: 933445 - DNA, 522 bp, Homo sapiens
aatgaagataataaaaacaccactttgcatattaatttggtttatgaatgaagtaccactaaatgactcccagaaaattatactacatgtgtgtgtacatgtatgtgtgtgtatatatatatatttctacaaatatcccttgtagaaatgtgtatgtatgtgtgtgtatatatatatttttttttttctacaagtatccctgtatttctagtatccctacaaatacagggatactagaattctagtatccctacaaatacagggatactttaaaactttagaattactgcttcagatataaagcattccctggtttagggtacctaattatgcctgttctctctgtttctcaactaamcaaaatactgctaaaatttttggaggcaagagaggagaattaaagtctgtggggcatggtgtaggcagggctggactgtaagtctaggcagacagtatctgaagtccgagatgcccaagggttagcccaaatagcagaattgatctttgcccctaagagagtct

SEQ ID NO: 933446 - DNA, 607 bp, Homo sapiens
ctagatgataaatttcatgatgaccaggactttatctgtctttcttagtatttttaatttttttttttttttgagatggagtctcgctctgtcgcccaggctggagtgcagtggcgcgatctcggctcactgcaagctccgcctcccgggttcacgctgttctcctgcctcagcctcccgagtagctgggactacaggcgcccgccaccacgccyggctaattttttgtatttttagtagaaacggggtttcaccgtgttaaccaggacggtctcgatctgctgacctcatgatccgcccacctcggcctcccaaagtgctgggattacaggcgtgagccaccgtgcctggccaatatttttaatttttaataattgtatatagttaaggtgtccaacaggatgtttcaatatacataagcatagtcacatgattagtgtagtcagacaaattagcatatctatctcctcgcatagttaccttttgcctgtatgtgctaagagctcctggaatctactctcagcaaatttccagtatgaattgcagcattattaactgtaatcaccatgctgtacattagatctccagacctgttcatcctacataa

SEQ ID NO: 933447 - DNA, 607 bp, Homo sapiens
ctagatgataaatttcatgatgaccaggactttatctgtctttcttagtatttttaatttttttttttttttgagatggagtctcgctctgtcgcccaggctggagtgcagtggcgcgatctcggctcactgcaagctccgcctcccgggttcacgctgttctcctgcctcagcctcccgagtagctgggactacaggcgcccgccaccacgcctggctaattttttgtatttttagtagaaacggggtttcaccgtgttaaccaggacggtctcgatctgctgacctcatgatccgcccacctcggcctcccaaagtgctgggattacaggcgtgagccaccgtgcctggccaatatttttaatttttaataattgtatatagttaaggtgtccaacaggatgtttcaatatacataagcatagtcacatgattagtgtagtcagacaaattagcatatctatctmctcgcatagttaccttttgcctgtatgtgctaagagctcctggaatctactctcagcaaatttccagtatgaattgcagcattattaactgtaatcaccatgctgtacattagatctccagacctgttcatcctacataa

SEQ ID NO: 933448 - DNA, 500 bp, Homo sapiens
aattttgaatggcacctgcatattgcacagaaccgtctgtaaaccaagcccaagtttttctctttcttagtcaactgatggtgggaaactccccaagagatcacaggtttaggctgggtgacagaagataatgtaacagaagcaaagactatgggtatttgtgtcactgcattgtgtaacttatttgtgccttcagggcttactcaagcccaatctcatatatgtcacttccattggatgagagagtgctgctgtgcatgcccacctttattgcttgatgattcagatataactcagttcatgatagacagctcaagttatatggtaacttagtggcctatggwtaaacatttggctactaaggcccagtagtagtccaaaagctgtttctgaagagaagcgtagctactcaaagaggaatgacaatgctttgtccccgaatcctaagagtttgtgctgtggttcacctacaagggcctactgaaggcttcaaaagtcac

SEQ ID NO: 933449 - DNA, 569 bp, Homo sapiens
ctggctaacatggtgaaaccccgtctctactaaaaatacaaaaaattagccccttgtgctggtgggtgcctgtagtcccagctactcgggaggctgaggcaggagaatggtgtgaacccaggaggtggagcttgcagtgagcagagatcaggccactgcactcgagcctgggtgacagagcaagactccgtctcaaaaaaaaaaaaaaaaaaaaatggtagtgcagacccaaagaatgagctgcagcaagatttattgtsaagactgaaagaataaagcttccacagtggggaaggggactgcagagggttgccactgctggctcaggcagccagcatttattcccttatttggccctgcccacatcctgctgattggtccattttacagagcactgactggtccattttacagactgctgattggtccattttacagagtgttgattggtgtgtttttatagagtgctgattggtgcatttacaatccttcagctagacacagagtgctgattggtgcatttacaatcctctagctagacagaaaagttctccaagtccccactcaac

SEQ ID NO: 933450 - DNA, 785 bp, Homo sapiens
tcagtgaggagggttgtgtgaggtgacaaatgtcctggattcctggtcacaggacattcagtgctgaagtcttggggtggctggtcaccctcagtatgagagagtcttgcagatgaaacgtaagtggggacttctgggtgggtaggattaggtaagtgaaaagggatgggaatggctgggcgcagtggctcacgcytgtaatcccagcactttgggaggctgaggtggacagatcatcacttcaggtcgggagtttgagaccagcctggtcaacatggtgaaaccccatctctactaaaaatacaaaacttagccaggcatgatggcagacacctgtaatctcagatgctcaggaggatgaagcaggagaatcacttgaacctgggcgggggcggaggttgcagtgagctgagattgcattaccgcactccagcctgaacaagagtgagactctgtctcaaaaaaaaaaaaaaaaaaaaaaaagaaaaagaaaaagatggtgggggagtgatgcaatcatgaggagatggaggaagaaactattcatagagacacagaacaatgattatgggttcaccagccattgaggtcactcaactagagaaaaggatattttcttggaaggagctgagaaaggaaatatgaatagaaagaccttaaaaatggtctgagatatctggatatgaggagagatgaaaaactgcagcggttaaagggaggggtgaggaaaaatagtccctcaaaaactgtatgtgaattctttaaaaaatggaaaactttctggg

SEQ ID NO: 933451 - DNA, 776 bp, Homo sapiens
tttactaaattaatacttgaaattaatttaattatttttctgtcaccaatttacataattctgtttcaaatgatatttctgttctttactagaacataagctgaattctgttagtgttgtcgactctacgcacttayaaataccccttagctgaagtcaaaggaaagaaatcatttctttctgatgtctaatttatctgcttttcaatatttctgtgagacggcctgattttgggaggagacaaaaatatataaaataaaactgttcttttgttttaaaaaaagaaaagtaatgacattttctacttagtttgaaagctagaaaatgtttcactccactttttctttggggtgatatcttattaaaagaaagaaactacagggtaaaaagagttgttctaccatgtgcctggtcttagaaacagttcccgtaagttctacctactggaacaaagcagcctttctagaggcccagttcttaacttcagaacatgcaaaggcaaggcctgaaggaacaaaggtgactgatgtcatgagacatttcctatatcctttcaatccctgacatacattccaggtagaaaacaaattaattctagttcgaacttctccccattgaaagtcccatctggtgtgtataagtcacactgcatcttgctgactaacacatcatctcgaataataaagatcctggagtaagactttagctgccaattttcttcaaaggtgcaaggtaggcaagaagagagcccttcctcagctgagctatactggccc

SEQ ID NO: 933452 - DNA, 581 bp, Homo sapiens
tcaacataccccattccaaaaagtaggtactacctgggccacacacacattcaccataaaaattaaattgaataggtatcaagaaacaattaagtttcatatcagattttcttccattaattttggcaacacagcgttcatttttctttgtattataaaaacttgttgctaatgtccagggtcaccamcctcatgtgaaataaaatgcatttgtgcaaggccctgacatcatatcaaaattcagtcagttatcttaatgcataatatatatgtaaaaaatcaagagagactggggaagaaaaacacaaaaatgtgagtagaatggtaaaagttgtctaccctggctgcacattagaatctgggataaacagatttagataaacagatgctcagaacccagccctagagattctgattcaggcccagtctgactgggccaatcgttgttatccctaagtgattcaaatctgctgtttttcttacctttctcagactttccactgttgtagaaaatgtgtattaaatgagaatactctgattcatatattttctgtcaaccatgataatgatgatagttactc

SEQ ID NO: 933453 - DNA, 581 bp, Homo sapiens
tcaacataccccattccaaaaagtaggtactacctgggccacacacacattcaccataaaaattaaattgaataggtatcaagaaacaattaagtttcatatcagattttcttccattaattttggcaacacagcgttcatttttctttgtattataaaaacttgttgctaatgtccagggtcaccaacctmatgtgaaataaaatgcatttgtgcaaggccctgacatcatatcaaaattcagtcagttatcttaatgcataatatatatgtaaaaaatcaagagagactggggaagaaaaacacaaaaatgtgagtagaatggtaaaagttgtctaccctggctgcacattagaatctgggataaacagatttagataaacagatgctcagaacccagccctagagattctgattcaggcccagtctgactgggccaatcgttgttatccctaagtgattcaaatctgctgtttttcttacctttctcagactttccactgttgtagaaaatgtgtattaaatgagaatactctgattcatatattttctgtcaaccatgataatgatgatagttactc

SEQ ID NO: 933454 - DNA, 581 bp, Homo sapiens
tcaacataccccattccaaaaagtaggtactacctgggccacacacacattcaccataaaaattaaattgaataggtatcaagaaacaattaagtttcatatcagattttcttccattaattttggcaacacagcgttcatttttctttgtattataaaaacttgttgctaatgtccagggtcaccaacctcatgtgaaataaaatgcatttgtgcaaggccctgacatcatatcaaaattcagtcagttatcttaatgcataatatatatgtaaaaaatcaagagagactggggaagaaaaacacaaaaatgtgagtagaatggtaaaagttgtctaccctggctgcacattagaatctgggataaacagatttagataaacagatgctcagaacccagccctagagattctgattcaggcccagtctgactgggccamtcgttgttatccctaagtgattcaaatctgctgtttttcttacctttctcagactttccactgttgtagaaaatgtgtattaaatgagaatactctgattcatatattttctgtcaaccatgataatgatgatagttactc

SEQ ID NO: 933455 - DNA, 629 bp, Homo sapiens
gcccgttggaaaagtgcagtattcgggtgggagtgaccctcattttccaggtgccgtctgtcacccctttctttgaccaggaaagggaactccctgaccccttgcacttcccgagtgaggcaatgccttgccctgctttggctggcgcacggtgcgtgccaccactgtcctgtgcccactgtctggcactccctagtgagatgaacccggtacctcagatggaaatgcagaaatcacccgtcttctgcrtcactcatgctgggagctgtagactggagctgttcttattcggccatcttggctcctcctagcaatgttatttctaagccagaatccttacaatgaaaggcaatgaagttggaaaagagtctcattccctaccctgggagaatgattcagggttctccgtctgtgtggggctcttccaaggctctattcctgctttgaaaatcacagtttgcatgttttttttattgaagagagtcctcaaagtgattaacccaggactgacaaaacctgagtccacccctgcctcagagatgtttcagcacaaaagcattcagtctgtatgataattgcataatcccagtgttgtgtggtataatatcaaaccccaaactcatcatgta

SEQ ID NO: 933456 - DNA, 601 bp, Homo sapiens
acctctacactgtaagaactatccaaccaagggggccaaagccagccttgctccacagtcctgaggcatcagacactgtgcagactgccctgccccctgctggctgcctgtctgcttcccgtggccagccctgaccgcggcccctgtcccccagccacttattgctcgccacagcccctactctgctgcttccattctggggcccgagtggacgggtggacctagaggaggctggcattgctgagccagcagcagggacmctagacacaggcaacaagggtaatggagcagaacacaggctctggaaccagccaacatggcaaaaccctatctctactaggaaatacaataatcagctgggtgtggtggtgcacgtctgtaatcccagctcctggggaggccgaggcacttgagccaagagtcagaggttgcggtgagtgagatcataccactgtactccagcctgggtgacagagcaagactctgtctcaaaaaaaaaaaaaaaaaaaaaaggaagcactggaggacattaaacaaatagcagatcctccagcctggccaacataaaaatacaaaaattagctgggcatggtggcgggtg

SEQ ID NO: 933457 - DNA, 741 bp, Homo sapiens
cagctgggtgtggtggtgcacgtctgtaatcccagctcctggggaggccgaggcacttgagccaagagtcagaggttgcggtgagtgagatcataccactgtactccagcctgggtgacagagcaagactctgtctcaaaaaaaaaaaaaaaaaaaaaaggaagcactggaggacattaaacaaatagcagatcctccagcctggccaacataaaaatacaaaaattagctgggcatggtggcgggtgcctgtaatcccagctactcgggaggctgagataggagaatcacttgaacccaggaggctgaggctgcagtgagccgagatcgcgccactgcactccagccygggcgacaaagggagactccatctcaaaacaaacaaacaaaacaaaacaaaacaaatagtagatctggtcaagcccctcagagctgttacataaaccaactactgagggtaaagacctttggaaggaccatttaaaacacctggggcttcatcgggctggatttgctcggagctacaggtggaatcaagagttctctataatcatcacttgcacagcgtagttttcagggaaatattttcctatttgacaggtgaaacagtatttttcacctgcctgtagcagttttgagacaatatagtacttttccagaagtgcttccctgaatgactgcgcacgattatgatgacattctggaatggggttttataacacttgtgggaacacgctgccc

SEQ ID NO: 933458 - DNA, 632 bp, Homo sapiens
tttctaattacaaaagtcatattttcacattggagaaaattaagaccttacagaaaaggatgaagcaaaaagaaatcaataataatctcacagtccagagatgactttgttggcatttcacctttttttcttacacatgtatgtatatgtatgtgcacacttaatataaaaacttagaaaacattttgattgtttttaaaactcaattttatcacagaatgggtaggtagttattgtaggaaaactagaaaatgtgagaaaagcttttaaaaagaaaaattactaataattctactatccatatatttgggtattttggtccagactttttttttttttttttttttttttgagagggagtcccgccctgtcaccaggctgsagtgcagtggtgcaatctcagctcactgcaacctctgactcccgggttcaagcgaatctcctgcctcagcctcccgagtagctgggattacaggcatgtgccaccatgcctggctaatttttgtatttttagtagagacgggatttcaccatgttggccaggatgctccaatttcctgacctcgtgatccacctgcctcagtctcccaaagtgctgggattacaggcgtgacgactatacccagccttaa

SEQ ID NO: 933459 - DNA, 576 bp, Homo sapiens
gtgagccaccatgcccggcccctcacaggaaacttgtttatgctcgcagatgccctagtggtttttgtctgacccacatctcgtctattgctaccatgataggcattctcttttatttatttatttattttatttttttgagacggartctcactgtgaagcttaggctggaatgcagtggcatgatttcgactcactgcaatctccacctcccaggttcaagcgattctcctgcctcagcctcccaagtagctgggactataggtgtgcaccaccatgccctgctgatttttgtgtttttttagtagagatggggtttcatcatgttggccgtgccggtctcgaactcctgacctcaagttatctgcccgcctcggcctcccaaagtgctaggattacaggcatgagccaccatgcccagctatgataggcattctctaagagaacgctgagtgaaaaagaagttaggtttaggtttggttgttaggttaagtgagacacacaggaaataacagaacacatgaaagcacaggaaccgtttattacttccagatagagagaacagggcagcattcc

SEQ ID NO: 933460 - DNA, 576 bp, Homo sapiens
gtgagccaccatgcccggcccctcacaggaaacttgtttatgctcgcagatgccctagtggtttttgtctgacccacatctcgtctattgctaccatgataggcattctcttttatttatttatttattttatttttttgagacggaatctcactgtgaagcttaggctggaatgcagtggcatgatttcgactcactgcaayctccacctcccaggttcaagcgattctcctgcctcagcctcccaagtagctgggactataggtgtgcaccaccatgccctgctgatttttgtgtttttttagtagagatggggtttcatcatgttggccgtgccggtctcgaactcctgacctcaagttatctgcccgcctcggcctcccaaagtgctaggattacaggcatgagccaccatgcccagctatgataggcattctctaagagaacgctgagtgaaaaagaagttaggtttaggtttggttgttaggttaagtgagacacacaggaaataacagaacacatgaaagcacaggaaccgtttattacttccagatagagagaacagggcagcattcc

SEQ ID NO: 933461 - DNA, 576 bp, Homo sapiens
gtgagccaccatgcccggcccctcacaggaaacttgtttatgctcgcagatgccctagtggtttttgtctgacccacatctcgtctattgctaccatgataggcattctcttttatttatttatttattttatttttttgagacggaatctcactgtgaagcttaggctggaatgcagtggcatgatttcgactcactgcaatctccacctcccaggttcaagcgattctcctgcctcagcctcccaagtagctgggactataggtgtgcaccaccatgccctgctgatttttgtgtttttttagtagagatggggtttcatcatgttggccgtgccggtctcgaactcctgacctcaagttatctgcccgcctcggcctcccaaagtgctaggattacaggcatragccaccatgcccagctatgataggcattctctaagagaacgctgagtgaaaaagaagttaggtttaggtttggttgttaggttaagtgagacacacaggaaataacagaacacatgaaagcacaggaaccgtttattacttccagatagagagaacagggcagcattcc

SEQ ID NO: 933462 - DNA, 580 bp, Homo sapiens
aggcatgtcaatagtctaagcactcttggtatgttgtaattgagaggtgaagccggctgggcttgagtcaggtggggacttggggaacttttctgtctagctaaaggattgtaaacacaccaatcagcactctctgtctagctaaagatttttaaacgcaccaatcagcacactgtaaaaacagaccaatcagcactctgtaaaatggaccaatcagcagggtgtgggcggggccaaataagggcataaaagctggccaccsgagccagaagcggcaactgctggagtccctttccaggtgtgaagctttgttctttcgctcttgctgctgctccctgtttaagtccagactacctttgtgagcttgtaacacagtgagggtctgtggctttattcgtgaagtcagctagaccacgaacccaccaagaaacaattctggacgtgccacctttaagagctgtaatacttgctgcaaaggtttgtggcttcactcttgaaatcagcaagaccacaaacccacggaatggagaaactccagacacaccatctttaagagctgtaacactcaggataagggtca

SEQ ID NO: 933463 - DNA, 580 bp, Homo sapiens
aggcatgtcaatagtctaagcactcttggtatgttgtaattgagaggtgaagccggctgggcttgagtcaggtggggacttggggaacttttctgtctagctaaaggattgtaaacacaccaatcagcactctctgtctagctaaagatttttaaacgcaccaatcagcacactgtaaaaacagaccaatcagcactctgtaaaatggaccaatcagcagggtgtgggcggggccaaataagggcataaaagctggccacccgagccagaagyggcaactgctggagtccctttccaggtgtgaagctttgttctttcgctcttgctgctgctccctgtttaagtccagactacctttgtgagcttgtaacacagtgagggtctgtggctttattcgtgaagtcagctagaccacgaacccaccaagaaacaattctggacgtgccacctttaagagctgtaatacttgctgcaaaggtttgtggcttcactcttgaaatcagcaagaccacaaacccacggaatggagaaactccagacacaccatctttaagagctgtaacactcaggataagggtca

SEQ ID NO: 933464 - DNA, 799 bp, Homo sapiens
agctgagggttgaggggaggcgaaaagcagagagggcaccaagacaaagtttgttatttttctttttatcattttaacctttatttttctttgatgatatctttgtactgtattgttttttctatgcctattgcaattactaactacatgtcctgtttctttgattgttggttttatctactgcctcttctaagtacacagagtgattatgtctcaaccacccctgggagctttggtgcactgatgtgaagaattggccattcacygttagtatttaaatgccataaccgctcccccaacacacacacacactttctctctctctcacacacaccacacacacacacacacacacacacacacacacacacacacacacactgtggactccaagccagatataaccatatcctcctcaggccaccttgccactagctttggcccttcaagtaatctagggaaagggtggcccatagtgacactcttcaatcagggtccactttaccatatgatatggtttggctctgtatccccacccaaatctcatcttgtagctcccacaattcctatgtgttgtgggtgagacctggtcggagataactgaatcatggggggaagtctttcttatgcttttctcatgatagtggataagtctcatgagatctgatggttttaaaaatgtgagtttccctgcacaagctctctctttgcctactgccatccatgtaagatgtgacttgctgtttcttgttttccaccacaattgtgaggccttcccaggcatgtggaactgtaagtc

SEQ ID NO: 933465 - DNA, 714 bp, Homo sapiens
gagatctgatggttttaaaaatgtgagtttccctgcacaagctctctctttgcctactgccatccatgtaagatgtgacttgctgtttcttgttttccaccacaattgtgaggccttcccaggcatgtggaactgtaagtcccttaaacctccttttcctcccagtctcagctatgtctttatcagcagcatgaaaatggtctagtacagtaaattggtaccattagagtggggcactgctgaaaagaacccaaaaatgtgaaagcaactttggaactgggtaatagacagaggttggaacagtttggaggtctcagaagaagacagaaaaatgtgggaaaggttggaacttcctagagacttgtcgaatgactttgaccaaaatgctgatggtgatatgggtaataatgtctaggctgaggtggtctcagaaggaaataaggcacttgttgggaattgaagaaarggtgactcttgttaggttttagcaaagagactggtggcattttgctcatgtcctaaagatttgtggaactttgaacttgaaagagatgatttagggtatctggtaggagaaatttttaagcagcaaagcattcaagaggtgacatgggtgctgttaaaggcatttagttttataagggaaacagagcataaaagtttggaaaatttgctgcctgacaatgcgataaaaaagaaaatcccattttctga

SEQ ID NO: 933466 - DNA, 745 bp, Homo sapiens
ttcttatgcttttctcatgatagtggataagtctcatgagatctgatggttttaaaaatgtgagtttccctgcacaagctctctctttgcctactgccatccatgtaagatgtgacttgctgtttcttgttttccaccacaattgtgaggccttcccaggcatgtggaactgtaagtcccttaaacctccttttcctcccagtctcagctatgtctttatcagcagcatgaaaatggtctagtacagtaaattggtaccattagagtggggcactgctgaaaagaacccaaaaatgtgaaagcaactttggaactgggtaatagacagaggttggaacagtttggaggtctcagaagaagacagaaaaatgtgggaaaggttggaacttcctagagacttgtcgaatgactttgaccaaaatgctgatggtgatatgggtaataatgtctaggctgaggtggtctcagaaggaaataaggcacttgttgggaattgaagaaagggtgactcttgttaggttttagcaaagagactggtggcattttgctcatgtsctaaagatttgtggaactttgaacttgaaagagatgatttagggtatctggtaggagaaatttttaagcagcaaagcattcaagaggtgacatgggtgctgttaaaggcatttagttttataagggaaacagagcataaaagtttggaaaatttgctgcctgacaatgcgataaaaaagaaaatcccatt

SEQ ID NO: 933467 - DNA, 604 bp, Homo sapiens
cctggatatgggacaagaacttgggacctgccgaatggtgggactgaaagagctgtaggctgggcgtggtggctcctgcctgtaatcccagcactttgggaggccgaagtgggtggatcacgaggtcaggggtttgagaccagcctggtcaatatggtgaaaccccatctctactaaaagcacaaaaagtagccagacatggtggcacatgcctgtaatcccagctacttgggagggtgaggcaggaaaatcacttgaactggggaggtggaggttgcagtgagccaagatcatgccactaaactccagcctgggagacagasactccatttcaaaaaagacaaagagaaagagctgtaacacaaacaggactgaaacacatccccccactcattatgttgtgggtgactagaaggagagaagagctgtggcccttcagggagcacagacctagggactcaccaagccagggctgtgacaccctcttttggtctctgcagttcctgacatctccaagcttctagacaccactgtgttcccctcatccagacatgggtacccacagcagaagctgcatgagatacatctgctccagccagagcct

SEQ ID NO: 933468 - DNA, 557 bp, Homo sapiens
ctgccagcctcagcttcccaaagtgctgggattacaggcatgagccaccaagcctggccttgatttccacattttaaaaactttgaaccctattttatatattttaaaatgtaaaccaacaggaaagtaagatttcatgactgagttttatttaaactactttttacagatccacttaatttgaaaattgagattggctttttaagcatataaaaatgacatctcaaaaaaaattacaaaacaaagaagaaaaaaatgacatctcctctttggtacattctagatttttttttaattatggtaaaatatgcatatatcaaatttactatcttaaccatttaggaatacagagttcaaaagtgttcagtgcattcacattgttgtgcagtctccgagtgttattttttttattgctaattstgactaaattgtgcttcctgcagtttgagaaagaccagtttatatcctatgaggtagggaaccactgagccttttttgtctgaggtcacacaggtgagcaaatggtggagtgacaattcaaactcaggcacctgatt

SEQ ID NO: 933469 - DNA, 605 bp, Homo sapiens
taaaatctgttgacctgtcctcaagttcactgattctatcctctgtcatctccactgtattattgagcccatccattaagtattttatttagcttattgtatttttcacttctataatttccatttggttcttttttataacttctatttctttgctgagattttctcagtatttttcgcatttgtttcaagagaatttgtgattgcttattgaagtatttttatgatggttgctttaaaattcttgtcagataattccagcatctaattcatcttgttgttggtatctgtcaattgtcttttctcattcatgttgcgattttcaattgtatcctgacagtttttatattatattctggatcatatttaatcttcttttattagcaggcagccccctgttgagatattgaagactaggtagatgtgtatgtttagcttcctgacaccatcctggcaaaaagggastgctgactcatactgcctcactgcagtggggtgggtgggaggaagctcagctccccatttggccccactgacaccttcccagtgaaagagaggcactgactcctaccatctcctggcctccaaatgggaatgaaaactca

SEQ ID NO: 933470 - DNA, 630 bp, Homo sapiens
cttggaccaactattccctctgcctggaatgctcctccccaaaagagccacgtgactcactccttcactttcttcaggctgttgttcaaatcactttcctattggtcgccctgtttaatatgaccccctgcacttcctatcccatgtaatgcttttttttttmctccaaggtccctcactttgtatgttttaatttttgttattgtgtcactccaagttccaagagggcagggatttttgtctcctttgttcactgctatatcccgtttgcctggcacacagtaggtacactggaaggaaggaacaacttaattgttgtaattccagttctcctcccctttttgatgaatgggctaacctgatacaatgccctcaagacccaaagatgggtcagcaccaatacttcatggcattaagacatgcagatgggtcaggagccaatacttatctatcaactgctagtctgttctaagcattttgtattttgactcttatcattttgtctatccagtaccatcaccattccatcccaaccatttcttggagacttccatcccttcttctgagaacttctccttgccaactccatccacacagccaccataagagctctgtgttaacacagagtgg

SEQ ID NO: 933471 - DNA, 611 bp, Homo sapiens
aaatgggattttcttttttattacattgtcaggcttcaaattttctgaacttttatgttctgcttcctttataaaactgaatgcctttaacagcacctaagccacatcttgaatgctttgctgcttagaaatttcttctgccagttaccctaaatcatctctctctcaaagttccacaaatctctagggcaggggcaaaatgctgccagtctcattgctaaaacataacaacagtcacctttgctccaattcccaacaaattcctcatttccatmtgagaccacctcggcctagaccttattgtccatatcgctattcgcattttgggcaaagccattcaagtttctacgaagttccaaactttcccacattttcctttcttcttctcagccctccaaatagcttttggattatttataacccaaaggataagtgcttgaggtgatagataacccatttttcgtgatgtgattaattcacaatgcatgcctgtatgaaaacatgttgtgctccataaatatatgcatctatgtacccacaagaattaaaaaaaatatggagtagcattggcatgagcccttgcacaatctggttctaggagaaaaagttgg

SEQ ID NO: 933472 - DNA, 782 bp, Homo sapiens
tcctatcagacattcaaagaaagaattggtaccaattctattgacattattccacaaggtagagaaagaaggaatcctgcctaaatcatcctatgaagccagtatcaccctaataccaaaatcagctagggacataacaataaaagaaacttacagaccaatatctctgatgaatgtagatggaaaattccttaacaaaatactagctaactgaacccaacggcatagcaaaaagataatttaccatgatcaggtgggtttcataccaagtatgcaggggtgatttaacatatacaatttaataaatgtaakacaccacacaaacagaattataaacaaaaattatactatcatttcaatagatggagaaaaagcatttgacaaaattcagcatcccttgtgattaaaaccctccacaaaactggcacagaagggacataatgtaataaaagccatctatgacaaagccacagccaatattacactgaaagggaaaagtttaaagcattccccctgagaactggaacaagacaaggatgcccactgtcaccacttctattcaatacagtattggaagtcctagctagactgttcagacaagaggaagaaataaagggcatccaaatcagtaaggaggaagtcaaactctctctgtttgctgatgatacgattgtatatgtagaaaaccctaagactccttcagaaagcccctagaactgataaatgaattcagtaaagtttcaggatacaaaattaatgtacacaagtcagttgctgtacta

SEQ ID NO: 933473 - DNA, 642 bp, Homo sapiens
tcttcccagcccccaagacctggaaatgggaaggctctggcttcaaagccccagtgaggccccaggcccccttttaggccccagttaaaattctgtagtgagctagaagagggggacatcgggtcacagggaggtgcttggtaactgatcatcaaaacctgcctagaggctgggaagggagtaaactgaggcaggggagctggaggaaatgagacccaggagatgggacaagagcaggcagaggtgacatgagtcagccycagagaaaatcaggatgggctgagggcagtggctcatgcctataatcccagcactttgggaggccaaggtgagaagatcacttgagcccaggagttcaagaccactatgggcaacacagtgagatcccatctctcccatatcgctggtaattagccggcctggttggagaccaatatcgcaagatccttaagaggctgaggtgggaggatcacttcagcctgagaggcagaggtttgcagtgagttgtgatcgcgccactgcactccaagccttggcaacaaagcaagactctgtctcaaaaaaaaaaaaaaaaaatcaaggttcctctgggcctgtgggacccatggggtgggcttcttccagccttttccatggctctcc

SEQ ID NO: 933474 - DNA, 760 bp, Homo sapiens
agtgaggcaatgctcgccctgcttctgctcgcgcacggtgcgtgcacccactgacctgcgcccactgtctggcactccctagtgagatgaacccagtacctcagatggaaatgcagaaatcacccgtcttctgcgtcgctcacgctgggagctrtagaccggagctgttcctattcggccatcttggctcctcttccctttttttttattttttagtagagacaagatttcaccatgttagccaggatggtctcaatgtcctgacctcgtgatccacccgcctcagcctcccaaagtgctgggattacaggcgtgagccatcatgcccggcctaggcatgaattttaaacagcacccccactttctgtactctctctccctaccttccctttcaatgcctctgggcctcctttggaggcgcccggcaggactcaatggcaatagaagaggaggaaggcagagaagactgaaaaacgaaccaatttctccacacttcatcttaggattcattctgtggtaaggtgtcgggattgtccactagttccttctatggtaaatgaaactattttgacttaaaaacatttggtgaaaatatctccctcatttctatcctgagaataaattccctgtagaaactgagctatcagtgcgaaaagtgtaaaatatggccaagtcagaaattttgtcaaaagagcctatttttaatggataagccagatttctatctaaagtagttgatttgccctggtactatttctac

SEQ ID NO: 933475 - DNA, 760 bp, Homo sapiens
agtgaggcaatgctcgccctgcttctgctcgcgcacggtgcgtgcacccactgacctgcgcccactgtctggcactccctagtgagatgaacccagtacctcagatggaaatgcagaaatcacccgtcttctgcgtcgctcacgctgggagctgtagaccggagctgttcctattcggccatcttggctcctcttccctttttttttattttttagtagagacaagatttcaccatgttagccaggatggtctcaatgtcctgacctcgtgatccacccgcctcagcctcccaaagtgctgggattacaggcgtgagccatcrtgcccggcctaggcatgaattttaaacagcacccccactttctgtactctctctccctaccttccctttcaatgcctctgggcctcctttggaggcgcccggcaggactcaatggcaatagaagaggaggaaggcagagaagactgaaaaacgaaccaatttctccacacttcatcttaggattcattctgtggtaaggtgtcgggattgtccactagttccttctatggtaaatgaaactattttgacttaaaaacatttggtgaaaatatctccctcatttctatcctgagaataaattccctgtagaaactgagctatcagtgcgaaaagtgtaaaatatggccaagtcagaaattttgtcaaaagagcctatttttaatggataagccagatttctatctaaagtagttgatttgccctggtactatttctac

SEQ ID NO: 933476 - DNA, 732 bp, Homo sapiens
tattcttcctttcattgagtttataatctaggaaggggtagacaacaagcgataacataagaaaaaggaaagcaatggagtaaggaagggtggtgttgcggcggtttgaaggggtccactgcaattttaaattgggtgattagggtagacctcactgagtgagtgatgttttgagcaaaagtttgaaataaggtgaggaattgagctatgagggtatctaagggaagagcattccagacagaaggaacaagccatacaaaggccctatgcagagcacgcctattatattcaaagaatagcaaggacctaagtgtggctggagtggagaccgtgagggagaaaaagtagtaagcgttgaagtcagagagggagggggaaggggggcagaccatgcaaggccttttgaggcttttgtgtttactctaaatgcagtggggaccaagtctcagattttgagtgtcatgwtctggcttatattttgacagaatctctctggctaaggtgtggagaataggctgtgaaggaagaaagggtgaaagtagaaagaagctggtgtggaggttactgcaataactgaagaaaggagtgatggtggctcaaacttgggagcagtggaaatagtgaatggtcaaactctgggcttattgtgaagtaggcactaatgggttcagtattattaggtatgtgagaaagaaaaaccaattatgactccagcgttctcaattgggaaga

SEQ ID NO: 933477 - DNA, 600 bp, Homo sapiens
gaaacccaagagggctgatggtgtagttccagtctgagtccaaagtgctaaaaaggcaggagagccaaggctgaggctgagtcagaaggcaggagaagactgatgtcccagttctaagacagtcaggcagagcaggagaattccttctcactgtgcctttggttctattctggccttcaatggactggaggaggtgcacctacactggggaaggcaacctgctttgcacagtccaccaattcaaatgttaacctcatccaraacaccctcacagtcatgctcagaatgtttaaccaaatatttgggtgtctcttggcccagtcaagttgacacataaaactagccatcaagtctcccacagaaagtagtgtttcaaatttaataagtaaaatcttcctaagccttaaagcaactctcaaaaatccaaaaaaaaaaaaaaaaatagacacagaaatgtaacagttaagattctctctctctctctctttttttttttttttgaggcagggtcttgctttgtcacctaggctagagtgcagttggcactaagacagctcactacagccttgacctcctaggctccagggatcctccacttca

SEQ ID NO: 933478 - DNA, 775 bp, Homo sapiens
tggttggcaataagagtgaacataacatatcctcatgcacatcctcctgaaaaataaatcacgcacaaacaagtattgttgtcttgtggtcaacactggtagacttgtcaacctggattgtgtaccacagtggctcattaattttctctgacaattgtgcctcaatagcctctgctatttcatcaattcatctagttttggtactagctgaaagaggaacaagtgccacttttgaaccacagcctctcctaaaagttcatgacaggccaggcgtggtggctcactcttgtagtcccagcactttgggaggctgaggcgggcggaatcacttgaggtcaggagttcaagaccagcctggccaacatggcaaaaccccatctccactaaaaatacaamaattagctgggtgttttggcaggtgcctgtagtcccagctattcgggaggctgaggcaggggaatcacttgaatctgggaggtggaggttgcagtgagccgagattacaccaccgcactcccgcctgggcaacagagtgagactccatctcaaaaaaaaaaaaaaaaaattcatgacagatgtccttagcagcaggcaggatcaactcttcaccaatagtgaagggcatcttacctttagcaatgcagttagccactaagaatgatgctctctgtgcagacacatttgatgaagtggtggccttcactaattgcttctgttctttgtgttcatgtttttttcttttgaaaaactccaaaggcttgtcttttaatgcagg

SEQ ID NO: 933479 - DNA, 569 bp, Homo sapiens
tcttccttcaaaaatcccaacacacttgaagatccaaacttcagattttcttaatacccctacagacctcccaggacctcccccttcatccaccaatagatttagcacctagtttactgtttttcctctttaattctacactgggtcacaaccttgatgactttgatatctacctggatgagcaattcagcatcttggcctctgtgctgtttgacctcctcatctctggcaagcttttttctccatttcacctctacccccaactttataacaatacctaaaccacttccaaaaatttcagcattctacttgctgaccaccataatttatccrtttggcacactcgaactattatttccatttcaagatttttttgacttcatcaaaaccaccaatgcattggccccaacaatgtttgccacctgcctcccgctcatgtctctctctttgctcacctagctagggtctgaataatcactgccttaaaaacaccactaattacctaacccccatccgttatatgccatccattttactcccttgtgaaaactccaaatcaaattcaactt

SEQ ID NO: 933480 - DNA, 601 bp, Homo sapiens
gggtttgagagcagacaactggtctgaccaaaatttattaggcgggaatttcctcgtcctaataagcctgggagtggtatgggagaccgggacttatttcatcccttatctacaatcataaaagacagactttcctacagtggccattttagagacctccccctaggaacgcattctctttctcagggctgttccttgctgagaaaaataattcagcgatatttctcctatttgcttttgaaagaagagaaatatggctctgttccgccagctcacaggcagccagacctaatggttatctcccttrttccctgaacatcgctgttatcctgttcttttttcaaggtgcccagatttcatattgtttaacacacatgcttacgaacaatttgtgcagttaacgcaatcatcacagggttctgaggcgacatatatcctcagtttatgaagatgatgggattaagagattaaagtaaagacaggcataggaaatcacaagacttgattggggaagtgataaatgtccatgaaatcttcacaatttatgttcagagattgcagtaaagacaggtgtaagaaattataaaagtattaatttggg

SEQ ID NO: 933481 - DNA, 601 bp, Homo sapiens
gggtttgagagcagacaactggtctgaccaaaatttattaggcgggaatttcctcgtcctaataagcctgggagtggtatgggagaccgggacttatttcatcccttatctacaatcataaaagacagactttcctacagtggccattttagagacctccccctaggaacgcattctctttctcagggctgttccttgctgagaaaaataattcagcgatatttctcctatttgcttttgaaagaagagaaatatggctctgttccgccagctcacaggcagccagacctaatggttatctcccttattccctgaacatcgctgttatcctgttcttttttcaaggtgcccagatttcatattgtttaacacacatgcttacgaacaatttgtgcagttaacrcaatcatcacagggttctgaggcgacatatatcctcagtttatgaagatgatgggattaagagattaaagtaaagacaggcataggaaatcacaagacttgattggggaagtgataaatgtccatgaaatcttcacaatttatgttcagagattgcagtaaagacaggtgtaagaaattataaaagtattaatttggg

SEQ ID NO: 933482 - DNA, 601 bp, Homo sapiens
gggtttgagagcagacaactggtctgaccaaaatttattaggcgggaatttcctcgtcctaataagcctgggagtggtatgggagaccgggacttatttcatcccttatctacaatcataaaagacagactttcctacagtggccattttagagacctccccctaggaacgcattctctttctcagggctgttccttgctgagaaaaataattcagcgatatttctcctatttgcttttgaaagaagagaaatatggctctgttccgccagctcacaggcagccagacctaatggttatctcccttattccctgaacatcgctgttatcctgttcttttttcaaggtgcccagatttcatattgtttaacacacatgcttacgaacaatttgtgcagttaacgcaatcatcacagggttctgaggcgacatayatcctcagtttatgaagatgatgggattaagagattaaagtaaagacaggcataggaaatcacaagacttgattggggaagtgataaatgtccatgaaatcttcacaatttatgttcagagattgcagtaaagacaggtgtaagaaattataaaagtattaatttggg

SEQ ID NO: 933483 - DNA, 572 bp, Homo sapiens
atgcggccaaaaacatgaaaaaaagctcatcatcactggtcattagaagaacgcaaatcaaaaccacaatgagataccgtctcacaccagttagaatggcgatcattaaaaagtcaggaaacagcagatgctggagaggatgtggagaaataggaatgcttttacactattggtgggagtgtaaattagttcatccattgtggaagacattgtggtgattcctcaaggatctagaacaagaaataccatttgacccagcaatcccattactgkctatatacccaaaggattataaatcattctataaagacacatgcacacatatgtttattgcagcactattcacaagagcaaagacttggaaccaacctaaatgcccaccagtgatagactggataaagaaaatgtggcacatagacgccatggaatactatgcagccataaaaaggatgagtttgtgtcctttgcagggatgtggatgaagctggaaaccataattctcagcaaactaacccaggaacaaaaaaacaaacaccacatgttctcaatcataagtgggatttgaacaatga

SEQ ID NO: 933484 - DNA, 537 bp, Homo sapiens
tggccacctggaagcatagattcaagttgccctgtatatacactccaattagcagcagttacaagtgttttttttttttttttttttttttggttattgttgttgtttgtttgtttgtttgttttgagacaatgtttcactcttgttgcccatgctggagtgcaatggcgcgatctcggctcaccgcaatctctgcctcccagactcaagcgattctcctgcctcagcctctccagtagctgggattacaggcatgcgacaccatgcccagctaattttgtatttttagtagacacagggtttctccattttggtcaggctggtcttgaactcctgacctcaggtgatccgcccrcctcagcctcccaaagtgctgggattacaggtgtaagccaccacacccatccacaagtgggttaagaaaaaaaggaggccctttctcagttgttatcaataatttacataaaataacaaactattgattgaccatacactgttttttgcatcacaaattccaggaacatgaagatagtggct

SEQ ID NO: 933485 - DNA, 555 bp, Homo sapiens
ggttttctttagataaaacgtgagaggtgcctctggccaatttcggtcaggagtgctttctcttacagactaagaatatatattggtttcagggtgaggggacttatcacaagcttggaatgtttatgtgtgtggagaagtttatggtggggctggaatctttctgtgaggtggggaagttattttggggcagacatctttcctgcccrgagtggggttatctcagggctagtatgtctctggtcggggaggagtttggaatgtttctagttaaagatgttatttgtggtttatggtcgtgctgaccttagccattaggttgatgccctttggatttaagtgtttttttattaaggtaaactttagaatgatgggcttgtccaagatgtcgatgctcctgctctgtcacccactgttggttcccggtaaccaccattttaattctatttctgtgtattcaaacttttaaaaaaaaattatattccacatataagtgagatgattcagtatttttctttttgtgtctggcttattttacttagcagaatgtctttc

SEQ ID NO: 933486 - DNA, 555 bp, Homo sapiens
ggttttctttagataaaacgtgagaggtgcctctggccaatttcggtcaggagtgctttctcttacagactaagaatatatattggtttcagggtgaggggacttatcacaagcttggaatgtttatgtgtgtggagaagtttatggtggggctggaatctttctgtgaggtggggaagttattttggggcagacatctttcctgcccagagkggggttatctcagggctagtatgtctctggtcggggaggagtttggaatgtttctagttaaagatgttatttgtggtttatggtcgtgctgaccttagccattaggttgatgccctttggatttaagtgtttttttattaaggtaaactttagaatgatgggcttgtccaagatgtcgatgctcctgctctgtcacccactgttggttcccggtaaccaccattttaattctatttctgtgtattcaaacttttaaaaaaaaattatattccacatataagtgagatgattcagtatttttctttttgtgtctggcttattttacttagcagaatgtctttc

SEQ ID NO: 933487 - DNA, 610 bp, Homo sapiens
ctacaggcgcccaccaccacgcccggctaactttttgtatttttagtagagacggggtttcaccgtgttagccaggatggtctcgatctcctgacctcatgatccacccacctcaacctcccaaagtgctggaattacaggcatgarccactccacccagcccttggaagccatcattcttaacaaactaatgcaggaacagaaaaccgcatactccatgttctcacttataagtgacagctaaaggatgagaacacacggacacagagcgggagaacaacaagcactggggcccacctcagggtggaaggtaggaggaggaagaggaagaggggcataaaataacttttgggcactaggtttagtacctggatgatgaaataatctgtacaacaaacccccatgacaggagtttacctatatagcaagcctacacgtgtacccctgaacctgttttgctttaaaaaaaaaaaaaagaagcccacacattattaataaataaatgtaatagagtcactcaatggaataaactacagcgataaaataaatagacaaataagccagaaaaaaataatgagagggcatgtaagtttacatagaatggtcaggg

SEQ ID NO: 933488 - DNA, 614 bp, Homo sapiens
gggactacaggcgcccaccaccacgcccggctaactttttgtatttttagtagagacggggtttcaccgtgttagccaggatggtctcgatctcctgacctcatgatccacccacctcaacctcccaaagtgctggaattacaggcatgaaccactccacccagcccttggaagccatcattcttaacaaactaatgcaggaacagaaaaccgcatactccatgttctcacttataagtgacagctaaaggatgagaacacrcggacacagagcgggagaacaacaagcactggggcccacctcagggtggaaggtaggaggaggaagaggaagaggggcataaaataacttttgggcactaggtttagtacctggatgatgaaataatctgtacaacaaacccccatgacaggagtttacctatatagcaagcctacacgtgtacccctgaacctgttttgctttaaaaaaaaaaaaaagaagcccacacattattaataaataaatgtaatagagtcactcaatggaataaactacagcgataaaataaatagacaaataagccagaaaaaaataatgagagggcatgtaagtttacatagaatggtcaggg

SEQ ID NO: 933489 - DNA, 610 bp, Homo sapiens
ctacaggcgcccaccaccacgcccggctaactttttgtatttttagtagagacggggtttcaccgtgttagccaggatggtctcgatctcctgacctcatgatccacccacctcaacctcccaaagtgctggaattacaggcatgaaccactccacccagcccttggaagccatcattcttaacaaactaatgcaggaacagaaaaccgcatactccatgttctcacttataagtgacagctaaaggatgagaacacayggacacagagcgggagaacaacaagcactggggcccacctcagggtggaaggtaggaggaggaagaggaagaggggcataaaataacttttgggcactaggtttagtacctggatgatgaaataatctgtacaacaaacccccatgacaggagtttacctatatagcaagcctacacgtgtacccctgaacctgttttgctttaaaaaaaaaaaaaagaagcccacacattattaataaataaatgtaatagagtcactcaatggaataaactacagcgataaaataaatagacaaataagccagaaaaaaataatgagagggcatgtaagtttacatagaatggtcaggg

SEQ ID NO: 933490 - DNA, 614 bp, Homo sapiens
gggactacaggcgcccaccaccacgcccggctaactttttgtatttttagtagagacggggtttcaccgtgttagccaggatggtctcgatctcctgacctcatgatccacccacctcaacctcccaaagtgctggaattacaggcatgaaccactccacccagcccttggaagccatcattcttaacaaactaatgcaggaacagaaaaccgcatactccatgttctcacttataagtgacagctaaaggatgagaacacacggacacagagcgggaraacaacaagcactggggcccacctcagggtggaaggtaggaggaggaagaggaagaggggcataaaataacttttgggcactaggtttagtacctggatgatgaaataatctgtacaacaaacccccatgacaggagtttacctatatagcaagcctacacgtgtacccctgaacctgttttgctttaaaaaaaaaaaaaagaagcccacacattattaataaataaatgtaatagagtcactcaatggaataaactacagcgataaaataaatagacaaataagccagaaaaaaataatgagagggcatgtaagtttacatagaatggtcaggg

SEQ ID NO: 933491 - DNA, 579 bp, Homo sapiens
ttgtgttgaactggtcagggaagaaggcatgagataaaatttaagcagggggaatcatagattactgaatgtcttgcagggaaaatcatatagtaactgtcttgacgcttctactgttattctgatggctttgggatgtcagggaatgagttccatttggtggtgctcaaatcctggtattcctctatacaagtgggagttttttaaatcaggatgacttgctttgatatttaaagcatgtctccttaaaacagctaatactgtatatttccyaagatggattccaaagctcttttgtgtacataccttacacacatcctgttagctattccttccttgacacgcttggcttctgagatgccactctctcctagtttggttccctagaatggtttcttgaccattcggtcttgagattcttttcctttacccactaataatttggtgtcccaggattagactgagaaccatggctgtgtgtgctccctgggagactatagtgtatctactcttttaccttgggatgtatgtttgcagatgattcaaaagtctgtctccatccctgaccactccccctat

SEQ ID NO: 933492 - DNA, 581 bp, Homo sapiens
  misc_feature 541, 542, 543, 544, 545, 546, 547, 548, 549, 550, 551, 552,553, 554, 555, 556, 557, 558, 559, 560, 561, 562, 563, 564,565, 566, 567, 568, 569, 570, 571, 572, 573, 574, 575, 576,577, 578, 579, 580, 581: n = A,T,C or G
tgctcttttacagcagccctgtgctgcctcccagaccttggagaacctactgtgtgcccagcagagggttaggagctagggatgcaaagataaagaaaggacacatacaattaaaattatgacaaaggcctgtttggctgtcctaaatgtcattatatatgcctctgtctcattccatggggtatctggtatattcagagtcctgaggagactcaagctgagctcaaaggacacgtaggaggtaagagggctaagaagggaagggtgtgcctgggaggggcaacagcaggtgccagggctcggtagcctcagagcaaggtgctcatgaatttggggatgggcaatrctaacatgcacaagtcctgtccagtctgcattttccaaatttgttagactacagaatattcacctccatcaccctgttaaaatagagtttaggaagtggtagacagaggaaagaaaccagcaaagacatgccctctgttcttgctggggtgtggttctggatagaatcgatgtgtgcaaatgatgccagcgaggnnnnnnnnnnnnnnnnnnnnnnnnnnnnnnnnnnnnnnnnn

SEQ ID NO: 933493 - DNA, 663 bp, Homo sapiens
ggctgtacactgcaaagctacaggggcagagcttcccaaggccacaggagcccaccttttgcatcagtgtgccctagatgtgagacatggagtcaaaggagattatttcatagctttaagatttaataactaccccattggattttggacttgcatggggtctgtagatmctttgtttgggccaatttcttccatttggaatgggagcatttatccgttgcctgtatgcccattgtatcttggaagtaactaactttcttttgattttacagactcctatgcagaagggacttgctttgtctcagatgagactttggacttggacatttgagttaatgctgaaataagttaagactttgggggaatgtggggaacacatgattggttgtgaaatgtaaggacatgaaatttgggaggggtcagggcggaatgatatgtttaggctttgtgtccccaccaaaatctcgtcttgaattgtaatccccaggggtttaggcaggacctggtgggaagtgattggattatgggggcagttcccctcatgcttttcttatgatactgagttctcacgagatctgatggtttattaagtgtctgtcatttcccctgtttgcactccttctctctcctgctgccatgtgagatgttccaagcttgcttctc

SEQ ID NO: 933494 - DNA, 663 bp, Homo sapiens
ggctgtacactgcaaagctacaggggcagagcttcccaaggccacaggagcccaccttttgcatcagtgtgccctagatgtgagacatggagtcaaaggagattatttcatagctttaagatttaataactaccccattggattttggacttgcatggggtctgtagatcctttgtttgggccaatttcttccatttggaatgggagcatttatycgttgcctgtatgcccattgtatcttggaagtaactaactttcttttgattttacagactcctatgcagaagggacttgctttgtctcagatgagactttggacttggacatttgagttaatgctgaaataagttaagactttgggggaatgtggggaacacatgattggttgtgaaatgtaaggacatgaaatttgggaggggtcagggcggaatgatatgtttaggctttgtgtccccaccaaaatctcgtcttgaattgtaatccccaggggtttaggcaggacctggtgggaagtgattggattatgggggcagttcccctcatgcttttcttatgatactgagttctcacgagatctgatggtttattaagtgtctgtcatttcccctgtttgcactccttctctctcctgctgccatgtgagatgttccaagcttgcttctc

SEQ ID NO: 933495 - DNA, 663 bp, Homo sapiens
ggctgtacactgcaaagctacaggggcagagcttcccaaggccacaggagcccaccttttgcatcagtgtgccctagatgtgagacatggagtcaaaggagattatttcatagctttaagatttaataactaccccattggattttggacttgcatggggtctgtagatcctttgtttgggccaatttcttccatttggaatgggagcatttatccgttgcctgtatgcccattgtatcttggaagtaactaactttcttttgattttacagactcctatgcagaagggacttgctttgtctcagatgagactttggacttggacatttgagttaatgctgaaatragttaagactttgggggaatgtggggaacacatgattggttgtgaaatgtaaggacatgaaatttgggaggggtcagggcggaatgatatgtttaggctttgtgtccccaccaaaatctcgtcttgaattgtaatccccaggggtttaggcaggacctggtgggaagtgattggattatgggggcagttcccctcatgcttttcttatgatactgagttctcacgagatctgatggtttattaagtgtctgtcatttcccctgtttgcactccttctctctcctgctgccatgtgagatgttccaagcttgcttctc

SEQ ID NO: 933496 - DNA, 731 bp, Homo sapiens
tgaacaaggcagagaggagcttcattgagcagcataacagttctcaggagacctgaagtggctagctcccttccacagggaatcctgacatctgtgcagccctcattggaaaggagacctggagttggtagctcctatccgcaggcaggctgtcccatcatctacccagagtctgactgagtctagggtttttatgcacttcagaggagaggaagtacatgctcattgattcatgggtggccctgggtgggcccacaaaatgcaccataagttctagtctgtggaactggaagcccagcccccaggcttcaggccatcactggcttgaaggtgaggcttcatgggcaccaatccctttccactcaggagcctgtctgcctcctgcccccatcaacctgcagtccttkgtgcccacagtacctaggctgttcatgccaagtggaacctgcaggcccacaccaaactgcctttagccccacctcagtctccctcccatgttcgtgggtgtctaaagtctggagagggctgaggttgcagggggctggtgtgtcaacactgccccgaatgtgtgcacacccagcgaagtcatgacagtgcctgggcttggcctcaactttgctccaaaatcagagcaggcatcaagagcagggagaggccaggcagtgggagtaggtacttctgagactgcaggggcagggagctttccatgtcaccaagagcacagggatgcc

SEQ ID NO: 933497 - DNA, 594 bp, Homo sapiens
gaagaagatatcaagtctatccaagacaaacaattgctaggagaatttgccaccaccaggccaaacctacaggagagacttaaggaagttctaaacatggaaatgaaagaaaaatacttgctaccacaaaagcacacgagtacatagcccacagatcctataaatgaattacacaaatgagactacaaagcaattagctaacaacactatgacaagaataaaatttctatatcaatattaaccttgaatataaacagtctaaataatccacttaaaagacatagagtgacaaattggattaaaaatcaagacttatttttctgctgcatgcaagagatgatctaacttgtaaygacacacatatgctcagagtaaaaggatggagaaagaactatcaaacaaacggaaagcaaaaaagagcaggtatcagataaaatagactttaatccaacaatggtaacaaaggagaaagaaaggcattgcataatgatgaaggattcaattcaagaagaacatttgactattctaaatatatacacaccaacattggtgcacccagatttaaaaaatactacttctcgatctaaaaaaaaa

SEQ ID NO: 933498 - DNA, 564 bp, Homo sapiens
atttttatataaggtgtaagaaggggtccagtttcagtttctgcatatggctagccagttttcccagcaccatttattaaatagggaatccttttcccattgcttgtttctgtcaggttagtcaaagataagatggttgtagatgtgtggtattatttctgagatctctgttcagttacattggtctatatgtctgtttttgtaccagtaccatgctgttttggttgctgtggccttgtagaatagtttgaagttaggtaacatgatgacttcagctttgttctttttgcttaggattttcttggctacacggactcttttttgtttctacatgaaatttaaagtagttttttctaattctgtgaggaatgccaatggtagtttgataggaatggcattgaacataaattactttttcaagatattgattttyaagatattgattcttcctatcttgatattgatcaagattcttcctatccataaagatgtattttgtgtatgtgtgtgtgtgtcctctcttatttccttgagcagtagtttgtagtttccttgaagagctcc

SEQ ID NO: 933499 - DNA, 749 bp, Homo sapiens
aaaatattttaccatattaacacagtaaaggaaaaaattcatgattatatcaatagatgcagaaaatgcatttgacaaaattcaacacccattcatgataataactatcagcaaactaccaataaaaggagcttcctcaatctgataaaaatcatccagctaacattatacttaattcagaaatattgaacattaagatcatgagtcaggcaaagttttctactctcaccacttctgttcaacactgtgctagaattctagccagtacaaggtggcaaggtaaaaacaactcctacagattggaaaggaagaagtaaaactatctttattcacagaaaacctgattggttatgtagaaaatcctaaggaatctattaaaaagctactacaattaatgaatgaatttagcaagttttcaggatatatgattaatacacaagaaaataaattttaccaaagacaggaaagacttccaccctaaaaacaaaacaacacaaaatgctgagagaaataaaaaaaaaaaaaaaccaaacatgtagaaaatagattatgtttatggactgaagattcataattgttaagatgacarttctccacaaaatgatctatagactgaatgcaatcctaataaaaatcacaacaaactattttgtagaaattgaaaactactttaaaatttatgtggacatgcaaatgatctagaatagctaaagcagccttgaaaatggagaagagaattggagggttca

SEQ ID NO: 933500 - DNA, 818 bp, Homo sapiens
acaacagctcccaggcaatgaaaacccttcttctggattatttccattgacgatttgttcctaaagttaggaaatatctttccagtgtggtactatcttttaaagttattttgatattggacaatgcccctggccacccagaccccagaagttcaatagtgaaggtgtcaaaatgttctacttgccccaaacacaacatctctaatttagcctctagaacagagggtcataaggacccctgatgctcattacacgtggttctctatgagaagaattgtcaatgctgtggaagagaagcctgatatagagaatatcatgaaagtttgtaaggattattgaaaataccattgttaatattttaaaaagctgtgaaagccagcaggctttcaatgcaatactggtgaagaaaactgtccagatgtcaygcataacttcatgggattaatgatacagccaatcaaggaaatcatgaaagagattgtggatatggaaaagaaggtgagggttaggatgttgaagggcttcaagatatgaatcttgcaaaaatttaagagctaatagacgccactacagaggaatttatagaagatgatttgataaatatgaatgcttcaaaaacagtgccagaacacaaactgactttagacaatctggcagaaagattctaattatacaagactgcttttgatttctttcatgacatggaccctcctatgatatgggcattgaaactaaaataataagttgaagagggcttggtatcacataacaacatttttagagaaatgaaaaaagcaagaaagtcagacagcaaatac

SEQ ID NO: 933501 - DNA, 640 bp, Homo sapiens
gctaaataaagcaaacttggccttgctgatctgcattgaaacagagattaggaactaaacagaaatgtcagaaaggcccatgcctacaggaagcaatctgggtaataacacagggaaaatgttactgggttttgtctgggctttcttatcaaaagcgtgatctatagaattacagcatcagtaacataagggaactagacagaaatgcagaatattgggtccaggatacaattgcatctggataaatatttggcctattagataacctgtctttctaataaaaagtctcaagcctgttggatataccataagttcacagtgggcaggtactatattttataggtttgccactcaaagtgtgtccctggatcagcagcagcagcagccatcacctggaagatgattggaagagcacaatctccacccttccccagwcctactgaatcagaatccacacattaacaagatccccagatgattgatataaacaataaaatgtgagaaaccctgatcctaccaggccactgattctcacccttggctgcaaattagaatcacctgggagcaaaaaaaaaacaacaacaaaccttgatccaactcctagacagccaactagcccctattgtgtcttagtgcaaat

SEQ ID NO: 933502 - DNA, 579 bp, Homo sapiens
ccaaggagagtctgagctctggcacacctagctctgcccccacctgatggttctttcctacccaccctggtagcggaagacaaaggacgtataatcttgggagttctaaggcctcacacaccgctagtccctctccatgctaccatagctgatggtctttggaaaacaccacctcccggaaggaggccaaccagcacaaaaayagagcattaaaccaccaaagaacccttatggagtccattgcaacccccgccccaccacctccaccagaacaggcactggcacccacggttgagagacccatagatggttcacatcacaggactctgtgcagaaaaccctcagtaccatcctggagctgggtagacttgctgggtggctagatccagaagagacacaacaatcactgaggttcagttcacaggaggccacatccataggaaaagggtaagagtactacatcaagggaacaccccatgggacaaaagaatctcaacaacagcctttagccctagatattccctctgacagagcctacccaaataagaaggaaccagaaaaccagccctggtaatatga

SEQ ID NO: 933503 - DNA, 746 bp, Homo sapiens
gaatcggccttatattcccctgcctccagaccctattttcctgcctcatctcccccctgagagatgtgatccccataaatctttatgggaggcagagggactgatggttttctcttgtaactacttcatgctggcttggggcatagtccctacctattggggatcacggaactcttgccctgttatggctagtggaggcagggtagcttcttgatggccaggggtgatggcttcacctggaattggmtggaacctttgttgcatgaccatctgaagcttgatagtctctaggcaggaggaaatgacttttcttttttttttgatacagagtctcactctgtcacccaggctggagtgcagtggtgcaatcttggctcactgcaaactctgcctcctgggttcaagaaattctctgcctcagcctcctgagtagctgggattacaggagcccaccaccacacccagctaatttttttgtatttttagtagagatgggggtttcaccatcttgcctaggctggtcttgaactcctgacctcaggatccacccgcctcccaaagtgctgggattataggtgtgagccaccatgcctggccgaggaaatgaatttgattaaaaaatttaatgggaacttcagggggtggatacctatgctgttatagagatttgcaggagaaaaaacaaaacctggtctgttctggaatctacgtgtttccttaaagtcttagcatgagcaactccattt

SEQ ID NO: 933504 - DNA, 746 bp, Homo sapiens
gaatcggccttatattcccctgcctccagaccctattttcctgcctcatctcccccctgagagatgtgatccccataaatctttatgggaggcagagggactgatggttttctcttgtaactacttcatgctggcttggggcatagtccctacctattggggatcacggaactcttgccctgttatggctagtggaggcagggtagcttcttgatggccaggggtgatggcttcacctggaattggatggaacctttgttgcatgaccatctgaagcttgatagtctctaggcaggaggaaatgacttttcttttttttttgatacagagtctcactctgtcacccaggctggagtgcagtggtgcaatcttggctcactgcaaactctgcctcctgggttcaagaaattctctgcctcagcctcctgagtagctgggattacagragcccaccaccacacccagctaatttttttgtatttttagtagagatgggggtttcaccatcttgcctaggctggtcttgaactcctgacctcaggatccacccgcctcccaaagtgctgggattataggtgtgagccaccatgcctggccgaggaaatgaatttgattaaaaaatttaatgggaacttcagggggtggatacctatgctgttatagagatttgcaggagaaaaaacaaaacctggtctgttctggaatctacgtgtttccttaaagtcttagcatgagcaactccattt

SEQ ID NO: 933505 - DNA, 747 bp, Homo sapiens
aggacattttgtttcacttccatccacttctgtttctttatctcaaacactgggaaaatcatagtacctgtcaagtaagggtgtcagaagactgggtgacgtaagtaaaccacttcagtaaaagccttgcatgaagttggcactcagggggcctgaggcattgttgttgttcttcagggatactctaaggactaagaattgttttcttagtgacaagttctcagagaaccaatttagatactgggagattggtaattacactttttattagctccactctctcaaggaagtgacttttctttcgtctttcttggaatttgggatatatcaattagcatgtgttcatggaacacctcactactccacagtggctaaaaacatgaggaaattcattatttacttgcccagaagtttgaagataggcagtgccaggattggtttggcatcttaataatgtctgagtgtggggttagggaagctctttgattccttcaacttttccctctgggccacaagatggctgctgaagcaccaggcatcacttycctacatggttgcatttaaaggcacaaagtaaggaaaaggacagagcggtgagagagagagaaagagatctcttagtgtcctcttatcaagaagaaaaaaagtcattttccccttatatcttttcagtcatcttccccttatatcttttggccagaactaaattagatcaccatccctaactgcagagaaagctgggaaggg

SEQ ID NO: 933506 - DNA, 781 bp, Homo sapiens
taatggcatttgtagcaatctggatggaattggagaccattactctaagtgaagtaattcaggaatagaaaaccagacactgaatgttctcattcataagtggaagctaagctgtgaggacacaaaggcataaaaatgatacaatggacttcggggacttggaggaaagggagtgaagaagatgagggataaaagactacacattgggtacagtgtacactgcttgggtgatgggtgcaccaaaatctcagaaatcaccactaaagaacttattcatgtaaaaaataataaattttaaaaaacaagaaaatttttcaaaaaataagtaaataaagactaattaaatttttttttctgaaggtacaaaactcaatggtaatagtaaatacacagaaaaaacacagaatattataacactgtaattgtggtgtataaaattcttaggtattaaatagaaagaaaaaagatgaaccaatcaaaaataataaaatctttttaagacatagtamaataaggtagaaacaacaaaaactttcaaagtaaggggatgaagttaaagtgtaaagtttttattagttttcttttttcttgtctgtatgcttgcttatgtaaccagtgttgtcatcagtttaaaataatgggtcataagatattattgcaagcctcatggtaacttcaaatcaaaagcatatgacagatacacaaaaaataagaagcaagaaattaaaacatactaccagaaaaaaaacaccttcacattaaaaaaaaaaaaaagtcggaa

SEQ ID NO: 933507 - DNA, 732 bp, Homo sapiens
gtattgagttgcgacagagattgacccctgaaacttaaaatatctgctatctggctctttcccaaaaatatttgtcccttagctagatggcagagaattaaatcatttccagtaaagactatcttatcacttatttccaagtcattaagtaaatatgaccttggaggtgaaacttaaaagcgatctatttaaagatgcatatataaataatctttttaatgatcacggaggggaggtttgctttttttctgaaaaataacgttatcttttcagatatttaatatgtggaagcacttaactataatagtttttgttttctttttactttagatgaatagtggaaaataagcagtttttttcattgacaagtaaaattgtatatatttatggtgtacagcatgacgttttgatatttgtatacattgtggaacggctaactcaarctttttaacatatatagtacctcacatacttattattgtttgttttgtgtgtgtgtgtgcagtaagaacacttacaatctactcttttatcaattttcaagtacacaatatattaactgtagtccccgtgatgtataaaagatctcttgaacttattcctcttgtctaactgatattttgtgtcgtttgaacaacacgtctccaatatctccacctccccagcctctggtaactagcattttactctttctttttgtaagtttcactgttttgcttttttttttttttt

SEQ ID NO: 933508 - DNA, 687 bp, Homo sapiens
ctaactaagccctggagctacaattatctggtcgcattaaactgaaatcacctgaaaaacttcacactgaacaagcctttggaaatgtctaatctgccagtttacacccagaagtgaaagtggaattcacttgttaaagacaagaaaacaaaagttttctgccaggaagagtctcatcttagaaccagtatagggtctgaagacatttctgcaatttatgtttatgccattctttcacttttatttaaaaaggagatttaacctgaccattctctttgaagccratgtcccaagtatatatgtttgatgagggtacagaagacataaggaataaaactgcattgccacagagggaatacacggctccagatacaaggctttatgctaattttagcaaaatgtatgtatctttttacatacataaagttatggcactatataaagagatccttaaatgtgacatacactgaagtcctatttactgcctgagtattccttttaaaaaataaaaactacaagtagtggttgtattaatattaaactatctccaaaattcactttagttctttaacttgtaagatatagccaaatcatatgctcaaaattaaaaccctgattttagtaccagattacagttatttaatggtagatcaaaagcagctaatctttggctccaaattaggacct

SEQ ID NO: 933509 - DNA, 602 bp, Homo sapiens
gcactccagcctgggcgacagagcaagactctgtctcaaaaataataataaaataaaataaaccaaatatttcacagccttctcttgagctagatgcacccatgcagtcaagtttcaaggatgtaagcaaaagcagtgtgtgtgatttctgggacagttgggtaggatgcatgcctttcctgtcctcttaatttttcctgatatattaagtgtagagaaacggctggaggatttgctcatgaggtaggctgagagacggtacatctatgacatagatgagcctgtgttcttgaaatcatggcgagctatgtttgttytagactgtctgtctcaggatcttttgaacagagagacatgcttttatcttgtttaagcctttgttattctggcttatcctattattagttgaatctaagcctaactaattatgctgaccatctgccttctttacaattatatatttaaatgccacagtttcctcttctgtaaaatgaaaataataatggtacccaacttatgaacttgtggtgaagatcaatgatttgatagtccctagtacataacaaacattaaaaatgttggttatcattagcattacccag

SEQ ID NO: 933510 - DNA, 602 bp, Homo sapiens
gcactccagcctgggcgacagagcaagactctgtctcaaaaataataataaaataaaataaaccaaatatttcacagccttctcttgagctagatgcacccatgcagtcaagtttcaaggatgtaagcaaaagcagtgtgtgtgatttctgggacagttgggtaggatgcatgcctttcctgtcctcttaatttttcctgatatattaagtgtagagaaacggctggaggatttgctcatgaggtaggctgagagacggtacatctatgacatagatgagcctgtgttcttgaaatcatggcgagctatgtttgttctagactgtctgtctcaggatyttttgaacagagagacatgcttttatcttgtttaagcctttgttattctggcttatcctattattagttgaatctaagcctaactaattatgctgaccatctgccttctttacaattatatatttaaatgccacagtttcctcttctgtaaaatgaaaataataatggtacccaacttatgaacttgtggtgaagatcaatgatttgatagtccctagtacataacaaacattaaaaatgttggttatcattagcattacccag

SEQ ID NO: 933511 - DNA, 619 bp, Homo sapiens
caccatgtttaactttttgaggaattgccagtgttttcctctattggattttttgacttgatacctatataactttaataaatatttttattttattattttttgagacagagtcttgctctgtcacccaggctggagtgcagtggtgcgatcttggctcactgcaaactcctcctcccaggttcaagcaattcttgtgcctcagcctcccaagtagctggaactacaggcatgtggcaccatgcccagtgcaatggttcccattcagggggctctgccctgtcttgtcccagcccctgtacctaacaacaaaggcccgccaaactcacgtggaaagccggcctgccggatcagcttctttttggacagcaccttcattgcctgcaggaaaatgaaggacagcacctttagccaggtcctgkttaaagcagggaggaaaaggggaaggagggcgcagtcggggttcctctactccaaagccggcccaagctcctggccccctggcaggctcaggtcaacagagtgagcccctcattaccagagagggtcaagcagccatggggttgtagggaggctggactcctggggtgcctccagctctgaggtgttcctgaggctc

SEQ ID NO: 933512 - DNA, 615 bp, Homo sapiens
ttgtggttgtagaaggtctggacaacgagaaccctcctggttccgtccatgttctgtccccagggtaaggaagtaccttgccaatacagaactgcttttaaaaaaaaaagagagatagggcattactccatcgcccaggctggagtgcagtggcacaatcatagctcactgcagcctcgaactcctgggcttaagtgatgtgactgtgtcagcyacctgagcagctagggctgcaggctcaagccacgtgcctggcagtaaagtaccttttaaagttgttttgattctggacaatgtctctctttggccacctatgaaccctatgagttcaaccctataaaggtgtcaaggtggtttactcgtcctcaaacacaacatctccaatttaacctctagatcgggggtcacagaggacctttaagattcagcacacatggcactctacgcagtggtccccaacctttttagcaccagtgagcggtttcgggaaagacaacttttgcgtggtgtggggtcgggtgggaaggtttcaggatgaaactgttccacctcagatcatcaggcattagactctcataaggagtgggcgacctagagcccgcgcatgcacagttc

SEQ ID NO: 933513 - DNA, 568 bp, Homo sapiens
ggtagtgcatccggtttaagcgtgtgtgtcaatcacttggttatgcaaatttcatgtgcctttaggagctgctcaagccttatctccaatataccacttccattgcataatgagctgctgctgcacatgcccagatatggcttagtggaatagagaacactccgcgtaagacgagtattttcagttcctggtcacttgtcttaggttgaccaacatgtttagtctccaccaggacaaggaacaatccagagctgtawctcaaatggaaagtaactactgaagagtgcattttattgctgaaaactctgaaatactcacataaaggttttggcaggcctcactcaacattctaatatctcacaaaaaaactgaagcaccattggataagctggtgttaaggttcaagtgatacggtatttggaatgcaaaccgggaaagctaaggagctttctccaggccatatataaagttgtacaggttacttggtaactagtcagagcagcatacacaaatatgatttatgttacatcccaaatcaatgatgctcactaaatgtttaaccattctc

SEQ ID NO: 933514 - DNA, 764 bp, Homo sapiens
atcaagggaaatcaggcatttccagcttgctcatagtggtccattttttaatccatatttcagctaaccaaacaaatgaactgttagaaccttttttaactccctgagctgcaacattaaatgcagagtccctacttagcggttccaaatcaataaattcagcctgattcaactctatgttccttccaccattatcccacacccttaatatccattcccatgccggttctccatatttctgtttatataaattagaaaactcaagcagttctttttgagtgtagcacacctcctcatggatcacactctcaacctcacctctagggcccactgggacttcaatctagttataggtttagaagcaaacaggggtgttgggggtgtctcctgaggagagtcaacattattttgcctggcagttscctcaggggaggccatcactgttgccttaggcagcacagggtttatctcctcagacaaaggtggaaaggctgatggcagcatgagtcgggttgtagaggggatgttgccactactggggatggggaagctgttactcctggcaaaaaagtttcaccagaatttacaaactcagtgtccccagcttcatcagtgtcctcccatacatccccattccacgttgcagggtcccgttcttttccaactgatgccctcactttaacagtagacacctggtgaggctgtgcatgtacctttgtcattgcaagtcagccacttgcacgataaaagcttgtgtctgtttt

SEQ ID NO: 933515 - DNA, 578 bp, Homo sapiens
ctgagtgatggaaatatctattgttttgatgaggcaactcttggtgggctcctggattttggctggttaccagaatgaccaagcaatgatttgaagcttggaagtttaatcttcacctctcatcctctggggatgagaaaggggctagagattgaatgaataacaaatcatgcytatgttttgaatgttttgaagtctgtataaaaatccctgaagtgcagagaggtttcaggttgttaagcacatctttatgccaggagggtggcataccccaactctatggtaacagaagctcctatacccaggacccttttggatctagccctgtgcacttcatcatctgcctgtccatctttatcctttatcgtatcctctataataaactagtaaatgtaagtaagcatttccctgagtttcatgagtaattctagcatattatcaaacttgggaaggggataatggcaaaccccaatttgtagtcaaatcagacagaagtctgggtaactggtgaccacccctactctgccccaccaccgcagcttgtgattgacatatgaagtggaaacagtcttgtggga

SEQ ID NO: 933516 - DNA, 578 bp, Homo sapiens
ctgagtgatggaaatatctattgttttgatgaggcaactcttggtgggctcctggattttggctggttaccagaatgaccaagcaatgatttgaagcttggaagtttaatcttcacctctcatcctctggggatgagaaaggggctagagattgaatgaataacaaatcatgcctatgttttgaatgttttgaagtctgtataaaaatccctgaagtgcagagaggtttcagrttgttaagcacatctttatgccaggagggtggcataccccaactctatggtaacagaagctcctatacccaggacccttttggatctagccctgtgcacttcatcatctgcctgtccatctttatcctttatcgtatcctctataataaactagtaaatgtaagtaagcatttccctgagtttcatgagtaattctagcatattatcaaacttgggaaggggataatggcaaaccccaatttgtagtcaaatcagacagaagtctgggtaactggtgaccacccctactctgccccaccaccgcagcttgtgattgacatatgaagtggaaacagtcttgtggga

SEQ ID NO: 933517 - DNA, 578 bp, Homo sapiens
ctgagtgatggaaatatctattgttttgatgaggcaactcttggtgggctcctggattttggctggttaccagaatgaccaagcaatgatttgaagcttggaagtttaatcttcacctctcatcctctggggatgagaaaggggctagagattgaatgaataacaaatcatgcctatgttttgaatgttttgaagtctgtataaaaatccctgaagtgcagagaggtttcaggttgttaagcacatctttatgccaggagggtggcataccccaactctatggtaacagaagctcytatacccaggacccttttggatctagccctgtgcacttcatcatctgcctgtccatctttatcctttatcgtatcctctataataaactagtaaatgtaagtaagcatttccctgagtttcatgagtaattctagcatattatcaaacttgggaaggggataatggcaaaccccaatttgtagtcaaatcagacagaagtctgggtaactggtgaccacccctactctgccccaccaccgcagcttgtgattgacatatgaagtggaaacagtcttgtggga

SEQ ID NO: 933518 - DNA, 587 bp, Homo sapiens
aaaaatggcacatcaggagattatatcccccacctggctcggagggtcctaagcccatggagtctcactcattgctagcacagcggtccgagatcaaacaacaaggcggcagtgaggctgggggaggggcgcctgccattgcccagttagttgtttgattaggtaaacaaagcggccaggaagctygaactcggtggagcccaccacagctcaaggaggcctgcctgcctctgtaggctccacctctgggggcagggcacagacaaacaaaaagacagcagtaacctctgcagacttacatgtccctctctgacagctttgaagagagtagaggttctcccagcatgcagcttgagatctgagaatgggcagactgcctcctcaagtgggtccctgacccgcaagtagcctaactgggaggcaccccccagtaggggcagacggacacctcacacggccgggtactcctctgagacaaaacttccagaggaatgatcgggcagcagcatttgcggttcaccaatatccgctgttctgcagccaccgctgctgatacttagacaaacagggactggagtgtacctcta

SEQ ID NO: 933519 - DNA, 617 bp, Homo sapiens
attcacagtgttgtggtgcaagcatcaccatcatccatctctagaactcttcatcttgcaaaactgaaactctgttatcaattaaaccaggggtgtccaatcttttggcttccctgggccacattggaagaagtcttgggccacacataaaatayactaatgatagctgatgagctaaaaaaaaattgcaaaaaaaatcataatgttttaagaaagtttaccaatttgtgttgggccgtattcaaagccatcatgggccacatacagcccgtgggcaatgggctggataagcttgcattaaacaatagctccccattcctcccttcccccagcctctgacaaccaccattctactttccatctccatgaatttcactactctaggtataagtagaatcataaaatatttgtcctttttgtgactggcttatttcacttagtataatgtcttcaaggttcctccatgttgtagcgtatgttagaattccctccctttttaaggctaaataatattccattatctgaatagaacacattttgtttatccatgcatccgtcaatggacattggagttgcttccaccttttgaatattgtgaaaatgggtgtataaatatc

SEQ ID NO: 933520 - DNA, 529 bp, Homo sapiens
gattgatagaagagtaacaaaacgtatacataggacatttttaggcggcaataaatgtttttaaggaaacagaataggatgaaatgactgaatctctaagacacattccagctaggaaaacaaaaaacattctaggtattttaacagagggatttaatacagggattatttacccaggtgtagaaaagctaaaaaaaagcttaatatttcttgagaaaagaacgcagaggttaagagttgcaagaaactgttaccactcctatggttggagggacagagggaagaggtgataytgctagtgcgcaagtacggggactgtttggtggaagttagaaccatagtcgtagctgtcctggatgatgttgctggaggatatgagaagacggtaaggggagctctcaaggagttggaaccacataggagacaaagccattagcagaaaatgctgcaagaagcaggaagaaaaacacatactcgagttcttccttcttcttctcctccaaccttgcaccagtgcctccaaattggc

SEQ ID NO: 933521 - DNA, 833 bp, Homo sapiens
gagggagtggcctatgaagcagcagctcaagaacagccgtgtgtcacttaacagggataggttctgagaaatgtgtcactagcgatttcctcactgtgtgaacatacagtgtacttacataaacttagatggtatagcctattgcgtctaagcatacaatatgttactgtattgacactgtaagcaatggtaaatatttgtctatctaaacatatgtaaacgtagaaaaggtccagtaaaatatgggcataaaagataaaaaggtacacccatatagggtacttaacttgaatggagtttgtgggactggaagttgctctgggcaagtcagtgagtgagtggtcagtgaacatgaaggccaggggcattagtgtacactactatggactttataaacactgtacacttaggctatgctaaaaatatttttcttgttttaataatcaattaaccttagcttactgtaactttttaaatttataaacttttaattttatataactttttgactcacaatatcacttagcttaaaacayacgttggccagaacaagcctataatcccaacattttggggggctgaggtgggatgatcccttgagcccaggagttcaagaccagcctgagcaacatagtgagacctcgtctctacaaaaagtaaaaaaattagctgagtgcggtggtgcatgcctgtagtcccaggtacttgggagcctgagttgggaggatcccttgagcttgggaggcagaggttgcagtgagccaagattgtgccactgccctccagtctgggtgacagaatgagaccctgtttcaaaacaaaaaccaaaaaac

SEQ ID NO: 933522 - DNA, 690 bp, Homo sapiens
aggtgcagctcaggccactgctgcagagggtgcaagtcccaagccttggcagcttccatgtggtgttgggcctgcaggttcacaaaagtccagagtttaggtttggaaacctcagccaagattgctgaggatgtatagaaaccactggatatacaggcagaggtgtgctgcaggggtggagcccacatggagaacctctgcaggagcagtgcaaaggggaaatgtgggaccagaacccccacacagagtccccactggggcactgcctaatggagctgtgagaagagggccaatgtcctcaagaccccagaatggtagatccagtgacagcttacaccatgcaccygaaaaagccagagacactcaatgccagcccctgaaggagctgtccaaggctgtgggatcccactccttgcatcactgtgccctgattgtgagatgtggagtcaaagggaattattctggagctttaaaatttaatgactgccccactggattttggacttgcatggggcctgtagcccctttgttttggcaaatttctcacatttggaacaggggtatttatccaatgtttatacctccactgtatcttggaagtaactaacttgcttttgatcttacaggctcctaggctgaagggacttgccttgtctcagatgagattttagacttgaacttttgggttaa

SEQ ID NO: 933523 - DNA, 695 bp, Homo sapiens
aatttaatgactgccccactggattttggacttgcatggggcctgtagcccctttgttttggcaaatttctcacatttggaacaggggtatttatccaatgtttatacctccactgtatcttggaagtaactaacttgcttttgatcttacaggctcctaggctgaagggacttgccttgtctcagatgagattttagacttgaacttttgggttaacgttggagtgagttaagactttgggggactgttgggagggcatgattgattttgaaatgtgaaaagacatgagatttgggaggggccaggagcagaatgatattgattggctctgtgctcccacycaaatctcatctccaattgtaatccccatgtgttaagggagggagctgaaatccccatgtgttgaaggagagagatgattggatcatggggtcagtttcccccatgctgtttttgtgatggtgagtgagttctcatgaaatttggtggttctatacgtgtctggaagttcctccttcactcttctctctcctgccaccttgtgaagaaggtgtctgcttgcccttcaccttttgtcatgattgtacgtttcctgaggcctccccatacatgtggaactgagaatcaattaaacctctttcctttataaattacccaggctcagatagtgtctttatagcagtgcaaaagtggg

SEQ ID NO: 933524 - DNA, 695 bp, Homo sapiens
aatttaatgactgccccactggattttggacttgcatggggcctgtagcccctttgttttggcaaatttctcacatttggaacaggggtatttatccaatgtttatacctccactgtatcttggaagtaactaacttgcttttgatcttacaggctcctaggctgaagggacttgccttgtctcagatgagattttagacttgaacttttgggttaacgttggagtgagttaagactttgggggactgttgggagggcatgattgattttgaaatgtgaaaagacatgagatttgggaggggccaggagcagaatgatattgattggctctgtgctcccacccaaatctcatctccaattgtaatccccatgtgttaagggagggagctgaaatccccatgtgttgaaggagagagatgattggatcatggggtcagtttcccccatgctgtttttgtgatggtgagtgagttctcatgaaatttggtggttctatacgtgtctggaagttcctccttcactcttctctctcctgccaccttgtgaagaakgtgtctgcttgcccttcaccttttgtcatgattgtacgtttcctgaggcctccccatacatgtggaactgagaatcaattaaacctctttcctttataaattacccaggctcagatagtgtctttatagcagtgcaaaagtggg

SEQ ID NO: 933525 - DNA, 585 bp, Homo sapiens
ggctgaagcaggagaatcactggaacccaagaggtggaggttgcagcaagccaagataatgccactgcactccagcctgagtgacagcgagactgtctcgaaaaaaaaaaaaaagatttttaatggttgcataatatttcatctctagataaaacataattttaccaacctcctatttttggacatctaagtttttaacttttttgttatatatttccctgctatgaaaattcttacaggtaaatatttgcccacatttctttatgtgttatttctgtagaaaagttttctagaagtgaaacagccataaatgaacctgtaaactaaactgcaaactgccaaagtgcctccaggaaggttgttaccgtttacatcccctccagtattgtaaaagggacccgctgtttcagttagcgccatgttcccccagacccttgatgggaagkccccagagacttggcaagcatttctcattataatgtttcctccccaaataagagagctctgaggaaagaaaagatgaaggaataagaaaggggaatgatgactatagtgggaagagagaagaggtggaaaaatgaagga

SEQ ID NO: 933526 - DNA, 610 bp, Homo sapiens
taaattttaatgtagagattatatttatctatatcataaccagggccttagaattttgcaatctaattgttatattcaatggttctcaaacaattctttggagccgaggaagcctttctttagatgaaatctctcaaaaaagaccaatatatgtagcagttaaaataagagctgctggaatactactcagcaataaaaaggaaaaataaagcactgatacacaagacaatttgcaggaatttcaagggaacttaactgagtggaaaaaccaatctcaaaaggtcatgtactgcatgatcccatttatataatcttgaaatgacaaaattctagagatggagaacagaatagggattgtcagggattagggaggcgaggaccctgggaaataggtgtggctttactagggtagcacaaaggtatatttgtaatgattgctctatatctttactctgatggtcccaygtatctacatgtgataaaattgcatagaactgaacacacacatgcatacaaatgagcacatggaaaactggtgaaatctgaagaaggtcagtggattgcatcaatgtcaatttcttggtcgtgatgttgtacaagatatgcaaaa

SEQ ID NO: 933527 - DNA, 753 bp, Homo sapiens
ctcagctgatctggttgtttgataagcattcggcactttccccttctggctctctctctcctgccaccacgtaagatgtgccttgcttcccctttgccttcttccatgattgtaagttccctaaggactccccagccatgtgaaacttgagtaaattaaacctcctttctttataaattacctagtctctggctgtatctttatagcagagtgagaacgaactaatacagaagccagttataaaagaccacatattgcamgattcattcatataaaatgtctagaacaggaaattctatatatagagaaagcagatccctaattgacagggctgggagggacaggggttaggggaatcagctaaagggcacagtgtttctttttgaatgttcaaaaatggaccgtggagatagttgtctgtatctgtaaaaatactgaaaatcattgagttgtacactttcaaggagtgaattgtatgacgtgtgtgatttatatctcaataaatttgtttaaagaaataactcagagttggccaggcatggtcgctcatgcctgtaatcccagcactttgggaggccgaggcaggcagatcacttcaggtcaggagtttgagaccagcctggccaacatggtgaaatcccatctctactaaacaaaaatacaaaaattagccaggcgtggtgctgtgcacctgttatcccagctattcaggacgctgaggcagcagaatcgcttgaacccaggaggcggagt

SEQ ID NO: 933528 - DNA, 720 bp, Homo sapiens
atgggagagtgcagtgactagaggactttacattgaactcagtgctgctctgccacaatggagagcaaagttgtgctgggctcactcagcattcacacacagagggggcatttgaaccagacctagccagtggggaatcgcccatctagctgttggaactcgagttcctcagcaagcctcgccagtgcaggccaaagtgctctggggtcctaggtaaacctgaacagcagactaggacacaaggactgcaattcctaggcaactcctagtgctaggctgggcttagagccagtaaactagggtggcacatgacctagggagacacaagctggtttggctatgggagggcttgcgccatccctcccccaaccccaggcagtgcagctcatagcaatgaaagtgactccttccttctgcttaaggagaggagaatgaagagtaaagaggactttgtcttgcatcttggatagcagctcagccacaacaggatagggcaccaggcagagtcatgagscccctattccaggccctagctcccaaatgacatttccagccacaccctgggccaaaagagaacccctgccttaaagggaaggactcaacacttgcaggattcatcacctgccgactaaagagtccttggaccctgaataacaaccagcaatatccagggagtatgccatgggcccgagctctgagacatgctggtttcaggggaga

SEQ ID NO: 933529 - DNA, 757 bp, Homo sapiens
ccataagacatggagaaagagtctgtgcacttggggatgggagagtgcagtgactagaggactttacattgaactcagtgctgctctgccacaatggagagcaaagttgtgctgggctcactcagcattcacacacagagggggcatttgaaccagacctagccagtggggaatcgcccatctagctgttggaactcgagttcctcagcaagcctcgccagtgcaggccaaagtgctctggggtcctaggtaaacctgaacagcagactaggacacaaggactgcaattcctaggcaactcctagtgctaggctgggcttagagccagtaaactagggtggcacatgacctagggagacacaagctggtttggctatgggagggcttgcgccatccctcccccaaccccaggcagtgcagctcatagcaatgaaagtgactccttccttctgcttaaggagaggagaatgaagagtaaagaggactttgtcttgcatcttggatagcagctcagccacaacaggatagggcaccaggcagagtcatgagcccccyattccaggccctagctcccaaatgacatttccagccacaccctgggccaaaagagaacccctgccttaaagggaaggactcaacacttgcaggattcatcacctgccgactaaagagtccttggaccctgaataacaaccagcaatatccagggagtatgccatgggcccgagctctgagacatgctggtttcaggggagac

SEQ ID NO: 933530 - DNA, 539 bp, Homo sapiens
gttttcatctagaagttgttgtctaggtctatggtccgtgaatattcaaatttgagtaggacatggcctgtccctttccaggagtgtgcagtacagcagcgaacagaagccccagtgctggaggacagcagccagggacggggtggaagaggactgtaaagaggaggcaggggttgsccgggcgcagtggcgcacacctgtaatcccagcactttgggaggccgaggcaggcagatcacctgaggttgggagttcgagaccagcctgaccaacatggagaaaccccgtctctactaaaaaatacaaaattagccaggcgtggtggtgcatacctgtaatcccagctacttgagaggctgaagcagaagaattgcttgaacccaggaggcggaggttgcagtgagccaagattgtgccattacactccagcctgggcaacaagagtgaaactccatgtcaaaaaaaaaaagaaaagaaaagaaaaaaagaaaaagaagaggtgggggtacttaacgccttcatcacaaatctggaaatgc

SEQ ID NO: 933531 - DNA, 721 bp, Homo sapiens
ccatattaactcgctacacagtccgttcttctctcatgacgtaacaacctaataatctccagctatgccacatgccttagaaggtgtgccacagtattcatctctatcatctttatccattaactcagtgctccttaaacttttggtctaaaaactccttgatgctcttaaaaatgacttaggatcacaaagagctttttttgtgatgtgggttacacctgtagatatttaccatattggaaaataaaactgagaaaaggatttaagtatttatgtattaattcctcttaaaataggccagacgcagtggctcatgccagtaatcccagcactttgggaagccaaggtgggtggatcacttgaggtcaggagttcaagaccagcctggccaacatggtgaaaccctgactctactaaaaatacaaaaattggccaggcatgataamacacacctgtagccccagctactcgggaggctgaggcaagagaatcgcttgaacctgggaaatggaagtttcagtgagctgaaatcacgccattgcactccagcctgggcgacagagtgagactgactcaaaaaaataaaaataaaaaataaaataataagcttgtcatgtgttaacagttttatgaaaaataattgttttccaaaacaaaaataaagtactggaggaatggcattatttgacatgttcacacatttctttaatatcagagttaa

SEQ ID NO: 933532 - DNA, 605 bp, Homo sapiens
atgggactataggcacacgccaccagaactggctttttttttttttttttttttttttttttttttttttttatgtagagatggagtttcgccttgttgcccaggctggtcttgaactcctgggctcaagggatcctcctgcttctgcctcccaaagtactggcattacaaacatgagccaccgggcctggcccaaaactttttaagctccaacatgacatgcaarggaaatttacactctcaaactcctgggctgaagcaatcttcccgcctgtggcctctttaagggctgggatcacaggcatgagctaccgcacccagcaggaactcctaatcaagcaaattctttgtcatcagctaaggagctcactgagtcaaacaagttgttcttgacctcctagtcttctggtaccctgggtctgctgcaggcctgtttctgggcaggccttccctggagcagcatcagactcttaattttgtgtggagttactgggtagggcactattcctatatagagccgatgatcagcagtcctcacctaagaaaagcagtcttttctagccctgtgttctgtggcagtgaagcacactaggtgttccagtcag

SEQ ID NO: 933533 - DNA, 605 bp, Homo sapiens
atgggactataggcacacgccaccagaactggctttttttttttttttttttttttttttttttttttttttatgtagagatggagtttcgccttgttgcccaggctggtcttgaactcctgggctcaagggatcctcctgcttctgcctcccaaagtactggcattacaaacatgagccaccgggcctggcccaaaactttttaagctccaacatgacatgcaagggaaatttacactctcaaactcctgggctgaagcaatcttcccgcctgtggcctctttaagkgctgggatcacaggcatgagctaccgcacccagcaggaactcctaatcaagcaaattctttgtcatcagctaaggagctcactgagtcaaacaagttgttcttgacctcctagtcttctggtaccctgggtctgctgcaggcctgtttctgggcaggccttccctggagcagcatcagactcttaattttgtgtggagttactgggtagggcactattcctatatagagccgatgatcagcagtcctcacctaagaaaagcagtcttttctagccctgtgttctgtggcagtgaagcacactaggtgttccagtcag

SEQ ID NO: 933534 - DNA, 622 bp, Homo sapiens
aaccagaggcccactcactgccttctccaccacccccatccaatctatcaccacaagattgaggattttactttctcaattgctctcaaatctgtccatttctctccacagcactagtgcaagttgccatcaccttttacctacaataatggccatagcctcctcactgaactactctgaacccttccaatctccctcccacgatgcagccagagtgaactcttcaaaacacaaatctgttgtgccaccccttgcatgaaatcttaggtagcttcccatagctcttaaagaccaaacttcataacatayccttcacggtttcacatggaatggtctctcccagcttctccagctttatcctgtcccacattccctctgctctctttgctttgcctagaagaacactcttaaagtttctcagactcactgtacttcttcctgccacaatgcttttatatgtactttttcttctaccaagaattccctctctcccttcttcacttagttaaagtagatcttagccttcttattacaaatcaaattcacagcttcagtattggaagccttttgtaaccccccgatgcatactgaggtcctcaaagcaccccaaacttcttctcca

SEQ ID NO: 933535 - DNA, 596 bp, Homo sapiens
ttccaacagtcttagcaaacggcacaccaggagattatatcccgcacctggctcagagggtcccatgcccatggagcctcgctcattgctagcacagcagtctgagatcaaactgcaaggcagcagtgaggctgggggaatcaatggcctgccattgatgaggcttgagtaggtaaacaaagcggccaggaagctcaaactgggtggagcccactgcagctcaagaaggcctacctgcctctgtagactccacctctggaggyagggcatagctgaacaaaagggagcagaaacttctgcaaacttaaatgtccctgtctgacagctttgaagagagtagtggttctcccagcacggagtttgagatctgagaatggtcagactgcctcctcaagtggatccctgacccctgagtagcctaactggaaggcaccccccagtaggggcagactgacagctcacacggccgggtacccctctgagacgaagcttccagaggaacattcaggcagcaacatttgctgttcagcaatattcgttgttctgcagcctctgctgctgatacctagacaaacagggtctggggtggacctcca

SEQ ID NO: 933536 - DNA, 601 bp, Homo sapiens
aatactgcacttttccaacagtcttagcaaacggcacaccaggagattatatcccgcacctggctcagagggtcccatgcccatggagcctcgctcattgctagcacagcagtctgagatcaaactgcaaggcagcagtgaggctgggggaatcaatggcctgccattgatgaggcttgagtaggtaaacaaagcggccaggaagctcaaactgggtggagcccactgcagctcaagaaggcctacctgcctctgtagactccacctctggaggcagggcatagctgaacaaaagggagcagaaacttctgcaaacttaaatgtccctgtctgacagctttgaagagagtagtggttctcccagcacggagtttgagatctgagaayggtcagactgcctcctcaagtggatccctgacccctgagtagcctaactggaaggcaccccccagtaggggcagactgacagctcacacggccgggtacccctctgagacgaagcttccagaggaacattcaggcagcaacatttgctgttcagcaatattcgttgttctgcagcctctgctgctgatacctagacaaacagggtctggggtgg

SEQ ID NO: 933537 - DNA, 596 bp, Homo sapiens
ttccaacagtcttagcaaacggcacaccaggagattatatcccgcacctggctcagagggtcccatgcccatggagcctcgctcattgctagcacagcagtctgagatcaaactgcaaggcagcagtgaggctgggggaatcaatggcctgccattgatgaggcttgagtaggtaaacaaagcggccaggaagctcaaactgggtggagcccactgcagctcaagaaggcctacctgcctctgtagactccacctctggaggcagggcatagctgaacaaaagggagcagaaacttctgcaaacttaaatgtccctgtctgacagctttgaagagagtagtggttctcccagcacggagtttgagatctgagaatrgtcagactgcctcctcaagtggatccctgacccctgagtagcctaactggaaggcaccccccagtaggggcagactgacagctcacacggccgggtacccctctgagacgaagcttccagaggaacattcaggcagcaacatttgctgttcagcaatattcgttgttctgcagcctctgctgctgatacctagacaaacagggtctggggtggacctcca

SEQ ID NO: 933538 - DNA, 640 bp, Homo sapiens
ggaaaatcgggtcatgcccaccctaatactgcacttttccaacagtcttagcaaacggcacaccaggagattatatcccgcacctggctcagagggtcccatgcccatggagcctcgctcattgctagcacagcagtctgagatcaaactgcaaggcagcagtgaggctgggggaatcaatggcctgccattgatgaggcttgagtaggtaaacaaagcggccaggaagctcaaactgggtggagcccactgcagctcaagaaggcctacctgcctctgtagactccacctctggaggcagggcatagctgaacaaaagggagcagaaacttctgcaaacttaaatgtccctgtctgacagctttgaagagagtagtggttctcccagcacggagtttgagatctgagaatggtcagactgcctcctcaagtggatccctgacccctgagtagcctaactggaaggcaccccccagtrggggcagactgacagctcacacggccgggtacccctctgagacgaagcttccagaggaacattcaggcagcaacatttgctgttcagcaatattcgttgttctgcagcctctgctgctgatacctagacaaacagggtctggggtggacctccagcaaactc

SEQ ID NO: 933539 - DNA, 640 bp, Homo sapiens
ccgtatcaccagcaacccctcaagataaccttatcacgtttcacggagggagagagggcggcaggaacggggccttgagtcaccaccctatcccactgggaaggcaggggtggatgggcagagtgtcacgcctgcctaggggaagtacacgctaggtacttatggcaagtatgtgaatgaacaaaatctacatgctgggcgcaagctccgaggaaaactccttcgcaggacctttctcccctcctgaggtccctctctaagatcctgtatcgcaggggtctggcgggagtgactgtgacccccagaggaccgcaggcaatgtctggaggcatttctggcggcagcaaagggggctgaggtgctactggggtctggtggatggaagcaggggtgttgcccagrgcagcccctgcaacagagagtgacccagccccccaaaacccgaacagtgcccaggctgagaaccctgccgttcttaccaaatgcatgagagtgtcagttgggcacccactgtgtgcagggcctccctgcaggacacattcaagaagacgaggtcacagggctcagagaggcaaggcttcctgccccacctaatggaaggaaggcagaggcgggacctgaacccaggtcccactgactc

SEQ ID NO: 933540 - DNA, 726 bp, Homo sapiens
atgcccagcctggccctgggtggctccactaggacctggcaggggggcccacacctcaatggagagagggctgacccagcaaagcccccgtggagcacccctggcatcaccaggagaagcccagagctggcaaatccactggccacggcacccgggcacccagaggtgctctctagaaagtccccggcagccccttcccatggcaagcaccaagtagctttctccaggaaacacaccaagctcacgtcacatccccatgacaaamtactacaagaagttaaaattagccaactggatcaaagctggtttgcaccagcacatggtgaaaacctgtaatcatacagataaaaataatgatagctaatgccacggttctggatgctgtgtctattacccttctaattctcaaaacaaccctagaaggtgaggactgcttaggtccttattttacatattaggaaactgaggcagagtcatgtgataaggtgcatgagaacaaagtgtctggaaccactcaggtctgccgcttgtctagccgagaaaacgactgcactgaattatatacaaagctgtcaatactcgaccacttttgacctacaaaactagcagtcatacggctcccccagtagcaaacaggagagcagcgcgcacagatccacgtgtccacagacaaggcaggttcccaggccgtgcagcgatacacagaggctcgtggaaaagcccagg

SEQ ID NO: 933541 - DNA, 726 bp, Homo sapiens
atgcccagcctggccctgggtggctccactaggacctggcaggggggcccacacctcaatggagagagggctgacccagcaaagcccccgtggagcacccctggcatcaccaggagaagcccagagctggcaaatccactggccacggcacccgggcacccagaggtgctctctagaaagtccccggcagccccttcccatggcaagcaccaagtagctttctccaggaaacacaccaagctcacgtcacatccccatgacaaactactacaagaagttaaaattagccaactggatcaaagctggtttgcaccagcacatggtgaaaacctgtaatcatacagataaaaataatgatagctaatgccacggttctggatgctgtgtctattacccttctaattctcaaaacaaccctagaaggtgaggactgcttaggtcctyattttacatattaggaaactgaggcagagtcatgtgataaggtgcatgagaacaaagtgtctggaaccactcaggtctgccgcttgtctagccgagaaaacgactgcactgaattatatacaaagctgtcaatactcgaccacttttgacctacaaaactagcagtcatacggctcccccagtagcaaacaggagagcagcgcgcacagatccacgtgtccacagacaaggcaggttcccaggccgtgcagcgatacacagaggctcgtggaaaagcccagg

SEQ ID NO: 933542 - DNA, 628 bp, Homo sapiens
aagagcatttgaaccgcatcttgaaggctgtaagggactctgaattttggagaatgggtgatggctgggatgggaatgggatccttgaacaggtgaggactgtcctgacagatgtccaggactctgggcctggagtcagggatggaaacccggggtgtattggggagggggtgtgtattagtccgttttcatgctgctgataaagacatacccaagactggtcaatttaaaaaagaaagaggtttaattgtactcacagttccatgtggctgtggagggctcacaatcatggcggagggcaaagaggagcaagtcacatcttacatggatggcagcaggcaaaaagttggcaactacattagtcagggttctctagagggacagaactaatagaaaaaawatatatatatattacataaaggggagtttattaaggagtattaactcacacgatcacaaggtcccacaacaggccatctgcaggctgagaagcaaggaagccagtctgagtcccaaagcttgaagaacttggagtgtgatgttcgagggcaggaagcatccagcacgggagaaagatgtaggctgggaggctaggccagtctcgcctttgcacatttttctgtctgct

SEQ ID NO: 933543 - DNA, 753 bp, Homo sapiens
tctccccagcaaatgggtttttcttttctactgcatggtcaggctgcaaattttccaaacttttatgctctgcttccctttttaatataagttccagtttcagatcatctctttgttcatgtatatgagtatacacttttaaaaacagccagattgcatcttgaatgctttactgcttagaaatttcttccaccagataccctaagtattctctctcaagttcaaaattccacagatctctagggcagaggcaaaatgccccagtctcttcrctaaagcatagcaagagtgacctttactccagttcccaatacgttcctcatctccatctgagaccacctcaggctgaacttcattgtccatatcactatcaacattttggtcaaaaccattcaacaagtctctaggatgttccaaactttcccacatctttctgtcttcttctgagccctccaaactgttccaacctctgcccattacccagttccaaaattgcttccacattattgggtatctttatagcagtgccccactcccagtaccaattttctgtattagtacgttctcacactgctataaataactagctgagactgggtaatttatgaagaaaagaggtttagttgactcacagttctgcaagctgtacaggaagcaggaagttcctgggaggcctcaggaaacttacaatcatggtggaaggctgaagggaatcaagcaccttcttcacatgatgtcagaagagagagagca

SEQ ID NO: 933544 - DNA, 753 bp, Homo sapiens
tctccccagcaaatgggtttttcttttctactgcatggtcaggctgcaaattttccaaacttttatgctctgcttccctttttaatataagttccagtttcagatcatctctttgttcatgtatatgagtatacacttttaaaaacagccagattgcatcttgaatgctttactgcttagaaatttcttccaccagataccctaagtattctctctcaagttcaaaattccacagatctctagggcagaggcaaaatgccccagtctcttcgctaaagcatagcaagagtgacctttactccagttcccaatacgttcctcatctccatctgagaccacctcaggctgaacttcattgtccatatcactatcaacattttggtcaaaaccattcaacaagtctctaggatgttccaaactttcccacatctttctgtcttcttctgagccctccaaactgttccaacctctgcccattacccagttccaaaattgcttccacattatygggtatctttatagcagtgccccactcccagtaccaattttctgtattagtacgttctcacactgctataaataactagctgagactgggtaatttatgaagaaaagaggtttagttgactcacagttctgcaagctgtacaggaagcaggaagttcctgggaggcctcaggaaacttacaatcatggtggaaggctgaagggaatcaagcaccttcttcacatgatgtcagaagagagagagca

SEQ ID NO: 933545 - DNA, 684 bp, Homo sapiens
ggatgcaatgggcactgagtccctaggctgcacagagcagggagaccctgggcccagcccgtgaaaccatcttttcctcctatgactcctggcctgtgatgggaagggctaccgcaaaggtctctgacatgccctggagackttttccccattgtcttgaagattataatttggctccttattacttatgcaaatttctgcttccaacttgaatttctcctcagaaaatgggtttttcttttctattgcattgtcagtctgcaaattttccaaacttttatgctctgtttctcttttacaactgaatgcttttaacacatcgaagtcacctcttaaatgctttgctgtttagaaatttcttttaccaaataccctacctaagtcatctccctcaagttcgaagttgcacaaatctctagggcaggggcaaaatgccaccagtctctttgctaaaatatagcaagagtcacctttactccagttcccaataagttcctcatttccatctgagaccacctcaacctaggctttattgaccatattactatcagcatttttggcaaagccattcagaaactctctaggaagttccaaactttcccacattttcctgtcttcttctcagccctccaaactattccaacccctgcctgttacccagttctaaggtcatttccacatttt

SEQ ID NO: 933546 - DNA, 684 bp, Homo sapiens
ggatgcaatgggcactgagtccctaggctgcacagagcagggagaccctgggcccagcccgtgaaaccatcttttcctcctatgactcctggcctgtgatgggaagggctaccgcaaaggtctctgacatgccctggagacgttttccccattgtcttgaagattataatttggctccttattacttatgcaaatttctgcttccarcttgaatttctcctcagaaaatgggtttttcttttctattgcattgtcagtctgcaaattttccaaacttttatgctctgtttctcttttacaactgaatgcttttaacacatcgaagtcacctcttaaatgctttgctgtttagaaatttcttttaccaaataccctacctaagtcatctccctcaagttcgaagttgcacaaatctctagggcaggggcaaaatgccaccagtctctttgctaaaatatagcaagagtcacctttactccagttcccaataagttcctcatttccatctgagaccacctcaacctaggctttattgaccatattactatcagcatttttggcaaagccattcagaaactctctaggaagttccaaactttcccacattttcctgtcttcttctcagccctccaaactattccaacccctgcctgttacccagttctaaggtcatttccacatttt

SEQ ID NO: 933547 - DNA, 567 bp, Homo sapiens
ttcaaatccaggtctctcataccaaaatacaattgtaattgcatttcttcccaaatacatgtaaagtgcctaacagaatgtctgacatatatgaaatcatcacgatgtgctagttccttttgtttcttactctacatcctctagcacatctcaaacatgctatcaaatttaacaaccacctaaaatatattatgccatcaaatctgcattgccaactcaaaccacctttctccagtctcaagaactatacatccagcttctttaagtgtccaacaggcatgccaaattcaaaatggcctcatgcaaacttatcayttttctcttaaatgtgctccatttatgatccccaaacagtgaatattaccatttattcagatgcctaaaatagaaatatgagagtcagggcttttaaaaaatagttttgtaatctgatttaagtcttcaatgcttattgacatgttgtttatatttcctaggatgactgatcaaatctttctaatcattaaaaattcagcttacatattatctcccctttggatctttgtaatatcagttaaatagtatcac

SEQ ID NO: 933548 - DNA, 742 bp, Homo sapiens
cagacatgtaagcatgggaaacatggctcagtggaccaaagtctgtgaattctcaccttgaaccacaattcactgctaacttctcaaccagtcactatcctatctcatgcttagttttgtctctaaaatgggaatagactaatattataaggtgcagaataaccaacaaaattgttcctgagaacttaaagatgcaaacagtaattaccttttaaaatttgtgaatagtgttttatagcagtaacctaatagttcaagagtgattgtgggcagggttggcctaagggaaaaatatgatttgatgtaaatgttgacagcagacatccagtcactccaaagaagggatatgattgttcaagaaaagataatcagggccgggcgtggtggctcatgcctgtaatcccagcacttttgggaggccgaggccggcggatcactgggtcaagagatcaasaccctcctggccaacatggtaaaaccccgtgtctaccaaaaatacaaaaaaaattagctaggcatggtggcacactcttgtagtcccagctacttgggaggctgaggcagaagaatcacttgaacctgggaggcagaggttgcagtgagccgagatcatgccactgcactccagcctggcaacagagcaagactccgtctcaaaaaaagaaagaaaggaagaaagagaaagaaagaaagaaaagatatcagaaagcacaaactaccataatacgcaaaaagagccagg

SEQ ID NO: 933549 - DNA, 588 bp, Homo sapiens
aggagctgtgatcctttggaggagaagaggctctctggcttttacaattttcagcttttctgctctggtttatccccatctttgtggttttatctacctttggtctttgatgttggtgacctacagatggggttttggtgtggatgtcctttttgttgatgttgatgctattcctttctgtttgttagttttccttgtaacagtcaggtccctcaactgcaggtctgttggagtttgctggaggtccaccccagaccctggttgcctgggtatcaccagyggagactgaagaacagcaaatattgcagaatagcaaatattgctgcctcatccttcccccggaagctttgtcccagaggggcaccctcatgtatgaggtatcagttggcccctacgggaagatgtctcccagttaagctacatgggggtcagggacccacttgaggaggcagtctgtccgttctctgagctcaaacactgtgctgggagaaccactgttctcttcagagctgtcagactgggatgtttaagtctgcagaagtttctgctgctttttgttcagctgtgccccgcccccagaggtggaga

SEQ ID NO: 933550 - DNA, 563 bp, Homo sapiens
agacttagcactgccttcagcttcctcccagtgcactattaacacttttaaagcaattacatttttttttttttttttttttttttttgagacggagtctcactctttcgcccaagctggactgcagtggcgctatcccggctcactgcaagctccgcctcttgggttcatgccattctcctgcctcagcctcccgagtagctgggattacaggcgcccaccaccacgcccggctaattttttgtatttttagtagagacagggtttcaccgtgttagccaggatggtctcgatctcctgacctcgtgatccgcccacctcggcctcccaaagtgctgggattacaggcgtgagccaycgcgcccagccgcaattacatttttaagtagtcaaatttttaaggcaatcaagactgcatccctacatcacaggctttagcccaagtgggctgggtgaggtatggcttgcttgggtcttgaagggggcacaccctcagccctctcactgaggctgccatacacgctgggctcccacactgagtcaggagcccagagagggccagg

SEQ ID NO: 933551 - DNA, 699 bp, Homo sapiens
tcctgagttccaccatcttgtctcgggcctaggatggccactaatatccagtgcgcaggcaggggctgggcactcacttcagggcaggagctgggaaagaaggcagagaagagcttccgcaagtccatcttatggagcacaaagggccagcgtccaagttgccagacttggcctgcagggcctcactttacttgctgtgcagaaaagagaccgcaagggggcaatggccaggcaggggccagggaggaactgttgcttggactggggtggtggacaggaaggtgaggacaagaggttggattctagagacattctcaaagtggaactggtagaaatgtctgatcaataaratgaggaggtgagagagaaaagaggagtggaagatgatgcctgggttgctggcctgaacaactggaaaaatggaggttccatccacggtgacaggaacacagggatggccagtgggagcaggtttggagggatgatgaggcaaggcagaacggggggactccgactggtcaaacagaacaactgtggcttggctctggctgatggctgctctgtaggaataagggctctgatttttcagatatcagaaatccaggtttttacgtaacagctcttgatttttatatgtttgcaataaattcaaatttacaatgatatgtaggttaatcctatgcaagccaaataaaatac

SEQ ID NO: 933552 - DNA, 614 bp, Homo sapiens
tgtcaggaaagcgcccctgttattaaatgtcgctctgcacgtctgcatgggaggcgtaatcacaggtggccgacctggaggggaagctcttcaaggggaggaaagaaagaaaacacaagaatgcatggactaaaaacacataaatgaagtgtaaaaattcaattagagctctaggaacagtgagatgaagtggaaaagtggggaayggggaagactctctgaaggtttctttagctctttggtgaatagatctgttctttttttctttttctttctttctctctctctttttttttttttttttttttttttttttttttttgagatgggagtttcgctctttcgcccaggctggagtgaagtgctgtgatctgggctcactgcaacctccgcctcctaggttcaagcgattttcctgcctcagcctcctgagtagctgggattacaagcacccatcaccatgcccggctaatttttgtatttttagtagagacggggtttcaccatgttggccaggctggtctcaaactactgacctcaggcgatccacctgcctcggcctcccaaagtgctgggattataggtgtgagccgctgcacctggtccctttttgt

SEQ ID NO: 933553 - DNA, 712 bp, Homo sapiens
atagagtggcatttagaggcccaggaagcaaaacaagaggacggagtcatgggaattggtgatataaaaatgagacactgttgtggagaaataggaagacaatctctggagaactgggcttctgggttgatactcaagaaaacaaatcctgtctctactaaaaatacaaaagttagctgggcgtggtggtgcatgcttgtaatcccagctacttgggaggctgaggcaagagaatcacttgagcccgggaggcagaggttgcagtgagccaagatcgcaccactgcactccagcctggcaacagagtgagactccatctcaaaaaaaaaaaaaaagaaaaagaaaaaagaaaacaaaccataacaagcagagtgacaaggtggttagaggcatgakatttggagttataccaatgtggattccaatgcaagctccacccattactaactgggtgactttgagaaaatgactcaacaccactgagtctcaacttcattgctgtaaatgaggatcacactgtatgtttgagttaaagcacttggcacaccatctagcccataaaacatactcaataaatttaaatagcttttataattataactgatactgtaagtgggctttggaatggcaaaggcagatggcaaatggcaaaggaaagagtccagttgctaacacagtgaagccacagttggaaaaagaagagaaacaagat

SEQ ID NO: 933554 - DNA, 604 bp, Homo sapiens
gtctagtaagggctcactgcttctaagatggcatctggtggctgtgttctcacatggaaggagagtggaagaaaggaacccactccctcaaatcctttcataacagctttaatcccattcataaggcttctaatcttatgacttaatcacctcctaaaggccccaactctcaaatcacattgagtttcaacatgtaaatctggggggacacattcagaccatagctttccacccttgggccccaaattcatgttcttcttacatgcaaaatccattccttcaattccartagtccccaaagtcaactaattccagtagtcattcaaaagttcaaagtccatatgtactagggttctctagagggacagagctaataggatacatatatataaagggtagtttattaaggagtattgactcacaagatcacaaggtcccacaataggccatctgcaagctgaggagcaaggaagttagtctgagtcccaaagctgaagaacttggagtcggatgtttgagggcaggaagcatccagcacaggagaaagactgaggacgggagataaagccagtctagtccttccacattcctctgcctgctttta

SEQ ID NO: 933555 - DNA, 604 bp, Homo sapiens
gtctagtaagggctcactgcttctaagatggcatctggtggctgtgttctcacatggaaggagagtggaagaaaggaacccactccctcaaatcctttcataacagctttaatcccattcataaggcttctaatcttatgacttaatcacctcctaaaggccccaactctcaaatcacattgagtttcaacatgtaaatctggggggacacattcagaccatagctttccacccttgggccccaaattcatgttcttcttacatgcaaaatccattccttcaattccagtagtccccaaagtcaactaattccagtagtcattcaaaagttcaaagtccatatgtactagggttctctagagggacagagctaataggatacatatatataaagggtagtttattaaggagtattgactcayaagatcacaaggtcccacaataggccatctgcaagctgaggagcaaggaagttagtctgagtcccaaagctgaagaacttggagtcggatgtttgagggcaggaagcatccagcacaggagaaagactgaggacgggagataaagccagtctagtccttccacattcctctgcctgctttta

SEQ ID NO: 933556 - DNA, 604 bp, Homo sapiens
gtctagtaagggctcactgcttctaagatggcatctggtggctgtgttctcacatggaaggagagtggaagaaaggaacccactccctcaaatcctttcataacagctttaatcccattcataaggcttctaatcttatgacttaatcacctcctaaaggccccaactctcaaatcacattgagtttcaacatgtaaatctggggggacacattcagaccatagctttccacccttgggccccaaattcatgttcttcttacatgcaaaatccattccttcaattccagtagtccccaaagtcaactaattccagtagtcattcaaaagttcaaagtccatatgtactagggttctctagagggacagagctaataggatacatatatataaagggtagtttattaaggagtattgactcacaagatcacaaggtcccacaataggccatctgcaagctgaggagmaaggaagttagtctgagtcccaaagctgaagaacttggagtcggatgtttgagggcaggaagcatccagcacaggagaaagactgaggacgggagataaagccagtctagtccttccacattcctctgcctgctttta

SEQ ID NO: 933557 - DNA, 649 bp, Homo sapiens
ttgctagaaaccttcacgtccacccccataatggaatttgtatgtcttttctccgaggtaatttaatttatctggagaaagaactctaattctgccgtttggggggttatatgcctgactgcaagcatcctcaagacagttgagagaaaatgattggatttatttggagaggttttacttaattctccagatgccctcctttgtaacagatgcttccaatcctcaagcatctctagtttaattgctccagagaagatggttctcctgtcttgcggtggcgagtggaggggagcggggggagttgtggagtatgtgtccctcctagaacactggggagytctagaggcccctggtgattttaaattccaagtctttatggggttcatcagaaagaatacctgcttttagccacacgcagtggctcatgcctgtaatcccagcactttgggaggctgagatgggcggatcacctgaggtcaggagttagagaccagcctggccaacatggtgaaaccccatctctactaaaaattcaaaaattagccaggcattgtgacacgcacctgtagtcccagctactcgggaggctgaggcaggagagtcgcttgaactcaggaggcagaggttgcagtgagctgagatcacacca

SEQ ID NO: 933558 - DNA, 649 bp, Homo sapiens
ttgctagaaaccttcacgtccacccccataatggaatttgtatgtcttttctccgaggtaatttaatttatctggagaaagaactctaattctgccgtttggggggttatatgcctgactgcaagcatcctcaagacagttgagagaaaatgattggatttatttggagaggttttacttaattctccagatgccctcctttgtaacagatgcttccaatcctcaagcatctctagtttaattgctccagagaagatggttctcctgtcttgcggtggcgagtggaggggagcggggggagttgtggagtatgtgtccctcctagaacactggggagctctrgaggcccctggtgattttaaattccaagtctttatggggttcatcagaaagaatacctgcttttagccacacgcagtggctcatgcctgtaatcccagcactttgggaggctgagatgggcggatcacctgaggtcaggagttagagaccagcctggccaacatggtgaaaccccatctctactaaaaattcaaaaattagccaggcattgtgacacgcacctgtagtcccagctactcgggaggctgaggcaggagagtcgcttgaactcaggaggcagaggttgcagtgagctgagatcacacca

SEQ ID NO: 933559 - DNA, 651 bp, Homo sapiens
aaaaccacacagtgataatacaagggacccagaatggccaaacagtattgaaaaagaagatcaaagttggaggactcatattttccaatttcaaacttactttaaagctactataatcaagatgctgtggtactggcataaagaaagacatatatrttggtggaatagaattgagaatctagaaatctttacatttaatagtcaattgattttccagaagaatgctattaagacggttaaactgggtaagaatagtcttgtcagcaaattgtgctgggacaactggatatctacaagaaaagaatgtttagatccctacctcacagcatatgcagaaattaactcaaagtgcattatagctaaaactatgaaactctcagaggaaaacattggagtaaatcttcattaccttgggttaggcagttgtttcttagacattacactaaaagcacaaacaacagaaggaaaaaaaaaaaaccatacttggctggtgggggatgtaaaatggtgcaccactttggaaaacagcctggcagttcctgaaaatgttaaaatacaattaatatatgacctagcaattctactcctagttatgtacccaagaaaaatgaaaacataaatccctgcaaaaactagtttccaaatgtaatg

SEQ ID NO: 933560 - DNA, 698 bp, Homo sapiens
aaaccacacagtgataatacaagggacccagaatggccaaacagtattgaaaaagaagatcaaagttggaggactcatattttccaatttcaaacttactttaaagctactataatcaagatgctgtggtactggcataaagaaagacatatatgttggtggaatagaattgagaatctagaaatctttacatttaatagtcaattgattttccagaagaatgctattaagacgrttaaactgggtaagaatagtcttgtcagcaaattgtgctgggacaactggatatctacaagaaaagaatgtttagatccctacctcacagcatatgcagaaattaactcaaagtgcattatagctaaaactatgaaactctcagaggaaaacattggagtaaatcttcattaccttgggttaggcagttgtttcttagacattacactaaaagcacaaacaacagaaggaaaaaaaaaaaaccatacttggctggtgggggatgtaaaatggtgcaccactttggaaaacagcctggcagttcctgaaaatgttaaaatacaattaatatatgacctagcaattctactcctagttatgtacccaagaaaaatgaaaacataaatccctgcaaaaactagtttccaaatgtaatggagataggcagtcagtaaacaaaatatataaaatgcccagtggtgata

SEQ ID NO: 933561 - DNA, 777 bp, Homo sapiens
cacagggacgatggtggcggtgatggtgaaggtgcaggccccgtgaaggcagggagggaagagcgtgtctgcgatgcaggggcagcagcacgggtccagctcaattcccagggggcctgaggctccgctgaactgaaaagacatcctcagagggggagcagcacagggattgcttggaagggcgtgagaagatgtgctcagagggtggggacatcaccgtaggcagggcagagccatcgggcactgagggaccaggcagagaccccccagtaggaggactgggcagggcagtgagcgcccaccgggtctcacacagcaggaaggaggtggcccatgccatggactgtgtgctcccgctctcatgctgaaatcctaggagggagcccggggaggtgaggaggccacsggcggagcctcgggggggggattagcaccctcataaaagggaccccagagctccctcgcccctcccaccgtgtgaggacacagtgagagggcgccatctggaaccaggaagcctcagcaaacaccagaccggccagttcctgatcctggacttccagcctgcagaaccgtgagcaacaaatgtctgcaagggttttgttttattttatttttttaaacagagacgaggtctcactctgttgcccaggccagtctcgaactcctgggctcaagatttccacccaccccagcttcccaaagtgctgggattacaggcgtaagccaccacgcccggccaacatctgctactttaagcagcccagtctgcggtgt

SEQ ID NO: 933562 - DNA, 555 bp, Homo sapiens
cagcctctcctggagagcaggtggctacgattcctcacggtttccctcgggtgggtccgtctttattcctctcgtgttcctgaaggagctctgccctgcgcacgcagcgcggcccgcggccctcgcctcccagcacgccacgattgcggcgttcctcctcctcaccgcggttcctgcctggggagagatttgcagacgctcgaatcgctgttccctttgaggtcacacagtttttttctgttttcaccattttttttgccttcagttttcagcagtttcgtttggatgtgtctgggtgtggatttctttgggtttattctgtttggagtttgctcagcttcttgaatctctarggattttttttgttttttttttttttttgccaagtttgggatatttcagccatttatttccttaaatactttttcagcaattcacttttctgtgaatttgctgagacctttgggtttccgtgtgctgtgagagcgtgcacactcgtctgcatgggccgtcttgtggcccctctccgccgcacttcccagataacccagcccc

SEQ ID NO: 933563 - DNA, 545 bp, Homo sapiens
aatttagctgtgagtccatctggtcctaggctttttttttggttggtaggctattaattactgcctcaattccagaacttcttattggtcaatacagggatttgacttcttcctggttcggtcttgggagggtgtatgtgtccaggaatttatttcttctagattttctagtttatttgtgtagaggtgtttatagtattctctgatactagtttgtatttctgtgtgatcagttgtgataccccttttattttttttattatgtctatttgattcttctttcttttcttctttattagtctggctaatgrtgtgtctgttttgttaatctttcaaaaaaccacctcctggattcattgattttttgaagagttttcgtgtctctatctccttcagttctgccctcatcttagttatttcttgtcttctgctatcttttgattttgtttgctcttgcttgtgtagttcttttaattgtgatgttagggtgtcgattttagatctatgtatccttttaattcagtgatccagtccttgagaaatgt

SEQ ID NO: 933564 - DNA, 672 bp, Homo sapiens
tttttttctttttagggatgaggtgttgctatattgtccaggctgtcttgaactcttggcctcaagagatcctcctgccttggcctcccaaagtgctggtatgaaggcatgaaacatcatacctgactgattctgaatatttcaaactgtacatttaaaatccaactcaaatggcatggcacaccctgctgtgaaagcaacacactccaggcagaatcctagaaagctctgagcactcagcataatcctaattgtcatcaggtctgtaaccactgctgtttcttcacaaagtcactatttgagccattttactcaaagttgactgaatttcaagaaaggtatgagacacaatcactatcacttgtattagttttcatttgaatatcatactgtccataaattgttagccacagggtgcgaggaagtatgtgggggccagtttgtgcgcacatagctgccattcgtggttcagttctccatgctaagaaarggagaacaaactagaactttctgtgctgattcggttaatactttctctgtagatgactcagaaccttcctgataatatttacttataattttctacaggagcttagaatctgtatctgttttatgaaaatatccattggtttcataattatcctgcaacctgataaattatcttaaattgat

SEQ ID NO: 933565 - DNA, 571 bp, Homo sapiens
cactgataaagtccgttgggagaagattcctacatggggtaggaagtttgcatagatcagtggttttcaaactatttagcaatggaaccccgattgcaaaattaataaaattatattttattagtaaattatttttaagtttaaagccttccttttacttcctataaaagccactgatatgrtttggctgtgtccccacccaaatcttaacttgagttgtatctcccagaattcccatgtgtgtgggagggacccagggggaggtaattgaatcatgggggttggtctttcctgtgctattcttgagatagtgaataagtcttacgagatctgatgggtttatcaggggtttctgcttttgcttcttcctcatttttctcttgccaccaccgtgtaagaagtgcctttctcctcctgccatgattctggggacccccagccatgtagaattataagtccaattaagcatctttttcttcccagtctcaggtgtgtctttgtcagcagtgtgaaaatggactgatatagccactatccatgagatcagtaaatgcatttcagtgcaaacaaa

SEQ ID NO: 933566 - DNA, 651 bp, Homo sapiens
ctctgccttttttcagcatttagtagagcatcagtcaccatccatatctgggaacaatgattgtaagaaacagaaacccatttgcatgagcttgaggacaagaaacacaccttatctctaacaggcaaactcatgggcacaagaaacaaatgagaggccatgagagaatggaaactgcagttacagaaaccaaaattcctctttcttgctctcagaagcccatggtctctttcttttttttctttttttcttcttttttttttttttttttgagacgsagtctcgctctgtcgcccaggctggagtgcagtggtgcaatctcagttcactgcaagctgcacctcctggggttaacgccattctcccacctcagcctcccaattagctggggctacaggcacccgccaccacacccagctaatttttgtatttttagtagagatgggctttcaccgtgtgagccaggatggtctcgatctcctgacctcgtgatccggccatcctggcttcccaaagtgctgggattacaggcgtgaaccaccgcacctggaagcccatggtctttcttatcagccctgtggactttcttatctcttcttctcactcacaaccaattttccctttttgctggtggcccaccctggcagccag

SEQ ID NO: 933567 - DNA, 628 bp, Homo sapiens
acacagacagggttcagtttcaaagccataaacggaaatgagcagagttggctttcccagacagggtacattttctcatcacttctcttgtcttgtggacaattagttgcctaaaaaagccattacttccaaacattatttctagccctatcttacccctgaaacttcgagcttataaaacctatgatctatttaaacttctacttggatatttaaaagatatctcaaatttaatgttgccaacagggagctcaacatttctccccaaatatgtccccttttccctcctggtttcctgtatctcagcaaacagtttcaccatccacgcaatggcttaagccaaaaacccaggtgctattcttgattcttttttctttcagcccgtacctataatctagcaaaatgttttattggttctacttccaaaaggaatcctaaatgtacccackgctctccggccctagtcccactgaccttccccaaaccatctcttgcttggactaaccactcactttgtgactgttgtgcctactctactgccctctataaccaagccatgctgcagcagtggggtgatcttttaaaatcacaaatcagactgcatctctccccagcttcacgccctttc

SEQ ID NO: 933568 - DNA, 513 bp, Homo sapiens
ccttccccaaaccatctcttgcttggactaaccactcactttgtgactgttgtgcctactctactgccctctataaccaagccatgctgcagcagtggggtgatcttttaaaatcacaaatcagactgcatctctccccagcttcacgccctttcctagtgcacctatatttacaaagcttaccatcaaacttagtttaaaatccaatccccttatctttgcttgaaaggcctcataaaagctgccccagcccactgctctgattyatcctgtgccgctgccaacctcagccactccactaggatagcacaggacctccatgcactagcaccacctgcctggaacgcccttaccccaggtttctgcttaccatttaggtatcagtttttaaaatgtcatctcaggcctggcgcggtagttctaaccctgtaatctcagcactttgggaggctgaggtgggtggatcactcaaggtcaggagttcgagaccagcctggtcaacatggtgaaacc

SEQ ID NO: 933569 - DNA, 513 bp, Homo sapiens
ccttccccaaaccatctcttgcttggactaaccactcactttgtgactgttgtgcctactctactgccctctataaccaagccatgctgcagcagtggggtgatcttttaaaatcacaaatcagactgcatctctccccagcttcacgccctttcctagtgcacctatatttacaaagcttaccatcaaacttagtttaaaatccaatccccttatctttgcttgaaaggcctcataaaagctgccccagcccactgctctgatttatcctgtgccgctgccaacctcagccactccactaggatagcacaggacctccatgcactagcaccacctgcctggaacgcccttaccccaggtttctgcttaccatttasgtatcagtttttaaaatgtcatctcaggcctggcgcggtagttctaaccctgtaatctcagcactttgggaggctgaggtgggtggatcactcaaggtcaggagttcgagaccagcctggtcaacatggtgaaacc

SEQ ID NO: 933570 - DNA, 627 bp, Homo sapiens
attcttacacaaggactgggaccgtgctctgtagcctttttgtccaaacaacttgaccttactgttttaggctggtcatcatgtctctgtgcagtggctgccaccaccctaatacttttagaagccctcaaaatcacaaactatgctcaactcactccatacagttctcataacttccaaaatatatttccttcctcacacctgatgcatatactttctgttccccagctcctttagcaatacccactctctgttgagtctccacaattaccattgtacctggcctgggcttcartctggcctcccacattattcctgataccacaccttatccccatgactgtatctctctgatccatctgacattcactctatttccccatatttccttctttcctgtttttcacctgaatcacagttagtttattgatggcagttccaccaggcctaatcaccactcaccagcaaaggcaggctgtgctatattatcttccacatctatcattgaggctactctctgcccccctccactatctctcagcaagccaaactcattgccttaacttggggcctcactcttgcaaagggactacacatcaatatttatactgactctaaatgctgtcc

SEQ ID NO: 933571 - DNA, 631 bp, Homo sapiens
cgaacacactttagaattgtttaaacacaatccacagaattaaaaacaaaaccagaagccattcacagttatactattgtcaattaaaagttttatacttaatacttgatataacagtcaatatctagtgggggatattgaaagtgatttcagggggcagagccaagatggccaaataggaacagctccagtctacagctcccagtgtgagtgacgcagaagacgaatcatttctgcatttccaactgaggtatcgggttcatctcactggggattgttggacagtgggcacaggacagtgggtgcagcacactgagcatgagcygaagcagggtgaggcatcatctcacctgggaagtgcaaggggtcagggaattccctttcctagccaaggaaaggggtgacagacggcacctggaaaattgggtcactccctccctaatactgggcttttccaatggtcttagcaaatggcacaccaggagattatatcctgcgcatggctcagaggttcctatgcccatggagcctcactcattgctagcacagcagtctgagatcaaactgcaaggaggcagtgaggctgggggaggggcgcccaccattgccgaggcttgagtaggtaaacgaa

SEQ ID NO: 933572 - DNA, 575 bp, Homo sapiens
tcaaaacaaaagttttccgtgcttagtgcatgattttgtcaggcaacaaacctatggctcaaactcaaaggggatgctactactaccaataactggagtgagacactctcacagtaacttggcaaacacccggaagtactggttcacccttctagctcaatgttacttctagtgtggtcccaggaacagcagcatcagcagcacctagaaaygccaattctcaggctccaacccagaccttgggaataaggcccagcaatctatgttgcatcaagccgtccaggtgattcagggccctactaaaatttgagaaccactggcacagtggttctcttgcacagtgaaatttgagaaccactggcacagtggttaatttgcacagtgaaaaggcttcttttcagtcttgggaaatgaaggagtaatagtcaagaggaggcattgcaaaatttttccatacacggctagatagtaagtatcttaggcaagaagtaaagtcaagattaggtaggtatttatggaaccatttaaaatgcaaccatttaaggcggggaacggtggctcacacctgtaatcct

SEQ ID NO: 933573 - DNA, 729 bp, Homo sapiens
gtccccagaggtggagtctacagagtcaggcaggcctccttgagctgtggtgggctccacccagtttgagcttcccggctgctttgtttacctactcaagcctcagcaatggtgggcgctcctcccccagcctcactgctgctttgcagtttgatctcagactgctgtcctagcaatgagcaaggctctgtgggcatgggaccctccaagccatgcgcgggatataatctcctggtgtgtcatttgctaagaccattggaaaagcgcagtactagggtgggagtgacccaattttccaggtgccgtctgtcacagcttcctttggctgggacagggaagtccctgaccccttgcgcttcccaggtgaggtgatgccttgctgtgcttcggctcacactcggtgggctgcacccactgtctgacaaggcccagtgagatgaacctggtacttcagttggaaatgcagaaatcacccgtcttctgygtcgctcatgctgggagctgtagactggagctgttcctattcagccatcttggaaccacatcgagagatcttaactgagtgtcaggagcacatttctatttttgaaaattcacatttgggaaatgtgcagaatagtggaataggaagaggttggatataccagtagagtttaaaggttataatggtagttcagggagggaaatatatgggcctgagctattaaggcagtgagagagaggagaaaa

SEQ ID NO: 933574 - DNA, 568 bp, Homo sapiens
ctgggctctttactctgttccattggtgcgtgtgtctgtttttgtaccagtaccattgctgttttcattactgtagctttataatacagtttgaagttggtaatgtgatgcctctagctttgttctttttgcataggatttccttggctatttgagctctttttggttccatatamattttaaaatagttttttcgaattctgtgaagaatgtcattggtagtttgataggaatagcattgaatctgtaagttgctttgagcagtatggtcattttaacaatatttattcatcctatacatgagcatggaatgtttttccattggtttgtgtcatctctgatttctttgagcagtgttttgtaattctcattgtagagatattctgcttctctggctagctggtaaaatatctagtattcccaggtattttattctttctgtggctattgtgaattggattgcattcttggtttggctctcagcttggacattttttttgtatagaaattctactgacttttatatattaattttatatgctgaaactttgctgaagtggtttatcac

SEQ ID NO: 933575 - DNA, 568 bp, Homo sapiens
ctgggctctttactctgttccattggtgcgtgtgtctgtttttgtaccagtaccattgctgttttcattactgtagctttataatacagtttgaagttggtaatgtgatgcctctagctttgttctttttgcataggatttccttggctatttgagctctttttggttccatatacattttaaaatagttttttcgaattctrtgaagaatgtcattggtagtttgataggaatagcattgaatctgtaagttgctttgagcagtatggtcattttaacaatatttattcatcctatacatgagcatggaatgtttttccattggtttgtgtcatctctgatttctttgagcagtgttttgtaattctcattgtagagatattctgcttctctggctagctggtaaaatatctagtattcccaggtattttattctttctgtggctattgtgaattggattgcattcttggtttggctctcagcttggacattttttttgtatagaaattctactgacttttatatattaattttatatgctgaaactttgctgaagtggtttatcac

SEQ ID NO: 933576 - DNA, 565 bp, Homo sapiens
tcttagtcataaattctttgcctaggtaatactattcagccataataaagaatgaaatcacatcttttgcagcaaaatagatggaactggaggccattattttaagtgaaacaactcagaaacaaagacaaatactgcatcttcttgcttataagttggagataatgtgtacacttgaacataaagtgtagaatgatagtcagtagagacttggaaaggtgggractatggaaggggtgtggatgaagaaattacttaatgggtacaatatacgtgatttgggttacacatacactaaaagccctgacttttttcagtatattcatgtgacaaaattacacttataccccatacatttatacaaagaaagctaaagcaaaacaccaaaacattaactgtaggacagatttgctggcaatgcattctctgtctgaataggtgtttcacttttgaaaaataattttaggcctgatgaggtggcttatgcctgcagtcccagtactttgggaggctgaggtgggtggatgacatgaatccaggagttcgagatcagcctagtcaacat

SEQ ID NO: 933577 - DNA, 609 bp, Homo sapiens
ttaatagcagggtttggaggggaaatgagttagaagccccacacagaatccctactggggcactgcctagtggagttaaagctccctgaggcctccctagaagctgagctgatgccagcactatgcttgtacagcctgcagaaccatgatctgattaaacctattttctttacaaattacccagtctcaggtaattctttatcacaatgtaagaactgcctaatatakaaaattggtactgaggaatggggcattgctataaagatacctgaaaatgtggaagcagctttggaactgggtagcagaggttagaagactttgtagagatcagaagaagatgggaaaatgagggaaagtttgaaacttcttagggactggttaaattgttttgagcaaaacaatgatagtgatatggacaattaagtccaggttgccaaggtatcagatggaaatgagaaacatactgggaactggagcaaaagtcacccttgttatgccttagcaaagaacttggctgcattgtgtttatgccatgagagttggtggaagtttcaactaaagagtgatttaggatatctggcagaagaaatttctaagcagcaaagcatt

SEQ ID NO: 933578 - DNA, 665 bp, Homo sapiens
ggcatcacctaggcctagttagaaatgccataaaagcttggcccaactccaaattgaagagacacatttcagcatttcctcctgtctccttgccagtaaactcaaaatgaaacttttattctcaaaagccagtgccatagtgttggcttctatgcacattgattggcaagcccattgctcaataacagtttatatattctcatgatatttgttagcatcctttaatttcaacctaaaatactcccttttgcatgcatggtaaggcagatgatgatgaattccttcagcttttatttgtctgggaaaaccttttatctctcctccattggtaaagaacatctttgctgggtataagattcttggttggcaattttttccttttagcactttgaatatatcatttcactctctcagcctgyaaagtttctggtgagatctgctaacagtcttatgaagattccttggccaggtgcggtggctcacgcctgtcatcccagcactttgggaggccaaggcaggcagaacacctgaagtcaggagtttgagaacagcctggacaacatggtgaaaccccatctctattaaaaatttaaaaattaaccaagcattgtggtgggcacctgtaatcccagctacttggaaggctgaggcaggaaaatcacttg

SEQ ID NO: 933579 - DNA, 593 bp, Homo sapiens
ctggtctcactcccagcaactggagataggtccttctgtttttgcactgttcctctaggtttggagatgcaaatattgcttctcctgcttcatcttttagatcatctgtagagacttccaagcacagttttaaatatctccctcatgaaatttcttgttcaagccttctcactcctgtcccttctgaacatgagcatacatggaacatttcccctatrtcccatggttctagtaagtgatgtgactacagccttaaaggaggagtaagatagatgttgggaggaggtgaggaaggagagggcaggggctgagtagaggtgcatgttttagagtactatgacattttaaaattcattttattcccatggttcaaggcaattttggaaaatgggtcaagccgaaagaatagaccacagatttcctgcagtcatattgagatgtatttgacaattgttctgtggtttcttgtaaagtgtttatttataaagcagtactgttcaatagagaattctgtgatggacatgtttactgtctgccctgtccaatatggcagccactagcacatgtggctgttgagcactagcaaggtggcc

SEQ ID NO: 933580 - DNA, 616 bp, Homo sapiens
aaaacagctgtcaggaaagcgcccctgttattaaatgtcgctctgcacgtctgcatgggaggcgtaatcacaggtggccgacctggaggggaagctcttcaaggggaggaaagaaagaaaacacaagaatgcatggactaaaaacacataaatgaagtgtaaaaattcaattagagctctaggaacagtgagatgaagtggaaaagtggggaayggggaagactctctgaaggtttctttagctctttggtgaatagatctgttctttttttctttttctttctttctctctctctttttttttttttttttttttttttttgagatgggagtttcgctctttcgcccaggctggagtgaagtgctgtgatctgggctcactgcaacctccgcctcctaggttcaagcgattttcctgcctcagcctcctgagtagctgggattacaagcacccatcaccatgcccggctaatttttgtatttttagtagagacggggtttcaccatgttggccaggctggtctcaaactactgacctcaggcgatccacctgcctcggcctcccaaagtgctgggattataggtgtgagccgctgcacctggtccctttttgttt

SEQ ID NO: 933581 - DNA, 611 bp, Homo sapiens
atattaaaataaataaatatatatgtataaaatatataaataatataaatccccaagacaacggagaaaatgtctccagggcatgtcagaggtcttcatggcagccccttccatcataggcctggaggactaggagaaaaatttggttttgtgggccagactcagggtccctgtgctgtgtgcagcttgggacttggtgccctgygtcccagccactccagccatggctggaaggggccaatgtagagcttatactgtggcttcagagggtgaaagcctcaagtcttggtagcttcaacatggtgttgagcctgcaagtgcacagaagtcaagaattgaagtttggaaaccttggcttagatttcagagaatgtacggaaatgcctggatctccaggcagaagtttgctgcaagggcagggctctcatacagaacctatgctaaggcagtgcggaagggaaatgtggggtcagagcccccacagagtccctactggggcactgcctagtggagctgtgagaagagggccactatcctccagagacagaatggtagatccactgatagcttgcgctatgcacctggagaagccacagatattcaatgccagc

SEQ ID NO: 933582 - DNA, 611 bp, Homo sapiens
atattaaaataaataaatatatatgtataaaatatataaataatataaatccccaagacaacggagaaaatgtctccagggcatgtcagaggtcttcatggcagccccttccatcataggcctggaggactaggagaaaaatttggttttgtgggccagactcagggtccctgtgctgtgtgcagcttgggacttggtgccctgcgtcccagccactccagccatggctggaaggggccaatgtagagcttatactgtggcttcagagggtgaaagcctcaagtcttggtagcttcaacatggtgttgagcctgcaagtgcacagaagtcaagaattgaagtttggaaaccttggcytagatttcagagaatgtacggaaatgcctggatctccaggcagaagtttgctgcaagggcagggctctcatacagaacctatgctaaggcagtgcggaagggaaatgtggggtcagagcccccacagagtccctactggggcactgcctagtggagctgtgagaagagggccactatcctccagagacagaatggtagatccactgatagcttgcgctatgcacctggagaagccacagatattcaatgccagc

SEQ ID NO: 933583 - DNA, 611 bp, Homo sapiens
atattaaaataaataaatatatatgtataaaatatataaataatataaatccccaagacaacggagaaaatgtctccagggcatgtcagaggtcttcatggcagccccttccatcataggcctggaggactaggagaaaaatttggttttgtgggccagactcagggtccctgtgctgtgtgcagcttgggacttggtgccctgcgtcccagccactccagccatggctggaaggggccaatgtagagcttatactgtggcttcagagggtgaaagcctcaagtcttggtagcttcaacatggtgttgagcctgcaagtgcacagaagtcaagaattgaagtttggaaaccttggcttagatttcagagaatgtacggaaatgcctggatctccaggcagaagtttgctgcaagggcagggctctcatacagaacctatgctaaggcagtgcggaaggsaaatgtggggtcagagcccccacagagtccctactggggcactgcctagtggagctgtgagaagagggccactatcctccagagacagaatggtagatccactgatagcttgcgctatgcacctggagaagccacagatattcaatgccagc

SEQ ID NO: 933584 - DNA, 585 bp, Homo sapiens
tatgaaaatgctaatacagaatgtcaggcagctattagacctattaagggaaaggcagatctaaatgaggaaaaaactttaagtgaatacattaaagcctgcgatggcattggggggcgcttatataaggccagtctccttgctcaggcaatggctggactaagggtaacaaaaaacacatgagtgttccctggatcttgctttaattgtggacagataggacatacaaaaagagagtgtacaaagagccaaaaaaggcaaaactcaggaggaaaaagcagggaaccaggtacctttcctagatgtaaaaaaggaaaacactgggctaatcaatgtcactcaaagtttgataatagtggacagccctkgccgggaaatggacagaggggccagcccgggcccccaattcaaaatggggcattctcaattcaggacatgatgtccccgactccaaatggagtgttcccagcccagtctatccctgttacaaatgtaaagcaatcatcccccttcacagctaaaagtggggcagtagatttatgctgtaccaaagctgtatccctccttcctggggagcctcctagg

SEQ ID NO: 933585 - DNA, 677 bp, Homo sapiens
gctatccccaaacttccactcttaactcttgaagtaaataaataatctttgctggcaggactatgttgaatctccttaggcactctgtgatcagatgtcctgggtcctcccaattcttagaccttttatacctgtttttctccttctcttattccatttagtttttccattcatacaaaaccatatccaggccatcaccaataattctacatgacaaatgtttcttctracaaccccacaatatcatcccttaccacaaaatcttccttcagcttaatctctcccactctaggttcccacgccacccctaatcccgcttgaagcagccctgagaagcatcgcccattatctctccataccatccccaaaaagttttcaccatcccaacactttaccactatttcattttatttttcttattaatataagaagacaggaatgtcagacctctgagcccaagctaagccatcatatcccctatgacctgcacatacacatccagatggctggttcctgccttaactgatgacattccactacaaaagaagtgaaaatggcctgttcctgccttaactgatgacattgtcttatgaaattccttctcctggctcatcctggctcaaaagctcccctactgagcaccttgtgacccctactctgcctgacagagaacaacc

SEQ ID NO: 933586 - DNA, 556 bp, Homo sapiens
ttcgcatcaatgttcatcagagatattggtctaaaattatctttttctgttgtgtctctgacggctttggtatcaggatgatgctggcctcataaaatgagttagggacgagtccctctttttctattgtttggaatagtttcagaaggaatggtaccagctcctccttgtacctctggtagaattcggctgtgaatccatctggtcctggactttttttggtttgtagagtattaattattgcctcaatttcagagcctgttattggtctgttgaagattcagtttcttccttgtttagtcttgggagggtgtatgtgtccaggaatttatccatttcttctagattttcwagtttatttgcgtagaggtgattatagtattctctgatggtagtttctatttctgtgggatcggtggtgatatcccctttatcatttttttattgcatctatttgattcttctctcttttcttctttattagtcttgctaacggtctatcaattttgttgatcttttcaaaaaaccagcttgtggattcgtggatttttttaaa

SEQ ID NO: 933587 - DNA, 608 bp, Homo sapiens
gtagggactaaataagttgatacaagcaaagttcttagaatggtgctggtgcatagtaagggctagctaaatgttagtgattaatattattatcctcagttatgtgccagccttggtggatataaacagtaataagacatagaaaatttatagtctagaagaaaggatcaacaataaacatgtgaatagatatgactaaatctgcttagtgcaataataaaatttgaaaagtgctttgagaacataaatgactgtgttggcatggaagaatccattaaaaatgaaaataatcagccacctaaatcaaatcaagttctgatagtcatttattgtttttcaatactgtggttactaagattcctccttttcttggcaactgaaacttgcaactctcaaggctcaggcctgtgacctcttctattctgtggcttattcctaggtgatctcatccattccacttgtgatastcatttcacatctctaagcccaacatcatactgaactgcaagtgcctgtgacatctcacactgattgtgtctacatccaaattctccctccacagccccctaatccttctctcacagtgttccccatactggaaatagcag

SEQ ID NO: 933588 - DNA, 496 bp, Homo sapiens
catgctagggatgaagctgacttgatcgtagtgcataagctttttgatgtgctgttgtatttggtttgccagtattttattgaggatatttgcattgatgttcattgggaatattcatctaaaattctctttttctgttgtgtctctgccagcctttggtatcaggatggtgttggcctcataaaatgagttagggaggattccctctttttctattgattagaatactttcagaaggaatggtaacagctcctctttgtacctctaatagaattcggctgtgaatccttctggtcctggaatttttttctttggtaggctattaattattgcctcaatttcagagcctgttawtggtctattcagagattcaacttcttcctagtttagtcttgggagggtgtgtgtgtccaggaatttatccatttcttctagactttccagtttatttttgtagaggtgtttatagtattctctgatggtagtttgtatttct

SEQ ID NO: 933589 - DNA, 605 bp, Homo sapiens
ctcttttttcttctttattagtcttgctagcagtctatcaattttgttaatcttttcaaaaaaccagctcctgaattcattaattttttgaagggttttttgtgtctctatctctttcagtgctgctctgatcttagttatttcttgccttctgctagcattttaatttgtttgctcttgcttctgtagttcttctaattttgatgttagggtgtcaattttagatctttcctgctttctcttgtgggcagttagtgctataaatttccctctacacactgctttaaatgtgtcccagagattctgacacrttgtgtctttgttctcattgatttgaaagaacatctttatttctgccttcatttcattatttacccagtagtcattcaggagcaggttgttcagtttccatgtagttgtgtggttttgagtgagtttcttaatcctgagttctaatttgattgcagtgtggtctgagagacagtttgttgtgatttctgttcttttacatttgctgaggagtgctttacttccaactatgtggtcaattttggaataagtgcgatgtggtgctgagaagaatgtatatcctgttgatttggggt

SEQ ID NO: 933590 - DNA, 480 bp, Homo sapiens
atgttcatcgtaggaatacagaaatgcaattgctttaagcatgttgttctttcatcctgttaatcatactgaatttatttattagttctagcagtacttgttttgtagattccttggaatttcctaaatagaataatcatgtcatctaaaaatagaaacagttttatttcttcctttacaatacatatgctttttatattctttttcttaccttatttcagtggttggaacttccagcaccatacttaatacgaatgatgccaaacgtcctttcattgttyctgatcttaaaggaaagtattcagtcttaccctgttaggtatgatatatgctgtaagggtttctgtgtagatgttctgtatcaagttgagtaggttcccttctcattcttagtttgctgagagcttttatcacgaatgggtgctggatactgtcaaatgcttttctgtgtcagttgagatactcatgtttttctccttt

SEQ ID NO: 933591 - DNA, 492 bp, Homo sapiens
ggccaggaatatacctttactgtcctgcctcaggggcatatcaactctctagctttgtgtcataatcttattcagagagaccttgattgcttttcactcccacaagatatcacactggtccattacattaatgacatcatgctgattggatccagtgagcaagaagtagcaaacacactggacttattggtgagacatttgcatgccagaggatcggaaataaatccaactaaaattcagggaacttctacctcagtaaaatttctaggggtccagtggtraggggcctgttgagatattccttctaaggtgaaggatgagttgctgcatttgggccctcctacaatgaagaaagagaagcaacacctactgggcctatttagattttggaggcaacacattcctcatttgagtgtgtcactctggcccatttatcaagtgacccgaaaggctgccagttttgagtggggtcagaacaggagaaggctctga

SEQ ID NO: 933592 - DNA, 832 bp, Homo sapiens
gatcgcctcagaagcctacaggaccaacacagacactaagtaactctcacagtagaaggtaagtccgtccctttcttagtcaatacggaggctacccactccacattaccttcttttcaaaggcgtgtttcccttgcctccataactgttgtaggtattgacagccaggcttctaaacctcttaraactccccaactctagtgccaacttagacgatactcttttaagcactcctttttagttatccccacctgcccagttcccttattaggctgagacactttaacttaattatctgcttccctgactattcctggattacagctacatctcattgccgcccttcttcccaatccaaagcctcctttgcatcctcctcttgtatcccccaaccttaacccccaagtataggatacctctactccctccttggcgaccggtcacgcaccccttaccatctcattaaaacctaatcacctttactcctctcaatgccaagattccattccacagcacgatttaaaaagattaaagactgttatcactcgcctgctacagcatggccttttaaagcctataaactctccttataattcccccattttacctgtcctagaaccagacaagccttacaggttagttcaggatctgcgctttatcaaccaaactgttttgcctatccaccccgtggtgccaaatccatatactctcctatcctcaatacctccctccacaacccattattctgttctggatctcaaacatgctttctttactattcctttgcacccttcatcccagcctctcttcgctttcacttggactgaccctg

SEQ ID NO: 933593 - DNA, 620 bp, Homo sapiens
atatattattttcattggcatatggaacattccccaggatttaccatatgtaaaaacacaacataagcccccaaaaatatttttaaaaataaaaatcatatcaagtatcttatcaaaatggaataaaattagacatcattaacaagaggaatatttgaaactatacaagtacaagaaaattaaacatgctcctgmatgaccaatagatgaggaaaaaattaagaataaattaggccgggtgcagtggctcatgcctgtaatcccagcactttgggaggccgaggtgggtggatacaaggtcaggagattgagaccatcctggctaacacagtgaaactctgtctatactaaaaatacaaaataaattagcaggcatggtggcgggcacctgtagtcccagctactcgggaggctgaggcaggagaatggcgtgaacctgggaggtggagcttgcagtgagccaagatcacgccattgccctccagcctgggcgacagagcaagactgtctcaaaaaaaaaaaagaataaaaaaaaaaaaaaaaatgaaaatagaaacacaggaaaccaaaacccagaaacatataagacatagcaaaaacaggactaactaatgtttata

SEQ ID NO: 933594 - DNA, 581 bp, Homo sapiens
ctcttccctttggcccagggaaagtccagaaatgccatccgagaatcaagtcttggaatcagggaccctaagagcccgcttggtgctctaccaccctatgtctgagctggtacctaaggtgcaagaaaaaggcccatttgcttttccttctgcttttctcaagcaaaggagtttcatcccatagccaccacagttagtaatgtgctgagtctcacctgaagcccgtaagtctcagagatttacccaaggcccttgacatagtacctgggtatcactgctgatcatttaggsgccaagggctcttcagttagcagccaatgaatgctgccaggattgggtcctttccttcaaggcagaggattctcttctggcccagggtatgtctagaaatattatctgggagggagggcctggaagtgggcctcacgactctgaccagtgctttatcctgctgtggctgagctggtatccaagatgtaagacaaagtcctccctgcttttccttctcctctcaagtggaaggaaggggtctagtttggagctgtaagctgtgcagcctggggttaggggaggggtgatga

SEQ ID NO: 933595 - DNA, 581 bp, Homo sapiens
ctcttccctttggcccagggaaagtccagaaatgccatccgagaatcaagtcttggaatcagggaccctaagagcccgcttggtgctctaccaccctatgtctgagctggtacctaaggtgcaagaaaaaggcccatttgcttttccttctgcttttctcaagcaaaggagtttcatcccatagccaccacagttagtaatgtgctgagtctcacctgaagcccgtaagtctcagagatttacccaaggcccttgacatagtacctgggtatcactgctgatcatttaggcsccaagggctcttcagttagcagccaatgaatgctgccaggattgggtcctttccttcaaggcagaggattctcttctggcccagggtatgtctagaaatattatctgggagggagggcctggaagtgggcctcacgactctgaccagtgctttatcctgctgtggctgagctggtatccaagatgtaagacaaagtcctccctgcttttccttctcctctcaagtggaaggaaggggtctagtttggagctgtaagctgtgcagcctggggttaggggaggggtgatga

SEQ ID NO: 933596 - DNA, 629 bp, Homo sapiens
atcctaagtgaattaatgcagaaacagaaaatcaaatcaaatactgcaagttctcttataagtaggagctaaaaaatgggtacatatggacacaaagatgaaaacaatagacattggggacttcaaaagaagaaagagagggctggggcaagagttgaacaattacctattagatactatgttcactatttgaaggayaggttcaatagaagcccaaaccccagcattatgcaacatattcatgtaacaaacctacacatgtacctcctaaatctaacatttaaaaagtttttaatagaattatttaaatgtaatacctcaaactataaaaattcttgaaaacaatctaggaaatactcttctcaacatcagccttggcaaggaatttctggctaagtcacgaaaagcaattgcaacaaaaataaaaatagagaagtgagacttagttaaactaaaaagctgctgcacagcaaaagaaattctcaacggagcaaacagacaacctacagaattggagaagatagtcacaaactatgtatctgacaaagacataaaatctttgggcgtatagaactacagggaacttaagcaaatcaacaagcaaaaaacaaccccatttaaaaaaaaaa

SEQ ID NO: 933597 - DNA, 629 bp, Homo sapiens
atcctaagtgaattaatgcagaaacagaaaatcaaatcaaatactgcaagttctcttataagtaggagctaaaaaatgggtacatatggacacaaagatgaaaacaatagacattggggacttcaaaagaagaaagagagggctggggcaagagttgaacaattacctattagatactatgttcactatttgaaggacaggttcaatagragcccaaaccccagcattatgcaacatattcatgtaacaaacctacacatgtacctcctaaatctaacatttaaaaagtttttaatagaattatttaaatgtaatacctcaaactataaaaattcttgaaaacaatctaggaaatactcttctcaacatcagccttggcaaggaatttctggctaagtcacgaaaagcaattgcaacaaaaataaaaatagagaagtgagacttagttaaactaaaaagctgctgcacagcaaaagaaattctcaacggagcaaacagacaacctacagaattggagaagatagtcacaaactatgtatctgacaaagacataaaatctttgggcgtatagaactacagggaacttaagcaaatcaacaagcaaaaaacaaccccatttaaaaaaaaaa

SEQ ID NO: 933598 - DNA, 629 bp, Homo sapiens
atcctaagtgaattaatgcagaaacagaaaatcaaatcaaatactgcaagttctcttataagtaggagctaaaaaatgggtacatatggacacaaagatgaaaacaatagacattggggacttcaaaagaagaaagagagggctggggcaagagttgaacaattacctattagatactatgttcactatttgaaggacaggttcaatagaagcccaaaccccagcattatgcaacatattcatgtaacaaacctacacatgtacctcctaaatctaacatttaaaaagtttttaatagaattatttaaatgtaatacctcaaactataaaaattcttgraaacaatctaggaaatactcttctcaacatcagccttggcaaggaatttctggctaagtcacgaaaagcaattgcaacaaaaataaaaatagagaagtgagacttagttaaactaaaaagctgctgcacagcaaaagaaattctcaacggagcaaacagacaacctacagaattggagaagatagtcacaaactatgtatctgacaaagacataaaatctttgggcgtatagaactacagggaacttaagcaaatcaacaagcaaaaaacaaccccatttaaaaaaaaaa

SEQ ID NO: 933599 - DNA, 449 bp, Homo sapiens
tcataaatagctcttattattttgagatacgtcccatcaatacctaatttattgagagtttttagcatgaaggtggttgaattttgtcagaggccttttctgcatctattaagataatcatatggtttttctctttggttctgtttatgtgatgaattacctttatggatttrtgtaggttgtaccagccttgtatcccagggatgaagccaactttgaagctttttgatgtgctgctggattcggtttgccagtattttattgaggaggtttgcatcgatgttcatcagggatattggcctaaaattctcttttcttgttgtgtctcttccaggctttggtatcgggatgatgctggcctcataaaatgaattcgggaggattccctctttttctattgatgggaatagtttcagaaggaatggtaccagctcctctttgtatctctg

SEQ ID NO: 933600 - DNA, 410 bp, Homo sapiens
gaggctagagaatcgcttgaacccaggagtcagaggttgcagtgagccaagactgcaccactgcactccagcgtgggtgacagagggggactccatctcaaaaaacaaaaaaagaatgcaatcccattcacagtagccacaaaagaataaagcatctagcaatacagctaaccagagaggtgaaagatctctacaatggaaattacaaaacactgcttaaaaaaatcagagattacaccaacaaatggaaaaacattacatactcatgtataggagaatcaatgttgttaaaatggccatactgcccaaaactatttacggattcaatgctatttttatcaaactaccaatgacatgytcacagaattagggtaaaaaaaattctaacattcatttgcaaccaaaaaaga

SEQ ID NO: 933601 - DNA, 610 bp, Homo sapiens
ttgtaaccttctttgtgttcctatgtaattcagagtccttcaggaaactctcaagtttattacaatatgccttttccatccaaagtggtttttttttttttttttttttttttttgagacggagtctcggtctgtcgcccaggctggagagtgcagtggcgcgatctcggctcactgcaagctccacctcccaggttcatgccattctcctgcctcagcctcccgagtagctggaactacaggcgcccgctaccacgcccggctaattttctgtatttttagtagagacggggtttcaccttcttagccaggatggtcttggtctcctgacctcgtgatccgcccgcctcggcctccyaaagtgctgggattacaggcatgagccaccgcgcccgtcctccatccaaagtttttgtgtcaggggtccatctgaggttttgtgtcaggggtccccaagaccaccttgaggctcaacaggtaactagaaaaactcacaggactgagaaaaccagttatattcactcttccagtttattacagcaaaaggttacagattaaaaatcagtaaaaggaaaacgttcacgggatgaagtccaagagaaaccaggca

SEQ ID NO: 933602 - DNA, 565 bp, Homo sapiens
tattacgtaaattgacaaatgtcacacaaaatgtggtgcctaattgattttgacatgcacgtacataaagtaggaccattcaggtaaatacagagctaataattacaagaagcaaataataccaatgaaaaccattttttaagggtattagattttcattctcttcctcatcaaaaagaagcatgtattgaacatctgcctgtggctagggttgtagtaagcagaaaagtgacttgcctaaaggatgagaaatcctattacataaagattttttattttaaatgtaggcccactctccacacacccacacccatcagttacctagcagttccttataaggagtgtgaaatccaagtctggcaactcactggggacttcaagcaaaaccttctactctgtcctgttargtgtgcagccctatgataaggcactgtggccatccgcagaataggcagaagataagcctctaatctgtacttttcaaccaatacctgggaggctttttaagagtgatactgaccttgttttcattggttttatttcattttacttaagtacttgttgc

SEQ ID NO: 933603 - DNA, 676 bp, Homo sapiens
tttaagttgaagccaatgcttatttgtcattctgaaaatcctagggcccttaagaatgatgctaaatctactctgcctataccctataaaaggaacaacaaagtcgggatagcagcactctgtttacagcatggttggttgaatattttaagcccactgttgaggcctactgctcagaaaaagattsctttcaaaatattactgctcattggcaatgcacctggtaatccaagagctctgatggaaatgtacaaggagattaatgttgttttcatgactgctaacataatatccatgtgcagcccagcccatagattaaggagtaatttcaatttttgagtcttaatatctaaaaaatacattttatgaggctatagctgccatacatagtgatttctctgatggatctgagcaaagtaaattaaaaatcttctggaaaggatttgccattttagatgccattaagaatattactgattcatgggaggggttcaaaatatctacattgttgattgattccaaccctcatagatgactttgaggggttcaatagttcagtggaggaagtaactgcagatgtggggggaaatatcaagagaactagaattagaagtggagcctgaagatgtgactgaattgctgcaatctcatgataaaacttgaacagtcaagaagc

SEQ ID NO: 933604 - DNA, 469 bp, Homo sapiens
tactccagtggtcaaagcagtcacaagcctgcccagatccaaagggaagaagtagacagattccaactttttttttaaccttttattttaggtttgggatacatgtgaagatttgttacataggcaaactagtgtcacaggggtatggagtacagattgtttcatcgcccatctattaagccaagtacctaatagtgatctcttctggtcctctccttcctcccacctccatcctgaagtagaacccagtgtctgttgcttccttctttgtgttctcatcatttagctcgcacttgtaagtgagaacatgcagtatttggttttctrttcctgtgttagtttgctaaggatgatagcctccagctccatccatgtttccacaaaagacatggtctcattcttgttttaaggcgcatagtattccatgggtatatgtaccacattttctttatccaataaaccaaattga

SEQ ID NO: 933605 - DNA, 527 bp, Homo sapiens
ggagctcttgcccctccaacttggcaggggcggggtttcttcctgttcctggctcccactgacaccatggagcatgcagcttctgcgcctccccaactgcacccagcgtcaagggcaacggccgctccagatgggccaccgctgccatcaccgggactgcgttctttccttcaagacagggggttcccttctgaccaagggtgtctccacaaatattgcctgggagctagggcctagattagagactttaggatgctgccttgtgtcctatactatagtggctgagttgctatccaaattgtgagacaaattattctttacttttcattctcctctcctcagacagagggaaagggtctyttccagagctgtgagctgcactgcctgatgttgggagaggagcaatgcaagcactcctttggccactctagctggcaactcactaagttgtgtgtccccagcacagaactagtactcacccagtaattctagtcctgtggcctggactgcctttcatgtttatttaa

SEQ ID NO: 933606 - DNA, 628 bp, Homo sapiens
aaccagtagcccagcgaaaacagaacaacgcagaagacaaagagagaagaggaaggacgtctggacaccaaggggattttaggcagtggtggttggagaacagtctggccgctgggcaacccaacaccagggaaagaccatcttcccactccatctcctcacttctggctccccatccatctcactgataactgcctccactactcagtaaaaccttgcactcatccttccagcctatgtttgatctgattcttccagtacactgggcaagaactcaggatacagaaggttatcacactatcscactgcccttgtgataagacagagggaatactgagctgattagcacaaacagtttgcagatggcaaagctgaaaaagcacactgtaacacatgctcacttgggctttgggagtcagagacctccacctctagctgctgtggggccagaacgtgttttctttgtcttgtgtcttggatatcagctcagccacagtagaacacagtcctaattaaagtcatgaggcccccattttggccatagtccctggatgacatttctaggcacacacttggccagaatgaaacccactgccttaaagggaaggactcataacctgctgacagc

SEQ ID NO: 933607 - DNA, 602 bp, Homo sapiens
tcttctagtagttcagttcagcaaatgtatatttctcagttgcaatgtttctgtttgatttttaaaaattattttgatatttgttaaatttctcataaacctctgaattatttttctatgttatcttgaacaccactgagtttccttaaaacagctattttgaattcttggtcagagggctcacatattgccatcttgttagggtcagttactggttcattgctttgtctggggaggacaggtttccctgtttgctgttgtatcttgtagatgtacatctatgtctttgcattgaagtattatttatttaagtcttctctgtctagcttgttttgtttttttaattgggtatatttggtgagatattctttgtaatttacatgttgaatttcttatttatttatttttcctgctagattgctttctcctttttggcactygatgacaccttaagcccaggtttgctttggctctagcaaaccattgaagcactgctggcccaaatgggagaggtcccacaggggccaccctggcagtgtgggattcgtgcctaggaaacttgaagaatgtacctcctacagcatggtgctgctaaaaagcaa

SEQ ID NO: 933608 - DNA, 723 bp, Homo sapiens
acattttatatttctggaaacccttcaatataaagttattacatgtaaaaataaaaagtctgttttagcgaactttttcttcacaaattatattttcctacttccctattagacaatttttgtaggctccatatgctattaatttacattcacttttagaagaattttcatcaaaagcaaaagtcttatgtaaattgwttatatgttatttctacttctatgtatatatacgcacatagccacatacatatatgtaactccagaggcctgcctggactgtttgataactgtattgaacaacagcaagaaaaagctgttcaaatttcaaacaacaagttgaactgaagacttcacatctttgaattaaatagacactagtagcctttaaaaattaagcatttctactgttttaaaaaattatagccatcatagtatgaggaaaaaatgtaataatcttttttaattcttgccattttattaaccacggactccttatgccctaacttcattggtacccctttgagattaaacagaacacttaatttaaaattctgataaataaattaattacagcatttacttgaggtactctttcacctttcaagaaatattttgagaattcattagctaaatattgctataatgcaggctagtaataaacggaaagaatgaattcattgtaaagtttaaactaatgatggtatgatctggaatttttgttaa

SEQ ID NO: 933609 - DNA, 707 bp, Homo sapiens
tctttttatttttgtctaacatcaaccacagccatttctttcatttgaagttgaaaactgctcatcaaaatccagtttaagctgagaaacaaagaactaaattttgcatgagagattatacactgcataagtaaaaaacaggaccagaaacaatggtggattagcaatttttaaaaagacaaaaacaggttatcatcaaatcaattgttaccaacacaccaattccacctctaggacagaaaattagccacttacccacgggaaaacaatgattgaagacaaagttcaccagtgaaagttggttatttttttccatccttgcatcaactaaaatgatatctacagttcctcttaacacttttctgagtttcaaatatgtgggtatgcttcattagctgaagccattttccatrtgtacatctggctacaagggaaactgggaatgtgagccctgatcctaatgtttgtagagtatttagaaatttgagaattccctccaaataaagagttttttaaaacattgttagacaaaaagtttgaattacaaaatgtggtagtagctcaggtctaactcaaatgcagggaaaaaaactattaactgtaaaaaaaattaaatacacatttgatggcaatgagaaacagaaaacaggcagaaatagtagaatattcaaccactgatgaagtatttgaccattgaataaagaaaa

SEQ ID NO: 933610 - DNA, 707 bp, Homo sapiens
tctttttatttttgtctaacatcaaccacagccatttctttcatttgaagttgaaaactgctcatcaaaatccagtttaagctgagaaacaaagaactaaattttgcatgagagattatacactgcataagtaaaaaacaggaccagaaacaatggtggattagcaatttttaaaaagacaaaaacaggttatcatcaaatcaattgttaccaacacaccaattccacctctaggacagaaaattagccacttacccacgggaaaacaatgattgaagacaaagttcaccagtgaaagttggttatttttttccatccttgcatcaactaaaatgatatctacagttcctcttaacacttttctgagtttcaaatatgtgggtatgcttcattagctgaagccattttccatatgtacatctggctacaagggaaactgggaatgtgagccctgatcctaatgtttgtagartatttagaaatttgagaattccctccaaataaagagttttttaaaacattgttagacaaaaagtttgaattacaaaatgtggtagtagctcaggtctaactcaaatgcagggaaaaaaactattaactgtaaaaaaaattaaatacacatttgatggcaatgagaaacagaaaacaggcagaaatagtagaatattcaaccactgatgaagtatttgaccattgaataaagaaaa

SEQ ID NO: 933611 - DNA, 611 bp, Homo sapiens
cgtggttggagagtagctgggacagatgggagagtccctgagggatggtgaagacatgagagagactggggagtaacgcagtgaaattggtgagtttggtggtgatttctgggtgcctgcaacggactccagctgragtgtgggtgtgtttggagagtagctgggacagtcaggcgagtccctgagggttggagataaggacgtgctagagactggggagtaactcagtgaaagtggtgggcttggcggtgatccctgtgttcctggaactgacccgctctgaaatgtgggcgtggttggagagtagctggaacagactggagggtccgtaagggctgggggtgaagacgtgagagagactggccaggatctcactgaggtctgtgagtttgtaggtgtttctggggtgtggggtacagactcccgctgaaatctgggcgtggttggagagtagctgggacagacaggagagtcatgggtggctgggggtgagctgctggatgatggcagtaagaacatatggtatattattgatgaatgaggtgactgtgaagaatctccagaggaggacacgggagaacacaatgacatgagtgactgtcctgcttggt

SEQ ID NO: 933612 - DNA, 722 bp, Homo sapiens
gagggttggagataaggacgtgctagagactgaggagtaactgagtgaaattggtgagtttggtggtgattccgaggtgcctggaactgactccagctgcaatgtgggcgtggttggagagtagctgggacagatgggagagtccctgagggatggtgaagacatgagagagactggggagtaacgcagtgaaattggtgagtttggtggtgatttctgggtgcctgcaacggactccagctggagtgtgggygtgtttggagagtagctgggacagtcaggcgagtccctgagggttggagataaggacgtgctagagactggggagtaactcagtgaaagtggtgggcttggcggtgatccctgtgttcctggaactgacccgctctgaaatgtgggcgtggttggagagtagctggaacagactggagggtccgtaagggctgggggtgaagacgtgagagagactggccaggatctcactgaggtctgtgagtttgtaggtgtttctggggtgtggggtacagactcccgctgaaatctgggcgtggttggagagtagctgggacagacaggagagtcatgggtggctgggggtgagctgctggatgatggcagtaagaacatatggtatattattgatgaatgaggtgactgtgaagaatctccagaggaggacacgggagaacacaatgacatgagtgactgtcctgcttggttag

SEQ ID NO: 933613 - DNA, 743 bp, Homo sapiens
catagattggactagtgttgagtgtctgtagcttttccacacggagggtgcaagctgttggtgggtctatgtatctggggtctggagggtggtagcatgggggctccaagtccatattttccttctgcactgccctagtagaggtttcccaagaactcttcgtctgcaggaggctactgcgtggaaacagtaggaggtgggtgtgggaagcagatccttcaccaatggttaggcaacgtcttcttgatgctgtcctcatgatagtgtgttctcatgagatctggttatataacggggtggyaactctttcctctcgcagtcttgcttctactcctgccatttgaaatatctcattgccccttggccttctggtatgattgggaggcttcctgatctgatcctccaagaagcagaagccactacgcttcctttacagcctgctgtatagtgagccaattaaacctcttttctttatgatcatacagaaaatcagtgctatgaagtggagccatgaaatgccttcaaggccctttcccctttgtcttggcaaccagcactcagcttcttttcatgcaaatatctgaagccttcgtgaattttcccccgaaaatggacttttctgttttaccacattgccaggctctgataaagatagctgacaatgtagaaccaggttcagaagtgagtaaaagacagaggtcagaagaattgggaaagcttagaagacagcaagatgaggaaaa

SEQ ID NO: 933614 - DNA, 613 bp, Homo sapiens
aggttatctgcatatctaatttttcccacaaattactgttttgaattgcactgaattcaatttaaggggatgccatttataaacagtgcaaatatatactgcacgagggatcttaaaaatcatacgtatggtttgatccacaagctcatatgagcgtgcaatgtcaayttttttcatgtttttttaagtccacttaaattctattttaagccaccatctgcctgtgctgttagggcagttagccctcaatcattttaagatgctcccctctaagtactgtgatagtgatagagatgtcaccagtcaagtgtcctaggaagccgactccgagttggagatttgcatgcaaggaggttgaaatgatattcccaacacctgtggaagagcgaaagcaataggattgggtggagcaggaagtcggctggaatgcaatcactatcatggccgcagtgcactctacagggatcttggtgagtttacctaatgacctcaaattggagcaagcaaacaaggccattatatttctgtaccaagcagttctgggatgtgggatgcctttataaggaacatggatttggatgaaggaactttactgtgctgtgagtattgttga

SEQ ID NO: 933615 - DNA, 776 bp, Homo sapiens
tcagtatgtttagtgacatcgcctatttacattctggcacaagctctggatctcactgcaaaccagtaagtctgcactggccctgatctgcaggccacacttttcagaatcctggttccatgctactactatatatggactaacaacaacaatgatgataattttaccaattagcatttatagaatgattattgcacaccagatgctatgttcagcacttaagcactttatatggattatttcatttaaactcttaaggacctcatgagggtttactttwttatttccatttttcaaatgaggaaatgtaaaccttcagaggtttaatttaaacagcttctagaagatcatctgtggtagggcaggtgcttaaagtcaggcagtatgatctctgcttaaccccagttaagtgtatagtgtatatgcttaaccatatatccatactgcttcctgactatgttatatattgcttccagactacattttaaaaaataggctcacgttgaatcactgggggttgaagaaatacttgacactaatggagatgtcaggaagagaggtctggaagaaataccataaaactaaaaaacatggtaaagatagatttgtaaatctttttatagatttgaaaaacatatttctaatacaaagttacagtcaaatatttaatacactttatctctcaagcacggtatgctttaattgaaacaatggacctaatcattactaggacttttagaaggtcacttctgtgtttgcctttgttttaatagcct

SEQ ID NO: 933616 - DNA, 605 bp, Homo sapiens
aggaatcacctacaaactcacgagcctcacggtgctccacccctgtgtctttcatctcttcacccccagtactcagggactctcctgtggctcccagttactctccagccatccccaggttcctgcgggagtcagccccatgcacccagaagtcccccagagactcacaagtctcgggagawtatgagcggtcccccagccctgactcctcaagattcatgcctgcctcacccagcttctccctctcccttcccagaaactcagacccaaggggcagctcctcaccagggatgtggaagtactctacatcatcccgcagggcttcaccactctcacatccatcatcaacagaattccacagctttacgtttccctttcctaaccaagcaggacagtcactcatgtcattgtgttctcccgtgtcctcctctggagattcttcacagtcacctcattcatcaataatataccatatgttcttactgccatcatccagcagctcacccccagccacccatgactctcctgtctgtcccagctactctccaaccacgcccagatttcagcgggagtctgtaccccacaccccagaaacacctacaaac

SEQ ID NO: 933617 - DNA, 528 bp, Homo sapiens
cacacccaggaatcacctacaaactcacgagcctcacggtgctccacccctgtgtctttcatctcttcacccccagtactcagggactctcctgtggctcccagttactctccagccatccccaggttcctgcgggagtcagccccatgcacccagaagtcccccagagactcacaagtctcgggagaawatgagcggtcccccagccctgactcctcaagattcatgcctgcctcacccagcttctccctctcccttcccagaaactcagacccaaggggcagctcctcaccagggatgtggaagtactctacatcatcccgcagggcttcaccactctcacatccatcatcaacagaattccacagctttacgtttccctttcctaaccaagcaggacagtcactcatgtcattgtgttctcccgtgtcctcctctggagattcttcacagtcacctcattcatcaataatataccatatgttcttactgccatcatccagcagctcacccccagccacccatgac

SEQ ID NO: 933618 - DNA, 534 bp, Homo sapiens
cccaggttcctgcgggagtcagccccatgcacccagaagtcccccagagactcacaagtctcgggagaatatgagcggtcccccagccctgactcctcaagattcatgcctgcctcacccagcttctccctctcccttcccagaaactcagacccaaggggcagctcctcaccagggatgtggaagtmctctacatcatcccgcagggcttcaccactctcacatccatcatcaacagaattccacagctttacgtttccctttcctaaccaagcaggacagtcactcatgtcattgtgttctcccgtgtcctcctctggagattcttcacagtcacctcattcatcaataatataccatatgttcttactgccatcatccagcagctcacccccagccacccatgactctcctgtctgtcccagctactctccaaccacgcccagatttcagcgggagtctgtaccccacaccccagaaacacctacaaactcacagacctcagtgagatcctggccagtctctctcacgtct

SEQ ID NO: 933619 - DNA, 639 bp, Homo sapiens
aattccacagctttacgtttccctttcctaaccaagcaggacagtcactcatgtcattgtgttctcccgtgtcctcctctggagattcttcacagtcacctcattcatcaataatataccatatgttcttactgccatcatccagcagctcacccccagccacccatgactctcctgtctgtcccagctactctccaaccacgcccagatttcagcgggagtctgtaccccacaccccagaaacacctacaaactcacagacctcagtgagatcctggccagtctctctcacgtcttcacccccagcccttacggaccctccagtctgtcccagctactctccaaccacgcccacatttcagcgcggtcagttccaggaacccggggatcaccrccaagcccaccactttcactgagttactccccagtctctagcacgtccttatctccaaccctcagggactcgcctgactgtcccagctactctccaaacacacccacacttcagcgggagtccgttgcaggcccccagaaatcaccaccaaactcaccaatttcactgcgttactccccagtctctctcatgtcttcaccatccctcagggactctcccgtctgtcccagctactctccaaccac

SEQ ID NO: 933620 - DNA, 735 bp, Homo sapiens
gaagtatgttgtcatgcaatacaagtgagctaaaaatcattgtaaaacattgtaggagctaacagacaaaatagcaagtataaagaagacataaccgacctaatagagctgaaaagcacactacaagaattttcataatgtagtcacatagtgattatgtgtgattgcattatgaaaattattgtagtgtgtgtgggcacccgagatttccctgtaagcaggtgtggccaggctggggtcctgggagaggcaagcagactaaggagggctgaggtcacaccagctccatctcatgtgcaagaccacccagcagaatagaccaagcagaggaaaraatcccagagcttgaaaactggctttctgaaataaaacaggcagacaagaatgggggaaaaaagaaggaaaatgaatgaacaaaacatccaagaaatatgagattatataaacaaccaaatctatgactgattagtgtacgtgaaagagatgaggagaatggaaccaacttggaaaacatacttcagaatatcattcatgagaatatccccaacctatccagacaggccaacattccaactcaggaaatccagagagcctcagtaagataagccacgagaagatcatccccaagacatataatcatcagattctccaaggtcaaaatgaaagaaacaatgttaaaggcagccagggagaaaggcaacgtcacctgcaaagggaattccatcagacttagca

SEQ ID NO: 933621 - DNA, 830 bp, Homo sapiens
ttcccactaaggtcattattacccaggctcttggaggcagccactcctcattgattatttgcacatgagataaacctctttgttttaccatattgaaggactaacagaatcacaaactgtaactcaagtgcttttccagtgaagagtgaaataggaaggaacgaaaataacatatatctacccccctcctcctcttcctttagcttggggtcatcattacctccatttctccattttatttttgtttcctttttattggcaccacccaagtatgtgtgtrtgtgtgtgtgtgtgtgtgtgtgtgtgtgtgtgtttgatattaaaactttagggaaagaaacagctctcttaaaaatgtcagcaacttcaattcattgctttttaaatatcctggttaataatttacacccttggttaaaatattcaatcttctacttaatatatagtgcttagctttgtttttattttattttttgagacagtcttgttagctctgttgtccaggctggagtgcagtgacccaatcttggctcactgcaacctccacctgctgggttcaagcaattctcatgcctcagcctcccgagtagctgggattacaggtgcccaccaccacgcccagctaattgtgtttttagtggagacgggctttcaccatgttggccaggcatatctcgaactcctgacctcaagtgatccgtccgcctcggcctcccaaagtgttgggattacaggcgtaagccatcgtgtccagcctagtgcttagctttaatgtgagtcagtgttagcatacacattcagaattctttcaacctcaaaccacaaatctt

SEQ ID NO: 933622 - DNA, 763 bp, Homo sapiens
aaggtcattattacccaggctcttggaggcagccactcctcattgattatttgcacatgagataaacctctttgttttaccatattgaaggactaacagaatcacaaactgtaactcaagtgcttttccagtgaagagtgaaataggaaggaacgaaaataacatatatctacccccctcctcctcttcctttagcttggggtcatcattacctccatttctccattttatttttgtttcctttttattggcaccacccaagtatgtgtgtgtgtgtgtgtgtgtgtgtgtgtgtgtgtgtgtgtttgatattaaaactttagrgaaagaaacagctctcttaaaaatgtcagcaacttcaattcattgctttttaaatatcctggttaataatttacacccttggttaaaatattcaatcttctacttaatatatagtgcttagctttgtttttattttattttttgagacagtcttgttagctctgttgtccaggctggagtgcagtgacccaatcttggctcactgcaacctccacctgctgggttcaagcaattctcatgcctcagcctcccgagtagctgggattacaggtgcccaccaccacgcccagctaattgtgtttttagtggagacgggctttcaccatgttggccaggcatatctcgaactcctgacctcaagtgatccgtccgcctcggcctcccaaagtgttgggattacaggcgtaagccatcgtgtccagcctagtgcttagcttta

SEQ ID NO: 933623 - DNA, 596 bp, Homo sapiens
caaaggagcctcaccctgtagccactaccaccacaggcccactgggagtactaacgggctactgctgatgttcacttatggtccaagcactattcagtcagtttgtggtaaatgctgccaggcctaggactcacccttaagggaaatgtgctctccagtggtccagggtgggtccagaaatgccatccaagagccaaggcctataaytgggaaccccaagagactacttggtactctacctgactgtggccgagctggtacctaatgtgcaaaactaagccccctttagttttctttctgtttttctcaagcaggaagagtctctcaccgtagccactacagttgggaatgtgctgggtctcacctgaatccagctcatctcagagtcttactcaaggcccctggtatactacctgggtatcactgttggttatttagggctgaagggctgcttagctagaaggtgatggatcctgccaggactgggcccttcccttcaaggcagtgggttcccttcttgcccagggtgtgtctcaacatgttgtctgggagctagggcctggaatgggggccttatgactcttaccagtgcccta

SEQ ID NO: 933624 - DNA, 591 bp, Homo sapiens
cagagtcttactcaaggcccctggtatactacctgggtatcactgttggttatttagggctgaagggctgcttagctagaaggtgatggatcctgccaggactgggcccttcccttcaaggcagtgggttcccttcttgcccagggtgtgtctcaacatgttgtctgggagctagggcctggaatgggggccttatgactcttaccagtgccctatcctactgtggctgagctggcccaatatgcacgacaaagtcctctttactctcccctcttttctcctcaagcagaaggaaggagtctcttttggaacgtgagcagtgctgcctgagtttatgggaggaatagcacaagcactctcttagccacttcggctggcttcttagtaggtggtgtacccctcaagtccactggttacgaaaccagctcagcactattactctcctargggttgcagtccttgtggcctagactgtctttcaagtttattagggccccagagcactttagcccgtggtgatgaggcttgctgaaactcaagttctgaccacgggaatgggtaatttccctctggctagggctcatctagatg

SEQ ID NO: 933625 - DNA, 761 bp, Homo sapiens
caggcccggtgaaatgctgacctgtttgttagctgcagcaatcagaggggcccccccaaagaggcaagggaaggggggccctgggaaagaaactcagcttgactgtcagagtttgcagcataaccagtgtgcttattgtaaagaaataggacagtggaagaacaaatgccctcagctcaaaagaaaacaaggtgactccaagcaggaggccccagacaaggaagaaggggccctactcaacctggcagaagggttattgggctcaagcatccccaaagagcctctggtcagaatgacagttgggggaagagacattgattttcttgtagatagcggtgctgaacattcgctagtaaccgccccrgtcgcccccttatccaaaaagactattgacatcatcggagccacaggagtttcagcaaagcaagcttcctgcttgcctcggacttgtactgtaggaggacataaagtcattcatcagttttggtacatgcctgactgtcccttgcccttgttgggaagggacttgcttagcaagctgagagccactatctctttgacagagcacggctctttcctactaaagttacccagaacgggagtcattatgacgcttatggtcccccaagagaaggaatggagacttttcttaactgagccaggccaagagagaagaccagctctgagtaagcagtggccaagagtatgggcagaagacaaccctctgggattggcagtcaaccaagcccctgtactcatag

SEQ ID NO: 933626 - DNA, 761 bp, Homo sapiens
caggcccggtgaaatgctgacctgtttgttagctgcagcaatcagaggggcccccccaaagaggcaagggaaggggggccctgggaaagaaactcagcttgactgtcagagtttgcagcataaccagtgtgcttattgtaaagaaataggacagtggaagaacaaatgccctcagctcaaaagaaaacaaggtgactccaagcaggaggccccagacaaggaagaaggggccctactcaacctggcagaagggttattgggctcaagcatccccaaagagcctctggtcagaatgacagttgggggaagagacattgattttcttgtagatagcggtgctgaacattcgctagtaaccgccccggtcgcccccttatccaaaaagactattgacatcatcggagccacaggrgtttcagcaaagcaagcttcctgcttgcctcggacttgtactgtaggaggacataaagtcattcatcagttttggtacatgcctgactgtcccttgcccttgttgggaagggacttgcttagcaagctgagagccactatctctttgacagagcacggctctttcctactaaagttacccagaacgggagtcattatgacgcttatggtcccccaagagaaggaatggagacttttcttaactgagccaggccaagagagaagaccagctctgagtaagcagtggccaagagtatgggcagaagacaaccctctgggattggcagtcaaccaagcccctgtactcatag

SEQ ID NO: 933627 - DNA, 761 bp, Homo sapiens
caggcccggtgaaatgctgacctgtttgttagctgcagcaatcagaggggcccccccaaagaggcaagggaaggggggccctgggaaagaaactcagcttgactgtcagagtttgcagcataaccagtgtgcttattgtaaagaaataggacagtggaagaacaaatgccctcagctcaaaagaaaacaaggtgactccaagcaggaggccccagacaaggaagaaggggccctactcaacctggcagaagggttattgggctcaagcatccccaaagagcctctggtcagaatgacagttgggggaagagacattgattttcttgtagatagcggtgctgaacattcgctagtaaccgccccggtcgcccccttatccaaaaagactattgacatcatcggagccacaggagtttcagcaaagcaagcttcctgcttgcctcggacttgtacwgtaggaggacataaagtcattcatcagttttggtacatgcctgactgtcccttgcccttgttgggaagggacttgcttagcaagctgagagccactatctctttgacagagcacggctctttcctactaaagttacccagaacgggagtcattatgacgcttatggtcccccaagagaaggaatggagacttttcttaactgagccaggccaagagagaagaccagctctgagtaagcagtggccaagagtatgggcagaagacaaccctctgggattggcagtcaaccaagcccctgtactcatag

SEQ ID NO: 933628 - DNA, 761 bp, Homo sapiens
caggcccggtgaaatgctgacctgtttgttagctgcagcaatcagaggggcccccccaaagaggcaagggaaggggggccctgggaaagaaactcagcttgactgtcagagtttgcagcataaccagtgtgcttattgtaaagaaataggacagtggaagaacaaatgccctcagctcaaaagaaaacaaggtgactccaagcaggaggccccagacaaggaagaaggggccctactcaacctggcagaagggttattgggctcaagcatccccaaagagcctctggtcagaatgacagttgggggaagagacattgattttcttgtagatagcggtgctgaacattcgctagtaaccgccccggtcgcccccttatccaaaaagactattgacatcatcggagccacaggagtttcagcaaagcaagcttcctgcttgcctcggacttgtactgtaggaggacataaagtcattcatcagttttggtacatgcctgactgtcccttgcccttgttgggaagggacttgcttagcaagctgagagccactatctctttgacagagcacggctctttcctactaaagttacccagaacgggagtcattatgacrcttatggtcccccaagagaaggaatggagacttttcttaactgagccaggccaagagagaagaccagctctgagtaagcagtggccaagagtatgggcagaagacaaccctctgggattggcagtcaaccaagcccctgtactcatag

SEQ ID NO: 933629 - DNA, 583 bp, Homo sapiens
aggcctatggtagaaaaggaaatatattcacataaaaacttgacagaagcattctcaggaacttctttgtgatgtgtgcattcaactaacagagttgaaagtttcttgtgatagagcagtattgaaacactccttttctagaatctgctagtggatatttggagattgttgaggccttctttggaaacgggaatatcatctcataaaaagtagacagaagcattctcagaaagttcttgtgatgtgtccattaaactcatagagttgaacctttcttttgaaagagcagttttgaaacactctttttgtagaatctgcaagagttcatktggagcgctttgaggcctatggtggaaaaggaaatatcttcacataaaaactaatcagaagcattctcagaaactcctttgagatttgtgagttcaactcacagagatgaaccttccttttgatagagcagttttcaaacagtctttttgaaaaatctacaagtggatatttggagcgatttgaagcctattgaggaaaaggaaatatcctcacataaaaactagacagaagcattctcaggaacttctttctg

SEQ ID NO: 933630 - DNA, 563 bp, Homo sapiens
  misc_feature 1, 2, 3, 4, 5, 6, 7, 8, 9, 10, 11, 12, 13, 14, 15, 16, 17,18, 19, 20, 21, 22, 23, 24, 25, 26, 27, 28, 29, 30, 31,32, 33, 34, 35, 36, 37, 38, 39, 40, 41, 42, 43, 44, 45,46: n = A,T,C or G
nnnnnnnnnnnnnnnnnnnnnnnnnnnnnnnnnnnnnnnnnnnnnngaaagagagtttctggggtgccagttgagttggtctcccctgtgtgagacacccatgcgtagccatgggcagcctctgaggagaaaagtctccttatgccttcatgtctttatgccccgagagcataacagctcagcggtattccacaggttgctcagggagataacagtcccttgaagcaggggagtataatcaaacgtcttggctcctcctgaaacccgctcccrcccatttcagtccctataagttaaagatcttacgtagtttagacacatgcctttgctcaaagaaattcccagaaaccgctactgctctacatcttattgaatgactcatgagttctctttcactgattaatccttttcctcatcccttcctcctgctctcatctgccttaggaacaaagagcttataaaccaataaattaggcggagcctgagagctccacattttctttatctagtctgtcattgatgggcatttgtgttggttccatgtctttgttattgtaaatgat

SEQ ID NO: 933631 - DNA, 532 bp, Homo sapiens
ggcttcaactttgcttggatttttaaatattttccttgcatatgtaaatagaatgtggtgagttttagttcaaaattctctgttgagaataataaatgcatgaaataccttaaagctctgtgaagacttgtaacatggcagcaatcaaatggcttataaaaggatactttgaatgtggataaattgaattcagtcaatatttcagtggaatttttggcyaattgcttgaattgaattgaattatactactcaattgaataatattttctcctcctccttctccccttccttcttccttctcttcctcctcctcctcttcttcttcttcttccccttctcctcctcttcctcctcctcccccttcttctacttccttctcttcctcctcctcctcttcttcttcttcctcttctcctcctcttcctcctcctccctcttcctcttcttcttcttcttctcctcctccttcttcttctccccttcctcctcctcctcctctgtcctcttcttcttcctcttctttttcttcttc

SEQ ID NO: 933632 - DNA, 684 bp, Homo sapiens
ttagaactaataagatatttagtaaagaatgggcaaatacaagatcaacacacaaatttgtggaaatatacaaccctcctagattcaatcaggaagaaatagaaacctggaacagaccaataacaagcagtaacaatgaatcagtaatttttaaaaattgcaacaaaaataagtccaggaccagatggattcacaattgaattctatcagacattcaaagaagaattggtaccaatcctactgaaactattccaaaagtggagaaaaagggaatcctccctaagtcattctgtgaagccagtatcatccaaayaccaaaaccaggagacgacttaacaaaagaaaactacagaccagtatccctgatagacatagatgcaaaaatcctaaaaaacaaaaacaaaaaactagctaactaaatccaatcacatatcaaaagataatacatcatgatcaagtgggtttcataccagagatgcaggaatgatttaatgtatacaagtcagtaaatgtgatatactacagaaacagaattaaaaacaaaaaagcagaaaaagcattttagaaaatccagtatcactttatgataaaaactctcaacatagaagggacataactcaaagcaataaaagccatagacgacaaactcacactgaacataatactgaatggggaaaagttgaa

SEQ ID NO: 933633 - DNA, 684 bp, Homo sapiens
ttagaactaataagatatttagtaaagaatgggcaaatacaagatcaacacacaaatttgtggaaatatacaaccctcctagattcaatcaggaagaaatagaaacctggaacagaccaataacaagcagtaacaatgaatcagtaatttttaaaaattgcaacaaaaataagtccaggaccagatggattcacaattgaattctatcagacattcaaagaagaattggtaccaatcctactgaaactattccaaaagtggagaaaaagggaatcctccctaagtcattctgtgaagccagtatcatccaaataccaaaaccaggagacgacttaacaaaagaaaactacagaccagtatccctgatagacatagatgcaaaaatcctraaaaacaaaaacaaaaaactagctaactaaatccaatcacatatcaaaagataatacatcatgatcaagtgggtttcataccagagatgcaggaatgatttaatgtatacaagtcagtaaatgtgatatactacagaaacagaattaaaaacaaaaaagcagaaaaagcattttagaaaatccagtatcactttatgataaaaactctcaacatagaagggacataactcaaagcaataaaagccatagacgacaaactcacactgaacataatactgaatggggaaaagttgaa

SEQ ID NO: 933634 - DNA, 640 bp, Homo sapiens
tccctcccctagccaagggaagccgtgagggactgtgccatgaggaaaggtacattccggcacaggtactacgcttttcccatggtcttcacaaactgcagaccagaagactccctcgggtgcctacatcaccagggccctgggtttcaagcacaaaattgggtggccgtttgggcagacaccaagctagctgcagtttttttcataccccagtggcacctggaacaccagcaagacagaatcattcattcccctgaaaacggggctgaagccagggagccaagtggtctagctcagcagatcccacccccacagagcccaacaagctaagatccactggcttgaaattctcgctgccagcacagcagtctgatgttgaactgggatgctmgagcttggtgggggaaggggcgtccgccattactgaggcttgattagatggttttcccctcacagtgtaaacaaagccccaggaagttcgaattcggcagagcccaccacagctcggctaagctgctatagccagactgcctctctagattcctcctctctgggcagggcatctctgaaagaaaggcagcagccccagtcaggggcttatagataaaactcccatctccctgggacagagcacctgggg

SEQ ID NO: 933635 - DNA, 755 bp, Homo sapiens
  misc_feature 1, 2, 3, 4, 5, 6, 7, 8, 9, 10, 11, 12, 13, 14, 15, 16, 17,18, 19, 20, 21, 22, 23, 24, 25, 26, 27, 28, 29, 30, 31,32, 33, 34, 35, 36, 37, 38, 39: n = A,T,C or G
nnnnnnnnnnnnnnnnnnnnnnnnnnnnnnnnnnnnnnntacaattagtttttgtttaggggtttgcaaccacttgcatggggaattgatgctaaccatcacacattgcagtgcagaaatagccttcaggaattctcctactgcctctgggctgacttgcccactattgtgacttgaaggtgcgtgccaaaggttgtttcataacataaatgtgtctgtcctgcgtatctcttgcracatagcaagtcattctagaactcagtggcttcaaatgacaacagtcatttgttttgttcacaaatctgtaataggcagggctttgcagggacagcttctcatggtttcacatggcatcatctggggtggctcaaaggctgggggctggaatcatctgaaggctccgagttcatgtatctggtggttgatgctggctgtgagctgagacctcagctagctggctgtggcctttccgtggggcctgggcatggcggctgggttctaagggtgattgtcccaagagggccaagtggaagctgtcttgccttttatgaccaccttggaagtcacatagtgtcacttctgaggtaatcacagacccactcagataaggggaaggaagacaggccccactcctcaatgagagggataccaatatcccactataagaagagcatgtgagatggaaggtctgatcgtgaccattttggaaaatacagtcttccatggtgtcttatggcacccagcccctaaaaata

SEQ ID NO: 933636 - DNA, 785 bp, Homo sapiens
ctctcctggtttaatgtagaggaagggatccaaaggcttagggagattgggatggtggagtggattagtcactttagacctaatcatcccagtgggaagggtccagaaattaacatgtctcctggtgcctggtatgcaccaattgacttggcaaatgctttttctccattcctgtccataaggcycaccagaagcaatttgctttcaactggcaaggccagcaatatacctttactgtcctacctcaggggtatatcaactctccggttttgtgtcataatcttattcagagagaccttgaacactttttgcttctgcaagatatcacactggtccattacaatgatgacattatgatgactagatccagtgaacaagaagtagcaaacacactggacttattggtgagacatttgcatgccagaggatgggaaataaatctgactaaaattcagggaacttctacctcagtaaaatttctaggggtccagtggtgtggggcctgtcgagatattccttctaaggtaaaggataagttgctgcatttggcccctcctacaaccgagaaagaggcacaaagcctagtgggcctgtttggattttggaggcaacacatttgggagtgttactctggcccatttattgagtgacccgaaaggctgccagttctgagtgggatccagaacaggagaaggctctgcaataggtccaggctgctgtgcaagctgctctgccacttggaccatatgacacagcaaatccaatggtgcttgaggtgtcagtgg

SEQ ID NO: 933637 - DNA, 616 bp, Homo sapiens
  misc_feature 595, 596, 597, 598, 599, 600, 601, 602, 603, 604, 605, 606,607, 608, 609, 610, 611, 612, 613, 614, 615, 616: n = A,T,C or G
tccgagtggtcaaaaactgtgaagatatttgtgtcccctgtgagtgctcaccaacaggtgacctcagtggaggaggagtttaataatcaagtggataggatgacccattctgtggacactactcagcctctttccccagccacccctgtcatcgcccaatagacccatgaacaaagtggccatggtggcagggatggaggttatacacgggctcagcaagatggacttccactcaccaagactgacccgrctatggccactgctgagtgcccaatttgccaacagaagagaccaacactgagccctcgatatggcaccattcctcagggtgatcagccagccacctggtggcaagttgattatattggaccttttccatcatggaaagggcagaggtttgttctcactagaatggcacttactcctgatatgggtttgcctatcctgtatgcaatgcttctgccaagactaccatccacggactcacaaaatgcattacccaccgtcatggcattccaaacagcattgtctctgaccaaggcactcactttgcggttaaggaagtggggcagtgggctcatgctcatggaattcnnnnnnnnnnnnnnnnnnnnnn

SEQ ID NO: 933638 - DNA, 616 bp, Homo sapiens
  misc_feature 595, 596, 597, 598, 599, 600, 601, 602, 603, 604, 605, 606,607, 608, 609, 610, 611, 612, 613, 614, 615, 616: n = A,T,C or G
tccgagtggtcaaaaactgtgaagatatttgtgtcccctgtgagtgctcaccaacaggtgacctcagtggaggaggagtttaataatcaagtggataggatgacccattctgtggacactactcagcctctttccccagccacccctgtcatcgcccaatagacccatgaacaaagtggccatggtggcagggatggaggttatacacgggctcagcaagatggacttccactcaccaagactgacccggctatggccactgctgagtgcccaatttgccaacagaagagaccaacactgagccctcgatatggcaccattcctcagggtgatcagccagccacctggtggcaagttgattatattggaccttttccatcatggaaagggcagaggtttgttctcactagaatggcacttactcctgatatgggtttgcctatccygtatgcaatgcttctgccaagactaccatccacggactcacaaaatgcattacccaccgtcatggcattccaaacagcattgtctctgaccaaggcactcactttgcggttaaggaagtggggcagtgggctcatgctcatggaattcnnnnnnnnnnnnnnnnnnnnnn

SEQ ID NO: 933639 - DNA, 677 bp, Homo sapiens
gtgtgttccccctcctataaggggtaaagtgtgtgacagtggagcaaatgagccacacccctgtcgcaagtcccgtgagggggtcagggaactctcccatttcatctgggggctcgtctgggatacagcacaaggatgagtacagatttagaactgtcggatctgcctcttttccaagattctgccacctctctttttcctttgggtaaaaggaatattggctctgtttctcttcatggaggtctagctgttgcacgggatggaataaagtcctggggcaacagaagccatcttttgttgctggaaggctccaagactgaactctgtaggccaagaaccccagactttgctgtggtatcttctttcatggcttgaaatggctcctatctcttcttttatagtattaagggctttgctgcaactascgagatgttactaagtacaaggtatgcttggttcagccatcagatgtgcaattcacaacaatgtagtttctgtttcttcttagaggtgccatccccagccgcaggtgtgcgcagtgcatgagtgactcccctccttctcccttcccctccttttcccctccccgccttctcccctctcctcccagctctgcacatgagctgcacccagtggccacgaggggcgggagaaaaccttggctgccgctggggccc

SEQ ID NO: 933640 - DNA, 654 bp, Homo sapiens
cccagcttatactcctctagagtgtatcctgaaccactgggactgctttgaccctcagactctggaggaaaatggctcatagccctctgcacaaaggtttgggcaaattatgaaggactggcttggcctcaggaagaaaccattcatttcgatatcatccagcagttggagcttttctgtaaacgtgagggcaaatgctctgaggcccatatgtgcaggctttctataccgtgcagggcaatccagaccttagctgacaatgtagaattaatccagaccggtttgccatctcgggagaggctgcaaggggcaatcccagggaacyaaaaaaacaaatcccagaggcatccccagcagaggagccagctccctccagccctgctcctccaggtccaccccatcctccctatccagcttcagtctctcacttgccccctcctagaaattctcaccctagacaagccccagtctcattctttcccctccaacagatgcctggtgaatttaccccataaggtccaggtactcttctctctacagaacttgaagcaaattgagggggatcttggcaagttttcagatgaccctgagagatatatagaggcttttcagaacttaacccaagtatctgagctctcctaggaagacgtcatg

SEQ ID NO: 933641 - DNA, 491 bp, Homo sapiens
aaaacacaccaaaatatgaagaccaacaacactgtgaagaaattacatcaacttttgtgcaaaataaccagctagaatcataaaaacaggatcaaattcacacataacaatactaaccttaaatgtcaatgggctaagtgccccaattaaaagacacacacaggcaaattggataaaaagtcaagaccaatcagtgtgctaccttgaggagacccatctcacgtgcaaagacacacataggctcaaaataaagggatgaaggaaaatttaccaagcaaatggaaagcaaaraaagcaggggttgcaatcctagtctctgataaaaccaactttaaaccaacagaggtcaaaatggacaaagaagggcaccacataatggtgaagggatcaatgcaacaaaaagagctaactattctaaacatatatgcacccaatacaggtgcacccagactcataaagcaagctcttagagacctacaaagactcccaca

SEQ ID NO: 933642 - DNA, 594 bp, Homo sapiens
caccaaaatatgaagaccaacaacactgtgaagaaattacatcaacttttgtgcaaaataaccagctagaatcataaaaacaggatcaaattcacacataacaatactaaccttaaatgtcaatgggctaagtgccccaattaaaagacacacacaggcaaattggataaaaagtcaagaccaatcagtgtgctaccttgaggagacccatctcacgtgcaaagacacacataggctcaaaataaagggatgaaggaaaatttaccaagcaaatggaaagcaaagaaagcagggkttgcaatcctagtctctgataaaaccaactttaaaccaacagaggtcaaaatggacaaagaagggcaccacataatggtgaagggatcaatgcaacaaaaagagctaactattctaaacatatatgcacccaatacaggtgcacccagactcataaagcaagctcttagagacctacaaagactcccacacaataacagtgggagactttaacactccactgtcaatattagacaattcaacaagacagaaaatcaacaaggatattcaggacttgaactcagctctggaccaagcaga

SEQ ID NO: 933643 - DNA, 661 bp, Homo sapiens
ttttactgttataccaacttcacagatgaataaacttaggccagagaaattcagaaacacagctagtaagtgaaggggtgggaatccaaactaacattgcagatatcaaagcctcctcccttcttcaataccccttaatgtataaggtgccaaattgcttattaatatacaaggtacatatgaataaaataaagcaatatttatgagatgtagccaawgctaaaatcagaagtaacaatcttttgaaaagaaatacaataaagtaacaaagctgtgaatcagaaaaaaattgaaaaaagaatgccaattcaaaccttaagaaaactagaggagaagtggaggagtgggcaagatggctgaccagaagcagctagtgtgtgtggctgtcatggaaaggaacagaaggggtgagcattaggtctttgcaaccctcaagtcaggagatctccttgtgaacccactccaccagggctttcagtcttcagtctaatacacagagctatgtggagtcttggcagagcagccactcaggccagcatggagtcctcgaaggcttagatacttgggttttctggtaaaagtagctgcagccccagcaaagttggaggttagactcctgtatataaccctaggaaagaggctgaatccaggggtgttaaca

SEQ ID NO: 933644 - DNA, 590 bp, Homo sapiens
ctgcagaggctccccaatgagagcaaagcataagtgagagaaccccagtgatccacatttccaccaagaactcctgcaatcttaaccacaggaaaaccatcaatctatgtgggtcctagactaatctagagagcttcctgaagaccatatgatgacattgctccagagagggagctcacactggatcccacatactccctgagtcctaagcagctacagcacagtgccaccttaaaagcccagcccctaacagattgcatcctgccctgggcacaacagcccatgcatctccacatccctggaaccccatggacatactccacccccagccactgcctctgctagctgctgccaccaggtcaaagtgtgagccattggtagcaaccttgatgcccccagcagtggggccactgatatggtttaactctgtgtccgtacccaaatctcarcttgaattgtaatccccatgtgtcagaggagggacctggtgggagatgactgggtcatgggggtagatttttcctttgctattctcctgatagaaagtaagttctcacgagagttgacggttttaaggtgtgtcacctccc

SEQ ID NO: 933645 - DNA, 643 bp, Homo sapiens
acagggattgtttgactttctctcttcctatttggatgtcttttatttctttctcttgcctgattgctctagctaagacttctaatattatttttaataggagtgatgagagaggacattattgtcttgttctggttttcaaaaggaatgcttccagcttttacmcactcaatatgatgttggcaatgggtttttcatagatggctcttattattttgaagtatatttcttcaatgcctaggtttttggagggttttaacatggaggaatgttaaattttatcaaaagccttttctgcatctattgagatgatcaggtggtttttgtttgtagatctgtttatatggtgaataatatttattgcaccaatcttgcatctcagggataaagcctacttgattgtgatgggctagctttttgaagtgcttctgtaattttcttgtattttgttgaatatatttacatctacgttcttcaaagctactggcctgaaattttcttgttttggtgtgtctcttccaggctttgctatcaggaagattctggcttcagggaatgaggaaggagtcccttaacctcaattttttagaatagtttcagtaggaatattagcagcttttccttatatatctggtataattca

SEQ ID NO: 933646 - DNA, 643 bp, Homo sapiens
acagggattgtttgactttctctcttcctatttggatgtcttttatttctttctcttgcctgattgctctagctaagacttctaatattatttttaataggagtgatgagagaggacattattgtcttgttctggttttcaaaaggaatgcttccagcttttacacactcaatatgatgttggcaatgggtttttcatagatggctcttattattttgaagtatatttcttcaatgcctaggtttttggagggttttaacatggaggaatgttaaattttatcaaaagccttttctgcatctattgagatgatcaggtggtttttgtttgtagwtctgtttatatggtgaataatatttattgcaccaatcttgcatctcagggataaagcctacttgattgtgatgggctagctttttgaagtgcttctgtaattttcttgtattttgttgaatatatttacatctacgttcttcaaagctactggcctgaaattttcttgttttggtgtgtctcttccaggctttgctatcaggaagattctggcttcagggaatgaggaaggagtcccttaacctcaattttttagaatagtttcagtaggaatattagcagcttttccttatatatctggtataattca

SEQ ID NO: 933647 - DNA, 655 bp, Homo sapiens
agccaatggttgactgatatgtgtgaataaaagggaggttaacttgcacaagttggggctgggtatagtgtcatttatgttccagagttatcttttggacaaagcctgacttcacctgaatcacatcttcttcaagcatcaccccattgtaccgtttgcctcattcccttatagttttctcctgagagcacttcctcactgcattatttgcatcagaatcctcttctcaasttctgcttctgtggaacctggccaaagacagttggtaacaggagtggtcacaaaaagcaggccataataaggaatattgcattggattgttcaactggctaaatgtcaatgagtaccctatggtggtatttggagtactgaccgttgctgatatgtggtagcagtgtgattgttaaaactttcaattgtggtgaacttggacttagaagaggtggaagatgaatttgcttgtgggtatctctgactctgagaaatgcagagatgatagtgatgataaggattgtggcattggatggctgttgctaagcatgattggagcaccaaagacagaaaatagcaggctcgtatttattaatccaaaaatttagagcaaagtgtgagtcagaggcctttcttggcagcatttagaaataccttcatttct

SEQ ID NO: 933648 - DNA, 583 bp, Homo sapiens
acatcagactccaggttcctcagcctttggactcttagatttgcaccagtggtttgccaggggttctctggccttcagccacagactgaaggctgcactgttgtcttccctgcttttgaggcttttggacttgaactgggccactactggcttcctacctcctcagcttgcagacagcttatcatgatgcttcgccttgtgatcgcatgagccaattctccctaataaactccctttcatgtatatatatatccatatatatggatatatatatatatggatatatatatataaggatacatatatatggatacatatatatggatatatatatatggatacatatatggatatatatatatggatatatatatatggatatatatatatggatatatatatatggatatatatatawggttatatatatatggatatatatattaggatatatatggatatatataatggttttgtccctctggagaaccctgactaatacgtaaacaaactcatatttaacatagtgcattgattttgaacaaagagggcaagataattcaacaagtaacagaaaatcttt

SEQ ID NO: 933649 - DNA, 600 bp, Homo sapiens; identical to SEQ ID NO: 931804

SEQ ID NO: 933650 - DNA, 600 bp, Homo sapiens; identical to SEQ ID NO: 931805

SEQ ID NO: 933651 - DNA, 600 bp, Homo sapiens; identical to SEQ ID NO: 931806

SEQ ID NO: 933652 - DNA, 678 bp, Homo sapiens
gcagcttcttgactgttcaagttttatcatgagattgcagcaattcagtcacatcttcaggctccacttctaattctagttctcttgatatttccccccacatctgcagttacttcctccactgaactattgaacccctcaaagtcatctatgagggttggaatcaatcaacaatgtagatattttgaacccctcccatgaatcagtaatattcttaatggcatctaaaatggcaaatcctttccagaagatttttaatttactttgcccagatccatcagagaaatcactatgtatggcagctatagcctcataaaatgtattttttagatattaagactcaaaaattgaaattactccttaatctatgggctgggctgcacatggatattatgttagcagtcatgaaaacaacattaatctccttgtacatttccatcagagctcttggattaccaggtgcattgccaatgagcagtaatattttgaaagsaatctttttctgagcagtaggcctcaacagtgggcttaaaatattcaaccaaccatgctgtaaacagagtgctgctatcccgactttgttgttccttttatagggtataggcagagtagatttagcatcattcttaagggccctaggattttcagaatgacaaataagcattggcttcaacttaa

SEQ ID NO: 933653 - DNA, 643 bp, Homo sapiens
tgtctaattcccagctttttctttagctgtatccatcctggtgtttatcccttctatgtgttctttgttttaagtattatattttattcctaataaagtcagagggagattacacacacatacacacatgtatctgtctattttctcttagctctttgtgcatatttattatatttcttggtttgtcccaaaattccgttctattttacatgtgtgtgtgtatatatatatatatatacacacacacacacacacacacacacatatatatgtatatacatctgaatatttgtttctttaatgagtgtactccacaggtgtctattaattttggtattcctgataacatgttttggggtagacccaaaggctagscccttgcctgcgtctctccattgtgtttataaagaggggaagggacatgccccagggctgagaaacccaggccccacagcatcatgttaaccactatataagtctcctagtcaaagattcacttttaaactactttaaataagcaatttcctgtttagtttattgagggggttggaggaagagtacacaaaaaagtaaggctagagagcagcagcagtccagacccaccatcatctgcaaacctaccgtttgatagcttctgtggcct

SEQ ID NO: 933654 - DNA, 655 bp, Homo sapiens
cttgtgtagctactatagaaaacagtatggacgttcctcaaaaaactaaaaatggaactaccatatttgtaacaatcccacctctgtgcatatatccaaaggaaatgaaatcaagacctcgaagagatatgtgcactcctacatccattgcagcagtatttgctgtagccaarctatggaagcaacttaaatgtccattgatgggtgaatgaatagagaaaatataacatatacctagaataaaatattaagccacaaagcagaaggaaatcctgtcatttgaaatatgaataaacctggtggagattatgctaagtgaaataagccagacacagaaggacgaatagtacatgataaatttaagataatgtgacatatacctacaataaaacatgaagccacaaaaaagaaggaaatcctgccatttgcgatatggatgaacttggtggagattatactaaatgaaataagccagacacagaaggatgaatactacatgatacatttatatgagaaatctaaaatagtcaaactcatagctgctgagagaagaatggtggttgccattgactgggaagaagaggaaatgggaaggtattagttaaacgatacaaagttttatttatatagtatgagtaagttctagagatttatg

SEQ ID NO: 933655 - DNA, 608 bp, Homo sapiens
ttttctatactgtcattcccacctttgagtggtgtctttgctttaaatttttgtgcacactcacaaaccgtcagcatgctctacccgtcctgtcctataaagaccacaggctcagtcagtagaggagaatatggcctaacttcaggaaaggagatggcttgacttcagggaaggaacaatctgactctggggaagacaacctgcgcttcccatcctctctccaccaaccctctacactgagarccatttttactgctcaagaaaattctccaccttcaccatccttcaaccatccatgtgacctcattcttcttagatgctggacaagagctcaagactcactgagtgtgggtacccagaaaggctgtcacactggccctttgctatcactggtagagggcagctacctctcatgatgaggcaaggggcaaatgagctgctaacacaccgccgtccaaggacagtagaactaaaggagcactgtaacaccccctctgggactttggagtcacaggtaccctcacctggacaccaccacgttcccctcaaggcgacatgcctggtctgaccacaggccctgcatggagcttgctcctgtgtcagtgcct

SEQ ID NO: 933656 - DNA, 554 bp, Homo sapiens
gacttctctgcattggttcttctagttagctattcctctaatttcttttcaaggtttttaacttctttgccatgggtttgaacttcctcctttagctcagagtagtttgatcgtctgaagccttcttctctcaactcgtcaaagtcattctccatccagctttgttccattgctggtgaggagctgcgttcctttggaggaggagaggcactctgatttttagagtttccagtttttctgttctgtttttcccccatctttgtggttttatctacctttggtctttgaagatggtgatgtrcagatggggttttggtgtggatgtcctttctatttgttagttttccttctaatagtcaggacccttagctgcaggtctgttggagtttgctggaggtccactccagaccctgtttgcctgggtatcagcagcagaggctgcagaacagcggatattggagagcagcaaatgttgctgcctgatcgttcctctggaatttttgtctcagaggattacccggccatgtgaggtgtcagtctgcccctactggggc

SEQ ID NO: 933657 - DNA, 588 bp, Homo sapiens
caagctggcattgattgtctgcagcttttccaggcacacggtgctatctgtaggtggatgtaccattctggcgtctggaggacagtggccctcttctcacagctccactaggcggtgccccagtagggactgtgtgtgggggcttctaccccatatctcccttccacactgccctagcagatgttctccatgagggccctgtgcctacagcaaacttttttctgggcatccaggcatttccatacatcttctgaaatctaggtggaggttcccaaacctcaattcttcacttctgtgtgctttgaggctcaacaccacatggaatatgccaaggcttggggcttccaatctccaaagccacagcctgagctgtatgttggcayctttcagccgtggctggagtggctgggacacagggcaccaagtccctaggctgcacacagcacagggaccctgggtctggcccacaaaaccactttttcctcctgggcctccaggcctgtgatgggaggggctgccatgaaggtctctgacatggcctagagacattttccccatggtcttggggattaacattaggctccttgc

SEQ ID NO: 933658 - DNA, 642 bp, Homo sapiens
tcctcacattggtttccttcacagataggtatgtgtctgtgtccaaatttccccttttctttctttttctgagatggagtttcactcttattggccaggctggagtgcaatggctcgatcttggctcaccacaacctccgcctcctgggttcaagttcctctgctgcctgagcctcccaagtacctgggattacaggcatgcacaagcacgcccagctaagttttgtacttttagtagagatggggtttctccatgtcggccaggctggtctcaaaatcccaacctcaggtgatccacccgcctcggcctcccaaagtgctaggattatagccataagccaacatgcccggcccaaatttccccttttcataaggacattggacatcttggattaggccacattctatgaatttgrttaaatttgcaaagaccctatttccaaataaggtcatgtattgaggtactgggagttaggatttcaacatatcctttttaggggacataaatgaacccataacagcaccaaagaagaatatcagcaattatctgaaagggctattgaaatactttttccacggccaactgcatatctgtgtaaggccagattttctttgtatactggaaccaaaacaacacactaa

SEQ ID NO: 933659 - DNA, 597 bp, Homo sapiens
tctgtcctacctcaccctatgcatctcttcatctgtatcctttgtaataccttttataataaaccagtaaatgtaagtaagtgtttctttcagtcctgcgatttgctcccacaaattaatccaacccatagaggaggtggtgggaaccccaacttgaagcccattgatcagaaattccagaggccaggcatggtggctcacatttgtaatctcagcactttgggaggccgaggtgggtagatcacatgaggtcaggagtttgagaccmgcctggccaacatggtgaaacctggtctctactaaaaatacaaaaattagctgggtgtggtggtgggcacctgtagtcccagctacttgggagtctgaatcaggagaatcactcaaacctgggagatggaggttgcagtgagctgagatcatgccactgcactgcagcctgggtgacagagggagactccatctcaaaaaataaaaaaataaaataaaaagaagttgcagagacctggatttgcaactggaggaggggcagtcttgtggactgagcccccaacctgtgggatctgacattatctctgggtagacagtgtgggaactgaa

SEQ ID NO: 933660 - DNA, 562 bp, Homo sapiens
ctccagcctggacaacaagagtgaaactccatctcaagaaaaaaaaaaaaaggaaagaaatcagtgtgcaaattacataggatttctttccttaaagaaatgcatcaaggccggatgcagtggctcacgcctataatctcagcactttaggaggcagaggcgggcagatcacctgaggtccagtgttcaggagcrgcctggccaacatgcgaaatgccttctctacaagaaatacaaaaattagccaggcatgatggtgcaagcttgtaatcccagctactcagaaggctgaggcacaataatcatttgaacctgggaggcagaggttgcagtcagctgagatcgtgccactgcactctagcttaggtgacagagctagactccatctccaaaaataaaggaatgaataagataccagcatatactactttctttttgcaatgagtctgtgagctctgcaccttcccaaggatgggcctggacccagaccctcccaggaagctctactctaggaatcatgcaaggactcactttagctttggtatggtgcatttcagtccga

SEQ ID NO: 933661 - DNA, 582 bp, Homo sapiens
gctgatagccaacaaagcagcaggaacccttgtcccactgccacaaagacctaaattaattcttcagtcagcctgaattagcttgacagcagattcatccccagagcctacataaaaggatatagccctactagcatgctagtttcagcatttttttttctttttgagacggagtcttgctctgtcaccaggccagagcgcagtggcaygatccccactcactgcaacctccacctcctgggttcaagcaattttcttgcctcagcctcccaagtagctgggactacagatgcctgccaccatgcccagctaatttttgtatttttagtagagatggggtttcaccatgttggccaggatggtcttgatgtcttaacctcatgatccacccacctctgcccagtgctgagattacaggcatgagccaccgcgcccagccagtttcagcttttttcacctagagtagagaaaccgttaattcagaataagcctgaacttctcacctacacatctgtgaggtaataaaaagatattgctaaatgtatgcttatttgttatgggaattatagaaaactaatacca

SEQ ID NO: 933662 - DNA, 793 bp, Homo sapiens
gttctgggctttttttggttggtaggctatttattgttgtcggtctattcagggattcgtcttcttcctggtttagtcttgggagggtgtatgtgtctaggaatttatccatttcttctagatgttctagtttatttgcatagaggtgtttatagtattctctgatggtagtttgtatttctgtgtggtcagcagtgatatcccttctgtcatttttttattstgtctatttgattcttctcttttcttcttatttcttgtcttctgctagcttttggattggtttgctcctgtgtctctagttctttccattgtgacattagggtgtcagtttgagatctttctagctttctgatgtgggcctttagtgctataaatttccctcttaatactgctttagctgcattccagagattctggtacattgtctctttgttctcactggtttcaaagaacttcttgatttctgccttaatttcattatttacccaggagtcattcaggagcaggttgttcaattttcatgtagttgtgtggttttgagtgagtttcttgatcctgagttctaatttgattgcactgtggtctgagagactgcttgttaagatttcatttcttttgcatttgctgaggagtgttttactcccaactatgtggttgattttagaataagcaccacgcagaaccgagaagaatgtatattctgttgtttggaggtagagagttctatagatatctattaggtccacttgttccagagctaagttcaagtcttaaatatccttgttaattt

SEQ ID NO: 933663 - DNA, 520 bp, Homo sapiens
ccacactctgctggcccaggtccaaagacacccccatcacaccgcaccctcccccaaaaacctgtttctcccacacaacactgcaccctccccgcataatgtaccctccccaacaatgtacaccccaccccacaaagcgccccctacacaccacagtgcaactttctccaacacactgcactctcctcccaccaaaatgtactctccctccccacagcacaccccacccatcataatgcattccccaacacactgsaccctccaccaccacaatgcacccccttgccacgatgcaccccttcacctcacaaccccacaatgcacccttccccccacaccttaccctcccccaagtcttccccatttaagataaattatacccgtaactacctattgctcaagtttgcagtctggaagccacctatgcttctctctcttgagctctatcatgaagtcctgttgtttataattaaaatatgtcctgaaactactcagggtcttcgcccattttgccaccagt

SEQ ID NO: 933664 - DNA, 595 bp, Homo sapiens
atgttgttgaatacggcaggatttccttctttgttaaggctgaataaaattatattccattgtaagataaagaatacgtggcacatatacataatggaatactgtttagatgtaagaaagaacaaaattcgactgggcgcggtggctcacgcctgtaatcccagcactttgggaggccgaggcaggcggatcacgagatcaagagatcaagaccatcctggccaacatggtgaaaccctgtctctactaaaaatgcaaaaattagctgggcctgttagtgtgygcctgtagtcccagctactcaggaggctgaggcaggagaatcgcttgaacccaggaggtggaggttgcagtgagccaagatcctgccactgcacttcagcctggcgacagagcaagacaccgtttaaaaaaaaaaaaaagaacaaaattctatcatttgtggcaacatggatgagcttggaggacgttatgtgaatgaaataagtcaggcccagaaagagaaatactgcatgttctcaagttgatctcaagacatagagaatagaacagtggttattagaggtggggcagtgtgttgggggttaggggatag

SEQ ID NO: 933665 - DNA, 595 bp, Homo sapiens
atgttgttgaatacggcaggatttccttctttgttaaggctgaataaaattatattccattgtaagataaagaatacgtggcacatatacataatggaatactgtttagatgtaagaaagaacaaaattcgactgggcgcggtggctcacgcctgtaatcccagcactttgggaggccgaggcaggcggatcacgagatcaagagatcaagaccatcctggccaacatggtgaaaccctgtctctactaaaaatgcaaaaattagctgggcctgttagtgtgtgcctgtagtcccagctactcaggaggctgaggcaggagaatcgcttgaacccrggaggtggaggttgcagtgagccaagatcctgccactgcacttcagcctggcgacagagcaagacaccgtttaaaaaaaaaaaaaagaacaaaattctatcatttgtggcaacatggatgagcttggaggacgttatgtgaatgaaataagtcaggcccagaaagagaaatactgcatgttctcaagttgatctcaagacatagagaatagaacagtggttattagaggtggggcagtgtgttgggggttaggggatag

SEQ ID NO: 933666 - DNA, 725 bp, Homo sapiens
aaatcatgaaccatctgtgaaccaggccctagtcttttcttccttgtcaacagaccatagagaactccccaagaggccatcagtgtaggctgggggagagaatgcaggggagagaggagaccatgggcatttgagccacttcctaatgtaacttacttgtgccttcaggacctgctggagccwgatcatatatataccccttccatttgatgatggaatgctgctgtgcatgacccaccttatggctagatcggtcagaaagcactcagttcatgataggcagttcaggtcacatggtgacttgacggcccatagacaaatgttcagtttccaccaaggcccagtaacagaccatgagctatctctcaaaaggggaggagtagttatctgcagaagatgacagggcctttctccaaaattctagaggcctcctctgtgattcacctactggggcctgcaaaggctccaaacagcagccattgacacctcaagcaccactggatctgctgcatcatatggcccaagtggcagagcagcttgcacagcagcctggacctgtggcagagccttctccttttctggaccccactcaaaactgaaagccttttgtgtcactcaataaatgggccagagtaacatccaaataggcctactaggcgttatgccaatttcttggttgtaggaggggccaaatgcagcaacttatccttcaccttagaaggaat

SEQ ID NO: 933667 - DNA, 725 bp, Homo sapiens
aaatcatgaaccatctgtgaaccaggccctagtcttttcttccttgtcaacagaccatagagaactccccaagaggccatcagtgtaggctgggggagagaatgcaggggagagaggagaccatgggcatttgagccacttcctaatgtaacttacttgtgccttcaggacctgctggagcctgatcatatatataccccttccatttgatgatggaatgctgctgtgcatgacccaccttatggctagatmggtcagaaagcactcagttcatgataggcagttcaggtcacatggtgacttgacggcccatagacaaatgttcagtttccaccaaggcccagtaacagaccatgagctatctctcaaaaggggaggagtagttatctgcagaagatgacagggcctttctccaaaattctagaggcctcctctgtgattcacctactggggcctgcaaaggctccaaacagcagccattgacacctcaagcaccactggatctgctgcatcatatggcccaagtggcagagcagcttgcacagcagcctggacctgtggcagagccttctccttttctggaccccactcaaaactgaaagccttttgtgtcactcaataaatgggccagagtaacatccaaataggcctactaggcgttatgccaatttcttggttgtaggaggggccaaatgcagcaacttatccttcaccttagaaggaat

SEQ ID NO: 933668 - DNA, 608 bp, Homo sapiens
gatgtatgacttgtttctatttttttgttttgttttattacttaagtaaatctgttatgagcttatatgtataaatctttatgtggatacatcaggattctttggcaagaagaaatagaaaaggaatattccaggaccataagttcagatgccatagggaagtggcaggtaacacaaataagtgaagcagattaggtataagataaaaggtatgatgaggactatagcaacttgccgcaaatccagtttttaactcttaacttatggaaataatgtgaagaaagctgaagtgattacacacaaccccctcaaaacaaaaagtactatagatcaactaattctttggatcagataacaagcaactctttccagaacttttacatcccataggctacagtatcattaagaaagaataattaagaaaataggacaggcaaratggctcacacctgtaatctcaacaatgtgggaggctgaggcaggaagatcacttgaggaggctgaggcaagaggatcactcgaaacaggagtttgagaccagcctaagcaacatagagagacccacctctacaaaaaataaaataaccaagagtgttgatgcatgccta

SEQ ID NO: 933669 - DNA, 589 bp, Homo sapiens
aatgtggggaatacagtgttaatggtgggctttgaaaaggtccaatacattcctggggatctagacagccacatgcaggtgcaaggccatgtgcacacccaggaaagacgtgagggggtcctcatttgtcacctgtggctgagcatgactgtctacacaaataggaagtgatggcacaccccaacacaaacacacaagccgtcggtaaaggataggagacagtggttgtggtgacttctctgtccaaccattagctaaccactaaactaaacaagcagggacttaaggggacggactttatatagcctttgtccaggaaragtcactaggcaagctgtaacaataaacagcaacagcagcaaatcctgggggaggagaaagggaatatccaatttccagagttgccacattattttattttaaatgcccaattttcaacaaaatattatgaaacactcaaacaggaaaaaaagcagtcaacagaaactgtctctgagggagcccagacttagattcactaaataaactttttaaatcggcaattataggcatattcaaacacctcaaggaaaccatgtcttaaaaaaaa

SEQ ID NO: 933670 - DNA, 512 bp, Homo sapiens
cattcttccttcctaagattttggacctgggatgggagaggctgccacaaagttctctgaaatgccttggagtccttttcccratagtcttgactattagcacttgggtctcctttagttatacaaatttctctagtaagtggctgctccaaaacctgcttgaattcctttcctgaaaaagctttttctttctctgccatatggctgcgctgcacatttcccaaactcttacactctgcttcttgtgtaaatatatgttccaactttaagtcatttatttgctcttgcatctgagcgtaggttgttagaagcagccaagccacagcttgaatgctttgtggcttaaaaattcattccaccagataccctaaatctttagtccaaacttccacagatccctaaggcatggacataatacagccatgttctttgctaaggcataacatgtgtgacctctgctccagttcccaataggttcttcatttccatctgcgacctgttcagcctgaact

SEQ ID NO: 933671 - DNA, 589 bp, Homo sapiens
cacttgaggggccataatctcgaagagcaaggaggtactgagaagtaaacactaccctccaactttgttctcaaaacattgccaggttcttaaaccacacaggggagagtgctgtgcatctaaacagaaagatgctaaaaagtagatcaaagttcaaagcgctctcaaagtgctgagaaggcaaaaaatgtggagtaggagtttgccaattctaaatgtgagagcatctaatgatgtagcctgaaatatatatgaagcaaaactgagaactaaaaagagacatagacaattacacacacatmgagaaaaacttgagcacccattttttttttatgaaataaataaggagttattaccagatgggtgctctgggattcaagaccaggtttgtctgaccccagacctgagacacaataactctgagcattactttgccaagtttacatcgtcttcacctcttgaacctacatcgttctctaagttggatttcctttgcttgattttcattttgtgttttcgagatcactctcagtgagtggttcatcatcacatcctaaataacctattttatagttcctgacataccaca

SEQ ID NO: 933672 - DNA, 589 bp, Homo sapiens
cacttgaggggccataatctcgaagagcaaggaggtactgagaagtaaacactaccctccaactttgttctcaaaacattgccaggttcttaaaccacacaggggagagtgctgtgcatctaaacagaaagatgctaaaaagtagatcaaagttcaaagcgctctcaaagtgctgagaaggcaaaaaatgtggagtaggagtttgccaattctaaatgtgagagcatctaatgatgtagcctgaaatatatatgaagcaaaactgagaactaaaaagagacatagacaattacacacacatagagaaaaacttgagcacccattttttttttatgaaatamataaggagttattaccagatgggtgctctgggattcaagaccaggtttgtctgaccccagacctgagacacaataactctgagcattactttgccaagtttacatcgtcttcacctcttgaacctacatcgttctctaagttggatttcctttgcttgattttcattttgtgttttcgagatcactctcagtgagtggttcatcatcacatcctaaataacctattttatagttcctgacataccaca

SEQ ID NO: 933673 - DNA, 600 bp, Homo sapiens
cagtcccatggggttatatggagattatctgctatggcctcaattaatcctttcataaatgggctagcagctccgttttctctaatgctttttcttatctctttataagtcttgaaagtaacgggttcatgtaactrattgccttgttgaccttgcatcaccaggcaggacaagagttccccttctaatgccacttgcctaagacagggtcccataactgtagtgtatcccttgccttttttctaatttattggaggaggaggactcagggaaaacctttctctcctctgtggcacctttacctggtaatggaggggctgagggaggaggaggaggtgataaggtagatgatggttcttcctcccctccctttttaggctcttctgtgtagagtggggccaaagcagccctaactaaggcccataacattaaagatgttactgggacccgttgcccttgcgcacgatgttgtttaagactttttcccactgttcccagagctctaggtctaacgtgactttttctgggaaccacgcgttgtggaaaacaacagtttgcattaggtcccttaattgggcctctgagaccgaggctctgcta

SEQ ID NO: 933674 - DNA, 599 bp, Homo sapiens
tggccctttggctctgaccgagaggaacaaagctggttagaccaactgcagagattagctgtggaccccagaacaccagggccaggtccaactgcccctcagtgatcaccaggctgcacataccaaagggccaacacgaggccaagggaggcttctaaacccacaatatctcaaagtgacatcggccccttctctgtagacccagatgctaccttagagataagctggaagtggagagaggaatcaggctgagacattttgcttatggggtagccttacttaaatggattggttacattcttgtctttgactaattgcagtgggatagactgaaatacattttttccctgttacctagtgggtgggacctggtaagatcagatcacttggccaggcacagtggctcacgcctgtaatcccagcactttgggaggccgakgccggcagatcccgaggtgaggagattgagaccatcctggctaacatggcaaaaccccatctctactaaaaatacaaaaaattagccgggcgtagtggccagtgcctgtagtcccagctactcaggaggccaaggcaggagaatggcatgaacccaggag

SEQ ID NO: 933675 - DNA, 578 bp, Homo sapiens
gcctttgatagagctgatccattcttggaccactgtcttcacttggctttgatgataccaccccctcttctgaccttagctgctccttccaactctctgttgctgatttgttcctgtatccatgatgtcttgatgttggtgtgcctgggacccagtctttggaccttgtcccttctgtgctccctccatcagtgatctactgtaatcacatggcattaaatactgtttctaccctaaagacacccaaattgtccgtggccttggtgtctctcttaaasgcaaggcttgtgtcttgtgctacctacttgatgtctctactcaaataccatagagaaatctcaaattaaacatgtctaaaatttggtcttgtccctaaaacctgctcctcccatactcttccccacattaggcaacagtcattccatccttctatttactcagacaaaaacccttacactcattcttgacctcacccttttgttcacactccaggccattaggaagtctcattggttctaccctcagaagatatccagattctgaccacttcgcatcactttcgtctccaacaccctagt

SEQ ID NO: 933676 - DNA, 567 bp, Homo sapiens
gctgtatagaaacaatgtttttgtccattctgtgaatgaacatttgggagctcattgaggtcaatggtgaaaaagtgattatctctataaaaaactagaaataagctatctgagaaaccacttagtgaagtgtgcaatattcgagtagagtttaaccttatttttcattcatcagtttggaaacacagtttagatagaatctgcaaatttatatttgggagcgcattgaggcctatggtgaaaaaggaagtatcttcagataaaaataagaaaaaaacctttctaagaatctactttatgaagtgcacattaatctcacacagctcaatctttcttttgatttggctgtttggaaatggtttttgtccrttctgcgattggacatttgggaggtgattgaggccaatggagaaaaagtgaatatccaagaaataaaactagaaggaagctatctgagaaaccactttctgatgtgagcattcatctcatagaggaaaacgtttcttttcaatcagcagtttggaaacactgtttgatagagtctgcaaaagtatatttgggagacca

SEQ ID NO: 933677 - DNA, 718 bp, Homo sapiens
tctttgtatgtgtttattggccatttgtacatcttctttagtgaaatgtccactcaaatcctttatttaaatacaagtaaattgggttatttgtattttcattattaagttgtaaccgttatttatatattctaagtacaattctcttytcagatatatgatttgcaaatttttttttccattctgtgggttgtctttttactttcttgatggtgtcctttgaagcacacaagtttttaacttttgtgaagttcaatttgtctgcttttctttggttggttgtagttttggtgtcacatctaataaaccatttccttaaaagagattatatattatgaccaagaaggatttgtcccaggaaaacaaggttggcttaacatccaaaaatcaacattatacagtatatcatgagaataaagggcaaaaccccatgatcatctcaatagatgcagaaaaaccatttgataaaatccaatgtaatttcatgatagaaacactcaacaaactatgaatagaaggaaacttatttaacctcataaaggatatctatgaaaaatccatggataatggtgaaagactggatgctttccccctaagatttggaacaagacaaggatgtccactcttaccacttatcttcaacattgtactggaggttctgtcaggtaattaggtaattacaaacagtagttaggtacacaatgaaataagaggcatc

SEQ ID NO: 933678 - DNA, 618 bp, Homo sapiens
gaaaataggagtacaatgcacgctcaagagaaggaaaaacatttctctatcattgttcaacaagtgcagacaccacttattcttcctggcagaagaaaaaaaaatttgacctgattcagaaaggtgaacagagtcatgartagttgaaaaaatacactaaaggagaaccagcaaccagaggctaaccaataatacccaaggaagtagttcttggagaaatagaacttttagaagaaacaggtgacaactttaatgaaaacaataataggggcaaatattcaaggagattttgttgtagcataaaaaatattttctactaccaaaaacaaaaaaaaatatattaactaaaagtaagtataataacttattgagtatcaaattagtagcctaggaaatcaaacagaaaggatattttaaaacacatagcaaaaatataaagtgatcataatgaaagttgtgagctttctcccaataaaaatatgtctacaaataatttttttgtaaaatctcaatgagatgcagatgcccctaaagcacatctgtagatccaatgacataaaaaaatgcaatccagtttaaagcatgaatttcattttaaagataaaaaaaaaagacttc

SEQ ID NO: 933679 - DNA, 614 bp, Homo sapiens
gctataggaggccttaagaaaatatattcccctgtcacctgactcattagagggtcaattgatcctaaaagataagtttattacccaatcagccacagatatcaggagaaagctccaaaagtgagccctgggtcctgaacaaaatctagatgcattattaaacccggcaaccttggtgttctataatagggatcaagaggaacaggctcaaaaggaaaagtgagatcagagaaagtctgcagccttaatcatggcgctaagacaaacaaaccttagtggttcagagaggacagaaaatggagcaggccaatcacccagtagggcttgttattagtgtggtttacaaggacactttaaaaaagattgtccagtgagaagccaccccctcgtccatgyccgctatgccaaggcaatcactggaaggtgcactgccccagagtgcactggttctctgggccagaagcccccaaccaaatgatccaacaacaggactgagggtgcccggggcaagtgccagctcatgtcatcacactcactgagccccaggtatgtttaatcattgagggccaggaaattgacttcctcctggacaatggcggggctttctcagtgtt

SEQ ID NO: 933680 - DNA, 563 bp, Homo sapiens
gtgttttcacatagtcccatatttcttggaggctttgtcatttctttttattttttttttctctaaacctcccttctcacttcatttcattcagttcatcttgcatcactgataccctttcttccagttgatcacatcggctcctgaggcttctgcattcttcacgtagttctcgagccttggctttcagctccatcagttcctttaagcacttctctgtattggttatcctagttataaattcgtctaaatttttttcgaagtttttaacttcttttcctttratttgaatctcctccagtagcttggggtagtttgatcgtctgaagctttcttctctcaactcgtcaaagtcattctctgtccagctttgttccgttgctggtgaggaactgcgttcctttggaggaggagaggcgctgtggtttttagagtttccagtttttctgctctgtttttttcccatctttgtggttttatctactttttgtctttgatgatggtgatgtacagatgagtttttggtgtggatgtcctttctgttgttagttttccttctaaca

SEQ ID NO: 933681 - DNA, 616 bp, Homo sapiens
ccccttggcagagtgggtgtgctgcactgggaggaatcccacttgtctgggcttccctgactctccagagccagcaggcagaaaagactgaaaccattcattgatccatgataccatagccgccccttctcctaggggatcctctcagggatatcatagttcttttcataaacccatggttrgggatgctgaaattatcacagggaggccctggtgcatgaggaagagtggattggggttccacttaaagaagcagtctggccacaaactgacccagccgctgggctgcactgtgggtaactgctcccagtccaaactgcccagtcttgctggcactggtggcaggggaaaaaggcctactggagctgcagtagtggcagccacccctccccgccgccaaactcgctcttgttaggcagtctccagcctgctgcgctggccagcagggattccaagccagtgggttttagcttgtggggttccatgagagtgaggccgcttggctccctggctttagcccccttcccacagaagtggatggatctcatgcctcaccagagttcccagagctggagtatgcaaatactcctgtgtctcagtgcctgctcaagtgccg

SEQ ID NO: 933682 - DNA, 616 bp, Homo sapiens
ccccttggcagagtgggtgtgctgcactgggaggaatcccacttgtctgggcttccctgactctccagagccagcaggcagaaaagactgaaaccattcattgatccatgataccatagccgccccttctcctaggggatcctctcagggatatcatagttcttttcataaacccatggttggggatgctgaaattatcacagggaggccctggtgcatgaggaagagtggattggggttccacttaaagaagcagtctggccacaaactgacccagccgctgkgctgcactgtgggtaactgctcccagtccaaactgcccagtcttgctggcactggtggcaggggaaaaaggcctactggagctgcagtagtggcagccacccctccccgccgccaaactcgctcttgttaggcagtctccagcctgctgcgctggccagcagggattccaagccagtgggttttagcttgtggggttccatgagagtgaggccgcttggctccctggctttagcccccttcccacagaagtggatggatctcatgcctcaccagagttcccagagctggagtatgcaaatactcctgtgtctcagtgcctgctcaagtgccg

SEQ ID NO: 933683 - DNA, 616 bp, Homo sapiens
ccccttggcagagtgggtgtgctgcactgggaggaatcccacttgtctgggcttccctgactctccagagccagcaggcagaaaagactgaaaccattcattgatccatgataccatagccgccccttctcctaggggatcctctcagggatatcatagttcttttcataaacccatggttggggatgctgaaattatcacagggaggccctggtgcatgaggaagagtggattggggttccacttaaagaagcagtctggccacaaactgacccagccgctgggctgcactgtgggtaactgctcccagtccaaactgcccagtcttgctggcactggtggcaggggaaaaaggcctactggagctgcagtagtggcagccacccctccccgccgccaaactcgctcttgttaggcagtctccagmctgctgcgctggccagcagggattccaagccagtgggttttagcttgtggggttccatgagagtgaggccgcttggctccctggctttagcccccttcccacagaagtggatggatctcatgcctcaccagagttcccagagctggagtatgcaaatactcctgtgtctcagtgcctgctcaagtgccg

SEQ ID NO: 933684 - DNA, 691 bp, Homo sapiens
ggagacccatctcacgtgcagagacacacataggctcaaaataaagggatggaggaagatctaccgagcaaatggaaaacaaaaaaaggcaggggttgcaatcctagtttctgataaaatagactttaaaccaacaaagatcaaaagagacaaagaaggccattacataatggtaaagggatcaattcaacaagaagagctaactatcctaaatatatatgcacccaatacaggagcacccagattcataaagcaagtccttagagacctacaaagagacttagactcccacacaataataatgggagactttaacaccccactgtcaacattagacagatcaacgagacagaaagttaacaaggatatccaggaattgaactcagctctgcaccaagcggacctaatagacatctacagaactctccaccccaaatcaacagaatatacgttcttctcagcaccacatcacacttattccaaaaytgaccacatagttggaagtaaagcgctcctcagcaaatgtaaaaaaacagaaattataacaaactgtctctcagaccacagtgcaatcaaactagaactcaggattgagagactacagattctcatcatcttcccctaggttatctacttattggtatcttactcgtgggccagcaatactggtttcctttttccttcctcctac

SEQ ID NO: 933685 - DNA, 744 bp, Homo sapiens
tctttctctgtttctgaaaaactggctaccctacagtttagcctgtatctccagtgaatctataaatctcctcccaactgtctttcaacatgaattccactgtttttgagagtactcataggcttgatcttctctacacttttgtaaatgaggtcagttgctttggggaagtatttggaactctgttctatggcctgtaatttcacttagaaaatatctctgaactagactctggtgctgggggtagggaaaatggcacgcttgtgtctgagtgacaacctcagttcgggagctgaggacatggtggatgagggagtcagcagccccaagtctccttggtttgcctgtgtggaacctccagcctttaagggcaattagggccccagtattcctagtggtgcctcatccaaggtagagttctgttctcatgagtaaggggcaggagaagggattcctgacctcttgactgtactcatctgmaacttactttcaatggcagacagtgggggcatgataagaatttgctgacattctgccattctcagaagatagccctcatattgggagctgaggaaattgggattcctacattcttggctgtgccattctggcgtggaatttctgtcttgctgagttgggaaggggaagtaaaagaatagattttggttcaaataccacaaactctcataattcttacagagttttgtagattttcttgattttttttttgtttttgctgtatac

SEQ ID NO: 933686 - DNA, 595 bp, Homo sapiens
aagtttttataaacatatacaagaatatatttgcatatatacaattatgcgcatttttaacaggacactgataaaactaaaaacccaggtaatttgcccatagtcacacagatagaaagtaccagagatatagttggaaattaaatttttgtgcttcaaatccttagttctctgaaatgtatcttgcttagtgtgtatatgatacattacattcttattgaacaattggatattcttatgtgtctgcatttatctttggttatttatttattcagttgcacaaatttcaatcatgcccatctacctggaggacttcagacaacgagtacataatttttcaaaataggggaccttttctttttctttgtccaaaagcacaccattaataaatgaagctgccattctacaatttccctactctcccagtatgtgasttatatgatttgctgcatcaggcaaaactgtaagtgacttgcctcattatgttctgtcctgagatgacagcacaagtatcacgggagcatgaaaaaatgaggtaatacatttgtgcttttttcttttaccattagtatcagcactttcgttcaattcacaa

SEQ ID NO: 933687 - DNA, 553 bp, Homo sapiens
aacatagtttagacattcccattccaaaagggagcaataagaaagaagaaaggagtaagtcccaaataagttaaaaatccaataaggcaaaaaacattaaattttaaggcttgagaataatattctttggctgcatatcccaccttttggacacactgggttgagggttgggcctctaaggccctgaaggggcccaccctcacagctctgtggggtgcattcacacagcagctcttattgattggagtcaggtgtctgaagatctatgcggctgggatcacattcttgtctctgcagttctaagatcttgggggcagccccactctcccaactccactagacatttccctagtggggatactctcagccatcctttgcaatctaggtggaggtagctgtgcatccaatscttgttcactctgtgtgccagcagatttagtatcaggtggacaccaccaagctttacaactcgtgccctctgcagtggtggcccaagctgcacctgagcccacctgagtcacatctggagcagccaaagagtgctacgccagaa

SEQ ID NO: 933688 - DNA, 631 bp, Homo sapiens
  misc_feature 1, 2, 3, 4, 5, 6, 7, 8, 9, 10, 11, 12, 13, 14, 15, 16, 17,18, 19, 20, 21, 22, 23, 24, 25, 26, 27, 28, 29: n = A,T,C or G
nnnnnnnnnnnnnnnnnnnnnnnnnnnnnacattctgtacattcttaagaattatgctgatttttttctgctcgctctgtcaatggaataacaaagcctggatgatagcacatctgtttacagcatggtttactgaatattttagcccaccattgagacctgctcagaaaaaratttctttcaaaatgttactgttcattgacagtgcacctagtcaaccaggagttctgatggagatgtacaaggagattaatgttgttttcatgcctgctaatacaacatctattctacagcccatggatcaaggagtaattttgactttgaagtcttattgtttaagaaatacatttcataaggctttagctgccatagatattgatttctctgatggattggggcaaagtcaattgaaaaccttctggaaaggattcaccattctagatgccattaagaacactcacatctgtaatcccagcactttgggagaccgaggcgggcagatcacgaggtcaagagatcgagaccatcctggccaacatggtgaaattccatctccactaaaaatataaaaattagctgggcgtggtggcacgcacctgtagtcccagctacttgggaggctgaggcagga

SEQ ID NO: 933689 - DNA, 823 bp, Homo sapiens
catcgacaacaaaacaaaggcataaagttttatgtgtgaggttttaggcctgagcacaagattagcaagaggaatctttcaaggcagcaggatctcctggcctccatctattctcaccacctgccaggagtccctatctacacttcctgttaagatagctctgattataagcttgttctatactcacctgcctctgtagcttcactagctattggatggacacttttaattggacagttttaaaagacattaccggctgggcgcggtggctyacacctgtaatcccagcacttttggaggcggaggcgggtggatcgcaaggtcaagagatcgagactatcctggccaacatggggaaaccccgtctctactaaaaataaaaaaattagctgggtgtggtggtgcacacctgtagtcccagctactcggaaggctggggcaggaaaatctcttgaaaccaggaggcggaggttgcagtgagccaagatagtgccactgcactccagcctgacaacagagtgagactgtctcaaaaaaaaaaagtcagccaggcatggtggtgcacacctgtaatcccagctactcagtaggctgaggcaggagaattgcttgaacctggcaggcggaggttgcagtgaggcaagatagtgccactgcactccagcctgggtgacagagcgagactccatctcaaaaaaaaagagagagagctattgccacgtttgccccaaagccacaagcatcttccacaggcagctcccagacaatgactgagcatgcagggatactaaggtgaaaccattcccgggacacattgtcctca

SEQ ID NO: 933690 - DNA, 762 bp, Homo sapiens
tataaccattgatgggaagcaggactggctacataatgaatttttggggcttagtaaaaaatgaaagtgcggggccatgtgttcaaaaatcaagaatttcatggggctacagcaaagcatgaaaacaagtctgagcccttccggatgcacaggcagaacacctgtgaacccgtccctgatgggcagggccactgctgttccacaagaatctgcgctttctagggctaatcaaaaaatgaggccttccgtaagcagggtgctcacattcactctgagttcatcttaaggacacacaggacagagtctggaagctgtactcagaattctttccattttgactgagtcaaaattagtgaaacattgactaggactaagctgatgtctagctttttttttgagttggggtctccctctgtcgcccaggctggtgtgcagtggcaagatcttggctcactgcagcmtcaacctgctgggctcaagtgatcctcctgcctgagcctcccaagtagctgggactacaagcacgtggcaccacagccagctaatttaaaaaaaaattttttatagagatgggatctcactatggtgcccaggctagtcttgaactcctgacctcaagagatcttccctacttgacctctcaaggtgttgggttgacaaggaatgaggcttgaggtataagctactatgtctagccatgatgtctatctttagagtaaaggaaaagtatctgttaggtggattcatgtaaacaaaaggaca

SEQ ID NO: 933691 - DNA, 498 bp, Homo sapiens
cttcagcctcacctatggctaaaaggggccaaggcacagctcaagcccttgcttcagagtatgcaagccccaagccttggtagcttccacatggtgttgagcctgtgggtgcacagaagtcaagaattgaagtttgggaacctcttcttgatttcaaaggatatgtggaaaagcttggatgtccaggcagatgtctgctgcaggggccctcatggagaacctctgctagggaagtgtggaagggaaagtggggttggarccctggcacagagtccccactgggacactgcctagtggagctgtgagaagagggccactgtcctccagaccccagaatggtagatccaccaacagcttgcaccatgtgcttggaaaagctgcactcaatgccagcccatgaaagcagtcatgagggggcctggatcctgcaaagccacaggggcagagctgctcaaggccatgggagtctccttcttgcatcagcatgacttgggtgtg

SEQ ID NO: 933692 - DNA, 498 bp, Homo sapiens
cttcagcctcacctatggctaaaaggggccaaggcacagctcaagcccttgcttcagagtatgcaagccccaagccttggtagcttccacatggtgttgagcctgtgggtgcacagaagtcaagaattgaagtttgggaacctcttcttgatttcaaaggatatgtggaaaagcttggatgtccaggcagatgtctgctgcaggggccctcatggagaacctctgctagggaagtgtggaagggaaagtggggttggagccctggcacagagtccccamtgggacactgcctagtggagctgtgagaagagggccactgtcctccagaccccagaatggtagatccaccaacagcttgcaccatgtgcttggaaaagctgcactcaatgccagcccatgaaagcagtcatgagggggcctggatcctgcaaagccacaggggcagagctgctcaaggccatgggagtctccttcttgcatcagcatgacttgggtgtg

SEQ ID NO: 933693 - DNA, 646 bp, Homo sapiens
ctaggccagtggaagtgccagcgggtcggtccaggggtcctcggtagaagttgttagttgaactcatttggggttccatttgtaagaccatctgtagcttgatggcttcgattctagaggaaacaaatttgacaagaaggttaaaaatacagggcccaaaggcaagtaacagcaagatggctgccacgggacctagaaaggggagaaaccatgttgcccaactccagaggttggtataagartttgaaaggtgtggtctgatttcagaagccttttcctgtaaatgtcgggtggcatctcataccatccccgactggttagtgtaaaaacaacactcttcccctaagaaggtgcagagtcctcctttctcagcagtgaggaggtctaggcatcggcagttttgtagagtcactgctgccaaagagtctatttgggattgtaaagtaagaatagatttcgttatttcttgcaaactgtctgagaaatcctttgagagtgtgtggtagtaggataatgaagcagataaactggctattccagttcctgtagcagtagccattcctaaccctataagtaggtgtattagttgtatggctctgcactgatggacttgagctttgaggggtactgataaggtctgatttcc

SEQ ID NO: 933694 - DNA, 597 bp, Homo sapiens
agctggtaccaggggaaggcaatctcccaacagataaaaaaacctaaaactggtgatcagcaacttcccactaagagctcaggagttgggcaagtggactcaagcctgcaccttaagaggaataatggcagagtttaactagtatatgaccttctaagaacattaggctggtaaggaaagaatgcctcaagtgagcacgtgcacaacgccagtaaacacattgtacatgttcccctcccaagtcctagcaggccattgcaaatgcagacagcccaccccaagggaagaatcagaggagaagggatgaaaatcctggaggtatgccaatstgtaaaaccccaagtcaaaagtaaaacagtacacttggtatctcaagttgcccgcttggcccacatgtctcagacaagttccactgctaacatactttggtgctgtgtgactcaggtatgatccccagtagtaagacacccctatgccttgccttgttctgctgggggcattcaacccccatatgctgttttcttctgcccttttgctgtcttgcaaaccaaaccccagaacaattcttcttggccacaagtgactctgctcccccag

SEQ ID NO: 933695 - DNA, 597 bp, Homo sapiens
agctggtaccaggggaaggcaatctcccaacagataaaaaaacctaaaactggtgatcagcaacttcccactaagagctcaggagttgggcaagtggactcaagcctgcaccttaagaggaataatggcagagtttaactagtatatgaccttctaagaacattaggctggtaaggaaagaatgcctcaagtgagcacgtgcacaacgccagtaaacacattgtacatgttcccctcccaagtcctagcaggccattgcaaatgcagacagcccaccccaagggaagaatcagaggagaagggatgaaaatcctggaggtatgccaatgtgtaaaaccccaagtcaaaagtaaaacagtacacttggtatctcaagttgcccgcttggcccacatgtctcagayaagttccactgctaacatactttggtgctgtgtgactcaggtatgatccccagtagtaagacacccctatgccttgccttgttctgctgggggcattcaacccccatatgctgttttcttctgcccttttgctgtcttgcaaaccaaaccccagaacaattcttcttggccacaagtgactctgctcccccag

SEQ ID NO: 933696 - DNA, 509 bp, Homo sapiens
gagatgttgcgatcatttgggggataagaggcattctggtttttggaattttcagaggttttgcactggtttttcctcatcttcatggatttatctacctttgatttttgaagctgatgatgtttggatggggtttttgtgtggggtctttttttattgatgttgtggtgttgttgccttctgtttgttagtttttcttctaacagtcaggcccctcttctgcaggtctgctgcagtttactggaggtccactccagatccttcttgcctgggtatcatcagtggakgcttcagaatcagaaaagattgctgcctgctccttcctctggaaggtcatcccagaggggcactggtctgatgccagacctctcctgtatgaggggtcggtcgacccctgttgggatgtctttccctgtcaggaggcatggcagtcagggacccatttgaggaggcagtctgtcccttagcagagctactgccctgggctgggagaatccccctcatcagga

SEQ ID NO: 933697 - DNA, 544 bp, Homo sapiens
tctttttgggaaggctttccaggtattctaagggtcttgactactgtactctaagtttttggtcactgccatcagatctgcattaggggccaccacaagcctagtaatgctgtagctcttgcagacttatagtaccaccttggtggtcttggataagttgcagaagaattccctggattaccaggcaaagactcttgttttcttctgttactttctcccaaacagtctctctgtgctgagatgcctggagttgggggaggggtaaaacaagcaccctgtggccaccacaactgggactgcactgkgtcatatctgaagccagcatgttattgggtttcaccaaggcctgtggtaaccactgcctggctatcacctaagttcactcaaagacctagggctctatcaacagcagatggcaaagccagacaggcttgtgtccttcccttcattgtgtcgaatttcccatagcctacatgaatgcagagatgctgtccagaagccatggccagtatctggaaacctcaggaaactccctcatgttcta

SEQ ID NO: 933698 - DNA, 582 bp, Homo sapiens
aatgttatcaataagggcttgctgaggccgggcgcggtggctcacgcctgtaatcccagcactttgggaggccgaggcgggtggatcatgaggtcaggagatcgagaccatcctggctaacaaggtgaaaccccgtctctactaaaaatacaaaaaattagccgggcgcggtggcgggcgcctgtagtcccagctactcgggaggctgaggcaggagaatggcgtgaacccgggaagcggagcttgcagtgagcygagattgcgccactgcagtccgcagtccagcctgggcgacagagcgagactccgtctcaaaaaaaaaaaaataaaaaataaaaaaaaaataaaaaataagggcttgctgaacaaatcggtacacactttgccaatatagctaaactcaacattaagtaagccacaaccagtttgcaaagaattaagaagtctttttctcacttagcctttgtacttgatcatctgtttatctgttcctggagtcccactccagtgaagactctgctttcctgggtcttgctacactgtctgataggggtagtgctgactcattattggaaatccaaa

SEQ ID NO: 933699 - DNA, 841 bp, Homo sapiens
taaataaaccagcaaataggtaagcaaactatgaaactggatatggcaacaaaataaatgctagaagtaaggtacaaatagcattgactattaggttagaacttgagtgctttgaaagaaaatggtgtcttaaaaataataaagaattaaatgatgtgtatgtatgagtccagttgtttcacagcatttaatcctgctggcaatgatggatcttttttgttgtttgtttgataccctcccacagaacccagcaatgttatcaataagggcttgctgaggccgggcgcggtggctcacgcctgtaatcccagcactttgggaggccgaggcgggtggatcatgaggtcaggagatcgagaccatcctggctaacaaggtgaaaccccgtctctactaaaaatacaaaaaattagccgggcgcggtggcgggcgcctgtagtcccagctactcgggaggctgaggcaggagaatggcgtgaacccgggaagcggagcttgcagtgagctgagattgcgccactgcagtccgcagtccagcctgggcgacagagcgagactccgtctcaaaaaaaaaaaaataaaaaataaaaaaaaaataaaaaataagggcttgctgaacaaatcggtacacactttgccaatatagctaaactcaacattaartaagccacaaccagtttgcaaagaattaagaagtctttttctcacttagcctttgtacttgatcatctgtttatctgttcctggagtcccactccagtgaagactctgctttcctgggtcttgctacactgtctgataggggtagtgctgactcattattggaaatccaaaacagcca

SEQ ID NO: 933700 - DNA, 576 bp, Homo sapiens
atcaatattaattgagtcaataaaagcataaagtattgcaatctgggagggttaagtagaccagaaagagggtggcctaatcttggttttggaggatgggcagaatttgaagacatggtagggctagtgacattaacaaaggtatagagataggaaagaccgtggagatagcaggggataacaaatagttaagattggctcaagcgaaagctttgcattgaataaggcgtgagaaaatagaaaaggaagttttaggccacattgagtacaaggatcttgaatgtcagtcagacttagggaatttaacgtcaccatgtagtcgtgggagaatcaactggacattgrttgtttttgtttacccagaaccatgctcccttttggtactagtacctttatattctatgggagacatgctttttctactcttaatccatgcagtgggttgacattactgtcaggcctttgagcccaagccaagccatcgcatcccctgtgacttgcacgtatacattcagatggcctgaagtaactgaagatccacaaaagaagtaaaaatagccttaactgatgacattc

SEQ ID NO: 933701 - DNA, 583 bp, Homo sapiens
aaaacactgaggaaagaaatcaaagatctaaataaatggaacaatatatcatgttcatgggttgaaagattcgtacggtaaagatgccagatttcccaaatcgattaataggtataatgcaatttctataaaaatctcagcaagtttttttgtagaagtagaaaatttattctgaaatttagatagaaaagcaaaggaacagttttgaaaatgaaaaataaagtgagaagaattgctattgatgttaagtgttactatataagctacagtaatcaagacaatttggtgttggttaaagaatagatacatagatcagtgttacacaatagagaaccccagaacagaccaacactaataggcccaattgatttttggcaacagcacaaaagcaatacaatagaggaagtgtaatctttttcaacaaatggtgctagaacaattggatayccatagcaaaacaaacaaacccaaacccccactgtatgtaaaaattaattcaattagagtatagatttaatgtaaaacaaacttttagaagaaaacagaatcttcaggacttagtgttagacaaagagctagaaga

SEQ ID NO: 933702 - DNA, 563 bp, Homo sapiens
gcagggaaactgttatatatggaacattattcctttaatagaaacccactgaggatatttcattatacaatcctgatgtttttcttaaaataatttcagatgttaaaataaaataaaaagccaatagagtcaattcagatcaaatcacaggatgctgaaggtggacaccagcaggaagattccattcaaactggtaataattaactccagaaacatcttccatgaagttgaggcacacacagggaatgggtaggctcatgagcaagggccgagcaccagatactgcctgggagctgcatctggatctttcatgttggatatggctayggaacaaggcaccaaaccaccaactggtttgatttgttagtttatcagtatttattctttttaatctgttagtcaatttcttgttaatcaattgagttgggggaaggtcagtcaggaaaggtatctagacattttcctgtctagtcatttttgggatgtgaaagacctgccaggaggcaacatcgtaaagggaaggagaataagtttggggtcatcaggtctgggcctgaagcctg

SEQ ID NO: 933703 - DNA, 609 bp, Homo sapiens
atgtttaatcctaatatttatactatgtacaaatgctaatatatactatgcataaatgctaaaatatatagcatttatactatgctaagtcccaccatatcaactacattttatgctttaatgtatgcatctattcattcattcacaggctcatgacaacacacatacacacgcatatgcacacacaccaacacagagggggttgggaaagagagggtgatattaggcattgttaggtttgaagctcgagtgtccatctgacagcatctagggaaaatttgttttctttgagactggaaaatctgtttaatatgactttaaactaattatgaaggaaggcagaaaaaacactccagatagatatacacatctggttattatggttattatggaggataatctgagtmtcactttttcactcgcttgcacgtgtgcacaaacacacaacacacacacgcactctcacactctgggccttagtgacttattttttattttattttattttttttgagacggaatctcactctgttgccaggctggagtgcagtagcgcgatctcagctcactgcaaacctccgcctcccgcgttcaagcgattctcctgcc

SEQ ID NO: 933704 - DNA, 581 bp, Homo sapiens
gctcatgcctgtaatcctggcactttgggagactgaggtaggaggatcacttgaggtcaggagttcaagaccagcctagccaacatggtgaaacctgtctctactaaaaatacaaaaaaaaaaaaaattagcaaggtgtggtggcatgtggctataatcccagttactcaggaagaggcaggagaattgcttgagcctgtgaggtggagggtgcagtgagctgagatcgtgccactgcactccagcctgggcaacagagcaagactccatctcaggaagaaacaaaacaaaaccaaaaaacaactcttaacaaacgaggaatagaagaaaattacctcaacataataaaagccaatatgaaaataccacaacttatattatactcaaccatggaaaaactgaaaatttttyctgtaagatcagaaagaaggcatggaagcccactccttctacttctgttcaacatagactggaagtcctagactgaacaattaggcaagaaaaagaaacaggaggcatccaaatcaaaccagaagaagtaaaattgtccttgtttgcagatgatgtgatcttatgtatat

SEQ ID NO: 933705 - DNA, 621 bp, Homo sapiens
gttatccagttgcaaagctgcttccactatttcaggcctttttatagtaatgctcccctcctggtaccaattttctgtattagccgttcttgcattgctgtaagggaatacctgagagtgggtaacttataaagaaaagaggtttaactggttcatgatgctatagacatggcagtgtgtccggaattggtgggttcttggtctcactgacttcaagaatgaagccgcggaccttcrcggtgagtgttatagctcttaaggtggcgcgtctggagttgttccttcctcctggtgggttcgcggtcttgctggcttcaggagtgaagctgcagaccttcgtggtgagtgttacagctcataaaagcagtgtggacccaaagagtgagcagtagcaagatttattgcaaagggcgaaagaacaaagcttccacagcgtggaaggcgaccccagcgagttgccactgctggctccgacagcctgcttttattctcttatctggcctcacccacatcctgctgattggtagagccgagtggtctgttttgacagggcgctgattggtgcgtttacaatccctgagctagacacaaaggttctccaagtccccaccagactcggga

SEQ ID NO: 933706 - DNA, 621 bp, Homo sapiens
gttatccagttgcaaagctgcttccactatttcaggcctttttatagtaatgctcccctcctggtaccaattttctgtattagccgttcttgcattgctgtaagggaatacctgagagtgggtaacttataaagaaaagaggtttaactggttcatgatgctatagacatggcagtgtgtccggaattggtgggttcttggtctcactgacttcaagaatgaagccgcggaccttcgcggtgagtgttatagctcttaaggtggcgcgtctggagttgttccttcctcctggtgggttcgcggtcttgctggcttcaggagtgaagctgcagaccttcgtggtgagtgttacagctcataaaagcagtgtggacccaaagagtgagcagtagcaagatttattgcaaagggcgaaagaacaaagcttccacagcgtggaaggcgaccccagcgagttgccactgctggctccgrcagcctgcttttattctcttatctggcctcacccacatcctgctgattggtagagccgagtggtctgttttgacagggcgctgattggtgcgtttacaatccctgagctagacacaaaggttctccaagtccccaccagactcggga

SEQ ID NO: 933707 - DNA, 621 bp, Homo sapiens
acctaactttatacctcaaagaacaaataaaaacaagaaaaacctaaacccaaagctaggaaaaggtaggagtaataaaatttagagcacacataaataaaatagagaatacaaaaacattacaaaaatatcaatgaaactaagagtttttttttttaaagattgacaaaattgaaaaacccttagctagattaactacgaaaaagagaaataaaactcaaataacaaaatcagatgaaagaggrgacaatacaactgatgctgcagaaatgaaaaaagtataagaatattatgaacaactgcaggccaagaaattgaaaaatttagaagtaattgacacattcttggaaatacatgaactatcaagactggatcatgaaaaaatagaaaatctaaatagaccaataactagcaaacaggttaaatcaataatcaaaaaacctcacaacaaaattaaagcataagtcccaatggttcaactacagaatctgatcaaacatttaaaacagaattagcaccagtcttcctgaaacacttgtgaaaaattaaaaggaaaaaatacttccaagttcattctatggaaatcagaattaccccaacaccaaagcacatcaaaacact

SEQ ID NO: 933708 - DNA, 622 bp, Homo sapiens
aaaatgtctagttgggccaggcccagtggctaatgcctgtaatcccagcactttgggaggctgaggtgggtggatcacctgaggtcaggagttcaagaccagcctgaccaacatggtgaaaccctcgtctctactaaaaatacaaaattagccaggtgtggtggtgcatgcctataatcccagctacttaggaggcaggggcaggagaattgcttgaacccgggaggcagaggttgcagtgagccaagatcacaccactrcactccagcttgggcaatagagtgagactccatcttcaaagaaaaaaatgtctagttgtgtattactctttatgtatgaacacttattcattgtaagttttcttcttattgttgcagaaaccatagtttctgcctgtagcccctatgtattccttctagggtacatatgctttttgcccaagatatatgctctgggttgaggggttgtagtatagagatctacctgccttgtggtgtccaggaccacacttctaagttcccttaataaatcacccaataccaacaaactggatttgtctacctcctcctttggtttctcatcttcttcagcatttgggggtctctttgtgtatacaaccctt

SEQ ID NO: 933709 - DNA, 705 bp, Homo sapiens
aaatagagctggtgtggggaaaagagccactttatttcgaatgcgaatctgcctggttaaccccaagtcccaggagtgcctctaaaatgtctagttgggccaggcccagtggctaatgcctgtaatcccagcactttgggaggctgaggtgggtggatcacctgaggtcaggagttcaagaccagcctgaccaacatggtgaaaccctcgtctctactaaaaatacaaaattagccaggtgtggtggtgcatgcctataatcccagctacttaggaggcaggggcaggagaattgcttgaacccgggaggcagaggttgcagtgagccaagatcacaccactgcactccagcttgggcaatagagtgagactccatcttcaaagaaaaaaatgtctagttgtgtattactctttatgtatgaacacttattcattgtaagttttcttcttattgtygcagaaaccatagtttctgcctgtagcccctatgtattccttctagggtacatatgctttttgcccaagatatatgctctgggttgaggggttgtagtatagagatctacctgccttgtggtgtccaggaccacacttctaagttcccttaataaatcacccaataccaacaaactggatttgtctacctcctcctttggtttctcatcttcttcagcatttgggggtctctttgtgtatacaaccctt

SEQ ID NO: 933710 - DNA, 572 bp, Homo sapiens
ctcttagtattaccatgccctgtgattaaggtcaatgggaaactacaatagcccaatccaggcagggctacaaatgacccagacccttcaggaatgaaggtttgggtcactccaccaggaaaaaaaacattacctgctgaggtgcttgctgaaggcaaggggaatacagaatgggtagtaaaagaagataatcaataccagctacgaccatgtgaccagctgcagaaatgaggactgtaattgtcatgagtatttcctctttcttttgttaaaaacatgtttgtgcatatacacacttgtactaagaaaatatcttcattttatttccttttcctttatcatgtgacgtaagatttattgacttcatatcagcatctaagtattgttaactttatgtaatagtatttgggttggggattggtgsgtttctggtcgtacaaaagatagttgtattatgttaggcataattataaccttattattgtctttatttgaagattatgtatgatctcaggagatgtgtatgggttcaagttgacaaggggtggacttgtgctggttaatactaaatg

SEQ ID NO: 933711 - DNA, 579 bp, Homo sapiens
accttaactacatctatatctctaatgtcccttgctatgtaacacaatatattcacaggttccagggtttagtacctggacacctttgggggtccattattttgcctactctagatatctcttcaggatctgacactaccatatccatctgcacagtagatgagtgccatactatgcaaggactcttagatggactgtgttacatttttgatcccttgaacatagccaatcaaacaatggtgtcatcagagcaaaaagtacccagcagtgagcagcacctgggacattcactggacctttcaggccccatatcgtccccaggcagcaggtgccattaaaagatggtatggattcttgaaaaaggaaaaactggaatggatgattggataaccaaacttcagctcccagcagcacatacacttaagaccaacagtttargccgggtgtggtggctcacacctgtaatcccagcactttgggaggccgaggtgggtggatcacctgaggtcaggagttcaagaccagcctggccaacatggtgcaaccccatttctactaaaaatacaaaaattagccagg

SEQ ID NO: 933712 - DNA, 606 bp, Homo sapiens
caaggaatttcaggagcttagtgttgatctctgctgttggcaggttgggcactcagaggtagcaatagccaaatccaccttgggaagagaataatgtgtctccactatggcctctttatacctggacccattgagcaaacactgggatggctgagcaggaaaagaaaacccatgcctggaatacatgctgatatggtttggccttgtgtccccacccaaatctcatctcgaattgtaatccccatgtgtcaagggaaggacctagtgagaggtgactggatcatgggagtggttttccccatgctgttctcattatacagagtgagttctcatgagatcyggtggttttataagggactctcctcctttcgcacactctcacctgctgccatgtaagacgtgcctgcttcaccttccgacatgattgtaagtttcctgaagcccccccagccatgcggaactgtgagtcaatcaaacctcttttctttataaattacctagtcttggatagtatctttaaagcactgtaagaacgaactaacgtgcctggcaattccagttagggcagatcaccacccactccagggcagaaaggctctgatgtaa

SEQ ID NO: 933713 - DNA, 827 bp, Homo sapiens
aaagcaaaacgaaagcacccggggcgcatcagttgcaatagcttccctgagcgcggccgtgggaggccaagatctgaggtcgcgaggcgacggtgggggcccgagctgcgcagaaactgggtgggggcggtccctggagggcgcccgggagctgctagaagttgtccggagcccctcaacccccttggaaaagcgaacgcggatgttaatataccaactccgcagggaacttttggcccgggtcttgagctgaaattccagactgaatgggaccgtgctgaaagttcgacgaggcaaaggagtatggcgcgggggcaagctttgacccccggcttcgtatcctcgggagaggccgggactccggctcgcccagcgagggtgcgcagaggcctcctgggattctaggcccacagaatttttgctccagtgaagttggataagcactccgcctccccgcaaaaaccagagttctcggmttataaacacttcaataaactctggtgacattctccgcgctcgctccttgccctcgcggcagtcactgcagggacaaaggcggcctgcgcagacttggaagaggcgcggcccgcgtgggcggctttaccggccaaagacgttttcagttaaggggaggcatcttcagagctgagggtaactccccacagccaccccgcaggtagggcagccaaccccaatctggtcagcttaaaagtgtcctcggtttcgccccctttcccagcgaaccaacactggcagattggcctgcgagccgctcgctctgttgctctagcacatttatgtagccaaacggtcgaagagccccatct

SEQ ID NO: 933714 - DNA, 827 bp, Homo sapiens
aaagcaaaacgaaagcacccggggcgcatcagttgcaatagcttccctgagcgcggccgtgggaggccaagatctgaggtcgcgaggcgacggtgggggcccgagctgcgcagaaactgggtgggggcggtccctggagggcgcccgggagctgctagaagttgtccggagcccctcaacccccttggaaaagcgaacgcggatgttaatataccaactccgcagggaacttttggcccgggtcttgagctgaaattccagactgaatgggaccgtgctgaaagttcgacgaggcaaaggagtatggcgcgggggcaagctttgacccccggcttcgtatcctcgggagaggccgggactccggctcgcccagcgagggtgcgcagaggcctcctgggattctaggcccacagaatttttgctccagtgaagttggataagcactccgcctccccgcaaaaaccagagttctcggcttataamcacttcaataaactctggtgacattctccgcgctcgctccttgccctcgcggcagtcactgcagggacaaaggcggcctgcgcagacttggaagaggcgcggcccgcgtgggcggctttaccggccaaagacgttttcagttaaggggaggcatcttcagagctgagggtaactccccacagccaccccgcaggtagggcagccaaccccaatctggtcagcttaaaagtgtcctcggtttcgccccctttcccagcgaaccaacactggcagattggcctgcgagccgctcgctctgttgctctagcacatttatgtagccaaacggtcgaagagccccatct

SEQ ID NO: 933715 - DNA, 779 bp, Homo sapiens
acctgcaagcaccatctactggcttagaggctggcccacacagcccattgcaaacactcccaacacaaaagcacagcagttgagaactgggaaagcatcgcactacaactgctactgccattaaccacattgtcctggatgcccaagagcttaagagcccacttacctacctggtacactgctactacaactgacatctgagaaagccacccaaaggaacaagaatttccctgtctggaaccaacagaattgtcactatrttctgtaccagatcccaaggatacacatgcttagcttactattactaccactgaaacttgcaaaagaacccatcaagcattccattccccagcacaaattcatcagtttctatcaataacctcacaatgccacacagaggaatagacagatactactaaggctgtttatagccaatgaaatcatacacagtcttcaccattacatggacccagaagcaaagccaaatggccctaccctaccaacatcatagccacatcatcaagaaaaagtttccctcaaacaaaagaaaataagaagaagttactgttgtttcatatgtgcagaaatcaatgtaaagacacaggaaacaaaaaagcaaagtaatatgacaccttcagaagaaaacaataattctccagtaatagatccttaccaaaaagaaatcatcaaaatttcaggtataaaattcaaactattaattttaaagaagctcaatgagatgcaagagaaacctgaaaaccaataaaaataaagcagaa

SEQ ID NO: 933716 - DNA, 602 bp, Homo sapiens
tcatataaaaactagacagaagaattctcagaaacttctttgtgatatgtgcattcaactcacagagtggaacattcctttcgatagggccgttttgaaacactcaattcgttgaatttccaagtggatatttagagcactttgaggcctatggcagaaaaggaaatatcttcgtagaaaaactagacagaatcattatcagaaactactttgtgatgtgtgcgttcaagtcacagagtttaacctttcttttgattgagcagttttgaaacactctttttgtagaattagcaagtatgtatttagagccctttgagggctatggtagaaaaggaaacatcttcatwggaaaactacacagagtcattcacagaaagtactttgtgatgtgtgcattttactcacagagattaaccattctttagatagagcaggtttgaaactctctttttgtaaagtcttcaagtgtatatttggagcgctttggggccttctttggaaaagggagtatcttcacataaaagtagacagaagtattctcaggaactactttgtgatgtctgcactcaactcacagagttgaaatttccttttgatagagc

SEQ ID NO: 933717 - DNA, 612 bp, Homo sapiens
acaactttctgagttcaatgcacacatcacaaagaagtttctgagaattcttctgtctagtttttatagaagaaattcccgtttccaaagaaggcctcaaagaggtccaaatatccacatgcagttgctacgaaaagagtgttacataactgctctatcaaaaggaatgttaaaccctgtgagttgaatgcaaacatcacaaagtagtttctgagaatgattctgtgtagtttttctatgaagatatttccttttctaccataggccccaaagccctctaaatatycacttgcaaattctacaaaaagagtgtttcaaaactgcactatcaaaaggaaggttcaactctctgtgttcagtgcagacatcacaaagaagtttctaagaatacttctgtctacattttatatgaaggtactcccatttccaaagaaggcctcaaagtgctccaaatattcacttgcagactttacagagtgcttcaaaactgctcaatcaacagaaagtttaaactctgtgatttgaacgcacacatcacaaagtagtttctgagaatgattctgtctagtttttataggaagaaatttcctttcctaccataggcctcaaagc

SEQ ID NO: 933718 - DNA, 679 bp, Homo sapiens
ccacaggactaggaaagtccccaggctgtgcttgaagctctacgcttttctctcaagtcaggaatttctattaatgtattatgcaacttcctaggaattctctgtggctagaaaggattctaataaaatacagaacaagcaggtccatggttaaaaggaataatctacaaacaaaaagaaataagtcatgtgttcatagctgtggctcctcaaaggcaggagatgaagcttgtttgcttctgcatcccaggcactcagcaaggctggcgggagagaacttctcccatgcgcttttctgccctctttctgattactccctaaaaagctaaagmgacattgcttttctccctgtttctcttccaaatccatttccatagctgctcaaccccatctcctgacaaagaaaagacaacttgataacgagaggctttttcttttttcttgtgcatgtgacctgaagtgagttctaattactcctaggtagctcacagtgtagtctagttgaaagccaatttgtacaattcaaacttcaaccattctgtttatttagccagaagaaaatgaaccaaacaggtgtttgatgaatcaaatgggaggcattgcaatgaaataatacagtgcccctccagccctgtcctgctctagcatgcctcccaaggattagcccacacccctcagg

SEQ ID NO: 933719 - DNA, 673 bp, Homo sapiens
ctaggaaagtccccaggctgtgcttgaagctctacgcttttctctcaagtcaggaatttctattaatgtattatgcaacttcctaggaattctctgtggctagaaaggattctaataaaatacagaacaagcaggtccatggttaaaaggaataatctacaaacaaaaagaaataagtcatgtgttcatagctgtggctcctcaaaggcaggagatgaagcttgtttgcttctgcatcccaggcactcagcaaggctggcgggagagaacttctcccatgcgcttttctgccctctttctgattactccctaaaaagctaaagcgacattgcttttctccctgtttctcttccaaatccatttccatagctgctcaaccccayctcctgacaaagaaaagacaacttgataacgagaggctttttcttttttcttgtgcatgtgacctgaagtgagttctaattactcctaggtagctcacagtgtagtctagttgaaagccaatttgtacaattcaaacttcaaccattctgtttatttagccagaagaaaatgaaccaaacaggtgtttgatgaatcaaatgggaggcattgcaatgaaataatacagtgcccctccagccctgtcctgctctagcatgcctcccaaggattagcccacacccctcaggct

SEQ ID NO: 933720 - DNA, 596 bp, Homo sapiens
gaatgttctggaaatgtctgttacatctatttagtcagattaactaagaaaaaaagtagagaaaactagaataaataaaatcagagacaaaaaaggaaatgctataaccgataccatagaaatacaaaggattgtaagaggctattgtgaacaattatatgccaacaaattggataaactagaaaaaatggatacatttctggacacatataacctaccatgaagaaacagaaaacctgaagaatcaataacaagtaataatattaaatcagtaaaaagtctcccatcaaagaaaagcccaggagctgatagcttcattactaaattctatgaaacatttaaagaataactaacaccaattctactaaaactattatttaaaaattgaagagaagggaatacattcaaaygcattctacaaggcaagcattacgatgataccaaaatcagacaaggacacaatgaaaaaagaaaactacaggccaatattcctgatatatataaatgcaaaatccctcaacaaaatactagcaatctgagttcaacagcacattaaaaagttttttcaccattatcaagtgggatttaatccagga

SEQ ID NO: 933721 - DNA, 705 bp, Homo sapiens
gggtttagacccaggacaaaaacatcacaatgtgtaatagtcagaatcacctagtttatagggctttcctgagaccagacactaatccaaaaaaggctggaattacttagaggtattgtttcaatttcttccagtccggctggaaatctcctgttgatgataaataactgaatataatttctgatgtgacctctcatttcccaaacagaagcaggatgcactccctcaatccatgtcttgcagctcctgctgcccagtggaggaaaaaaatatcccacacagacagctctgctcggatttcagcaccctctctccttcctccaggtctgcagaggcctgttacccgttaggcgcagcaggcgcagtccctcctcccgcttctgttccagcaaaacactyacacaggctgaaacatcctacaccccagagtcaaagttcttaataacattttccaaaggactgagtgcttttttatgaatgcatggagaaaatatggtgcgggtttaatattgtattatgagcctctgacgaaggattttaaaaatatgctttatgcatgaatatataaaataggcatatgttgcagtaaagtttcactgttgtacataaagcatattataataaaagttgtaaagttagcccttagtggagaattgaagaaagaaaaaaatgcgatgcttccagccagcggggatggagtctccc

SEQ ID NO: 933722 - DNA, 694 bp, Homo sapiens
gtttcactgttgtacataaagcatattataataaaagttgtaaagttagcccttagtggagaattgaagaaagaaaaaaatgcgatgcttccagccagcggggatggagtctcccaacacattctttgttttgccatagaagccgcttactcttgctggaatgtctctgtygagccaaggctggctgggcagtaatggtggggcagttatatgatgaataaaagggtcagagagaggtgcccccccgggcagcccaagccccagccaacggcagatgcaaatttgcctcagaaatacacatggatcaaaatcttaacactgcactttgcaatgctcttggaatgtccccaaagaagaaaatgagagatttcaaagcatgaacactgatggcttttcttccaggcagattagcttgaaaattactgttggggttatttgcattgcacttaacactgactactgtgtgttgagtatttaattctcaggacaggccaggagttccttaaaggcagagattcctcatgggcattgccccaccaccccctggaccacacacacacactcacacaccagctcgtcttatgcccgcagccgtaagcattagccagtgattagttgaatgcattactgtattgatgtctttttttttttttttaaacacactcaatcaactaaatataggcataccttagag

SEQ ID NO: 933723 - DNA, 774 bp, Homo sapiens
tatgtctgcactatcctgcagtctattaattgtgcaataacattgtgttaaaatataatgtaaatatcttaactaaaaatactttgttgctaaaatatgctaatgatcatttgagcctttggtgcttcgtcatctttttgctggtggagggtcttacctcgatgctgatggctgctgactgatcagggtggtggttgctaaagttggggtggctgtggcagtttctttctctttctttctttctttctttctttctttctttctttctttctttctttcttctttctttctttcttctttcctctttttttttttttctgagatgaaggtttgctcttgttgcccaggctggagtgcaatggtgcgatctcggctcactgcaaccttgcaacctckgcctcccaggttcaagtgattctcctgcctcagcctcctgagtagctgggattacaggtgcatgccagcacacccagctaatttttgtatttttagtagaaacggggtttcatcatattggtcaggctggtctcgaactcctgacctcaggtgatccgcccgcctcagatgcccaaagtgctgggattacaggcatgagccactgcgcctggccagtagtttcttaaaataagacaacaatgaagtttgctgcatcgatggattgttcctttcatgaaagagttctctgtggtgggcaatgctgtttgatagccttttacccgcagtggaacttctttcaaaactgaagtcagtcctgtcgatttctgtagctgcgtt

SEQ ID NO: 933724 - DNA, 629 bp, Homo sapiens
gaaatactctaaatcctttgctgtcatttcaacgatgtttacatcgtcttcaccaggagtggattccaactcaagagaccactttctctgctcatccataaaaaacaacttctcattcattcaaggattatcctgagactgcagcaattcagtccctcttcaggctccacttccaattctagttctcttgctgtttccaccatgtctgcagtgacgtcctccacggaagtcttgaacccctcaaagctatccctgagggttggaatcaacttcttccaaactaatgttcatgttgatattttgacttctgcccccgaatcacaaatgttcttaatggcatctagaatggtgaaccctacgcagaagtttttcaatggactttgcccagatccatcagaggaatcactttctatggcacctataactttacaacatgtatttcttaaataatagggcttgaaagtcaaaattactccttcatctatgggctgcaraatggatgttgtgtcaacaggcatgaaaacattcatctccttgtacgtctccatcagagctcctgggtggccaggcgcattgtccatgagcagtacagtttttagttttggggtttttttttttgagacagagtc

SEQ ID NO: 933725 - DNA, 611 bp, Homo sapiens
ggcacctataactttacaacatgtatttcttaaataatagggcttgaaagtcaaaattactccttcatctatgggctgcagaatggatgttgtgtcaacaggcatgaaaacattcatctccttgtacgtctccatcagagctcctgggtggccaggcgcattgtccatgagcagtacagtttttagttttggggtktttttttttgagacagagtctcagtctgctgcccaggctggagtgcagtggtgcaatctcagctcactgcaacctccacctcctaggttcaagcgattctcctgcctcatcttcctgagtagctgggactacagatgcgtgccaggctggtctcaaactcctgacctcaggtgatccacttgcctcggcctcccaaagtgttgagattacaggcttgagccaccgtgcccggcttgagcagtacagttttaaagaaacctttttctgagcagtagatctcaactgtgggtttaaaatattccataaatcatgctgtaaacagacatgctgccattctggctttgttcttccatccatagagcacaggaagagcagctactgcataattcttaggacctaggattttcagaatggt

SEQ ID NO: 933726 - DNA, 690 bp, Homo sapiens
  misc_feature 248: n = A,T,C or G
ctactctagggtccagatactcggttcctagggaattacttacaagaaacgacatcagccggaaacggtggcttatgcctgtagtccagcactttgggaggctggggtgggtggatcacttgaggtcatgagttcgagaccagcctggtcaacatagtgaaatcctgtctctactaaaaatacaaaaatcagccaggcatggtggcgggcatctgtaatcccagctactaggcaggctgaggcagggnagaatcacttgaatccacagggaggcggagtttgcagtgagctgagatcgtgccactgcactccatcctagacaacagagtgagactctatctcaaaaaacaaacaaacaaacaaaagcctgacatcatagctccatgaaaagacttgaatatgaatagacataatagttttattgtcgtagctcaaactgcaaacaacctaaaggccatcaacagatgaatggctacataaactttagtcaatccacataatggatgactattcagcaggakaatgaatggagcattgataattttttgataattgatcattacattgataatgtaacaacatgggtgaatcccaagataacaaagccgtgtggaagcatccccacaaaagagacgatatgttgcacgattccatttatataagattctggtaaacgtacactaatgtgca

SEQ ID NO: 933727 - DNA, 686 bp, Homo sapiens
acgtgggggaagattggactcaacaccaaatatagcatgggaagttggagtttatagcccgggagcagggtgggggcagggcacggcaagtcacatagaggagacatcggggcaggggaattctggctacactgacccaacagggtttcgctgaggatgggccagggcgacaggcattacctgggtgtggtggacaatgaggagcctgaacagatcatgaggktgatgtggtgtcaagggcaggggctcttgctgaactgactcagtcgcgttcttgctaaacccaggttttatagggatgagcccagataggcccaggggatgttccagagcctggctgaaatctgggcaggtagggcctttctgtcgccagagagccaggacagccccacccaccacaaggcgttcaccgtggcaggaagcaggtgcctgtgctcggaaagtctcacgggcaattcctcccagcggtgggcatgggatgtggccctggcccctgatctgtgagccccctcctctgcgagtaggtgtgaagacccatcctgccaggcctggctcctgaggaccagccgaggatgggagtggaacacaggagctttctccacacgtgctctgtgctgcagccgtgcagtcaggctggggagtttgctgggactctctgaggtgtcctgaccacttccctggctacc

SEQ ID NO: 933728 - DNA, 686 bp, Homo sapiens
acgtgggggaagattggactcaacaccaaatatagcatgggaagttggagtttatagcccgggagcagggtgggggcagggcacggcaagtcacatagaggagacatcggggcaggggaattctggctacactgacccaacagggtttcgctgaggatgggccagggcgacaggcattacctgggtgtggtggacaatgaggagcctgaacagatcatgaggttgatgtggtgtcragggcaggggctcttgctgaactgactcagtcgcgttcttgctaaacccaggttttatagggatgagcccagataggcccaggggatgttccagagcctggctgaaatctgggcaggtagggcctttctgtcgccagagagccaggacagccccacccaccacaaggcgttcaccgtggcaggaagcaggtgcctgtgctcggaaagtctcacgggcaattcctcccagcggtgggcatgggatgtggccctggcccctgatctgtgagccccctcctctgcgagtaggtgtgaagacccatcctgccaggcctggctcctgaggaccagccgaggatgggagtggaacacaggagctttctccacacgtgctctgtgctgcagccgtgcagtcaggctggggagtttgctgggactctctgaggtgtcctgaccacttccctggctacc

SEQ ID NO: 933729 - DNA, 635 bp, Homo sapiens
ggttgcagtgagccgagatcacaacattgtactccagcctgggtgtcagagcaagactccatctcaaaaaaaaaaaaaaagaagaagaagaagaagaggaagaggaagaagaaggagaaggggaagaagaaggagaagagaagaaaaagaaatttcaagtgatctagactagcccaatcaatcttgacaaggaaaaacaaagctggagggttcagacttcccagattcaaaactccctgcagagctacagtcatgaacaccgagaatcactgaactgcacacttttttaaacagggtgaattttatggtatctgaattatgtattggagaaactcaagcccgtcaatattgctgatgtcttcacatgtgagcagtatcatggytgtgcatgcgaagattgagcctccttacaacgagtcactttaacatctctggcgagtgcgtgtcttggtgtggaaacatactggcattgcagacagtgctgcaagtggaatggtcttatagtggaaaacatccatgctgtctgcataacagaaacacccacaagaaacagcctcctgcaagacgcccaaatgtccctgtccaatctgctaaccaggtgtgtggctcctcacctctttaaatctgtacaacat

SEQ ID NO: 933730 - DNA, 645 bp, Homo sapiens
ggtgtcctggtgtggagtggacatggccaaggttggaccccaggggaaaagaagccgaccttgagcggcaaagacacagggtgggcgggggcctcacatgtaggcaggggatagatcagggtgggcggggacctcacgtgcaggcaggtgatagatccaaccgtccgtgttccaccatggggacagaggatcaagagccgggggcctcagtctcagcagagcccgggtggcagagagggactaaggcctggaggaggccctgccgctctgcgtggaaggcaagagtgagccatgggatatgatggggagcagggctgtgactggagagtgttgctgggacatcatgctgctgcaggcggggtcagagctgaaactctgaagtggatgagggtggggtggccttgggaaggtgctcagagagaagggagggcccagccgggaaccgtgagccatkgtggcatccgggcaacctcccttgtctgggggtggctgtggggctttggctgcgccgagtcctttggtgagtgctgccccgctcactcctcccgagactgagcctccgaccgccctgccagcgtggtctctgtgtgaggagaagggtcccaggggagaacaacagccagagtgctggatcccgcagccccc

SEQ ID NO: 933731 - DNA, 562 bp, Homo sapiens
ctttactcattgctgggtatgtttttgttttttcaccccctattccctggtacataagttgctccataatttgataaaattaaattcaggaagggaaagttttaagccagtatgtaaggttcatttgaaccccaagagggctctcttagctgtctcttttcctggttctgtctggtaaactagctagcttatgtttagcttgttctgatggagcatgggccctttgatttcccaccaccacaatyttccttattttcaagagattcttttggtttgaacacactattttgaacactgtgttttgaagttaattctactgggggagagctttggcagtctgcattcttgtggactaaatttcccccgagcaaagtctctgaagtagcttctgatcttcttctcttttctcttcaagtttggaaattcaactatgtgagcctgacctggggccctcgtattctcagcctggcatgcctggggcagagccactgccctctgagtgggggctgggtgtaagaggggagtctcaaactatttgttacttcccctcaacaaggactca

SEQ ID NO: 933732 - DNA, 825 bp, Homo sapiens
aatagaaaagggctacctggggaccaggtgtgtccaccatggggtcccaccttcccttttccattagcacatatgcagtaagaaagaactggataacatagagaagttgaggcagagaacccacctgcgtaataaaagatcggggtgggggctctcagagatttgtgccctatgcagatggcacacctagtcctaacaggtttttcgtgccgtatgtaaataagacactgcctcctgactagcgcatctataaaacccccagcattttgccgtgcttaggcaacccatttttccaggacccctctctgtagcagagagatattctctctgttttgtctrttaaatttccactcttaacatcattctttgtgtgtctgcatccttgatctccatggctgtgagacaacaaatctcgggtgtcaccccagacaacaaggccgcttcagtaagactggcaaaacagactttttgtggcaatagatgccaaattgtaaacaagatctagggctttggaaggcagggttaagtcatgtcctgcaaacaacaaaatctccttagatggattttcattaacctggtataatgtggtttactttccaacctataatgaggctactttccaacctctttccatgtgatagagtattacatgacagatagcagactctaaaggaaatcaaaatatttcacctcaaaatgtatttctttgacatattttgaagtagctcccataggtccagcagattgaaatggccctgcaaagccatctattgtgtggaaaatttgcatctgtacagaatctctattaatgcaaccaggcctttc

SEQ ID NO: 933733 - DNA, 712 bp, Homo sapiens
cactgagtctgagcccaaaggctgaactcagtggggcttgggatttccttctatgtcacacagcccaggtcactgggaagaaaatacccaacgttgctgggcgcagtggctcacacctgtaatcccagcactttgggaggcagaggcgggcggatcacgaggtcaggagatcgagaccatcctggctaacacggtgaaaccccgtctctactaaaaatacaaaaaattagccgggcgcagtggcaggcgcctgtagtcccagctactcgggaggctgaggcaggagaatggcgtgaacccgggaggcggagttgcagtgagccgagatcgcgccactgcactccagcctgggcgacagagcgagactccgtctcaaaaaaaaaaaaaaaaraaaagaaaatacccaacgttgcagttcctgccacagcacacccgactgctttcggctgttacatctgttcaccctcacggcataactgagaagcccgtcacaaaccagagcaggccgtttcccaggctcacacgtcaggcggcttgccggaggtctcagctccccagagggagtgggatggaaagacgggtgctgctgaccccgcaggcagggcacaggcagggttgggcggaggcttcctccatgcaggcatcttcagggagccaaggctcccctcgccaagtcctgccaggcatggggcgctgaatggtggccccaact

SEQ ID NO: 933734 - DNA, 599 bp, Homo sapiens
tgtaaaggggtttaagcaatgaatgattcatgaatcaggcagcctcctgagccagagtagactctgagactccagcacagccatggggtggaagaagactgatggacagaaaaaggaaagtgacacacagaaaatggaagtgaggtacagraagagctggattgggtacagcttggtgtttgccttatttgaacagtttgaacagttggctacatttgattggccaaaactcagtgattggcacaagtgtaggctgcggtctgtttacacttccacttgttgtagttcaccatgtgcagagaaacctttaggctgaacttaaaatatgtaaggaggcagctttaggctaaacttgatttaacaatttcaccccaaattagagagatcaaaactttagtcattgatgtcactgtaaccgttgtaaatatacttatttggtctttaaaccctctgggaaatggtagacacagtgggttttccaaggtaggagcaaggactgagtagaaggtccctccttatgctggaacgtcctgtgtacaggagaaaaacaaaacctgatctgttgtaggatctgtgtgtttccttaaagtcttagtttg

SEQ ID NO: 933735 - DNA, 570 bp, Homo sapiens
agagaatcaatttggaatttatcagagaaacttaacagagagatgaaataacgaaagcaaaacaaacaaaaaataagcaaacccccagaaatcctggaactgaaaaatacaatgaatgaaataaaaaatgcaacagagtatcaagatctgcatcaatgaaaaaaaamgagaagaatcagtgagcttgaagacagactatttgaaaatatatagtcagaagaagaaaatgaaaaaagaatataaagaaaaaaacaaagcttatgtgatctattggatgacacaaaaagagcaatatttaggttactggagttaaagagggaattgagaaagacaaaatggttggatggaaccatagaaacaatagaaaacttttcatacctgcagaaagatataaatagtcagctaaaggaaggtctaaggtcaccagtcggattcaacccaaataagaataccccaagaaatattacagtcaaattctaaaaggtggtaggcaaagagaggatcctgaacgcagtgagagaaaagaaggaaaaaacatgtaaaggaagatttaatatgcctggcaacagg

SEQ ID NO: 933736 - DNA, 608 bp, Homo sapiens
agctatggagagcacctcgcgctgaagctgacattcaaaggcctgaacggtcataactgagacccattccaaacgctgacttacatgtgatgtcattttcccccagtgttcttaactgaattgcaactgttgtatttaccatggtggggaggggcacgcaygcaaagtagagacgaggtagagaaagtagaagtattctttaaggtaaagatataaaaatattctgtagataacatgtaacttaagtggccctaccttggagcttcgtatgtaggtgagtttttatatgccacttctgtttctctcatttagatggatatatgcaatgccaaagacaaaagcttatgttaacaatcactgtaagttaaattatgcttgaaaaataagaataaaaaatattatggtgcaagaagaaggtgcttggtattgctttccattgaaatcaaaatgtaaagaaataaatgcaaagagaagatacagtggtatttatggatgtgcacaggggaggctttctctgtgtggggctgggcaggagagagacgcgtcacaggcagattgcattcgacgccgtgctcggagtggcgttctcggtgcagagttctagcatg

SEQ ID NO: 933737 - DNA, 608 bp, Homo sapiens
agctatggagagcacctcgcgctgaagctgacattcaaaggcctgaacggtcataactgagacccattccaaacgctgacttacatgtgatgtcattttcccccagtgttcttaactgaattgcaactgttgtatttaccatggtggggaggggcacgcatgcaaagtagagacgaggtagagaaagtagaagtattctttaaggtaaagatataaaaatattctgtagataacatgtaacttaagtggccctaccttggagcttcgtatgtaggtgagtttttatatgccacttctgtttctctcatttagatggatatatgcaatgccaaagacaaaagcttatgttaacaatcactgtaagttaaattatgcttgaaaaataagaataaaaaatattatggtgcaagaagaaggtgcttkgtattgctttccattgaaatcaaaatgtaaagaaataaatgcaaagagaagatacagtggtatttatggatgtgcacaggggaggctttctctgtgtggggctgggcaggagagagacgcgtcacaggcagattgcattcgacgccgtgctcggagtggcgttctcggtgcagagttctagcatg

SEQ ID NO: 933738 - DNA, 622 bp, Homo sapiens
accaaactctattattttttgattttttgattatggccattcttgcaggagtaaggtggcattgcattgtggttttgatttgcattttcctgatcattagtaatgttgagcattttttatatgcttgttggtcatttgtatagctgcttttgggaattgtctattcatgtccttagcccactttttgatgggattttttgttttttttttcttgctaatttstttgagttcattgtagattctggatattagtcctttgttggatgtatagattgtgaagattttctcccactctgtgggttgtctgtttactctgctgactgttccctttactgtgcagaagctctttagtttaattaagtcctacccatgtatcttcatttttgttgcatttgcttttgggttgtttgtcatgaagtctttgcctaagccaatgtctagaaaggtttgtccaatgttatcttctagaagttttatagttgaggtcttagatttaagtccttgatccgtcttgagttgattttttagtaaggtgagagatgaggatccagtttcattctgttcatcctagcatgtttggcagcatccatgtcctctaaccaccagatgccagtaatcgtcc

SEQ ID NO: 933739 - DNA, 584 bp, Homo sapiens
gtctttctagtattcctgattagctaaaaagttctgggctgcttcctatgactctcctaaaatgtcatttttatataggtaaaaaagaagaacaagaaaagttatgtttgttagatttttcctaattgcaggattttttaaaattcaagttttagagctaggtgggaccttartgatttagccaaagccccaatattacagttaaagaaattggtattccaagagctggtgttttgcccacagtcccttgaagatgcagaaccaaaccccaagttttataacaacccttgacaagtgagctcaaacaggacacacatgttgacttgtgaaatttgtggtcactttataaagctgagtttacaaagccagttcttcacaaactaagcagttcctcttagtcactatacctgctgttcagataggttaaagaatgaaacctaggcagtagctaagagacccgtcagttaggcattttccaagtaagaatgattatgaggacatacgttacaatttcagtttttaagaaatgtccttgctaaactggtcaccaaaacaaatgtttaaataatccacaggggtaaaat

SEQ ID NO: 933740 - DNA, 609 bp, Homo sapiens
aagtttaaggaagagaaatatgaaaaccaaatttatgtagttataataataactaacatttattcattacttgttacagatcagttaatgattcaaatacttgacgtaaattatctcatttaattacaccataagcctttgaggtaggagctattattatccttattttatagatgaggaaaatgaggcgcagagagaccatgtaacttgcctgaggtcacagagtagagccaaggtttaaactctgagcctgacctcattgccttggcatgtcctcatcatgctccatggcctttttgatatgggaaaaatgtgctctgcaggtcaygggcttagtccagtgccctggacactttttgagtcatcaacccctttgagatggggtggaccctcctcagaaaaaaatgcacacacttaggttagtgtttatcttctacatagtctaatgctagttcaaaaattccagtagcataaaatcaagttttttttcccccaaaatatattgcaccatttattccaacatgtgtttaaaagcacaaaaatagcctgggcaacatggtgagactttgtctctacaaaaacttagccagccatggtggcttgcacctg

SEQ ID NO: 933741 - DNA, 569 bp, Homo sapiens
acagctcttgagttcttgatttgattctcaacttggttgctgttggtgtatagcagtgctacttatttgtgtacattgattttgtatcctgaaactttactgaattcattaatcagatctaggagctttttggatgagtctttagggttttctagatatatgatcatatcatcagtgaacagcaacactttgacttcctctttactgatttggatggcctttatttctttctcttgtcggrttgctctggctaggacccagtactatgttgaataaaagtggtgagagtggacatccttgtcctgtgccagttcttagggggaatactttcaacttttccccattctgtataatgttagctgtgggtttgtcatagatggcttttattaccttaatatatgttccttctgtgccagttttgctgagggttttaatcaataaggggatgctggattttgtcaaatgctttttctgcatctattgagatgatcacatgatttttatttttaattctgtttatgtggtatatcaaatttattgacttgcatatgttaaaccaaccctgcatc

SEQ ID NO: 933742 - DNA, 591 bp, Homo sapiens
gaccacacctggctaatttttgtagttttagtagagcagggtttcaccatgttggccaggctggtctcgaactcctgacttcagataatctgcccaccttggcctcccaaagtgctgggattacaggcatgagccaccatgcctcccccggcctgttttttttaaaaaaaatttcttcarattggtttttacctttctctgttacctccttgagtagctggataatcaactgtctgcattctttatctggcaatttagagattcttcttggtttggatccattgctggagagctagtgtgatcttttgagtgtgtgatagaaccttgttttgtaatattaccagacttacttttctgtttctttttcatttgggcagactgtttcagtggaaagatctggaactcaagggctgctgttcaggttcttttgtcccacagggtaattccttgatgtggtgctctcccccttcccctaggaatggggcttcctgagagctagactgcagtgattgttattgcccttctgagccctgggctggtgctaggcaatgtctgcaaagagtcctgtgatatgatccatcttcaagtctc

SEQ ID NO: 933743 - DNA, 567 bp, Homo sapiens
atccatatagtggaatattattcagtcataaaaaggaaggaagtgctgacccatactataacatggatgaacctagaaaaaattatgctaaatgaaagaagtcagacacaaaagtctacatattttatgattccatttgtataaaatgtgcagaattggcaaatacatagagacaaagtagattagtggttgccagaggttgaggggaagagggaatagaacatgatcgctaatgaggacagggtatcttttaggggtgatgaaaatgttctggagttagatagtggtgatggttacttaactttgggaatatgctaaaaaccattcattcaattgtatactttgaaatgrgttaaaatgataaatgttatgtaagttttatcttaaaaattcaaaataaaaaaatgcctagggaaaatgtcaagaatttggtatgtatacaagtcagcagcccagggaagaggccacaatagagatagagatttaggggagattgaaatattgatggtatataaaatgctgagtctgccctgtatttgtggataatatgattgaatgtgaagaaaa

SEQ ID NO: 933744 - DNA, 618 bp, Homo sapiens
aactgctcttgttcctcacatagtgaggaagctagggccacagagaatatctctgtgttgtcagagaggaaactgagcctccctggaggtcttataagttgtaaaagtgagaggtggaactgagaccagacacaaacgcctttgcatcactcctttaaccccatgcactcggggcaggagcgtggcaggtgactctgaaccacactgtgccagaggcaggcagggcccccagtttgccccacgggcctgtggcacttagaattgcaccttgctctgctgactaaaaatacatttctgttccttggcccaagtgccaagagaagtggggctgtttggccttgttcctgctattccattagacagcatygaagtatgtaaagcaggagagaaaaaaaagagagttactccctgtttggattcagtttggaaaatgcaggttagcactggcagccagctctttggcctgaagttgggcaccatctgacttggtcagtgatttctctgaaatgacagaaaccgaaggggctttatcttggttttctctgaggtgcctgtgttccccattcttagattggatgcctggattcagtgctggcaagttaggttagcagcatgaca

SEQ ID NO: 933745 - DNA, 617 bp, Homo sapiens
agctacttacctagggatgggtctcaggctgaagactgctctctaccatccttgaagcaggaaaaaaactcgaacttgtcttccctgctgggagcaagctcaaactccataaaagagttgtcagccttccatcatcacggacccaggaaatcttgccttccttcttggaagcaaataaaactccaaaagaaggrgagggggagttgtacatcaaataaactttagatcacgaccaagttttgagagatcagggactctatggagggggtgctcccagacctcagcaaattgtcctgttggtttgagccataaggttagctcatggtgctaccaagcaccaatagatctgtcaaaggtcaggggtacctcaactcagaatccctccatggttaccaaaatgtgaaccccccaaatctgagacaggtctcagttaatttagaaagtttattgttccaaggttgaagatgcacacccgtgacacagcctcaggatgtcctgacgacatgtgccaaggtggtcatacgttttagggagacatgagacatcaatcaacacatgtaagatgaacattggttcagtctggaaaaggccgggcaacgccaagcaaatgtgggaca

SEQ ID NO: 933746 - DNA, 617 bp, Homo sapiens
agctacttacctagggatgggtctcaggctgaagactgctctctaccatccttgaagcaggaaaaaaactcgaacttgtcttccctgctgggagcaagctcaaactccataaaagagttgtcagccttccatcatcacggacccaggaaatcttgccttccttcttggaagcaaataaaactccaaaagaaggagagggggagttgtacatcaaataaactttagatcacgaccaagttttgagagatcagggactctatggagggggtgctcccagacctcagcaaattgtcctgttggtttgagccataaggttagctcatgstgctaccaagcaccaatagatctgtcaaaggtcaggggtacctcaactcagaatccctccatggttaccaaaatgtgaaccccccaaatctgagacaggtctcagttaatttagaaagtttattgttccaaggttgaagatgcacacccgtgacacagcctcaggatgtcctgacgacatgtgccaaggtggtcatacgttttagggagacatgagacatcaatcaacacatgtaagatgaacattggttcagtctggaaaaggccgggcaacgccaagcaaatgtgggaca

SEQ ID NO: 933747 - DNA, 602 bp, Homo sapiens
tgaccaaacaatatcctgaacagtattgattcagagtaatccatgttctgagctttgttgttttctgatgcatggggacggatcagtaatgtgcaggttgttagaacaccagtgacttctctgtggctgagtgcatcgacaagtgtgtggtgggaggagacggcggctccttccggagcaggagctgtcatgtggggagctggcccaggctcacgagagcgacttgcgctggctgagggaacggcaggtccaggcgggcagcgctgtccggcgcctacctttytgcggtgccggaatctgctcgtctgcaaccgtccgctttggtagctgccagccacatggggctgttgctaatgtggcaggtgtagctgaagagctgaacgttttgacttattttaattaattaagtggttatgtgttgccagtagctcccatctgggctgtgaccccatggtctgcggatctcactctggcaccagactccgagtggagctgcatgcggccaccggacagtgtggagtgcctcttcgggttgtgtagaagtaggaaatgtgtcaccaacataggagctgttgctgctgcgttctctagcacacctgcct

SEQ ID NO: 933748 - DNA, 652 bp, Homo sapiens
tgtgtgcacacagcactgagaagatggtgcccgggggctgccctgtccgttctgtgatctcattagacaggaggtccggacgtgggccactgtgtgcagtcactgctctctgttgtttccataggctacgggcgcacctacttgagctgcacgtctgcccacaccagcaccagcgacggcacggccatgatcaccagggcaggccttccttgccaggacctcgagtttgttcagttccaccccacaggtagggcaggacgccttgcccggaaggcgttcggctcgtgtgtcttgtaagcgtgtggtgcctactcattgctcttccatagttttatgtaataacatggttttgaagatcagcttccwtagctctcaggtcctaacttcaatgtcatttccttaaggagacttttcccacactccccttcccctaaggcagtttgggccaccatcttatgcatttctcaagagccctaaaccctgccttggtgatacttatgccagcagtaaagcagggattgaggccgggcatggtggctcacacctgtaatcccagcactttgggaggccaaggcaggtggatcacctgaggtcaggagttcaagaccagcctgcacaacatggtgaaacctcatctctactaaacataaaa

SEQ ID NO: 933749 - DNA, 781 bp, Homo sapiens
  misc_feature 305: n = A,T,C or G
tgtagcaacagctttacaaatgaaacttcatgattccccaagtaatctacaaagttattttacatacgatttcattctaacaggcttcaagctaagcaggcacatataccacaaaaactcttcatctgttttgcaggcatacttttgtgctgatctgtatctactctaatttctcaaaaaagaaatgctgtggatcaggcgtggtggctcatgtctgtgaccgcagcactttgggaggccgaggagggtggatggcctgaggtcaggaaatcaagaccaccctggccaacatggtgaaacctagntgtccacttaaaaatacaaaaattagccaggcatggtggtggcatgcctgtaatcccagctactcgggagkctgaggcaggagaattgcttgaacccaggaggcggaggtgtcggtgagctgagatcgcaccactgcactccagcctgggcaagagagtgagactccgtctcaaaaaaaaaaaaagaaaagaaaagaaatgctatgaaattgggtgtggctatgaaacaagcttaccttcacatcattcttctcatataggccattcatgcaggctatgctaaagccaggctctaaacagatactgttgccagacccaggacaaatggaacctctatgactaacagcattcctgttgcttctgattctaggtgggaaacctccactgatatttaacaactttgctctaagtagatgtggaatggtggtgtgaaaaaaagcagaggatctggaacaacagaccacagttcaagtcca

SEQ ID NO: 933750 - DNA, 781 bp, Homo sapiens
  misc_feature 305: n = A,T,C or G
tgtagcaacagctttacaaatgaaacttcatgattccccaagtaatctacaaagttattttacatacgatttcattctaacaggcttcaagctaagcaggcacatataccacaaaaactcttcatctgttttgcaggcatacttttgtgctgatctgtatctactctaatttctcaaaaaagaaatgctgtggatcaggcgtggtggctcatgtctgtgaccgcagcactttgggaggccgaggagggtggatggcctgaggtcaggaaatcaagaccaccctggccaacatggtgaaacctagntgtccacttaaaaatacaaaaattagccaggcatggtggtggcatgcctgtaatcccagctactcgggagtctgaggcaggagaatygcttgaacccaggaggcggaggtgtcggtgagctgagatcgcaccactgcactccagcctgggcaagagagtgagactccgtctcaaaaaaaaaaaaagaaaagaaaagaaatgctatgaaattgggtgtggctatgaaacaagcttaccttcacatcattcttctcatataggccattcatgcaggctatgctaaagccaggctctaaacagatactgttgccagacccaggacaaatggaacctctatgactaacagcattcctgttgcttctgattctaggtgggaaacctccactgatatttaacaactttgctctaagtagatgtggaatggtggtgtgaaaaaaagcagaggatctggaacaacagaccacagttcaagtcca

SEQ ID NO: 933751 - DNA, 610 bp, Homo sapiens
tgaagcagagagaaagccctgaccagacactgaatctgctggcatcttgattttgtacttctctgtctctagaactgtgaaaaatgcatttctcttctttataaattatgaatctacggtattttattatagcagcccaaatggactaagacaagtagtagattagtggactggaagaaatttggaggsaaaatttaacaggagagggtacatggtagatgctggggtcctgaaaagcaggcctgtgtgggaaacatcagtattttggttattcagcccccatccctgcctgtctttctgcttttgaggtctgtggtaacagcaacaccccttcttctaggaaatgttctcttacacactccgcttgtggaagttgaatggagtggccatttcattgttgactccaatctggccacagatcattgggatccaagagtgggctttcaaacccgcccaatcagaatccttccttggagtttgcaaactgaagaaggagaaagagatagagtccccagacaatggccaagctgtgagatataaaatatagaagcagagactggggtggctggcaagatggctgagtaagaagagctccaggtctgtagctccc

SEQ ID NO: 933752 - DNA, 590 bp, Homo sapiens
atactaaaaaaatcaatttttgtgttatctgagagaagcaaaatgataaatgtctacaaaagccttaggtgccagaaaaacagttttatatgaaaataaaaatgagtcaattcactggttgtatctctcttaaacataaagcaaagaagcaatagtattagcttgttttaaagtccaaatcttattgtcccggccgattcttaggaggactgaaacattgttatgcatgtgctgtgtgtgtgtgtgtgttgtggggaagaggtgtatagtgtgaaactttttcttttacactggcttctttcttwgtatggcaaactttagagcagtcatctgcccccttaacattggtgaccagcacacgatagtaagaattttttgtactcagaattttttatacaacactggttgtatacaccaaccagtgagattccttttttatcttcattttagattaaatatatcaacaacgggtatgcttctgttaacttagatgacatagtgttatttcctgagctgtaactcatctctgcagattctgcttttaaatgggacattccttcaatcctgaagtaaagccacatctgcagaga

SEQ ID NO: 933753 - DNA, 590 bp, Homo sapiens
atactaaaaaaatcaatttttgtgttatctgagagaagcaaaatgataaatgtctacaaaagccttaggtgccagaaaaacagttttatatgaaaataaaaatgagtcaattcactggttgtatctctcttaaacataaagcaaagaagcaatagtattagcttgttttaaagtccaaatcttattgtcccggccgattcttaggaggactgaaacattgttatgcatgtgctgtgtgtgtgtgtgtgttgtggggaagaggtgtatagtgtgaaactttttcttttacactggcttctttcttagtatggcaaactttagagcagtcatctgcccccttaacattggtgaccagcacacgatagtaagaaytttttgtactcagaattttttatacaacactggttgtatacaccaaccagtgagattccttttttatcttcattttagattaaatatatcaacaacgggtatgcttctgttaacttagatgacatagtgttatttcctgagctgtaactcatctctgcagattctgcttttaaatgggacattccttcaatcctgaagtaaagccacatctgcagaga

SEQ ID NO: 933754 - DNA, 623 bp, Homo sapiens
aaatctcagacttccttatagctattctcttctgggtcctcaccagaatcacccttaattttccactgatggcaatctagcctttttctagcttgcttctccaaactcttccagcctctacccatgacccagttccaaagctgcttccacattttcatgtatcaattttctgtcttagtctgtttggtatttcaataaaataataccacagactgggtaatatataaagaacagagatttatttctaaaattctggaggtggtgaagtccaagaaggtggaaggtggggctggcaccttgtgagagccttcctgctccatcatatggtagtggaaggcatcacatggtaagaatgtgtaagagagagggggaggaaggagatcagatgcatccttttatcaggaatccactcccacaataactaacctactcctgagataaaggygttaattcatacataagggcagagccctcatgacctaatcactctaaaaggtccaacctgtcaacaccatcgcattgatgattaagtttccagcacatgaactttggtgaacacattgacacctcagcaaatgtattcctcgcacttcagaggaagctattcagtgcaatcctggatc

SEQ ID NO: 933755 - DNA, 629 bp, Homo sapiens
ccctgtactgcctccctctgaagacgagaagagtctccctcacccagtcccaccaccttacaaccagcctgttcccttagggtcaccccatgtctcctcgatgacaccccctgtgggctcgccacccattgcctcttgactgtagaggaaatagcccctctactaccactgagagaggcacaagtccctccaggtgacgagcgctcagcccccttcttagtttatgtcccttttttctacttctgacttgtataattggaaaacccataatcctcccttctctgaaaagccccaggttttgacctttctgatggagtccgtactccggactcactggcccacctaggatgattgccaacagctcctttcaacccttttcacctctgaagagaggaaatgtatccgaagagaggccaaaaagtacttcctcacatcagccaatagactggaggaggaagctagagacctccttgaggaggtctttccctccaccyggcctgagacccaaattccttaagtggaaggagagctttagatgattttcaccagtatctcctcatgggtattaagggagccacttggaaacccataaacttgtctaagatgaccgaagttgtccaagggcccga

SEQ ID NO: 933756 - DNA, 633 bp, Homo sapiens
aatgaaaagaaagctttaactctgcgaggtgaatgcacacatcacaaggcagtttctcagaaatcttctttgtagtttttacctgaagatatttcctttttcatcataggcctcaaggcactcccaaatatcccttcatggattctgccaaaactgtgtttctggactgctgaaggaaaagaaaggtttgtctctgcgagatgaatrcacacttcacaaagcagtttctcaaatagcttcccactagatttttccttggatatttgctttttcaccattgatctgaaagaactccaaaaagtccattcacagaactgacaaaaacagtgattgcaaccaactgaatccacagaaagtttgaacactgtgagatgaatgcacacatgacaatgcagtttctcagaaggcttctttctagtttttatctgaagatatttcctttttcaccataggcctcaatgtgttcccagatatccctctgcagaatctatgaaaacattgtttccaaatttctgaatgaaaataaaaatttaactctgtgaaatgaatacacacaacacaaagcagtttctcaaatagcttccctttattttttacccttagatatatgcatgtttgccattgtcctcaatg

SEQ ID NO: 933757 - DNA, 677 bp, Homo sapiens
gtggtgcacacctgtaatcccagctactcaggaggctgagacatgagaatcacttgaacccgggaggcggaggttgcagtgagccaagatcatgccactgcactgcagcctgggtaatagagtgagactttgtctcaatacattaaattaaattaataaataaaataaaagaacaatcagaaggctggtgcaggaggwaagtagtagaggagacaaactggggtcaggttggagattatttggggcatgaataaaagcatttatattgattctggaggcagattagagaacaagtacatacagaggtgtgagaggctaagtgtatcatcttgaataaagtcaaacttctctttgtgttggcattcatcctgtctgccaagtataatagctgagtgtaacccaaggcattttagaaatgttagaagtgtcaggaaccatgtaccacacatagacctcaaagcaatgttgctatattagtcttttttctttaacttacctgtaatcataaaatattgatttaaaaaccaagactactaatatttcacaacactatattcacttctaacatactactgtcaggttaacatttgataattccaattaaaagggtttaaaatttttataggatttaccatggcagtatcccaaggaaacatcgtaccacccagcttggccaa

SEQ ID NO: 933758 - DNA, 620 bp, Homo sapiens
caaatggacgccaaggactactatcatcacaggtgacaagatcacgggtgagtgtatctgggtgtgtgctggggggctgaggggggcttggtggtgtaaggagatggggctagccggggcaaggagcccgcggagatgatcttaagcaatctgagaggaggggtaagaaaaagctgcggaaaataaaggggcctagaccactcctccctcggttccggggggacagttggcgcggaagcgttaggaggtacgaggtacggactaactacatttctgcaggccccaggagggggcggagggcggtggctggaaaggaaaggaagccgggagcgccatccgtgtccccggagatactggctccggccaccaggaaacacagagaccacaacgtctcggcaccctcagtacaccgscgccaccccttccccaggacacggcgatttccccagactctggggggcggggtctccggtccctccccctcctccccgccctgcccggctctgcccgatctggtccggcccggtccagcccggcccggcccagcccagcccactcaggactcacggctccgacagctccggcggctcctcccctgccccggcttctctcccacccac

SEQ ID NO: 933759 - DNA, 620 bp, Homo sapiens
caaatggacgccaaggactactatcatcacaggtgacaagatcacgggtgagtgtatctgggtgtgtgctggggggctgaggggggcttggtggtgtaaggagatggggctagccggggcaaggagcccgcggagatgatcttaagcaatctgagaggaggggtaagaaaaagctgcggaaaataaaggggcctagaccactcctccctcggttccggggggacagttggcgcggaagcgttaggaggtacgaggtacggactaactacatttctgcaggccccaggagggggcggagggcggtggctggaaaggaaaggaagccgggagcgccatccgtgtccccggagatactggctccggccaccaggaaacacagagaccacaacgtctcggcaccctcagtacaccgccgscaccccttccccaggacacggcgatttccccagactctggggggcggggtctccggtccctccccctcctccccgccctgcccggctctgcccgatctggtccggcccggtccagcccggcccggcccagcccagcccactcaggactcacggctccgacagctccggcggctcctcccctgccccggcttctctcccacccac

SEQ ID NO: 933760 - DNA, 596 bp, Homo sapiens
atagagacagaaagtagattagcagttcccgggccctaaggaatggggaattgggagatgacagctaagggataaggtctttctttctggggtgatgaaaatatcctaaaattgattgtggtgatggttacaaaactctatgaatatactaagaccaaggccaggcatggtggctcacgcttgtaatcccagcactttgggaggccaaggtgggcggatcacctgaggtcaggagtttgagacyagcctggccaacatggtgaaaccccatctctattaaaaatacaaaaaaattagccgggcatggtggcgcaagcctttaatcccagctacttgggagactgaggcctgagaatcgcttaaacccaggaggcggaggttgcagtgagccaagatcgtgccactgcactgcagcctgggggacagagtgagactctgtctgaaaaaacaaaacaaaatatgtatttatatatacatacactaagaccatagaattgtatatttaaaatgggtgaattatatggtatgtgaattatatctcaataaagttgtcaaaaaaggtgtaagctgcctgggttcaaatccttgtttaattt

SEQ ID NO: 933761 - DNA, 596 bp, Homo sapiens
atagagacagaaagtagattagcagttcccgggccctaaggaatggggaattgggagatgacagctaagggataaggtctttctttctggggtgatgaaaatatcctaaaattgattgtggtgatggttacaaaactctatgaatatactaagaccaaggccaggcatggtggctcacgcttgtaatcccagcactttgggaggccaaggtgggcggatcacctgaggtcaggagtttgagaccagcctggccaacatggtgaaaccccatctctattaaaaatacaaaaaaattagccgggcatggtggckcaagcctttaatcccagctacttgggagactgaggcctgagaatcgcttaaacccaggaggcggaggttgcagtgagccaagatcgtgccactgcactgcagcctgggggacagagtgagactctgtctgaaaaaacaaaacaaaatatgtatttatatatacatacactaagaccatagaattgtatatttaaaatgggtgaattatatggtatgtgaattatatctcaataaagttgtcaaaaaaggtgtaagctgcctgggttcaaatccttgtttaattt

SEQ ID NO: 933762 - DNA, 773 bp, Homo sapiens
agtgccatcaccatcaccaccaggaagctgattttgaaaaaaaaaaaaatcaaatgtctatgggatcgagcctctagatctaattgtcaaagtacagaaattacatgggacaatgggacagatgaaatgacatcatgaggaagccatcagcaaaatccagacttgggaaaaccctacaggacaaaccacctggtttttccacatcataaaaagaaacagagggaacctgcaaagtacaagagacgtaagagccactttagcctattgcaacctgtggatttagctggatcctgcttcaaagaagcagtaaaaagaaagcacaggctgggtgcaatggctcacgctgtaatcccagcactttgggaggscaaggcgggcagatcacttgaggtcaggaattcaagaccagcctggccaacatggtgaaaccccgtctccactgaaaacacaaaaatcagccaggcgtggtggcaagcacctgtaatcccagctactcaggaggctgagccaggagaatcacttgaccacgtggggcagaggttacagtgagtcgagactgcatcactgcactccagtctgggtgacagagtaaaactccatctaaaaagaaaaaaagaaagcacaggacaaaaggcaaacacaaatgtcaactgcatatttgatattaggcattattatgtttagatgcgataatggtatcatggcacattttttaagaagcccttttctctagacatacacaaagaaatgttcaatgaatgaaatgctatatc

SEQ ID NO: 933763 - DNA, 592 bp, Homo sapiens
tttcagcattattcaaaatagtgaattaataagtccctaaatgttctatagcaaggattggcaaaatttttctgtaaatagctagattgtaagtaatttaggctttgtaggccatatgatttctgtagcaatgtcttactctattcaggctgttgtaacaaagactgtggtctgtgtagcttataaacaacagaaatttatttctcacagttctggaggctgggaagttcaagatcaagatgctggcagattcaatgtcttattagtgcctgcttcatggttcatagatagctatcttctcactgtgtcctcacatggcagatgggrtgagggagctctttgaggtccctttataaggtcattaatctcgtttattaagactccaccttcatggcctaatcagttcccaaaaaccctgccttcaaataccatcacattgggaattaggtttcaacatatttaggggacacaaacattcattctatagcaagcaataactcaactctgctgaagtaatgtatagataatatgtaaatgaatagatatgtatgtgttccaataaaacttttcctatggattctgaaatttgaac

SEQ ID NO: 933764 - DNA, 653 bp, Homo sapiens
gttctcctggataataacctgcagagtgttttccaacttggttccattctccccgtcactttcaggtacaccaatcagacgtagatttggtcttttcacatagtccaatatttcctggaggctttgttcatttctttttattcttttttctctaaacttctcttctcgcttcatttcattcatttgatcttccatcacgataccctttcttccagttgatcgaatcggttattgaggcttgtgcattcgtcacgtatttcttgtgccatggttttcagctccatcaggtcctttaaggacttctctgcattggttattctagttagccattcgtctaatattttttcaaggtttttaayttctttgccatgggttagaacttcctcctttagctcggagtagtttgatcatctgaagccttcttctctcaacttgtcaaagtcattctccatccagctttgttccattgctggtgaggagctgcgttcctttggaggaggagaggtgctctgatttttagaattttcagtttttctgctctgttttttccccatctttgtggttttatctacctttggactttgatgatggtgacgtacagatggggttttggtgtggatgtcctttctatttgttagttgtccttctaacag

SEQ ID NO: 933765 - DNA, 700 bp, Homo sapiens
aatctcccaattgcggtgaaagagaaagtgagtgactctcagcagttcacattcccaccacagactcctgcaattcttgccacaggagagtccttcaacccacacaggccctgagactaacatagggagctacctagagatttcttgaaggaattgctccagaaaggaagctcacaccaggtcccatgcccacccccagtactaagcagctatagcaaagcactattttgagagcrcagtctccaccagaatgccctggagcccaacatctcctgcatcttcacatccctggagccccactgacatcccacacacacagcagggagctgctgctgtctggcactgccagggccaaagtatgagccataggcagcaaccccaccacccccagtagcagggccaccatgcatttaaaaatgccctgaggaaagcctactctgtttatatggctgccaactgtggccaaagagtgtgctccttagttgcctgtttatgcttcttctactgccactgaaagcaaccctctcctccccaggagcagagccacagcacaactgttgccactccaacctaagcattcctccaagagcctggtgattgccctgcctctgcctaccatagcccattaccacacacaccactgggggcctgagaacaggtgtgcttagcctggatccacccacccccatgcccaagcaca

SEQ ID NO: 933766 - DNA, 700 bp, Homo sapiens
aatctcccaattgcggtgaaagagaaagtgagtgactctcagcagttcacattcccaccacagactcctgcaattcttgccacaggagagtccttcaacccacacaggccctgagactaacatagggagctacctagagatttcttgaaggaattgctccagaaaggaagctcacaccaggtcccatgcccacccccagtactaagcagctatagcaaagcactattttgagagcgcagtctccaccagaatgccctggagcccaacatctcctgcatcttcacatccctggagccccactgacatcccacacacacagcagggagctgctgctgtctggcactgccagggccaaagtatgagccatargcagcaaccccaccacccccagtagcagggccaccatgcatttaaaaatgccctgaggaaagcctactctgtttatatggctgccaactgtggccaaagagtgtgctccttagttgcctgtttatgcttcttctactgccactgaaagcaaccctctcctccccaggagcagagccacagcacaactgttgccactccaacctaagcattcctccaagagcctggtgattgccctgcctctgcctaccatagcccattaccacacacaccactgggggcctgagaacaggtgtgcttagcctggatccacccacccccatgcccaagcaca

SEQ ID NO: 933767 - DNA, 700 bp, Homo sapiens
aatctcccaattgcggtgaaagagaaagtgagtgactctcagcagttcacattcccaccacagactcctgcaattcttgccacaggagagtccttcaacccacacaggccctgagactaacatagggagctacctagagatttcttgaaggaattgctccagaaaggaagctcacaccaggtcccatgcccacccccagtactaagcagctatagcaaagcactattttgagagcgcagtctccaccagaatgccctggagcccaacatctcctgcatcttcacatccctggagccccactgacatcccacacacacagcagggagctgctgctgtctggcactgccagggccaaagtatgagccataggcagcaaccccaccacccccagtagcagggccaccatgcatttaaaaatgccctgaggaaagcctactctgtttatatggctgccaactgtggccaaagagtgtgctccttagytgcctgtttatgcttcttctactgccactgaaagcaaccctctcctccccaggagcagagccacagcacaactgttgccactccaacctaagcattcctccaagagcctggtgattgccctgcctctgcctaccatagcccattaccacacacaccactgggggcctgagaacaggtgtgcttagcctggatccacccacccccatgcccaagcaca

SEQ ID NO: 933768 - DNA, 837 bp, Homo sapiens
acttagtataattttaagttcatccatgtggtatgtatcaatacttcactgagaatactgctgctatgaatactggtgtacacatacccattcaagtccctgctttcgattcttttgggtattatatacctagaagtgggtttgctggatggtaattctatgtttaacttttgaagaaccattatactgctttccatagtggctgtaccattttacattcctgccagcaatggacaagatttctaatttctccacatccttgtcaacacttgttgttttccttttttttttttgacaatagtcatcctaatgaatgtgaggtagtatctcatgcatctccctcataattagtgatgttgagcatcttttcatgtgcttattggctatttgtatattttctttggagaaacatctatttaagaagacctttgtccatttttcaattgggttttttgttattgttgagtgtcagaagttctttatatactctggatattaatctcttatcagggccgggcayggtggctcatgcctgtaatcccagcactttgggaggctgaggtgggtggattgcttgagctcaggagttcaagaccagcctaggcaacatggcaaaaccccaccactacaaaaaaatacaaaaatcagccagatggagtggtgtgtgcctgtagtcccagctactcagggggctaagcggggaggatggtttgagcctaggaggttgaggctgcagtgagctgagaatgtgccactgcactccagcctgggcaaaagagcaagaccctgtctcaagtaataataataataataatctcttatcagatatataatttg

SEQ ID NO: 933769 - DNA, 598 bp, Homo sapiens
agaccacagccagactgcttcttcagtatagaccctgacccatccctcctgactgggtggggccaccctgcaggaactccagccaggggctcaggggtagaactctgatctccctgggcctgagcccctatggggagggtggccataatctccatggaccaacagacttagtctttcctcctactagctctgaagaatctgggcgtccagatgcatgggtttccccccagagcagcacaccccctccaccaaaggatagccaaagtacttcattaaatgggtcctgtttcccatgccaagtgggtgagaccccccaaaagaggttgtcagatgccctatacagaagcattcctactggcatcaggtgggtgccactcaaggtcagagatcccagaggaaacagcagacatccatctttgctgttctccmatctcctcaagtgacgtttctaggcatgggagcatattaatagggcctgaagtgaacccccagcaaaccacagtagccctacagaagagggacctaactatagaaagaaaaacaaaaaagcagaaagcaacacaacagcatcaacaaaaaaagtccccacaaaaacctc

SEQ ID NO: 933770 - DNA, 542 bp, Homo sapiens
tattctagcactattagatttgccagatgaaaaatacaaagaccagttcaacctaggggataatcaatttttcatgctcattatcatttagatgagtctcttataagggaatggtttcagcatgacgcattttaatgctgagtaacacctcattcctctaggtagtgaagagggagccttatatatgctctcagcgaaaatgttaagatcttaaattacagaataaagaggaaatcaaaaggaaatttgtgaaaacaaaatgagagccagagaaatrgtaaaatttattgccagaaaacttttcagtttgatcagtttttatagttccttaaccttcatcgttctttgtatgcctcctgcctgtcctgaagggaaaaagaaaagcattcaaagcttaagcactttattaaaccttttatagcttgacaccatttggaaccatttcagtatttcatattgaagacaaagacatgtctttctgaaaaattaaaatgaaaacagacccaattacagtggcttcagcagtcttggctgagggctga

SEQ ID NO: 933771 - DNA, 611 bp, Homo sapiens
atggctcatgcctgtaatcccagtgctttgggaggctgaggcaggaagacctcttgagtccaggagttcaagaccagcctgggcaatacagcgagaccctgtctctacaaaaaaacaaaaacaaaaacagccgcgcatggtgrcgcacgcctatagtcctacctactggggaggctgaggcagaaggatcacttcagcccaggagtttgaggctatagtgagctattgtcacaccattgcactccagcctgggcaacagagtggggccctgtctctaaaaaaaataaaattaaaaaaagggaaagaatgaacataatcagaataaaggtggttggcaatcaaataccatcagcactatcacagcactcttcactgcccttaactctctcctttcattctcctttcatcgtggaccggtcgaaactgtattgaggactatctcagtaagaatgcaaagttccagtttccccatcttcaccactgtggcatgcaaacaatgtgccagcggacccacccacaaggaggccaggcatgaagctccctttcttcccagactgatgggcttctgacagttctcttagcctagagaaaatggaaaacaacagtaggac

SEQ ID NO: 933772 - DNA, 621 bp, Homo sapiens
actcctttcaaccaatattcagtcaaagagtgaaagaaactttctaaatgctggtcccgccatgactctactgccacagctctggtgcttccagttaaatgatgaatttctcctgcttcccagcaccctgaatatctaagcctttcagttcatttgcaaatgaagattaatttacaatttacatgctagagtcatgtttactgctccagcatacagccatctatgcttgctcagagttgatagaaacagtgccaaaaactgctgtatcactcakggtccctgcaggaaaagacggcacaaattgtgcacctgaaggaacttagtaatgggattatttacacaggtttgggtaaggtgcagggaggggagctagtcacagtgaggagccttaggtcagaagggtcaaagggaaggactgtttactagaacccagagagaacagctattgggagaaggtccctcccaggagtggtggctttcagtagagggacaaaaccaatccaacaaccccttggcctattaatgcacgacacataagcagatagaaaagggtaggaactggacctgaagggcaggtggaaaatgccctgtgcagtatctaatggttggagaagtttcaac

SEQ ID NO: 933773 - DNA, 660 bp, Homo sapiens
cagcccatggtacatattaagcaaatcaactttttcttgtaatgtcatgacttttctctgctccttgggaatatttccagcatcactattagcacttcatatgggtcccattctgttactcaagatttacgatattacactaaaaatgatttttttaatacatgagaaaaatgagatacaactttttacagacatacagtttactggagaaatgaactgttcatgcagagatgactagcaccacaggcattttaagcagatactrgcaatcatagcagcaggcaatagacaaattcctagggagacagggatgggtccctagcgaaatctgaccttcaaaccaaaatcagcttgaagcctgaaaaccaagctgccagttacaggtggagtcagtgactggagtgaaaacttcctcaatgccttttagccaatcaaatcatgcttttttgaggcctacccatagaacaatcagcatgcactcccctattttgagcccataaaaatcctggactcaacctcacagatggctaaccactttcaggccccctctcacacagagggctttcaggtcgcctcttgctgccgagagcttttctgtcactcaataaaattctcctctgccttgtgaaccctctggttgccacgtacctcattcctctt

SEQ ID NO: 933774 - DNA, 660 bp, Homo sapiens
cagcccatggtacatattaagcaaatcaactttttcttgtaatgtcatgacttttctctgctccttgggaatatttccagcatcactattagcacttcatatgggtcccattctgttactcaagatttacgatattacactaaaaatgatttttttaatacatgagaaaaatgagatacaactttttacagacatacagtttactggagaaatgaactgttcatgcagagatgactagcaccacaggcattttaagcagatactggcaatcatagcagcaggcaatagacaaattcctagggagacagggatgggtccctagygaaatctgaccttcaaaccaaaatcagcttgaagcctgaaaaccaagctgccagttacaggtggagtcagtgactggagtgaaaacttcctcaatgccttttagccaatcaaatcatgcttttttgaggcctacccatagaacaatcagcatgcactcccctattttgagcccataaaaatcctggactcaacctcacagatggctaaccactttcaggccccctctcacacagagggctttcaggtcgcctcttgctgccgagagcttttctgtcactcaataaaattctcctctgccttgtgaaccctctggttgccacgtacctcattcctctt

SEQ ID NO: 933775 - DNA, 660 bp, Homo sapiens
cagcccatggtacatattaagcaaatcaactttttcttgtaatgtcatgacttttctctgctccttgggaatatttccagcatcactattagcacttcatatgggtcccattctgttactcaagatttacgatattacactaaaaatgatttttttaatacatgagaaaaatgagatacaactttttacagacatacagtttactggagaaatgaactgttcatgcagagatgactagcaccacaggcattttaagcagatactggcaatcatagcagcaggcaatagacaaattcctagggagacagggatgggtccctagcgaaatctgaccttcaaaccaaaatcagcttgaagcctgaaaaccaagctgccagttacaggtggagtcagtgactggagtgaaaacttcctcaatgccttttagccaatcaaatcatgctttttygaggcctacccatagaacaatcagcatgcactcccctattttgagcccataaaaatcctggactcaacctcacagatggctaaccactttcaggccccctctcacacagagggctttcaggtcgcctcttgctgccgagagcttttctgtcactcaataaaattctcctctgccttgtgaaccctctggttgccacgtacctcattcctctt

SEQ ID NO: 933776 - DNA, 628 bp, Homo sapiens
ctgcacccggcttgtgttgttaatgctgcattcctagggctaaacgctgtgttgtgaacaaattcagtttaactcaattcaactcaagaaatatttattgagcactaattttttgttaggccttgtgcctgggccctaggaatatgatgctgtgtgagataggtctttgccctcttagcttcttccagcttttcagacttgattcttccttctctatgctttcattgcagcttaaacacacctctactattggaatttttatgctgatttatatattttttaatgtgtctgtgcttctctctaaagtgtgayattgaggacaggaacagcctttaatcattttctttctttttttttttgagatggagttttgctcagttgcccaggccggagtgcaatggcgcaatctcagctcactgcaacctctgcctcctgggcctcccgggttcaagcgattctcccgcctcagcctcctgagtagctaggattacaggcacccgccatcatgcccagctaatttttgtatttttagtacagacggggtttcaccatgttggccaggctggtcttgaactcctgacctcaggtgatccacccaccttggcctcctaaagtgctgggattacag

SEQ ID NO: 933777 - DNA, 562 bp, Homo sapiens
aatcttttccactgaagttagggatgactgtgattttcagaacacgtccagaatttttcatcaagaaggtagcttgagcctgaaatgcaaaacccatggaggaattctgaagccattgtctccttgagtaccaacagggtcagggaagactgggcctcctgaatttattattgttctttaagaattacaggttgaggtagttgatggtggtaaacattctctcaggagacaataactccagtgatgttcttcaaagattttagcaaaaacagagtaaatagcattctctatcaatatataaatttaaaaaactatctttttgcttacagttttaaatyctgaacaattctctcttatatgtgtattgctaatcattaaggtattattttttccacatataaagctttgtctttttgttgttgttgttgtttttaagatggagtttccctctgttgccaggctagagtgcagtggcatgatctcggcttactgcaacctttgcctcccaggttcaagcgattcttctgcctcagcctcccgagtagctgggaccacaggtgcc

SEQ ID NO: 933778 - DNA, 585 bp, Homo sapiens
atgtcctaagccaaaggctctgggttagtgtgggtcacctggctattgatgttcactggacatgaaatgagtgagactaatttatctctatatcccatgtgtccagtatagagcctggcacatggtagttgataattcagagtgttttaaaaaacaaataaatgaataacattgttgcttccccacatgtaatgttgccttgccccttyttcagaataaggggaaggaagctgtcttttattttagatcaaatatcctgaaaatagggaaattagtttttgaggacttgataatttctctcaagtatgcccttcttcacttcctggaccatggcactgttcccttggtaatatccatagaacattttctgatgaatgctcttctcaaagacaagatcttgcacttgaaaaaaaaaaaaaaagcagagagactgggcagtagtgcatgcctgtagtcttagaactttgggaggctgaggtgggaagatcacgtgagcccaggagtttgagaccagccgaggcaacacagtgagaccctacctctacaaaaaaaaaaaaaaaaaaaaaaaaaaaaaaaaaaaattaa

SEQ ID NO: 933779 - DNA, 585 bp, Homo sapiens
atgtcctaagccaaaggctctgggttagtgtgggtcacctggctattgatgttcactggacatgaaatgagtgagactaatttatctctatatcccatgtgtccagtatagagcctggcacatggtagttgataattcagagtgttttaaaaaacaaataaatgaataacattgttgcttccccacatgtaatgttgccttgccccttcttcagaataaggggaaggaagctgtcttttattttagatcaaatatcctgaaaatagggaaattagtttttgaggacttgataatttctctcaagtatgcccttyttcacttcctggaccatggcactgttcccttggtaatatccatagaacattttctgatgaatgctcttctcaaagacaagatcttgcacttgaaaaaaaaaaaaaaagcagagagactgggcagtagtgcatgcctgtagtcttagaactttgggaggctgaggtgggaagatcacgtgagcccaggagtttgagaccagccgaggcaacacagtgagaccctacctctacaaaaaaaaaaaaaaaaaaaaaaaaaaaaaaaaaaaattaa

SEQ ID NO: 933780 - DNA, 585 bp, Homo sapiens
atgtcctaagccaaaggctctgggttagtgtgggtcacctggctattgatgttcactggacatgaaatgagtgagactaatttatctctatatcccatgtgtccagtatagagcctggcacatggtagttgataattcagagtgttttaaaaaacaaataaatgaataacattgttgcttccccacatgtaatgttgccttgccccttcttcagaataaggggaaggaagctgtcttttattttagatcaaatatcctgaaaatagggaaattagtttttgaggacttgataatttctctcaagtatgcccttcttcacttcctggaccatggcactgttcccttggtaatatccatagaacattttytgatgaatgctcttctcaaagacaagatcttgcacttgaaaaaaaaaaaaaaagcagagagactgggcagtagtgcatgcctgtagtcttagaactttgggaggctgaggtgggaagatcacgtgagcccaggagtttgagaccagccgaggcaacacagtgagaccctacctctacaaaaaaaaaaaaaaaaaaaaaaaaaaaaaaaaaaaattaa

SEQ ID NO: 933781 - DNA, 664 bp, Homo sapiens
aatctcttgggggtacagtctgaagatacgttcccataatagtggctgcttggcaacaggaacatgcttaagggtcagtcttcatgtcctaagccaaaggctctgggttagtgtgggtcacctggctattgatgttcactggacatgaaatgagtgagactaatttatctctatatcccatgtgtccagtatagagcctggcacatggtagttgataattcagagtgttttaaaaaacaaataaatgaataacattgttgcttccccacatgtaatgttgccttgccccttcttcagaataaggggaaggaagctgtcttttattttagatcaaatatcctgaaaatagggaaattagtttttgaggacttgataatttctctcaagtatgcccttcttcacttcctggaccatggcactgttcccttggtaatatccatagaacattttctgatgaatgctcttctcaaagacaagatcttgcmcttgaaaaaaaaaaaaaaagcagagagactgggcagtagtgcatgcctgtagtcttagaactttgggaggctgaggtgggaagatcacgtgagcccaggagtttgagaccagccgaggcaacacagtgagaccctacctctacaaaaaaaaaaaaaaaaaaaaaaaaaaaaaaaaaaaa

SEQ ID NO: 933782 - DNA, 598 bp, Homo sapiens
gtggagaaataagaatgcttttacactgttggttagtgtaagttagttcaaccattgtggaagacagtgtggcaattcctcaaggatctagaaccagaaataccatttgacccagcaagcccattactgggtatacacccaaaggattataaatcattctactgtaaagacacatgcacacttaatgtttattgcagcactattcacaatagcaaagacttggaaccaacccaaatgcccatcaaggatagactggataaagaaaatgtggcacatatgcaccatggaatactatgcagccataaaaaaggatgagttcttgtccttttcagggacatgaagcyggacaccataattctcagcaaactaacacaggaacagaagcgcaaacactgcatcttctcactcaaaagtggaagttgaacagtgaaaacacatgggcacagggagggaacatcacacactggggcctgttgggtgttgggggtcctaggggagagatagcattaggagaaatacctgatgaagacgatgggttgctgtgtgtagcaaaacactgtggcatgtgtatacctatgtaacaaacctgcatgttctg

SEQ ID NO: 933783 - DNA, 636 bp, Homo sapiens
ctgtggttctgtaggcagaagagacaacaatgtcttcatttcagatgacatgcctgtatatccagaccatcaaagtaagcctactattagaattaaataagaaaattttattaaataggcagataaaagtgaatttacaaaattaatatctttgagctagtagtaaaaagttggaagctaaaaagttttatatttcattcatacattaaaaattataacatattggccrggtgcggtggctcatgcctgtaatcccagcactttgggaggccgaggcaggcagatcatgaggtcaggagatcgagaccatcctggctaacacggtgaaacctcgtctctacgaaaaatgcaaaaaattagccaggtgtggtggcgggtgcctgtagtccaagctactcgggaggctgaggcaggagaatggcgtgaacccggcaggcggagcttgcagtgagcagagatcacgccattgcacttcagcttgggcgacagagtgagactctgtctcaaaaaaacaaaaaaattataacgtatttagaaataaatatgttatttagcttgtcttttgtttatatatttttctataactgtcaattattattaacataaagcatgaataaatggagagatagctcatgt

SEQ ID NO: 933784 - DNA, 596 bp, Homo sapiens
cttactatcctctgattatagccatcctgaggactgcaggatgtatccctaagaggtggcccattctatttccacaagagaatattgaggttttatttctatcacggggcactcccagatcagtgggacttcaaatgggtcagagacctggggcccacttgctgctgattaaactgcttggtctgccagcctatttccctcaactatttcatctgtccctctttggyagtctttacaatgtattattgccacttcctgtgggaggaaaactgaggataatagtctattaattttctgattatatttaataggagacccattagctatgaggaagttcctctttccagatagtggtatgggcatcgaggaccaggaaagcatacttagaatcaatataaaagttaacgtttttcctttgcttaattcgagcaccctcgtgagggtgattagttcaactagctgaccatttgtgcccaaggagagaggtgcactctcaacaacatcattcagagtaactattgcataccctgctctgtgagttcctttttctacaaaaaaaacttccgtccataaacggaatccagtctgggttatct

SEQ ID NO: 933785 - DNA, 606 bp, Homo sapiens
tggagtttgctggaggtcatctccagaccctgtttacctgggtatcaccagcagaggctgcagaacagcaaatattgcagaagagcaaatgttgctgcctgatccttcctctggaagcttcatcccagaggggcactcacctgtatgaggtgtctgtcagcccctactgggaggtgtctcccagttaggctacacggggaacagggacccacttgaggaggcagtctgtccattctcagagctcagaaaccatgccaggagagccattgctctcttcagagctgtcagacagggacatttatgtctgcagaagtttctgctgtcttttgttcagctatgcctgyccccagaggtggggtctacagaggcagcaggccttgcagagctgcagtgggctctgcccagttcaaacttccccagccacattgtttacctactcaagcctcagcaatggtggacgcccctcccctaccaggctgctgcctcagactgctgtgctagcagtgagaaaagctgtgtgggcttgggatccaccaagccaggtgcgggatatgatctcctggtgtgccgtttgctaagattgttggaaaagcacagtatttgggt

SEQ ID NO: 933786 - DNA, 606 bp, Homo sapiens
tggagtttgctggaggtcatctccagaccctgtttacctgggtatcaccagcagaggctgcagaacagcaaatattgcagaagagcaaatgttgctgcctgatccttcctctggaagcttcatcccagaggggcactcacctgtatgaggtgtctgtcagcccctactgggaggtgtctcccagttaggctacacggggaacagggacccacttgaggaggcagtctgtccattctcagagctcagaaaccatgccaggagagccattgctctcttcagagctgtcagacagggacatttatgtctgcagaagtttctgctgtcttttgttcagctatgcctgcccccagaggtggggtctacagaggcagcaggccttgcagagctgcagtgggctctgcccagttcaaacttccccagccacwttgtttacctactcaagcctcagcaatggtggacgcccctcccctaccaggctgctgcctcagactgctgtgctagcagtgagaaaagctgtgtgggcttgggatccaccaagccaggtgcgggatatgatctcctggtgtgccgtttgctaagattgttggaaaagcacagtatttgggt

SEQ ID NO: 933787 - DNA, 610 bp, Homo sapiens
tcgggccctgtattttattttatttattaatttttttgagatggaatctcactctgtcacccaggctggagtgcagtggtgtgatcttggctcactgcaagctccacctcccaggttcatgccattctcctgcctcagcctcccaagtagctggtactacaggcacctgccaccaygcccggctaattttttgtatttttagtagagacggggtttcaccgtgttagccaggatggtcttgatctcctgacctcatgatccgcccgccttggcctcccaaagtgccgggattcaggcatgagacactgcgcccagcccagtccctgcatttttaacctccttgtcaaatttgtttcctccaggatcgaggccatcaagctacagatggtcttacaaatggaaccccaaatgagctcaattcacaacttctacgaaggacccctggatcaacctactggccctttgactggcctaaaaagttcccctctggaggacactacaactgcagggccccttctttgcccctatccagcaggaagtagctagatcagtcatcgcccaattcccaacagcagttggtatgtcctgtttagagggaggattgagaagt

SEQ ID NO: 933788 - DNA, 751 bp, Homo sapiens
ggaatgcagtgtagatgcacatatagatggccttccaggaacaatttagggtgattgcatccccacaggaggagcacttctcaaattcaggcttgcagagtcacaactcctctctacttggaacatcaacattcctacagatgcaaagagttacctgtctgatctgaatagctggaatactgggacaggaaggtggatagctttcctgcttgcctggcaggggagctgaggtggcttccacccttcactctgataaaacctcagcacatttaatttagagctcccccaggcaccttcatcaaggctgggacctctgcccaccattagatatatctaygcatctctttagctaccaccaatacctaccccagggatacctctcctattggcctgaaggctgaatcatcagcttagtaaataaaatactgggaaaaaattaaataaataaaaaggtgtacaccatgggagaatgagataagcttcaagagatcctagccattccaaccctacaggagacagtgaacttacccacaggccaaatgcatggttactgcaaccagcgtctgggaaagccagcgcacaaaaactctctttaaggaactcctacagagtcttccccactaaaagcattaagaatcaaattaggctataataaatgataaacattaaagtcagatccttaagagggaaaagaagaaattaaagaaaaaaacacagtcaaatcaaaaataaatttaagaacaatttgaag

SEQ ID NO: 933789 - DNA, 638 bp, Homo sapiens
tgtttacacaactttatattttcatcacttttgttggaattactaggagtcacagggtaggcacacggtttaagcttctttaaaaagtagtataacattattgaaagtggttgtgcaattttacacccctgccgacattggtatgaatgcttcaggagctccacagcctcggcagtaactgatgttgggaaattttgtctgtcatttaaatcactcgagtgggtatgcggtagtaattcattttggtttctctggtgaagagtgatattgagatgttaaaagtttgtttattgatcattcatgaattttttttccaaaatgttcattgagtcttttgctcattttttacattgaattttttgtcaagtctcttgtcagataaatgtattgcaartgcctgtggctcacttcatatttttcttggtgattttgaaaaacaaaagtttttgagtcaggtaaaaaatgaatttattaatttattattatatgggtagtgccttctgtgtgctaataaatccttgaatattccaatatcatgaagactttatcttaaagttttcttcttgggttttgtagttttagcttttatgttttgtttatgtttcatttcaaatacttgtgtatgtgtgatgtgaggt

SEQ ID NO: 933790 - DNA, 765 bp, Homo sapiens
ttttcaaagtaatactaagcaaaagtacacaggcagaaaaatgtgatcatcctgaacttttatcacacatcaaaatttccctcctatatttttagaaccatttcagtgaaaagtgtagaatggcatcgctaatgtttataggcaaagaacagaatcattaggatttgagacacgttttcagaaaagtgcctttaaataattaacgtcatgacactcttcctcagttcttcatccagcagagtaaatgtctcttgacaggtaatagtcctttatgtgaagcagtaactccagtttggtcaaggtaactagtgttattgaaaagcatgctttaattaaatgcaatgtcttagaaaaccatgctgtttacaagcaataaacaactcttaaatattcaattaatcagctatcaacccaaattcataaaagacccacatactacttctatgctttaaaaaggaaaagagacatattaagaatgaaagcagattaaagaaaagagctaatcaaaaaataagaaaccaggaaatgacattgtcaatagtgagcacccgttttggagtgtgcgctatgaatttgctggctccgacagtaagtattcytacatgggctttctcatttagcactaccctaaatcctgtgaggtggttattggcatccttccattagatgaagaagctgaggttcagagacgttaagcatcttgtccaaaggcagttgctcttaaatggaaaaactaaaattcctatctggaactctctgaatccc

SEQ ID NO: 933791 - DNA, 444 bp, Homo sapiens
caaattattaatagaaaatggtgccccccttgaggccacttgatgagctgaggcattgagggccatgtatagttttttgttgtatattcttctttgcctttttaaagaataaccttctaaaaatgtaaaaaaaacactcttcactcataggccacacagaaaacattccacagggtcgaattggctcacagatagcaatttgccagcctctgctctgtatcttgattaggtgctggttgcatggatatatatatatttgtcaaaactcactgatcaatacacttaagacctatgctttttactatatgtagtctcaataaaatatagaacagttcttgacagttgagttaatgctcaaatgaatgttaatgttawtttagcttcatataatgacatactttatttttaattataacaaagtattattattctgcattataaaac

SEQ ID NO: 933792 - DNA, 500 bp, Homo sapiens
taacactattagcattttggtcaaagccgttcaacaagtctctaggaaattccaaacttccccacattttcctgccttattctgagctctccaaactcttccaacctctgcctgtttctcagttgtaaggtcgcttccacatctttgggtatctttatagcaccaccccactctctgcgatactaatatctgtatgagtcagggttccctagagggacaggactaacagtgaaaccatctttgcaaaattatgactgagacagtgaaagagatctagcttaaccgactccatctcgtttctaacctccaagctgtccttgttcattgctaggcataggctgaactaactttragagaaacttagtttatactttgtagtttaaacaaagccgatacacaatcctttaacaaggcagacctccttcttgcctggggactagattacctttgtaggactaacaacattagccacaaagttagtaattatggtttaggagtca

SEQ ID NO: 933793 - DNA, 745 bp, Homo sapiens
tgcctgcagaacaagagacagatctgggggaggctgcatcccagggagcctcttgggtggcagcacagggggtgctgaatcttatacttggggcagtcggctatgtgcttggagcaggggacactggcagggagttgggctccagggaaccagagtccagggagtgagaggcagggtctcgcaggaagcagaggcatgctcagaaggggaactggagagagagagggtcccagaaggactgtgtgcaggggtgaagcccaggtgaggggactagctggggatggtgcacttgggctggcaagagtgggagctaaagggataagggggggatgcccggggggatggatggacaaaggctagggtctggggatccgagggagggggcagcaggccccttgcagcctgaggtgtgcaccgccacatggcyccaccctggaacacagcgtggccctgaggaggaggaggggagactgccctggtgcacgatggagaaagctctggaatgtaccattaagtgagcaaagcagggtgtgagagtacacatctcacactactttgggtaagaaagggcaggtgtaagtacgtatattcttatttaatttgtcagcaaaaagaagcaggaaggaaacagttgtctcttaaaatggtcccttcagagggagggcaaggggcagggcctccagtgcctgtatgcttcctcagggcagacctaggaatattcctgagggttctgaaccctgtcaat

SEQ ID NO: 933794 - DNA, 591 bp, Homo sapiens
ctctcaagagattattaagaaataaaatgggattctcaaacattaaagtatgccagatcttctgggactccagccagctacatattatggcctgttcttatgcacattttcatttttaaatatatatctatatatatatatatatatatatatwttttttttttttttttttgagacagcgtttggctcttgtcacccagactggagtgcaatggcgcaatctcagctcactgcaaccttcgcctcctgggttcaagtgattctcctgctttagcctcccgagtagctggaattacaggcatgcaccaccatgcccagctaatttttgtatttttagtagacacagggtttcatcatgttgacaagactggtcttaaactcctgtcctcaagtgatccgcctgctttggcctcctaaagtgctgggattacttgcatgagccatcatgcctggaacttatgcacatttataaactgatgggcaaaattacatcaaaaaaaattcagagctcaaatggtcattatttgaaaaatctgcaactatacattaacatgtagagtgttctaaattctttgtctatttttttctgcc

SEQ ID NO: 933795 - DNA, 655 bp, Homo sapiens
ggaacatgcctgtactcccagctacttgggaggctgaggtgggaggaccacctgagcccaagaggtcaaggctagagtgagcagtgagttcaccactacactccagcctgagcaagcttaagaccctgtctcaaaaaaaaaaaaaatacgctatttaagcatgaggtctcagaaaaatagagattcctgcaaggtatttgataatgtccctcaaattcactagggcaaaaaataagtagctcttatcttgagaatatcatttayagatttagagacaacactgaggtgcaataaattttctcctagtaatattacgatctgcaaacttgtcaacatttctgtaatatccccttttaggaaaaaacatcctacatggggaggacagataattctctgtccttgaaccaaaggtccttctctggaaaggttgccttttttgacttaaagtccaatcctcagaaagaacacacatgaaatctacctgcttagtgagacaggtccccagaattgagcctgatacacatggggactgggatgtgatagacaggatgtctcactggggcagggaaagaatcacacatctgggttatgctggagagattatgtcaccaatttttaatatgatagaactaacattgatatcagagatctagat

SEQ ID NO: 933796 - DNA, 590 bp, Homo sapiens
attgtaaaactactggaagagaatatagggacaaaactcaataacatttgtttgggtgataattttttggatatgaactcaaaagcataggaaacaaaatcaaaaagagatacatgggattttgttaaattaaaaagcttctgcacagccaaggaaaacatcaatataagcagacaacctacagaatgggaaaaaaatatctgtaaatcatgtatgtgctaaaggggattaatatccaaaatatacaagaaactcaaataattcaacagtaagacaacaacccaattaaacattggtcaaaaaatctgaatagatatttcttaaaatttacaaatggtcaacagcaatctgaaaaaaaaatgctcaatrtaactaataatcagagaaatgcaaatcaaatccacaatgagttagcactatactaatgttagaatggttattatcaaaaagacaaaagataacaagtgttagtgagacatggagaaaagggaacactgaacccagttggtgagagtgtaaattagtatagccattatgaaaaacagaattgaggttcctccaaaaatcaaaaacagaactaccacatgatc

SEQ ID NO: 933797 - DNA, 628 bp, Homo sapiens
tatgtgaaacctaatagaatttaaataataatttttgttcattaatttatctgttattgagtactaaacaatgttctacgtgtaatgtgtgattgagtactaataaaaattctatgttctaggtgtaatagagagaaataaggaaaataaactgaaaatgaaatgactactataacaatggcatatgtgggggttattgagttgcaaaggaaaaaaattctttctgacaagatcaggagatgacttcctatagaaaaatgcaaagttaaacaagattgtcatttaaattacctcaacttgattccccttgggggatttctacttaataattttctttctattttggtacaggccagcaaaactgctcagactactaaaggagcatatttgtgggcactgtctgactcgtatgaagatgcacatrtgagaatgtaggtattcagatcgaaaccagataaatgtatttttcaatgctgtaattttgaaagatgagcctaacagaaaagccatcttaacataaaagtatatctaattctttatgactttgaatttgttgcatttaattttcattacaaatattatgtaatttggcttctgaaattaatatatacaaatgttatatattttc

SEQ ID NO: 933798 - DNA, 628 bp, Homo sapiens
tatgtgaaacctaatagaatttaaataataatttttgttcattaatttatctgttattgagtactaaacaatgttctacgtgtaatgtgtgattgagtactaataaaaattctatgttctaggtgtaatagagagaaataaggaaaataaactgaaaatgaaatgactactataacaatggcatatgtgggggttattgagttgcaaaggaaaaaaattctttctgacaagatcaggagatgacttcctatagaaaaatgcaaagttaaacaagattgtcatttaaattacctcaacttgattccccttgggggatttctacttaataattttctttctattttggtacaggccagcaaaactgctcagactactaaaggagcatatttgtgggcactgtctgactcgtatgaagatgcacatgtgagaatgtaggtattcagatcgaaaccagataaatgtatttttcaatgctgtaattttgaargatgagcctaacagaaaagccatcttaacataaaagtatatctaattctttatgactttgaatttgttgcatttaattttcattacaaatattatgtaatttggcttctgaaattaatatatacaaatgttatatattttc

SEQ ID NO: 933799 - DNA, 564 bp, Homo sapiens
aaaaaagaaagaaagaaactcaaataactatcaaattctgtcttttgatgatataaccaagatctaaagaaaaaccacataaacaaatcttgaacttcaatgagaaagattgttttcctcagtagcaggggttagagtagtgtattgtagaattgaacaaatgaataaatatattgaagctaatgagagctaggggtttcattattaaagaatagagttctaatatgaaaagaaggaagactggaatgaaccttgtagtgtgaaattggaattgccgctatcagtattaayacttggtgcctgtgtgtgtgtgtatgttcatgtgtatgtgcatatcttagccctgtgcactaaaagggcctagaagcaaacatatcccaagtcaatgagcatatctagcatctaagccttggtttctcaattcaaactcctactaaaatgatcaatggaaccttggagaaatgtctggttccaggactggggcattattttgtgtgccagaaggcaaggaagtactaaaaaaaaaaaaaaaaaaaaaaagaataaggacatgtccaggggaca

SEQ ID NO: 933800 - DNA, 423 bp, Homo sapiens
ggctaaaaggggccaatgcagagctcgggccatggcttcagagggggtaagcctcaagcctcagaagcttccacatggtgttgagcctgcaagtgcaccgaagtcaagaattggggtttggaaacctctacctagacttcagaagatgtatggaaacacctggatgtccaggcagaagtttgctgcagggatggggtgctcatggagaacytctgatagggcagtgcaggagggaaaagtggggttggaacccccacacagagtccctactggggcactgcctagtggagctgtgagaagagggccaccaccctccagactccagaatggtagatctaccaacagcttgcaccatttgcctggaaaagccacagacactcaataccagcctgtgaaagtagctgagaaggaggctgtactctg

SEQ ID NO: 933801 - DNA, 482 bp, Homo sapiens
cctgactgttagaaggaaagctaacaagcagaaaggacatccacaccaaaaccccatctgtacatcaccatcatcaaagaccaaaggtagataaaaccacaaagatggggaaaaacagagcggaaaaactgaaaaatctaaaaatcagagcgcctctcctcctccaaaggaacgcagctcctcaccagcaacggaacaaagctggacagagaatgacttcgacgagttcagagaagaaggmttcattcagacaatcaaactactccgagctaaaggaggaaattcgaacccatggcaaagaagttaaaaaccttgaaaaaaaattagatgaatggctaactagaataaccaacgcacagaagtccttaaaggacctgatggagctgaaaatcaaggcacaagaactacgtgatgaatgcacaagcctcagtagctgattcgatcaactggaagaaagggtatcagtgatggaagatgaaatg

SEQ ID NO: 933802 - DNA, 582 bp, Homo sapiens
ttagaatttcagttcactgaaatcaggtaaaatgtctgatttgtgttattatatcaaatacttctgttttttgtcaactttcatacttcagattatacatccttccttcctcatcttccttatcccataacttgaggggcaaatgctaaagagcctcatttgcttagttatgagaatttgtaactgaagggaacttyttctaaacgtcctcctcaatagttcatacgtctgtctcctggttgtctgctgcttctcattagcattgtttgtcattaataaattaacctcaacatttagtagatcctattttaaaggagactagttactactgtgtaagctattatatttcttactgttttttgtttaagtctgttttcctgtttatttttccctaacaagctacccaaaggtgagtggcttaacagcaacatgtatttagttcaccaatctgtggtttggaaaatccttgtccaggacaaccttctctgctcccctcagcttcacttgcagtcaatcaaatgttgggggactggaatcatctgaaggtctggtcactgatatgtctggttgttgacagtggct

SEQ ID NO: 933803 - DNA, 582 bp, Homo sapiens
ttagaatttcagttcactgaaatcaggtaaaatgtctgatttgtgttattatatcaaatacttctgttttttgtcaactttcatacttcagattatacatccttccttcctcatcttccttatcccataacttgaggggcaaatgctaaagagcctcatttgcttagttatgagaatttgtaactgaagggaacttcttctaaacgtcctcctcaatagttcatacgtctgtctcctggttgtctgctgcttctcattagcattgtttgtcattaataaattaacctcaacatttagtagatcctattttaaaggagactagttactactgtgtaagctattatatttcttactgttttttgtttaagtctgttttcctgtttatttttccctaacaagctacccaaaggtgagtggcttaacagcarcatgtatttagttcaccaatctgtggtttggaaaatccttgtccaggacaaccttctctgctcccctcagcttcacttgcagtcaatcaaatgttgggggactggaatcatctgaaggtctggtcactgatatgtctggttgttgacagtggct

SEQ ID NO: 933804 - DNA, 728 bp, Homo sapiens
cctgcctcccattctattcagttgtccctctgctcattgagatagatgcgtatagtatctgattgcctcctttggaaaggctaatcagaaactcagaagaatgcaattgtttgtctctcacttatctgtgacctggaagccccctcctgcttcaggtcttctcaccttcacttcgagttgtccagcctttccagactgaactaatgtacttcttacatgtattgattgatgtctcatgtctccctaaaatgtataaaaccaagctgtgccacaaccaccttgggcacatgttgtcaggacttcctgagactrtgtcttgggtgcacatcctcgaccttgacaaagtaaactaactttctttcttttttttttttttttttttttttgagacaagagttttgctctgttgcccaggctggagtgcagtggcatgatctcggctcactgcaacctctgcctcacaggttcaagcaattctcctgcctcagcctcccgagtagctgccattacagaagcccagctaatttttgtatttttagtagagacagggtttcatcatcttggctaggctggtcttgaacacctgacctcgtgatccacccacctcagcctcccaaagtgctgggattataggtgtgagccactgtgcctggcctaaactttcaaaattaactgagaactctcagattttctgggtttacattttggtaaccagaaggggtttctga

SEQ ID NO: 933805 - DNA, 687 bp, Homo sapiens
actctttgttgagtctcccacaattaccattgttcctggcccagacttcaatccggcctcccacattattcctgataccacacctgacccccatgactgtatctctctgatccacctggcattcaatccatttgcccaaattttcttctttcctgttcctcaccctgatcacacttggtttattgatggcagttccaccaggcctaatmgctactcaccagcaaaggcaggctatgctatagtatcttccatatctatcgttgaggctaccactctacccgcctccactacctctcagcaaactgaactcattgtgttaactcaggccctcactctttcagaaggactgcgtgtcaatatttatactgactctaaatatgccttccatatcctgcaccaccatgctgttacatgggctgaaagaggtttcctcactacgcaagtgtcctcctttattaatgcctctttaattaaaaactcttctcaaggccactttacttccaaaggaagatggagtacttcactgcaaaggccatcaaagggcctcagaccccattgctcagggcaatgcttatgctgataaggtagctaaagaagcagctagcgttccaacttctgtccctcatggccagtttttctgcttctcatcagtcactcctacttgctctcccactgaagttgtccacc

SEQ ID NO: 933806 - DNA, 578 bp, Homo sapiens
tcgacctcccaaaatgctgggattacaggcatgagccactgtgcccggcctgtgaatacaattttaagtatgcctaatcttacaaataaaaaagaagtaaaatctcagtttttaagggtctgtaacattttctatttcattaaggactgtttagtatagtatttctytcaatatactttatagtccttagtgaccaaagggaagagtctttatttaacttcagggtcaagtctgtcattgataatataaagttaattttctattagttacttattttaatggcttgacgaaaaagagaaactctataaccacatagtattacaaataccaattagcttgctgagcatcacataggagttcaaagtgagcaaaatttgatcttagaaaaagagttttatatacctttacattgcaaaggcataaatctcaacaggtttttgaatctatagttattctatatatagatgccaatacataataggtattactattgttaattaggtttgtttattctggcatcccattcattcttggccctttaactcactgatgcattactgttattagagcaataatat

SEQ ID NO: 933807 - DNA, 776 bp, Homo sapiens
tgctccagcctaagtgacagtgtgagaccctgtctttaaaaagaaagtttttaaagagtttgatgttatataatggtatttttttttaatcagtggagatctcggcatgaaatgacccaaaagagcctaattagagtatgcacatttataagggaatggctaacaatagttatcatattaaacttcataatttgaaagagatttgaaaaaggattcgtaataataatttctaatttgagatgtcttgttttaaaatttgtaaaagtagattttgaaagctgatgttttagatttcacagcatacaaaaatctcaaaatgtggttcaccctacttttattgttgtcatcagaagctaaaatgaataatttatattaaaatttatgatactagagaatgtgggaaaaggcaaccaaaaaatatataactgtatgtgggaataactttatgcttatttgtctattaytctttatctcatgcatatagtatacaggttatcatgaaatttagtttattttttaaataaccctattaaaatttgaaagctgtattcctagaaagaatagctatttaattggatttacatagtcaggaataaagtgaaattagaactggtttattcagggcaagcaagatgacttgtatagtgaacatggtataattaagcaggcatgcaaaacattatgtccatgtatattacaaataaatgtactacttaccattacctacattttagccctagtcttctacatgcatcaaaatttctaatatacttaat

SEQ ID NO: 933808 - DNA, 606 bp, Homo sapiens
agcgggttgccattgctggctcctggagcctgcttttagtctcttatctggccccacccacatcctgctgattggtccattttacagagagctgattggtccgttttgacagggtgcagataggtgtatttacaatcccttagctagaggtaaaggttctccaagtccccaccagagtagctagatacagagtatccattggtgcattcacaaaccctgagctagacacagggtgctgattggtgtgtttacaaaccttgagctagatacagagtgcccattggtgtatttacaatcccttagacataaaggttctccaagtccccaccagactcaggagcccagctagcttcacccagtggatcccgcaccggggccgcaggtggagctgcstgccagtcccgcgccctgtgccggcactcctcagccgttgggtggtcgatgggactgggcgccttggagcagggggcggcgctcgtcagggaggctccagcggcgcaggagcccacggtgttaggggaggctcaggcatggcgggctgcaggtctggagccctgcaccgccgggaggcagctaaggcccggcaagaagtcgagcacagcagct

SEQ ID NO: 933809 - DNA, 500 bp, Homo sapiens
agtagtgtcataggaatcaagataaatatacagagtcagttgctttttgatataccagcaatgaagtaattgaaattaaagaaaataatacaaaatataaatgtatcagaaatacaaaatactccagaataagtctaacactatatatataatctatatgtaggatatatctacatgcacaaactctgatggcagaagtcaaaggtctaaataaatgtaaagatattctgtatcatggattggaagactcaatactgttaatatgtcaatattttccaaatcattctatctgttcaacacaattacagtcaaaatcataagatattttgtatatatcaaaaactaattmtaaaatatgtattgaaagggggaagacctacaatagccaagaacattttgaagaaaaataactaatttggaagctcacactacccaattgtaagacttgcaataaagatacagtaatcaagaacgcatggtattggtcaaagaatagacac

SEQ ID NO: 933810 - DNA, 556 bp, Homo sapiens
accgtgttagcaaggatagtctcgatctcctgacatcgtgatccgcccgcctcggcctcccaaagtgctagaattacaggtgtgagccaccgcgcccggcccaaacaacatttttcaaagcattgaagatatacaattaagggcagttcttcctatagatagaaacaaacaaggtgagctttactaatgacatggtatcctgtctataaagaatttcctgcctgggtgcctataatcccagctactggggrggctggtacaggggaatcacttgaacccaggagtcagaggttgcagtgagccgaaatagtgccgttgcactccagcctgggcgacaagagtgaaactacatctcaagaaaaaaacaaaaaaagaagaagaagaagaattttctgcctgtctggcagtgagaagaaacccaggcaagcacagcactcccaatgagttgaggagagggggttgagagtccataggacgagagggtagagttcacagccagtatgcccagaggaggaagctgcacagaaaaagcagtctgcagatgtgcagcggtccc

SEQ ID NO: 933811 - DNA, 581 bp, Homo sapiens
atatacctgagatcatgcagtatttttctttctgagtctggcttatttcatttagcataatgtctttctgactcattcatgtcaatgcaaatgacaggatcacttctttaaactgaataatgttccagtgtgcatatatgtgtgcatatatatatatatrtatatttactgatgtatacatacacaaacgcacacacaatagatgtgttcaccattggtctgttgacactttggtttcttttcatatcttggctcacacttgttagaatggctgttatcaagaaaagaagcaataacaagtgttggcgatggtgtggagaaaaggaaacccttgtcctctgttggtgggaatgtaaattagtacagtcattatggaaaccagcatgggggttactcaaaaaaattaaaatagaatgggggtggaattacagcaaattatttcattttatattacatcatcaaagtagaacaaactgttacatattccagcaatcccagttttgactatatacccagggaaatgaaatcagcaccttgcagagatgtctgtatgcccaggtatattgcagcattatttgctg

SEQ ID NO: 933812 - DNA, 748 bp, Homo sapiens
tggagtttgctgtaggcccactccagaccctgtttgcctgggtatcaccagcggaggctgcagaacagcaaatgttgctgcctgatccttcctctggaagcttcgtctcagrcgggcacctggattatgaggtgtcatttgggccttactgggaggtttctcccagttaggctactcaggggtcagagacccacttaaggaggcagtgtctctgttctcagagctcaaacaccgtgctgggagaaccactgctctcttcagagctctcagacagggatgtttaagtctgcaaaagtttctgctgccttttgttcagctatgcccttcccccagaggtggagtctacagaggcaggcaggcctccttgagctgtggtgggctccaccctgttcgagctttgtggccgcttggtttacccactcaaacctcagcaatgatggacgcccctcccccagcctcactgctgccttgcagttcaatcttggactgctgtcctagcagtgagcaaggctccatgggtgcgggcccctctgcagccaggcacaggatataatttcctggtgtgccgtttgttaagaccactgggaaagtgcagtattagggtgggagtgtcccgattttccaggtaccgtctgtcacagcttcccttgcctaggaaaaggaactccctgaccctttgtgcttcccgggtaaggcaatgccctgccctgctttggctcacactacgtgggctgcacccactgtccaa

SEQ ID NO: 933813 - DNA, 748 bp, Homo sapiens
tggagtttgctgtaggcccactccagaccctgtttgcctgggtatcaccagcggaggctgcagaacagcaaatgttgctgcctgatccttcctctggaagcttcgtctcaggsgggcacctggattatgaggtgtcatttgggccttactgggaggtttctcccagttaggctactcaggggtcagagacccacttaaggaggcagtgtctctgttctcagagctcaaacaccgtgctgggagaaccactgctctcttcagagctctcagacagggatgtttaagtctgcaaaagtttctgctgccttttgttcagctatgcccttcccccagaggtggagtctacagaggcaggcaggcctccttgagctgtggtgggctccaccctgttcgagctttgtggccgcttggtttacccactcaaacctcagcaatgatggacgcccctcccccagcctcactgctgccttgcagttcaatcttggactgctgtcctagcagtgagcaaggctccatgggtgcgggcccctctgcagccaggcacaggatataatttcctggtgtgccgtttgttaagaccactgggaaagtgcagtattagggtgggagtgtcccgattttccaggtaccgtctgtcacagcttcccttgcctaggaaaaggaactccctgaccctttgtgcttcccgggtaaggcaatgccctgccctgctttggctcacactacgtgggctgcacccactgtccaa

SEQ ID NO: 933814 - DNA, 748 bp, Homo sapiens
tggagtttgctgtaggcccactccagaccctgtttgcctgggtatcaccagcggaggctgcagaacagcaaatgttgctgcctgatccttcctctggaagcttcgtctcaggcgggcacctggattatgaggtgtcatttgggccttactgggaggtttctcccagttaggctactcaggggtcagagacccacttaaggaggcagtstctctgttctcagagctcaaacaccgtgctgggagaaccactgctctcttcagagctctcagacagggatgtttaagtctgcaaaagtttctgctgccttttgttcagctatgcccttcccccagaggtggagtctacagaggcaggcaggcctccttgagctgtggtgggctccaccctgttcgagctttgtggccgcttggtttacccactcaaacctcagcaatgatggacgcccctcccccagcctcactgctgccttgcagttcaatcttggactgctgtcctagcagtgagcaaggctccatgggtgcgggcccctctgcagccaggcacaggatataatttcctggtgtgccgtttgttaagaccactgggaaagtgcagtattagggtgggagtgtcccgattttccaggtaccgtctgtcacagcttcccttgcctaggaaaaggaactccctgaccctttgtgcttcccgggtaaggcaatgccctgccctgctttggctcacactacgtgggctgcacccactgtccaa

SEQ ID NO: 933815 - DNA, 646 bp, Homo sapiens
ctaaaatcgattggatacagcaaagcagcactaagagcgaagttgatagcaataaatgcctatatcaaaaaagtaaaaagactttaaataaacaacctaagaatgcatctcaaggaactagaaaagcaagaacaagcccagcctataattagtagtaggaaagaaataataaaaatcagagcagaaataaatgaaattaagacaatacaatayagaatatgaacaaaaaaaagttgttttattgaaaaggtaaaaaaaaaaatcaacaaacctttagctatgctaaggacaaaagagagaagacccaaataaataaaatcaaaaatgaaaaaggagacgtaacaactgagacatcagaaatacaaagaatcattagacactattatgaacaattatactccaacaaacttggaaacctagaagtaatgcatatattcctggacacatatcacttaccaagattaaaacacaaagaaacctcaaaaaaccaataacaagtaacaagatttaagccataatgtaaagattctcattaaagaaaagcccaggacctgattacttcactcctgaattctaccaaacacttaaagaaaaactaatgccaatcctactcaaactcttcaaaaaaattaaaggtgaggcaata

SEQ ID NO: 933816 - DNA, 604 bp, Homo sapiens
agccaggagaaggagtttcacaagacagtgtcatcagttaaggcaggaacaggccattttcacttcttttgtggtggaatgtcatcagttaaggcaggaaccggccatctggatgtgtacgtgcaggtcacaggggatatgatggcttagcttgggctcagaggcctgacattcctgtcttcttatattagtaagaaaaataaaatgaaatagtrgtaaagtgttgggacagcgaaaattttgggggatggtatggagagataatgggcgatgcttctcagggccgcttccagcgggattgggggtggcgtgggaacctagagtgggagacattaagctgaaggaagattttgtggtaaggggtgatattgtggggttgttagaagaaacatttgtcatttagaattattggtgttggcctggatacagttttgtatgaattgaaaaactaaatggaataagagaaggagaaaaacaggtataaaaggtctaagaattgggacgactcaggacatctgattagagagtccctaaggagattcagcatagtcctgccagcaaagattatttacttcaagagttaagagtggcagtttggggatag

SEQ ID NO: 933817 - DNA, 575 bp, Homo sapiens
tgattgtagaacaattgaatattcatgtgcaaaactgtaaatgttgatctacagctccttcttctccaaaaacatgttttaaatggatcatagatctaaatgcaaaacataaaactgaaaaaaaaatcttagaagaaaacatagaaggaactccttgatgagaggaggcagaataagatagcagaataagaggctccatcaatcatcctcccttcaaggacatcaagttaacaactatttacacagaaaaaaaaaaaacacctttatgagagccaaaagtcagatatgcacccatagtacctggttttaacttcatattgctgaaagaggcactgaagagatagaaaaaactgtcctgaatgccagcattactcacccaatgcscttcctctggaagtggtggcatggtgtgtagagcacccctggacaccagggaagggagaaaacaacaattgtgaggcattaaaaatgctattctgttagagctgaaagaaaaactggactaaactcagctgacacctgcacatggagggaccatttaaaccactcctagccagaggggaatcacaaattcc

SEQ ID NO: 933818 - DNA, 766 bp, Homo sapiens
gtgccacctagagagcaatctgtagaagagaaaatcatagtaaagaaggagatgagtctccttagaaacaattttccacccagtacattgcatatatagtttatcattttggttgcagacaataaatagttaagtcgaaagccaaattggcattgctacaaatgaaggttaatgccttcacaaagctactgacaaagcctatgacaatgcatcaaactctccatttaaataattgaatggcactgacagatgagctcctcttctcaggtatgttgggatcatttataatgggtgagttaactgtgttaatacccaacatactaatcagaatgtatgctagtttgccaggggagcggctgataatttccgtctgtcaatctaaaatctctggaggtaaacaccttggcagacagaaaaggacactgaaaaattagctggagcatgaatctgtgcagtgtttaacagatagtggacaccragggaactgtttaaacataccactcatcatgatttacagactttgcctagtgtatgcacttcatgggatttttttcctcattaagagcacatttcaatatatttgccttttatcttcttaatttctcctttttaaatggtgtgccattttaaaataatgacaatggttgcatatatgtttgataaagtcattaaatgtagcaatgaagaacctgtgactcttttgacttgggattgccatctcctgtatcctgcattgctacctgcatgattgaatagtccccaaagg

SEQ ID NO: 933819 - DNA, 543 bp, Homo sapiens
tgtggcctatgaaaaaatacattaaatgaagattatagaaattcagtggtaggggattaacaaagagactgcttggttaagtgattaaactccttatctagctcattctttaatctacttgactttaggaagtttggcttrtagggaccttgggtaaggtgcatactccaaactcttggtattatcctcccagtggtcataataatagtctccctagcatgttgtattctctcaaaggttttaaatgcttgcatgcaaccatctctagaatgtcatatggtctctcttcaactggaataacaagaactgaaagaaatgtgcaaccataaggaccccataacctatgaatgacacgctgagaccagaaacccaaaatgatggtaactgagagtggtgctaaggtcctaagttttggttacactctcacctaagtgagaacctgaccaaaaagggggaatttttttaagcaaaattataggaggccattgttttggactgagctcaggcactaggccccaacaaacaaaaccatactaaactgga

SEQ ID NO: 933820 - DNA, 581 bp, Homo sapiens
taaggatgaataaggcatatcatgaaaagttttaggccaataaattcaaagattgaatgccgttcaaaaaattcttgaaatacacatcttactaaaactggtacaagaggaaatggaaactttgagaaagaaattgaattacacatttgtaagttttccatgaaaagaattccaggtccatatggttgctctggtgaattctggcaatttttttttttttttttttttgagacggagtcttgctctgtcrcccaggctggagtgcagtggtgcgatctcggctcactgcaagctctgcctccagggttcacgccattctcctgtctcagcctcctgggtagctgggactacaggtgcccaccaccacgcccggctaattttttgtatttttaatagagacggggtttcactgcgttagccagggtagtctcgatctcttgacctcgtgatccgcccgccttggcctcccaaagtgctgggattacaggtgtgagccactggccccggccgaattctggcaaattttaacaaagagtttattctagtttgatagaaactttttcaaagtccaacaaagatat

SEQ ID NO: 933821 - DNA, 581 bp, Homo sapiens
taaggatgaataaggcatatcatgaaaagttttaggccaataaattcaaagattgaatgccgttcaaaaaattcttgaaatacacatcttactaaaactggtacaagaggaaatggaaactttgagaaagaaattgaattacacatttgtaagttttccatgaaaagaattccaggtccatatggttgctctggtgaattctggcaatttttttttttttttttttttgagacggagtcttgctctgtcgcccaggctggagtgcagtggtgcgatctcggctcactgcaagctctgcctccagggttcacgccattctccygtctcagcctcctgggtagctgggactacaggtgcccaccaccacgcccggctaattttttgtatttttaatagagacggggtttcactgcgttagccagggtagtctcgatctcttgacctcgtgatccgcccgccttggcctcccaaagtgctgggattacaggtgtgagccactggccccggccgaattctggcaaattttaacaaagagtttattctagtttgatagaaactttttcaaagtccaacaaagatat

SEQ ID NO: 933822 - DNA, 599 bp, Homo sapiens
ttgagaggactgggtatgaagttgggaacccaggtccaaatcctggctcagccactgttaaatgtgtgaccttgggcaagttacttaacctctctgagcctcagtttcctcatctggactctgtaccaagcccacaagaccacagaagcagcccctgcttgcatctccatctggctcttccattcttctctggctgtctctctaagcccacgccacactggccaccattcttgttcctatcacagcgaagctcartgtggcctcagggcttttgccctagctattcctgctgtctggagttaccctttccctgattttcttgtggctggttccttttcctccttcatgtctcagttcaaaggttaccttcttagagaggagagcccctcactgaccactctccacacctgccatcatcaattccattccctggcctcagtttcttccagtgcctctcgggttctgaaattgtcatatttgctttttgcattgttgttgctctttgcttgttatctgcttggcactccctctagacccatgggctctaggagatgaggaatcgtgattgtcttgttcattgctacatctccatcacctaa

SEQ ID NO: 933823 - DNA, 545 bp, Homo sapiens
gctaagctactgtatgtgggattaagaggcatagttaaccaaacatttgagaacaagtaattaccactgcatctctctatcacatatttgccttacacataatttatacaagtccacagaggaaaaataaaatgctgtttgcaacattttttttccagccacacatttttcaggcttactttttttttcctcatcaaagactattcatttttatggtcttatattggataacagtgggatattttctctctgttatatagggacagagaaacracatctctaatcagttattcttggctgtgtccttcctgccaaatcttgggcatctaaatgtggaggtgcacagtccctgaagttggtttatgtaatactttcagagtggtatggacatgcaaacaacaccgtcatttattcattcagcaaacattatgagacactttctatgtgcccagaattgtgctgggctctcaggatacccatgaataagagagggtccctatccttgatgagactgtaatctagcagtagagacaattaaaccaaca

SEQ ID NO: 933824 - DNA, 586 bp, Homo sapiens
tccgcatctccgtctattctgttgttatgcttcaaattttactttgaaactcctgtagtaaatgtatttccaaagttcagcttggttctttcttaaaatgattatgtcatttttcaactcctggatcattttcatattttccttgtattgggtttcaaccttctyttgtatctcaatgaccttccttgccatccagattctgaattctatgtctgacgtttcagccatttcaatctggttagattccattgcgggggcactaatgtgattgtttggaggtaagaagacactctggctttcagtgtggccagagttcttgcactgggtctttctcatcttcaaggggtgatgatcctttatctatttggaattgctatcttttaaatggagattttagtttgtattgtcattattgcccttgaggatttggctgtggcacaacatgggtatagctgaaagactatatttctggatgcttttactgggcaaggttcagtttcacactcctggactgtgttctctaaccctggagtactggttctgggtcagtggtttcatccccttcttcctcgaggtcaagccccag

SEQ ID NO: 933825 - DNA, 586 bp, Homo sapiens
tccgcatctccgtctattctgttgttatgcttcaaattttactttgaaactcctgtagtaaatgtatttccaaagttcagcttggttctttcttaaaatgattatgtcatttttcaactcctggatcattttcatattttccttgtattgggtttcaaccttcttttgtatctcaatgaccttccttgccatccagattctgaattctatgtctgacgtttcagccatttcaatctggttagattccattgcgggggcactaatgtgattgtttggaggtaagaagacactctggctttcagtgtgkccagagttcttgcactgggtctttctcatcttcaaggggtgatgatcctttatctatttggaattgctatcttttaaatggagattttagtttgtattgtcattattgcccttgaggatttggctgtggcacaacatgggtatagctgaaagactatatttctggatgcttttactgggcaaggttcagtttcacactcctggactgtgttctctaaccctggagtactggttctgggtcagtggtttcatccccttcttcctcgaggtcaagccccag

SEQ ID NO: 933826 - DNA, 679 bp, Homo sapiens
agctcagccatggtaagatagggcactgggcagagtcctgaggaccccatttcaggtcctgctcccagggaacatttctagacccaccctgggccagaagggaacctgctgcattgaagggaaggacccaggcctggcaggattcatcacctgctaactaaagagttattagccctaaataatcagcagcagtaaccaggtagtattaccaggtattaacacatgcaacgggcctttaatgagactctgagatgtactggcttcaggtrtgactcagcacatttactgttgtgatgcctacaaggagagaccccttgtgcccaagaaaagcagagagaagagtaaaggggactttgtcttgagcttacataccagcttagccaccgtggaaaagagcaccaagtgggttcttggggtccccaactccaggtcttgactcttggatggcatctcaggacctaccctgggccagaagggagcccactgccctaaagagtgaatcccaggtttggcagcactcaccgcaagctgctgaaagagcctttgggccttaagtgaaaactggtggtaccctggcagtactccccatgggcctgcagtggtggtggacacagggagagactcctctgcctggggaaaggggaggaaagagtaggaaggactttgtcttctggttttg

SEQ ID NO: 933827 - DNA, 573 bp, Homo sapiens
caagtgtggtggtgcatgcctgtaatctcagctacttggaaggctgaggcatgagaatcacttaaacctggaaggtggaggttgcagtgagctgagatcatgccactgcactactgcagactgggtgacagggtgagattccatttcaaaaaaaaaaaaaaaaaaagaataaagatggcttctacaacatatcccatctcaaatgcaatttctatactgtgaggttgacaattatgtcatcagttggtagagtctatgtccccttgctctgagctgggaagacctttgaaactgagktaaccaaaatagtgtggctgaatgatgtctatgtggcttcagaggcaaggtcataaaaatgccatgcacattgtcctcttggaacatgcattctcagaagtcagctatcatgctgtgaggaagctaattagccacagcaaggaccatatataagtgttctgtccaatagttacagctaagtcccatctaaacaacagccatcatcaactgctggatgtgtgagtgaatgagccactggatgatgccaaccctagccaagtcatccccagccttctt

SEQ ID NO: 933828 - DNA, 621 bp, Homo sapiens
agcatgtgcactgtttttcaaactgtgcatctaacaaaggactaatatccagaatctacaaggagttcaaatcagcaagaaaaaagcaaacaatcccatcaaaaagtgggcaaatgttatgaatagacatttctcaaaagaagatacacaaatggccaaaaacatatgaaaaagtgctcaatatcactaatcatcagagaaatgtaaattaaaaccaccaatgagataccaccttaccccagccagaatggycattattagaaaatcaaaaaacaatagatgtttgtgtggatgtggggaaaagggaatgcttatacaatgctggtggatgcaagttagtacaacctccatggaaaatagtatggagatttcttaaagaacaaaaaatttatctaccattcaatccagaaatcctactgctgggtatctacccaaagaaaaagaaatcattatatcaaaaagacacctgcagacatatgtttatcacagcacaattgacaattgcaaagatatgaaaccaacctaagtaccaatcaaccaatgagtggataaggaaaatgtggtacatatatacacgatggaacactcaaccataaaaaagaatgaaataatatctcttgc

SEQ ID NO: 933829 - DNA, 644 bp, Homo sapiens
atccttagggaattacattgtagcagtgttgggggagataacacataaataaagaagtaaaatacacagtatattggatggtggtaagttctatggggaaaataaaataaaatacaaaaggtggaaaggactgtgtgagtgtaggaggacaggatagagggtattgttattgaaaacagaatagtcacagcctgagcaacatagtgagacccagtctctacaaaaagtgaaaaaattagctgagcatgatggctcctgcctgtagtcccagctactcgagaggctgaggtgggaggatcacttgagcctggaggtcaaggctgcagtgagcartgatcgtaccattgcactccagcctgggcaacagagtgagaccctgtctcaaaacaaacaaaacacaacaaaaccaaacaaccagactagtcagacaaatactcacaaaggagaggacatttgagctaagagccaaagaggagagggagcatatcttatgcatgtggaggaatcattccaagctgagaaaacagccagtgcaaaagcctgaggttggagaacacctcgtgtatgcttgtcgtagcattcctgtaaaagattttgtgcatagcacatctagccttgcggagaatacagtatttccaaacttc

SEQ ID NO: 933830 - DNA, 751 bp, Homo sapiens
aagtttggcagttcctcaaaaagctaaacgtagattgtgcacccatgtacatagcagcattattcacagtagccaacaggtagatgccaacccaagtgttcattgaaggattaatggataaacaaaacgctgtatgtacatacaatggaatattcaaccatgaaaagaaataaagaattaaaacaagctacagtgtgtgtgaacctcaaaaacattaggctaaaggaaacaagcctgtcaccagaggatagacactcatcatttcacttatattaggtacctagagtagtcaaattcacagagacataaagtagaatgatgatttgcagggactagtgggaggggagatgagaagttattgtttaatgctacaaaatttcagttttgcaagattaatcattctgtggataaatggtgagatggtagcacaacaatgcaaatttacttgatgccactgacctgtacatttaaaaaggcttaagatgrtaaattttatgtgtattatattaaaatgtttaaaaagctagcacagaaataccatataagccatcaatttgactccaaggtatgtacccaaaagaattgaaggcaggaactaaaaacgatacttgtatgccaatgatcatagcagcacaactcacaataaccaaaagatggaaacagtccaactgttcctcaaaagattaatgaataaacaaaatgtggtatgtgcacacaatggaatattattcaaccattaaaaacgaagttc

SEQ ID NO: 933831 - DNA, 628 bp, Homo sapiens
ggcggtgcttgcatcaccactcccccaaccccaggcatcaccacccacagctctgagagagactccttccttctgtttgaagaaaggaaagggaagagtagagagaattttgttttgcaacttggacaccaggtcggccacagtataataaagcactaaacagagtcctaaagcccagaattcaggccctagttcccagatgacagaagggaacccactgccctgaatggaaagacccagtgatggcaggattcatcacttgctgactaaaaagcccttagacyttgcagaaacttcagcagtagacaggcagtagttgccacagcccctgagagagacccattagtgtactggctttgggtgtaactctctacattcccagctatggtgaccatgaggagagactccttattttcgaggaaaagagagggaagagtaaaaaggattttgtcttgtggcttgggtcccagctcagccacagtaaaacaaagcaccagttagattcctaggatttccaatacgagggcctagctcctggatggcatttctagacccaccctgggccaaaagggactctgtttccctgaagggaaagatccaggcctggcaggattcaccaacctgctga

SEQ ID NO: 933832 - DNA, 737 bp, Homo sapiens
gatcctctgtctcagaggcctaattaagggacctaatgcgaactgttgtttcccataacccatggttctcagaagaaggcacgctagacttagagctctgggaacaagtgggaagaaatcttaaaagacatcatgcacaagggcaacgggtcctagtaacatctttaatgttatgggcgttaggtagggctgctttgtccctgctctatacagaagagcctaaaaarggaagggaagaggaaccatcacctaccttactgccccctcctcctccctcagccctgccgttatgggtataggtgccacagaagagacagagaattttcctgagccccctcccccaataaattggaaaaaagacaagggatacactacgggacgctctcttaggcaagtggcattagaaggggagctcttggcctgcccagtgatgcaagatcaacaaggcaattgggtacatgaacccactactttcaacacttataaagaaataagaaaaagcattagagaaaacggagctgctagcccatttacaaaaggattaattgaggccatagcagataacttccatatgaccccatgggactggtcatagctaaaacaactttagaggccagtcaatacctcctctggagggcagaatatgatgaattgtgcgaacaagaagtcaaccagaatcaattggccaggcaaaacataatggctgctatgctccaggggaggggtccctatgtcaa

SEQ ID NO: 933833 - DNA, 737 bp, Homo sapiens
gatcctctgtctcagaggcctaattaagggacctaatgcgaactgttgtttcccataacccatggttctcagaagaaggcacgctagacttagagctctgggaacaagtgggaagaaatcttaaaagacatcatgcacaagggcaacgggtcctagtaacatctttaatgttatgggcgttaggtagggctgctttgtccctgctctatacagaagagcctaaaaagggaagggaagaggaaccatcacctaccttactgccccctcctcctccctcagccctgccgttatgggtataggtgccacagaagagacagagaattttcctgagccccctcccccaataaattggaaaaaagacaagggatacactacgggacgctctcttaggcaagtggcattagaaggggagctcttggcctgcccagtgatgcaagatcaacaaggcaatygggtacatgaacccactactttcaacacttataaagaaataagaaaaagcattagagaaaacggagctgctagcccatttacaaaaggattaattgaggccatagcagataacttccatatgaccccatgggactggtcatagctaaaacaactttagaggccagtcaatacctcctctggagggcagaatatgatgaattgtgcgaacaagaagtcaaccagaatcaattggccaggcaaaacataatggctgctatgctccaggggaggggtccctatgtcaa

SEQ ID NO: 933834 - DNA, 615 bp, Homo sapiens
cctcattaaaagtcaatcaaaataataaacggttataagaaacaaagaacaagcagaacaaataggaaacacttggcaagatgatgttttaatccacctatgtcaataattacattaaatgaaaatgtcctaaatgcagcaattaatacagcagtccccaacctttttggcaccagggaccagttttgtggaagacaatttttccactgaacaaggtggggtaggggtatggtttcgggatgaaactgttccaccccaggtcatcatcaggcattagttagattcttataaggatcaggcaacctaggccaggattcacaggtgtggccagygttcccactcctatgagaatctaatgcccgctgctgatctgacaggaggtgggtcttaggtgggaatgctcacttgctgggcgctcacttgctgtgcagtctggttcctaacaggccacggactgggactggtaccggtccatcgcccaggagttgggaacccctgaattaaaagagagattgtcagataatccaagactcaattctgaactgtttatacaaacacagtgtaggctgccaccatggctaatgtctgtgatcccaacactttgggaagccaagg

SEQ ID NO: 933835 - DNA, 720 bp, Homo sapiens
attgcttcagtgctgcagcaataccctactcactgcagggctggcaactgtaccatttaaaccatttcatgtttaccatgatcatatgcttcaccaccctaactcctggtcagaatttcccagttgccattttagagggtcaagcctaataagagatccattcccaagatatattctcagatggaatyggtgtatgctaaacaggattttggtggcaatctcccaacttgtaatatttaattcagcctgtctttcatggcccctgtataaccatctattgctattacaggcccttggaaccaatgaatgttatgcgtgcattcagttccagtagccaatggagcaagcacagcctaagtgagcaatatgcacttctacatgtggccaccagcccccagacaccctagtcgccattgctgttattgggattctggggccttggcctacatcctagtctaaagcggttgatgctggccatccctctgcaggaagggcagtgggttgaacttttgaggctcctttggtgaagtgctgttctggcttgaactgctgccacagtcccacaagaacagcattaagctatttttgcagtaggtgtccctgccaatatcaggtcataccacatttgttggtgggtcaccctgatgggccccttggctgttccctttcctttggctcccttgtcttttaccccagtagtacacacccctcagtttctcc

SEQ ID NO: 933836 - DNA, 584 bp, Homo sapiens
acttactatttattaagtggaagtggatcaccctaaaggccttcatcctcattgtcttcatgctgagtaggctgaggaggaaatggaggggttggtcttgctgtcttgggggtggcagaggtggaagaggtagagggagcaggagaggcaggcaccctcggggtgactttatggaaatacatcataatttctgttmgacttttgtgcttttacatttattttaaaatgtttctatatggtaccgatccttcttccactgtttgcttctgttttagtgcctgtaacatagcagagtccatgtcttaaaagtagtccaaagcagtcttgaataatcagaacccttctgccagattgtctaatgtcagtttgtttcctggcactgcttctacatcttcctcatcctctggcactggttcagaagcactcgtctccatcaaaccatcttctgttaatttctctagtgtggtgtctatttgctcttaaatatttccatgattgctatcttgaagctcttcatcacccaccccctccaccccactgtttttgccatatccagtttctttcatgatttccttgattggctc

SEQ ID NO: 933837 - DNA, 448 bp, Homo sapiens
taatatttgttttttttttttttttgcttatttgtcaacatttggcttatttcacttagcataatgtcatcaagtttcatccatgttatagcataggtcagaatttccttcgttttaaggatgaataatattccattgtatgtmtatgctgcattttgcctattcatccctcagtggacacttgggttgcttccatgttttagctattgcgaataatgctactacgaacatgtgtgtacaaatgttcaagactctgttttcatccctaaaaaactaaaaacagaactgccatatgatctaataatcccagttctgggatatattcaaaggaattgaaatcaatatgttggagggatatctccacacacagaaagacaaataccacatgatctcacttatatgtgaaatctaaaaaagttgaattcatagatgtagagagtagaaatga

SEQ ID NO: 933838 - DNA, 681 bp, Homo sapiens
agcgtctccaaaaaaaaaagaagaaataaaacagagaggctgggcacagtggctcacgcgtgtaatcccagcactttgggaggccgaggcaggtggatcacccagcctgggcaacaagagggaaacttcatctcaaaataacaacaacaacaaaaaagaaaacagagggatcccaggtacccgccttcactcagtttccccaatggtaacatctcgcagaactactgggcgccatcacagccggggtctgactgctcttgctcaggtttccccggttttccgtatcctcacgtgtgtgtatttacttctgtgcaattttatcgcaggccaaggcaggcggatcacctgagctcaggagtttgagaccagcctgggcaacatggtgaaaccctgtctctacaaaaaatacaaaaattagccggacacggtggcacgtgcctgtarccccagctccttgagggtctgagatgggaggatcacttgagcccaggaggtggaggttgcagtgagcccatattgcgccactgtactccagcctgggtgacggggcgagaccctgtctcaaaaacaaaaacaaataaacagaatgagagtatgcaaccttttgggactggcttttcccctcagcagacaccacttttcttgagcaccttgatctcatagtcccagggacggtttctg

SEQ ID NO: 933839 - DNA, 634 bp, Homo sapiens
acccaggggtccaagaccagtctaggcaacatagtgagaccctgtctttacaaaatatttaaagactggacgggcgcggtggctcatgcctgtaatcccagcactttgggaagccgagacgggcggatcacgaggtcaggaaatcgagaccatcctggctaacacggtgaaaccccgtctctactaaaaatacaaaaaattagctgggcatggtggtgggtgcctgtagtyccagctactctggaggctgaggcaggagaatggcctgaacccgggaggtggagcttgcagtgaacagagatcatgccaccgcactccaacctgggcgacagagcgagagtctaaaaaaaaaaaacatatatgtatatatatatgccgggtgtggtggctcacggctgtaacctcagcactttgggaagccaaggcaggtgaatcacctgaggtcaggagttcaagaccagcctggccaacacggtgaaaccccatctctacaaaaaatacaaaaattagccaggcatggtggtgcatgcctgtaatcccagctacttgggaggcagagacaggagaatcgcttgaatctgggaggcggaggttgcagtgaaccgagatcatgccactgcactccagcctgggc

SEQ ID NO: 933840 - DNA, 576 bp, Homo sapiens
agtatttcattgaattgacataccacaattagtttaaccactgacatgtcaaaggacattttgatggcttctagtttttggtgattatgaataatgatgccataagcattcatgtacaagtttttctatgaaaatagtttttattggatcacatggtaagtrgatatttaactttataagaaactgccaaactggtttgtatttatttatttactgagacagagttttgctctgtcacccaggctggggtgcagtggcacgatctcgggtcactgcaacctccacctctcagattcaagcgattctcctctctcagcctcccgagtagctgggattacaggagtctgccaccacgcccggctaatttttgtatttttagtagagacagggtttcaccatattggccaggctggtctcaaactcccgacctcaggtgatccgccccccttggcctcccaaagtgctgggattacaggcgtgagccactgtgcctggccccaaactgttttccagagtggctgtaccattttgaactcctaccagcagtgtatgagagttccaggggctcttccatct

SEQ ID NO: 933841 - DNA, 576 bp, Homo sapiens
aaggccacaatccctccagaggccttaggcacgaatccacttcttgcctcttccagttcctggtggcttcccgaattccttggcttgtggcctcattattccaatttctgcctcctccatggtcacattaccttctcctcttccgtatgtcaaatattcctctacatccctctttttttttttttttttgacaaagattttcactcttgttgcctaggctgcgagtgcaatggtgcratctcagctcactgcaacctctgcctcctggattcaagcgattctcctgcctcagtctcctgagtagctgggattacaggcattcaccaccatgcctggctaattttgtatttgtagtagagatgggatttctccatgttggtcaggccagtcttgaactcctgacctcaggtgatttgcccgcctcagcctcccaaagtgctgagtttacaggtgtgagccaccgcacccagccttacctccctcctataaggatgtatgtgattgcattcaagtccaccctgataatctagaataatatccccatctgcaaagacccttttctttgcctataaggga

SEQ ID NO: 933842 - DNA, 576 bp, Homo sapiens
aaggccacaatccctccagaggccttaggcacgaatccacttcttgcctcttccagttcctggtggcttcccgaattccttggcttgtggcctcattattccaatttctgcctcctccatggtcacattaccttctcctcttccgtatgtcaaatattcctctacatccctctttttttttttttttttgacaaagattttcactcttgttgcctaggctgcgagtgcaatggtgcaatctcagctcactgcaacctctgcctcctggattcaagcgattctcctgcctcagtctcctgagtagctgggattacaggcattcaccaccatgcctggctaattttgtatttgtagtagagatgggatttctccatgttggtcaggccagtcttgaactcctgacctcargtgatttgcccgcctcagcctcccaaagtgctgagtttacaggtgtgagccaccgcacccagccttacctccctcctataaggatgtatgtgattgcattcaagtccaccctgataatctagaataatatccccatctgcaaagacccttttctttgcctataaggga

SEQ ID NO: 933843 - DNA, 725 bp, Homo sapiens
ctgttagagtttgctggaggtccactccagaccctgcttgcctgggtatcaccagtggaggctgcagaacagcaaatattgcagaacagcaaatgttgctgcctgatccttcctctggaagcttcgtctcagaggggtacccagcggtatgaggtgtcartcagcccctactgggagatgtctcccagttaggctactcagtggtcagggacccacttgaagaggcagtctgtctgttctcagatttcaaactccgtgctgggagaaccactactctcttcaaagctgttagacagggacatttaagtctgcagaagtttctgctgccttttgttcagctatgccctgcccccagaggtggtgtctacaaaggcaggcaggcctctttgagctgtggtgggctccacctaattagagcttcctggccactttgtttacctactcaagcctcagcaatggtggatgccactcccccagcctcgctgctgccttgcagttcaatctcaggctgctgtgctagcagtgagcgaggctccgtgggcatgggaccctctgagccatgcgcgggatataatctcctggtgtgtcatttgctaaggccgttggaaaagtgcagtattagggtgggagtgttccaattttccaggtaccatctgtcaccgcttcccttggctagggaagggaattcccagaccccctgtgcttcctgggtgaggtgaggccca

SEQ ID NO: 933844 - DNA, 725 bp, Homo sapiens
ctgttagagtttgctggaggtccactccagaccctgcttgcctgggtatcaccagtggaggctgcagaacagcaaatattgcagaacagcaaatgttgctgcctgatccttcctctggaagcttcgtctcagaggggtacccagcggtatgaggtgtcagtcagcccctactgggagatgtctcccagttaggctactcagtggtcagggacccacttgaagaggcagtctgtctgttctcagatttcaaactccgtgctgggagaaccactactctcttcaaagctgttagacagggacatttaagtctgcagaagtttctgctgccttttgttcagctatgccctgcccccagaggtggtgtctacaaaggcaggcaggcctctttgagctgtggtgggctccacctaattagagcttcctggccrctttgtttacctactcaagcctcagcaatggtggatgccactcccccagcctcgctgctgccttgcagttcaatctcaggctgctgtgctagcagtgagcgaggctccgtgggcatgggaccctctgagccatgcgcgggatataatctcctggtgtgtcatttgctaaggccgttggaaaagtgcagtattagggtgggagtgttccaattttccaggtaccatctgtcaccgcttcccttggctagggaagggaattcccagaccccctgtgcttcctgggtgaggtgaggccca

SEQ ID NO: 933845 - DNA, 563 bp, Homo sapiens
tcaggctggtctcgaactcctgacctcaggtgatccacctgtctctgcctcccagagtgctgggattacaggcgtgagccaccacgcccggcctttgtgcaccggtttttaactgccccagatgggaagggctgcatctctgctcacattcctattagtcagaacttggccccatggcctcacytactgcagaggtggctgggaagggcaattgacccaggaaaggaaacagcaagatgaacacattgtattgtgtgccgcacactgccacccccacatgtcagggaaggagggtcttgggaaggctgctgggtgggtgactgccactccacctcacttccacttactccccaaccaggccagcaagtctggtcacagatgtggcaggggaggctccccttctgtgggtttccatggccttgaaggaaataaaaatatttctccctaaaatattgaggattgttaaattaaagacccttaaaacatgggaacactctacctcaccctctacttgcctgatggcaggacataaatccttccaaactggatgtgtgggtgaatgg

SEQ ID NO: 933846 - DNA, 563 bp, Homo sapiens
tcaggctggtctcgaactcctgacctcaggtgatccacctgtctctgcctcccagagtgctgggattacaggcgtgagccaccacgcccggcctttgtgcaccggtttttaactgccccagatgggaagggctgcatctctgctcacattcctattagtcagaacttggccccatggcctcacctactgcagaggtggctgggaagggcaattgaccsaggaaaggaaacagcaagatgaacacattgtattgtgtgccgcacactgccacccccacatgtcagggaaggagggtcttgggaaggctgctgggtgggtgactgccactccacctcacttccacttactccccaaccaggccagcaagtctggtcacagatgtggcaggggaggctccccttctgtgggtttccatggccttgaaggaaataaaaatatttctccctaaaatattgaggattgttaaattaaagacccttaaaacatgggaacactctacctcaccctctacttgcctgatggcaggacataaatccttccaaactggatgtgtgggtgaatgg

SEQ ID NO: 933847 - DNA, 629 bp, Homo sapiens
tggcctctcagagaaagcagtagcatggaggctcagcttgatggctgtgctaggagtcttccttgtaccaataggatggcccagtaagctcccatcccaagtcagcccacctgacttgtgatgaactggcaacaacttgctgcttctaatccctcagtggaaaatgtgctcattaggccagtcatggtggctcatgcctgtaatcccagcactttgggaggctgaggcgagcagatcacttgaggtcatgagtttgagaccagcctggccaacatggcaaaatgctgtctctacaaaaaatacaaacattagaagggcgttgtagcacatgcctgtaatcccagctactcgggaagctgagtcagggcacttgaacccaggaggcggaggttgcagkgagccaagatcatgccactgcactccagcctgggcaacagagtgagactccgactcaaaaataataataataataataataataataataataagtaatttgtctgtggttttacattaagcaactgaattgggattaaagggaaaaaaacattcctttattaaaacaacagttaataaatactaacttaaaaacaaaaaaaagaaaaagaaaatgtgctcactgagggctg

SEQ ID NO: 933848 - DNA, 679 bp, Homo sapiens
agaaggagtcagagagccttgggccagaattccaggggctctgggagtgcctgccaggtgagttgaacagtccgatttccagtggggtcccgcacagatggacacggcttaggaggaatcctgggctgcaggcattccttggcctggtggtcagatttctggcacttgtagcaagctcctgtgggaggaggttctggaggaactcctggctgctgtggttcaggcgtttggaagttcttgtgtgctggagatgtggctggggtttgtctcacagtggaggcaaggaattgcaactttttttttattattgtacgccttgaaggtgagatwaatgaagtcctgttgtggggtttgagggccagattccagtttttggagttttatttaatgtcgggagcagattaggtaataaaatgtatattgagaatatgatggccttttgaccttttagggtctagggctgtaaagcgtctcagggttgctgtggaacgagccataaactgggctgggtttttatatttgatgaaaaggagcctaaacacttctgatttgggataaagaaaaaggagcattaaccttgactatgcctttggctccagcaacctttttaagagtaaattgctgggcaggtggtggagggctagtcacggaacgaaactgtaagccagaccaggtgtga

SEQ ID NO: 933849 - DNA, 614 bp, Homo sapiens
agactggagtagcatctcatgccctagaattttaggggtgctccctgtgctttcaatgagtctcaaacacaccaactctcatcttgaactctctgtttgctcctcaatttttgcagctcctactttttcttcttttcctgggatttcccattcttctctacaaaaatgaccaactcccagttcctgcctgggtggaagtgacaattttattactttttctttcacctcgtgattctacaaagggaacaaatgagccctggtttaaggcttgcagatccattggtgagatggggaggagactcttttatccacaggaaaaacagttgaggggggkgttccttcttatactggtctgctatgactgccacattaaaataccacagactgagtggcttaaacagcagaaatttatttctcagagttctggaggttagaagtccaagatcagggagcctcagtgtgtttatttttcctaaagcctctcgccttgactttcagttcaccgtattttcactgtgtcctcacatggctgtttctctgtgcacatccctccccagccccctggcttttcttcttcttctaaggataccagacctattggattaaggccctac

SEQ ID NO: 933850 - DNA, 655 bp, Homo sapiens
aaacatttatctacctgtaatgtttgataaattgctggaggccaagtacagattagcatgataatgagaaaattctgaagggtctcttccccactgtcattggttcgggggggacatttcacaggctttctttccagttacccccaccaagtttctcatggtgaggctctcagaaagatgccctgatggccttggcaggggcaggagacraatggccctggtatgaccctcccaggcccttctccctaacagaagcccactctccaggggcaggacatccccagagggcaacacagtaacctcacctcagcaaggggttggggaatactgcctttccccagacccctccagcttttctgtctcacctaaaggaaaacattaaagaatgtggtcaatagggaacatgaatccaaggatatggatcggaaatggaggaaccgagacttttgtgaagaccacagcatgaggaaggccctgcacctcaccaccacaaaaacaagcttccagtataaagaccggcctgtggctgaaagagtcaaaacacagtctctctgaggagcagtgcaaaaggaagcccccgagccaagaagagatgtaaaccaagacaccgaaggaatctgcagccttggcacctacaaacagcccacattagaca

SEQ ID NO: 933851 - DNA, 726 bp, Homo sapiens
caaaaaaaataataatatagagagagcctctgtacgatttaccaagttcccttcaatggtaacatttggcaaaagtatagtagtatgtcaaaaccagaatacaatctactgatcttattactatttctccagttttacttgtagtcatttgtttgggtgtgtgcatttagttctgtacaattttatcataattataggattttgtatccaccaccacagtcragatgttaaaccattcaattgcctcgagattcctttgcacggctcatttatcaccaagcacaccttcctcatgctcaccttgctgcctcccctaagccctagacataacgtatctattcctcatttttttaaatgctgtcacttcacaaagttaaataaagagaatcacacagtatgtaacatttttgatttggcatttttgtactcagaaaaatttcatggagattcatccagttgttggatgtatcagtagtctattcctttttactgctgatcagtatttaatggtatacatgtaacagtttgtttaaccattggcctgtttaagagcatcttgactttccagttcttggtgacaacaaataaaactgctatgaacattcacatactgtttttgtgtgtgcataagtttttatttcattttattctcaagagagctactgctgggttgtgtgttaattgcatgattaattttataagaaattgagaaaccattttttagtg

SEQ ID NO: 933852 - DNA, 737 bp, Homo sapiens
agtctattcctttttactgctgatcagtatttaatggtatacatgtaacagtttgtttaaccattggcctgtttaagagcatcttgactttccagttcttggtgacaacaaataaaactgctatgaacattcacatactgtttttgtgtgtgcataagtttttatttcattttattctcaagagagctactgctgggttgtgtgttaattgcatgattaattttataagaaattgagaaaccattttttagtgactggaccatattacattcccaacaaggatgtatgaggggtccagcttctccccattctcaccaatatttggcactgtcacacaatttttttttttttttgagatggagtcttactctgtcgcccagactggagtgcagtggcatgatctcggctcactgcaagctccgcctcccgggttcaggccattttcctgcctcagcctcccgagtaactaggactacaggcacacaccaccatgcgtggctaatttttttgtattttttagtagagatgggatttcaccactttagccaggatggtctcgatctcctgacctcgtgatccgcctgcctcrgcctcccaaagtgctgggattataggcgtgagccaccacacagggccagcaccatcacattttttaaaaattacatattctgatcaatttgtagtggtgtctcattgtggttttagtttgaatttccttggtggctgatggtaccaaa

SEQ ID NO: 933853 - DNA, 611 bp, Homo sapiens
atgtatactggtatactattgtggtcttcatttgcatttccttaatggctagtgatactggacatcgtttcaggtgctcattagtcatctgaatatccccttaggtgaaatgtctctacatatcttttgcctattttctaactggattatttctttaatattgagtttcttcctataaccttgatctgactcctttgctacatatgtggcttgcaaatattttcacttagttggtagctggtcttcatcctcttagcagggttgtttgaagaaaaaaaaaattttttttttttgagacggagtcttgctgtgtcgcccaggctggagtgcagtggcgcratctcggctcactgcaagctctgcctcccaggttcatgccattctcctgccttagcctcccgagtagctgggactacaggtgcccaccaccacgcccggctttttgtaattttagtagagatggggtttcaccgtgttagccaggatgttctcgatctcctgacttcgtgatccacccgcctcggcctcctaaagtgctgggtttacaggcttgagccaccgcacctagcctaaaaagttttaattttaataaatttcaattaatatgaaca

SEQ ID NO: 933854 - DNA, 611 bp, Homo sapiens
atgtatactggtatactattgtggtcttcatttgcatttccttaatggctagtgatactggacatcgtttcaggtgctcattagtcatctgaatatccccttaggtgaaatgtctctacatatcttttgcctattttctaactggattatttctttaatattgagtttcttcctataaccttgatctgactcctttgctacatatgtggcttgcaaatattttcacttagttggtagctggtcttcatcctcttagcagggttgtttgaagaaaaaaaaaattttttttttttgagacggagtcttgctgtgtcgcccaggctggagtgcagtggcgcaatctcggctcactgcaagctctgcctcccaggttcatgccattctcctgccttagcctcccgagtagctgggactacaggtgcccaccaccacgccyggctttttgtaattttagtagagatggggtttcaccgtgttagccaggatgttctcgatctcctgacttcgtgatccacccgcctcggcctcctaaagtgctgggtttacaggcttgagccaccgcacctagcctaaaaagttttaattttaataaatttcaattaatatgaaca

SEQ ID NO: 933855 - DNA, 568 bp, Homo sapiens
atttggtgttttcacatagtcccatatttcttggaggctttgtcatttctttttattttttttttctctaaacctcccttctcacttcatttcattcagttcatcttgcatcactgataccctttcttccagttgatcacatcggctcctgaggcttctgcattcttcacgtagttctcgagccttggctttcagctccatcagttcctttaagcacttctctgtattggttatcctagttataaattcgtctaaatttttttcgaagtttttaacttcttttcctttratttgaatctcctccagtagcttggggtagtttgatcgtctgaagctttcttctctcaactcgtcaaagtcattctctgtccagctttgttccgttgctggtgaggaactgcgttcctttggaggaggagaggcgctgtggtttttagagtttccagtttttctgctctgtttttttcccatctttgtggttttatctactttttgtctttgatgatggtgatgtacagatgagtttttggtgtggatgtcctttctgttgttagttttccttctaaca

SEQ ID NO: 933856 - DNA, 573 bp, Homo sapiens
aggtcttttggagtttgctagaggtccactccagaccctgtttgcctgggtatcagcagcggtggctgtagaacagcgtgtactggtgaaccgcaaatgctgctgcctgattgttcctctgtaagttttgtctcagaggagtacctggctgtgtgagatttcagtctgccccttctgggggatgcctcccagttaggctacttgggggtcagggaccacctgaggaggcagtctgccagttctcagatctcaagctgcatgctgggagaaccactactgtcttcaaagctgtcagacagggacwtttaagtctgcagaggttactgctgtctttttgtttgtctgtgccctgcctgcagaggtggagcctacagaggcaggcaggcctccttgagctgtggtgggttccacccagttcgagcttcctggctgctttgtttacctaataaaacaactaacttggcaatggtgggcacccctcccccagcctcactgctgccttccagtttgatctcagacttctgtgctagcaatcagcgagactccgtggggtaggaccctccgagccaggtg

SEQ ID NO: 933857 - DNA, 730 bp, Homo sapiens
aaaaaacaaaaatgagctgagtgtggtggcttaagcctgtaattccagcactttgggaggccaaggcatgaggatcacttgagctcaggagcttgagaccagcctggccaacatggtgaaaccccatctcaactaaaaaaaatacaaaattagctgggcatgatggtgggcgcctgtaatcccagctacatgggaggctgaggtaggagaattgcttgaacccgggaggcggaggttgcagtgagccaagatcgcaccactgtataattwaaaaaaaaaaaattgaaaaagtagccaggcgtagtggcaggtgcctgtaatcccagctactcaggaggctgaggcaggagaatcatttgaacctgggaggcggaggttgcagtgacctgagattgcgccactgcactccagcctgggcgatgaagcagaaaacaaaaaacaaaaaacaaaaaaaccgaggccaccgtagctccagtgcctggagcagggcctgcgttgaggccgtggtggatgtcggagggtgggtgaatgaatgaacagtgagttcactccacattgggtgcctcagtccagccgtccccgtacacccgaggggccccacgcagccacacctggcttttctcaggcagtggctcttcccacctgggtctccgtcctaggggtctgtcgccctgatgtcagggagcgggcgcagctctcagacgcgctggtgttgtctcctaactctgcc

SEQ ID NO: 933858 - DNA, 678 bp, Homo sapiens
aagtctctcttatatacatatatacgcacatacatatacacatatacatatacacatatacatacatacacatatacatatacacacacatacacacatatatagacatatacacatatacataaacatatatacatatacacatatgcataaacacatatacatatatacgtatgcatatatacatgtacctatatatagacatatacatatatagactatactatacatatacatacttatacacatrtatacatatacacatatacatatacacatacatatacacatacacatatatacacatatgcatatatacatacacatacatatacacatatatacagacatacacatgcatgtatacacatatatacatatacatataaacatatacatatatagacatatatacacatacacaaatacatatatagacatatacatatgtacatatacacatatacatacacatatatccatatccatatatagacatatatacatatacacatacacatacatatctccatatacatatatacatatgtgcatgtacataaacacatatacatatgcacatatacatatatgcatagatatgtacatatatagacacatgtatacacatatacatatatacatatgcatatatacatatgtagcaggacgagcctc

SEQ ID NO: 933859 - DNA, 692 bp, Homo sapiens
gtgagacatggagtcaaagcagatcatttcaaagctttaacatttgactgccttgctggatttaggacttgcatgggcctgtagccccttcattttggccaatttctcccatttaaagagggtgtatttacccaatgyctgtatctccattgtatctggaagtaactaatttgcttttggttttacaggctcacaggcagaagggacttgccttgtgtcaggtgagactttggacttggactttgggttaatgcaggaatgaattaaggcactggagaattgttgggaagccatggttggttttgaaatatgaaaggggcatgagattagggagggtccaggggcagaatgatatggttaggctttgtgtctccacccaaatctcatcttgaattgtaattcccataatccccacatgtcaagggagagaccaggtggaggtaattgaatcatgggggtggtttctcttattctgttcttataacagtgaatgagttctcacaagatctgatggttttataaggcactcttccctcttctattggcacttctctttcctgccaccttgagaagaaggtgcctcgcttccccttcaccttctgctatgattgtaagtttcctgaggtttccccagtcaggctgagctgtgagtcaattaaaattttttcctttataaactacccagtctctgg

SEQ ID NO: 933860 - DNA, 692 bp, Homo sapiens
gtgagacatggagtcaaagcagatcatttcaaagctttaacatttgactgccttgctggatttaggacttgcatgggcctgtagccccttcattttggccaatttctcccatttaaagagggtgtatttacccaatgcctgtatctccattgtatctggaagtaactaatttgcttttggttttacaggctcacaggcagaagggacttgccttgtgtcaggtgagactttggacttggactttgggttaatgcaggaatgaattaaggcactggagaattgttgggaagccatggttggttttgaaatatgaaaggggcatgagattagggagggtccaggggcagaatgatatggttaggctttgtgtctccacccaaatctcatcttgaattgtaattcccayaatccccacatgtcaagggagagaccaggtggaggtaattgaatcatgggggtggtttctcttattctgttcttataacagtgaatgagttctcacaagatctgatggttttataaggcactcttccctcttctattggcacttctctttcctgccaccttgagaagaaggtgcctcgcttccccttcaccttctgctatgattgtaagtttcctgaggtttccccagtcaggctgagctgtgagtcaattaaaattttttcctttataaactacccagtctctgg

SEQ ID NO: 933861 - DNA, 574 bp, Homo sapiens
gctccagactgccccctgtggccctatgctccagaatatctaggttccaggcccaccccagtagaatttgatactagtccagccctcaaagacccaagctccagactggaccccatcaacccaagaccaaagcctgcccgcatggactcagcctccaggcccactaccatggacccaggtgccagggcaccccaytgaaccctggtgctaggtcagctcctgtaaactcaggaccaggcccatctccatggacccaggcaccaggcctcccctagcaacaggttttccctcatggactcgggctttaggctggcccctgtagacacaggtttcagcctacctatgcatgcctacccatgcaggcccaatctctaggcccaacccagtggagtccagcactaggctggcctctgtgaacccaagatccaagcctaaccacctagattcgggttcaacgcctgccccactggacccatgagccagactcagccaagtggacctagccaccagaccagcctgcctgaggattccaacagcaagcttgcaagcagaccccactaaatggctcaccaag

SEQ ID NO: 933862 - DNA, 852 bp, Homo sapiens
aggagaacgaaagaaacacgttttgaaagctttctgagaagaagctcaaaagtaaggtagtgaagacccagagctacatccctacaaaattaaatctgtgatgtttagatcatgatttccagtgcaaggcagacaaggagaaaatgccaggagtgttggcatctctctctctctctcacacacacacacacgacacaggatctgatgagtttattcattcgttcaacaaacatttgctgaattacgtaccagatatctatacttatttttgttaacttcaaacctagagattggtagawatgttccagtcctcctgtcaagacttcaaggaaaaagatgtttgaaatttctatttctgtaaagattaaaacatagctacctgcctaatacctcaggaaaaaatagcacatctaaagctagtggaagaaaactaaaacttgcctcctcctgagaccaagttacatatggcaaaattatagtctatggacttaggccttccccaactttttttttagcttcttttttgaacatgggttttctggacctgctatatacactgtggagaatataaagtttaaaaaaatgtaagaaccttcctttgcattataatattaatagtttattaaggtttttttcttatttcacatctaacaagaattaaaattatttcttcactattttttaaataatttatgagttttatgagaaaaataattgataacaaacattatatttctaaactaacaaaatgactcattgataaaatggcccaacatccaccctcaaaatactgatgacagtaccatttttcccccggctttccccaccacatacttacctgtgcaacttctt

SEQ ID NO: 933863 - DNA, 810 bp, Homo sapiens
accacaaacttgcacacttttccagaaaatgcaaagacagagcttacctggccattatgaaaacatgtaagacagtgtgttcaaatactttgtgcctatccactccttgtacactctcttgctctcttgagtactcaacattaaatctaaggctctcatacacattaacaccatcaacaagcagaattaaagttgtactatatggatgtacttaaaattcgtaaaggtggaccagtgaacttttaaaacctacacataactctgatataagtacaatccttgggaaaaagtgaatttcttaactgctccatgctgataaaaacaaataaggacccctccatcaaaaaaaacctggcactttaaccaaacaagataataaagagaaaaattttaagattttaaaacaaaacaatctgaatataggatttaaataagatatgaaatccaggccagacacagtggctcatgcctgtaatcccagcactttgggaggctgaggcgggcagatcacctgaggtcgggagtttgagaccagcctgaccaacatggagaaacccttctctattaaaaatacaaaattagccgggcatggtggcacatgcctgtaaccccagctactcgggaggcggaggcaggagaatctcttgaacccaggaggtagagggtgcaktgagtttagatcgtgccactgcactccagcctgggtgataagagcaaaactctatctcaaaaaaaaaaaaaaaagatatgaaatcaattcacttttacaaaaatgttgaatccttgaaaatataaaaagtgagttatttt

SEQ ID NO: 933864 - DNA, 659 bp, Homo sapiens
catttttagtagagacagggtttctccatgttgatcaggctgctcttcaactcccgacctcaggtgatccacctgcctcggcctcccaaagtgctgggattacaggtgtgagccctgcgccccactctatttttcaacttttattggtgtatagtatttgtatatatttatggggcacatgtgatattttcttacatgcagagaatgtgcaatggttaagttcaggctatttaggatatccatcacctggggcatttatcatttctgtgtttttggagcatttcaagtcctctcatctagctattttgaaatatataatactttgatggtaattatagtcactctgtgctgctattggacattagaacatatttttttctstattactctatgtttatactctgcctttgcccattcttaccccaaaatacacccttcccagactctgttgactattattttacactgtatctccatgggattaacattttttagctaccacatctgagtgagaacatggaatatttttcttgctgtgcctggattatttcatttaatataatgacctccagtttcactcatgttgctgcaattgacaagattttattatttattatggtcaaatagtattccactatgtgtatagaccatattttctt

SEQ ID NO: 933865 - DNA, 659 bp, Homo sapiens
catttttagtagagacagggtttctccatgttgatcaggctgctcttcaactcccgacctcaggtgatccacctgcctcggcctcccaaagtgctgggattacaggtgtgagccctgcgccccactctatttttcaacttttattggtgtatagtatttgtatatatttatggggcacatgtgatattttcttacatgcagagaatgtgcaatggttaagttcaggctatttaggatatccatcacctggggcatttatcatttctgtgtttttggagcatttcaagtcctctcatctagctattttgaaatatataatactttgatggtaattatagtcactctgtgctgctattggacattagaacatatttttttctgtattactctatgtttatactctgcctttgcccattcttaccccaaaatacacccttcccagmctctgttgactattattttacactgtatctccatgggattaacattttttagctaccacatctgagtgagaacatggaatatttttcttgctgtgcctggattatttcatttaatataatgacctccagtttcactcatgttgctgcaattgacaagattttattatttattatggtcaaatagtattccactatgtgtatagaccatattttctt

SEQ ID NO: 933866 - DNA, 735 bp, Homo sapiens
tgagcagggtaagggtgattaggttttaatgggatggtaaggggtgcatgattcgtcatcaaggagggagtagaggtgtcccatacttgtgggttaaggtggggagatacaaggggaggatgtgaaggaggctttgaactggggaaaagggcagcaatgaggtatggctgtagcctaggaatagtcaggaaaacagataattttgttaaaatatctcagcctaataaggggactgggcaggtggggataactaaaaaggagtgcataaaagaatattgtccaagttggcaccagatttggggaattttaagaggtttagaagactggccgtcaatacccacaacagttatggaggcaagagaaacaagcccttgaaggtaatgtggagtgggtagcctccatattgattaagaaggggttggacttatcctccgcagtaagagttaccmgaagcatctgtgatggtccaggaggcttccgaggtgatcacgcagtgtcagtcttcagccgctaagctgagaagatctgggaagaagtcagtcagagccttgggccagttggacagttcaatttccagtggggtcctgcacagatgggacacggcttaggaggactcccgggctgcgggcattccttggcccagtggccagatttctggcacttgaagcaagatcctgggggaggaagtcctgaaggaatgcctgactgctgtggcttaggtgttttgaagttctt

SEQ ID NO: 933867 - DNA, 735 bp, Homo sapiens
tgagcagggtaagggtgattaggttttaatgggatggtaaggggtgcatgattcgtcatcaaggagggagtagaggtgtcccatacttgtgggttaaggtggggagatacaaggggaggatgtgaaggaggctttgaactggggaaaagggcagcaatgaggtatggctgtagcctaggaatagtcaggaaaacagataattttgttaaaatatctcagcctaataaggggactgggcaggtggggataactaaaaaggagtgcataaaagaatattgtccaagttggcaccagatttggggaattttaagaggtttagaagactggccgtcaatacccacaacagttatggaggcaagagaaacaagcccttgaaggtaatgtggagtgggtagcctccatattgattaagaaggggttggacttatcctccgcagtaagagttaccagaagcatctgtgatggtccaggaggcttccgaggtgatcasgcagtgtcagtcttcagccgctaagctgagaagatctgggaagaagtcagtcagagccttgggccagttggacagttcaatttccagtggggtcctgcacagatgggacacggcttaggaggactcccgggctgcgggcattccttggcccagtggccagatttctggcacttgaagcaagatcctgggggaggaagtcctgaaggaatgcctgactgctgtggcttaggtgttttgaagttctt

SEQ ID NO: 933868 - DNA, 595 bp, Homo sapiens
acttattttgtgggggaatgtcatcagttaaggcagggcagggcattttcacttcttttgtgattcttcagttacttcaggccatctgggcgtataagtgcaagtcacaggggatgcgatggcttggcttgggctcagaggtctgacattcctgccttcttatattaataagaaaaacgaaacaaaatagtgttgaagtgttggggcagcgaaaatttttggggggtggtatggagagagagaatgggygatgtttctcaggcctgctttgagcgggattaggggcggcgtgggaacctagagtggtagagattaagctgaaggaagattttgtggtaaggggtgatattgtggggttgttagagaaacatttgtcatgtagaattattggtgatggcctggatatggttttgtatggattgaaaaactaaatggaataagagaaggagaaatacaggtattaaaggactaagaattgggaggacttaggacatctaattagagagtgcttaaagaggttcagcatagccttgccaccaaagattatttatttcctttaagagttaagagtggcggtttggggatagcaccagga

SEQ ID NO: 933869 - DNA, 623 bp, Homo sapiens
ccatgttgcagcaaatgatgtgatttttaaaatttcttcttatagctgcatagtattccgtgcagtttacgtaccacagcttctttatccaatccaaaaatgatgggcttctagggtgattccctgtctttctctagtaaatagtacagggatgagtatgtgagtgcatgtgtctttttggtagtattatttattctcctttggatgcataccagtaaatggcattgctgggttatatgatggctctgttttaagttctttgagaaatctccatacttcaaattggctgaactaatttacatttccacaaacagtatataagtgttcccttttctctgtaaccttgccagcatctgttatttkttgactttttaataatagctatcctgactggtgtgagatggtatcttactgtggttttgatttgcatttctctgatgattagtgaaggaagctgagaaatttttcatgtgtttgttagtcattcatatgtcttcttttgagaagtggctattcatgtcctttgcccaaattttagtgaggtaataatctcattacaaattcttattttttatttttggtcgggcgtggtggctcacgcctataatcccagcactttggga

SEQ ID NO: 933870 - DNA, 675 bp, Homo sapiens
cgtttactaaagtattctatagttacatcgctggaaaacaaacacttctaattaggctggtgtggttagacttctttgcttaggaaatgactccaatagggtaatacttaggtgattccaatttgaacacacttgtaagcttactgctagatatcttggccatgttctccttgtcagattgcccctttaacctcatgaattattttaagccaaaaagaaaatgsaagagggccagtgatctaactcataacactctgggtgccctggtgcaaccagttgctttgtctggaaagggcacaaaggatcttgatctgctgagaccagccagtgtcacagacttctttcccactctctcataagagatatctccagaaattctagagaatacaaaaaaattacattgaaattaaaaccagtggttggctttgggccaggtacagtggctcacgcctgtgatcccagcactttgggaggccgaggtgggcagatcacttgaggtcacgacttcgagaccagcatggccaacatggtgaaacctcgtctctactaaaaatacaaaaattagccgagcatgatggtacatgcctgtagtcccagctactccggagctgacgcaggagaatcacttgaacccaggaagcagaggttgcaataagccaagatggagccactgca

SEQ ID NO: 933871 - DNA, 782 bp, Homo sapiens
ctctcatgtgtgcatgaagagtggcaagacaaaaaaaaaaaaaaaaatcggaggaaaataattcagttgactgagaagaaaaaaacctttttccagaaaaacaaggtccgagaagagaaaaagttaaaggactttaaaatatatctatagcttgtttatccacttttaattaagctgaattttaaccatagtgctctttaaaaaagaaatccgttcagatctcttattacccaactttagccatgccaagcagccaatatttctagtttctgagctttaccagaggtaaactcctaggtgcttcaaagacatggtaggcagtttcttttttacaagatttagaatctccacaaagtagctcagagaaaggaaaattcaagagaggaaattagaagctatcaatcgggggggggggagggggggagaacctcaataaatggcaaagttacagaaataacaaaccagaaaggaatcattccagacgccaacaattgaacccaggccaccactgtcaaaagataatgccttagctactgagctatccagcattgagcagtttctagctttcccmagaaggagcctaaagaagccaatttcaaatttgcaagacttttaactgttcaagaaaaatttttaggactatgatatgaaccccaaaattcctgtcttctggatggtggaaaccaaaagaaagtatctccacattgtcacaaggttaagctcttaagcacacagaacaagacagagaaatttcatacagtattggcttcaggaacccgtag

SEQ ID NO: 933872 - DNA, 590 bp, Homo sapiens
ccacctcagcctcccaaatgttgggattataggcatgagccactgtgcctggcctacaagtttattataaaggacagaagttggttttgttttgtttttttagtcccgctgtgtgatgttacccagactggagtgcaatggtgcaatcatggctcactgcagcctcaacctcctgagcacaagtgatccttccagcttakcctcccaagtagctgggactacagccacatgccaccacacctggctatttttttttttttttgtattttttgtagagatgggggtctcaccatgttggccaggctggtcttgaactcctggggtcaacagatcctcccatctcagcctcccaaaatgttgtgattacaggcatgaaccactgcaccctgcctactagtttattataaaggatacaacttgggaacagacaaatggaaagcacgcatagggaaagctatgtggggaggggtatgaagcttccatgccctggaggcaccaccctcgtgtcctcagtgtgtttgccaatccagaagctcttggagtctcattgttcaagagcttttacagaactcaatctctagctccccctc

SEQ ID NO: 933873 - DNA, 552 bp, Homo sapiens
cagggttttgccatgttgccccagctggtctccaacttctggcctcaagtgatccgcccaccttggcctcccaaagtgctgggattacaggtgtgagccactgtgcccagtgcactcacatgtttctgatgtctctccatgtccaaattttctcttcttacaaggacacaggtcagattagattagggctcactttagagacctcattttaacataatcacctctttaaagaccttgtctctgtgccaggtgaggtggctcacatctgtaatccagcactttgggacactgaggtgggcagatcatgaggtcaagagatcaagaccatcctggccaacatggtgaaamcccgtctctactaaaaatacaaaaaaaaagattagctgggcgtggcggcgggcgcctgtagtcccagctactcaggaggctgaggcaggagaatcgcttgaacccaggaggtggaggttgcaatgagctgagatcacaccactgcactccatcctggcaacagagtgagacttggtctcaaacaaacaaacaaacaaacaaaaa

SEQ ID NO: 933874 - DNA, 578 bp, Homo sapiens
cttgaggcgaccatctgcagatctcccaagctctctgtctctctgtgtagttctctcctttccagaaatttgctctatgaactctagccacattggacttcccaaactcctagctcaatcttctcaactcagggagagaagacctagtgcctggagtctctctaaacggaattgtaatcattgagatcacctcatttatttcccatctctcagggattgcagtcctttattgccagatgcccagtgtctggaatgctgttgtttcatatattttgtctctgtctcatccttggaggaaaaagcyggtcctcattactccatcttgtaatagacatcctataaagcccatgtgatttccgtatgctgtctgtctcacgtacatctcagaatttcagtgctttgagatgattgactccagcctcttcattatcagcaagggtaacagacctggtgaggtaatgttgattgtccacgttttacagtaaatttgtgccagagacctgtgccaggtcttaaaaatgcctatacaatcatacctcaggatagaactgcttcttagaagggcaagaatattattt

SEQ ID NO: 933875 - DNA, 578 bp, Homo sapiens
cttgaggcgaccatctgcagatctcccaagctctctgtctctctgtgtagttctctcctttccagaaatttgctctatgaactctagccacattggacttcccaaactcctagctcaatcttctcaactcagggagagaagacctagtgcctggagtctctctaaacggaattgtaatcattgagatcacctcatttatttcccatctctcagggattgcagtcctttattgccagatgcccagtgtctggaatgctgttgtttcatatattttgtctctgtctcatccttggaggaaaaagccggtcctcattactccatcttgtaatagacatcctataaagcccatgtgatttccgtatgctrtctgtctcacgtacatctcagaatttcagtgctttgagatgattgactccagcctcttcattatcagcaagggtaacagacctggtgaggtaatgttgattgtccacgttttacagtaaatttgtgccagagacctgtgccaggtcttaaaaatgcctatacaatcatacctcaggatagaactgcttcttagaagggcaagaatattattt

SEQ ID NO: 933876 - DNA, 656 bp, Homo sapiens
attgtgctatgtgagggcttttttaaaattttgaatacaagtcccatatcagatatataatttgtgagtattttctaccattctctggttttctttccactttcttggtaagatcacttgaagtacaattttttaaaattttgagaaaataccttctattatttyttatcccttgtgcttttaatgtcttatgtaagcacgctttgcctaatccaaagtctcgaaaatttattcctacatttttatttaagagttttacagtttaatgcttacatttcagtctatgattcatgttgagatagttttgtgtatggtatgatgaaggcattcaaccaattgttttacatgtggatgtccaatgtcccaattccatattttgaaaagactatttttccccattgaattttcttggcactgttgttgaaaatcaattgaccgttagtgtagttgtttatttctagactctaaaacagatttcattgttctatatgtctagtcttaggccagtatcacactgattactgtagctttgtagtaagctttgaaattaggaagtgtgagtcttacaacttcacatctccttttcataattatttggctcttctgggtcccttgcaattccatgtgaattttagaatcaacctgccaatttctaa

SEQ ID NO: 933877 - DNA, 541 bp, Homo sapiens
  misc_feature 215, 216: n = A,T,C or G
aagctcatgaaccgtgctgcctcccagttttgtcatctgtgtgatggggatacaactgttagctcatggcactggagggggaccggaggacccaatgtctgtcaagcactaacgctttgcccagggtcccccatgtggtggtgggtgccacagcatcagtatctgggtaggggcctgcgggaagcgggactggggaatgacagccggtgcatggnntgggcagggagactgaagggcagagtcaaggccgactccacacatggggctgtcgctggggkgagtggggatctggaggaagaggcctaagaaagaagaggcacctgaaccatgagacccaaaggccccccttgcctctggccagggaaacagagcctgtggctccagccttggggacaaaggcccgttccttggctcactttccggggctcccttctctgagagcctaaccagggtccctctggagtctaggttcctgccacaacagcccaagtagattccgctctgcctctgaattccatagtcactccccacaacccacaca

SEQ ID NO: 933878 - DNA, 402 bp, Homo sapiens
caagtttcttcttgaagtgaaagccttcaagagtggcatcccttcctcactgccataattggcggacatcctccatgtctcactgaagaccctccttgagctggaagtccagaactgatattctactctctcaaacatatgtgtcttaccaaggccactatcatgctggccacctattgcttgtcctgcctctycaatgtgacatcattgaggtaatgtgctagttctcaactggaaacaattttgccctgtagaagacatttggcaattcctggagaaattttctttttctttttttggagacggagtcttcctcagtcacccaggctggagcgcagtggtgtgatctggggtcacagcaagctccgcctcccaggttcatgctattctcctgcctcgggc

SEQ ID NO: 933879 - DNA, 639 bp, Homo sapiens
agaaccactactctcttcaactctatcagacagggacatttaagtctgcagaggattctgctgccttttgtttggctatgccctgcccccagatgtggagtctagagaggcaggcaggcctccttgagctgcagtgggctccacccagttggagcttcccagccgctttgtttacctactcaagccttggcaatggcaggtgcccctcccccagcctggctgccaccttgcagtttgatctcagactgctgtgctagcratgagtgaggctccacaggcgtaggaccctctgagccgggcacaggttataatatcctggtgtgtcatttgctaagagcattggaaaagcgcagtattagggtgggagtgacccactttttctggtgctgtctgtcacccatttctttgactaggaaagggaattccttgacccattgcgcttcctgggtgaaatgatgcctcaccttgctttggctcatgctcggtgtgctgcacccactgtcctgcacccactttctgacactgcccagtgagatgaacccggtacctcagttggaaatgcagaaatcacccatcttctgcattcgtcacgctgggagctgtagactggagctgttcctcttcagccatcttggctcc

SEQ ID NO: 933880 - DNA, 573 bp, Homo sapiens
tctgggagaaccactactctcttcaactctatcagacagggacatttaagtctgcagaggattctgctgccttttgtttggctatgccctgcccccagatgtggagtctagagaggcaggcaggcctccttgagctgcagtgggctccacccagttggagcttcccagccgctttgtttacctactcaagccttggcaatggcaggtgcccctcccccagcctggctgccaccttgcagtttgatctcagactgctgtgctagcgatgagtgaggctccacaggcgtaggaccctctgagccgggcacaggttataatatcctggtgtgtcatttgctaagagcattggaaaagygcagtattagggtgggagtgacccactttttctggtgctgtctgtcacccatttctttgactaggaaagggaattccttgacccattgcgcttcctgggtgaaatgatgcctcaccttgctttggctcatgctcggtgtgctgcacccactgtcctgcacccactttctgacactgcccagtgagatgaacccggtacctcagttggaaatgcagaaa

SEQ ID NO: 933881 - DNA, 639 bp, Homo sapiens
agaaccactactctcttcaactctatcagacagggacatttaagtctgcagaggattctgctgccttttgtttggctatgccctgcccccagatgtggagtctagagaggcaggcaggcctccttgagctgcagtgggctccacccagttggagcttcccagccgctttgtttacctactcaagccttggcaatggcaggtgcccctcccccagcctggctgccaccttgcagtttgatctcagactgctgtgctagcgatgagtgaggctccacaggcgtaggaccctctgagccgggcacaggttataatatcctggtgtgtcatttgctaagagcattggaaaagcgcagtattagggtgggagtgacccacttttyctggtgctgtctgtcacccatttctttgactaggaaagggaattccttgacccattgcgcttcctgggtgaaatgatgcctcaccttgctttggctcatgctcggtgtgctgcacccactgtcctgcacccactttctgacactgcccagtgagatgaacccggtacctcagttggaaatgcagaaatcacccatcttctgcattcgtcacgctgggagctgtagactggagctgttcctcttcagccatcttggctcc

SEQ ID NO: 933882 - DNA, 639 bp, Homo sapiens
agaaccactactctcttcaactctatcagacagggacatttaagtctgcagaggattctgctgccttttgtttggctatgccctgcccccagatgtggagtctagagaggcaggcaggcctccttgagctgcagtgggctccacccagttggagcttcccagccgctttgtttacctactcaagccttggcaatggcaggtgcccctcccccagcctggctgccaccttgcagtttgatctcagactgctgtgctagcgatgagtgaggctccacaggcgtaggaccctctgagccgggcacaggttataatatcctggtgtgtcatttgctaagagcattggaaaagcgcagtattagggtgggagtgacccactttttctggtgctgtctgtcacccatttctttgactaggaaagggaattccttgacccattgcgcttcctgggtgaaatgatgcctcaccytgctttggctcatgctcggtgtgctgcacccactgtcctgcacccactttctgacactgcccagtgagatgaacccggtacctcagttggaaatgcagaaatcacccatcttctgcattcgtcacgctgggagctgtagactggagctgttcctcttcagccatcttggctcc

SEQ ID NO: 933883 - DNA, 575 bp, Homo sapiens
caaagaaccacaggctattgtgttaagaggaagcaatagagaggattgaggctgggaagctaatggcaataatgagatgagacatgagggtgccttagatggggaacagtggaggtgataagaagtgattagattctgagcatatttagstggtacagccaaaggatttgcagatggattggaatgcaggcaatgaaaaatgtggagtagagaggcctaataaaggggaaggatgaatttgccattactgtgctggattcctgaagaagttttctgactggtctcctggattccatgttcagtcttctataatccattgtcaacagagtagctggagtgaacctttcaaaactgaaatgagatgatgttactcctctgcccagtgtcccatcgccaaatatttacaatggcctacagagtcctaaataacctgactccctgcgacctttctgttcacatctcctaattcactctgttccagctgtgttcctctctggccttactggttctacaaatcaccctacaggattctaactcaaggcctttgcacttatgttccttgatatgcatggctc

SEQ ID NO: 933884 - DNA, 575 bp, Homo sapiens
caaagaaccacaggctattgtgttaagaggaagcaatagagaggattgaggctgggaagctaatggcaataatgagatgagacatgagggtgccttagatggggaacagtggaggtgataagaagtgattagattctgagcatatttaggtggtacagccaaaggatttgcagatggattggaatgcaggcaatgaaaaatgtggagtagagaggyctaataaaggggaaggatgaatttgccattactgtgctggattcctgaagaagttttctgactggtctcctggattccatgttcagtcttctataatccattgtcaacagagtagctggagtgaacctttcaaaactgaaatgagatgatgttactcctctgcccagtgtcccatcgccaaatatttacaatggcctacagagtcctaaataacctgactccctgcgacctttctgttcacatctcctaattcactctgttccagctgtgttcctctctggccttactggttctacaaatcaccctacaggattctaactcaaggcctttgcacttatgttccttgatatgcatggctc

SEQ ID NO: 933885 - DNA, 777 bp, Homo sapiens
gctgggagggcagcaagagaaaggtgtggacaatgatgcttcagaactgtaatctcctcttctgcattccactgcagaagacagatttatatgacaatcctggggtataaaaaaagaaaaaataaaccttagaaaattaaaaaggatttttcctaaattaagactgacaacatctcacacataaaacatacatgtagaggtcaggcacggyggctcatgcctgtaatcttagcactttgggaggccaagggcaggcagatcacctgaggttaggagttcaagatcagccaggccaactaaaaatacaaaaattagcctgtagcatggtggcccacacctgtaatcctagctacttgggaggcagaggcaggacaatcgcttgaacctgggaggcagaggttgcagtgagccaagatcatgccattgaactccagcctaggcaacagagggagactccatctcaaaaagaaaaagaaagaaagaaggaaggaaggaagggaggaagggagaaagaaacagaaagaaaagaaagaaaggaaagaaagaaagaaagaaagaaagaaagaaagaaagaaagaaagaaaagacagacagacagaaagaaagacagacagacgtggaaatacttttatcctataccttaagaaaacattaatcaattaaaatgtacattttgcttaatcatcagattaaaattagagtttaaaccatagaaaattttaaagaaatagtcatgtcaacaactcctctccaacccagaactatagacatacccac

SEQ ID NO: 933886 - DNA, 624 bp, Homo sapiens
acgctctccagtgtcaaccatattgtcaaaaaatgacaggatttccctgttctcgtcttcatttttaattacaaaaagcgcatactttacttacaatgaatataaacaataaagaaaatagtgagtaaaaagggaaatttccacttcctcttattactattaagtatcactattaaaagttttgtatgtatgtttccagcctatatgtcacacgtgtactcacacacatacatgtatatatacatagagatttgtttgttgacaaaattctaattttgttattactcatagtatactattttttcaatgtgtgtggttttgttttttgttttcgttttgtttttgtttgagatrgagtctcactctgttgcccaggctggagtgcagtggcacgatctcggctcactgcaacctctgcctcactgcaacctctgcctcctgggttcaagcgattctcctgccttagcctcctgagtagctgggattacaggcgcctgctaccacgcctggctaatttttgtatttttaatagagacggggtttcaccatgttagccaggctggtctcaaacttctgacatcaggtgatctgcccgccttgccaaggtgtttttaatacctccaa

SEQ ID NO: 933887 - DNA, 572 bp, Homo sapiens
ggctctgtgtctccacccgaatctcatctcaaattgtaatttccacatgttgaaggacggacatgatgggagatgactggatcatggggatggttccctccatgttgttctcatgatagtgagtgagttcccacaatatctgatggtttttaaagtggcacttcctccattgctccctttcttacctgccaccatgtaagatgtgccttgcttccccttcaccttctgtcatgactgtaagtttcctgaggcctccccagccatgtggaatggtgagtcaattaaacctgtcttctttataaattacccagtcttggggasttctttatagcagtgtgaaaatggacgaatacagagaattggcactggcagagtgggatactgctacaaagataacctgaatatgtggaagtaactttggaactgagtaacaggcagaggttggtggaacagtttggagggctcagaagaagacaggaagacatgggaaagtttggaacttcctagagacttgttgaatggttttgaccacaatactgatagtgatatggacaatgaggtccaggctgagg

SEQ ID NO: 933888 - DNA, 665 bp, Homo sapiens
tgagcagagaactatcctattatattggcatagaagggaaatctgcaaaagcctcaagacacaaatgatgtttgagatgagccttaatggataaaaagagactcagagacatatgaggaagggtattcacacactaaggggatggtgtaagtaaaagcagaggctagtttttcttgtaggtagagtatttgtagagcaataaaaaggcatgaagctgaagactgggaccttattgtagaaggtcttgagtactagggtgaggattctgagggtaaattcaatagattggaaaacaaatactggactgggagtaaagagttatctggccaaacctagraactgagtgaccttggactaatcagttaatctttttgagctttaacttccttgctgtactatggagatggcaattgttgcgttaaagattgggcataagtgacaaaatgcatggggaagtattttgaaaactaaaacttaataggagccatcatcatcttcagcgtcaccattgccatcatcatcatcattgtgatgtgatgatgcatatgaagcttttttttttttttttttgagatggagtctcgctctgtcacccagcctggagtgcagtggcatgatttcggctcactgcaacctctgcctcccaggttcaagcgattcttgtg

SEQ ID NO: 933889 - DNA, 733 bp, Homo sapiens
aaataatgtggaattcatgctctttaaacatttaaatggactgcactgctggagtatcttactttccatcaatagtgtcatatagggactaaatatgttttttgaaaagaaaatcaaaataatcctgcattaaactgaattctgcacagggaagttttgctatactgcaactttttttttttttttttgagatggggtctcactctgttgcccaggctggagtgcagtggtgcactctcttcactgcaacctctgcctcctgggttcaaagcgattctcctgcctcagcctcccgagtagctgggactacaggtgcctgccaccatgcccggctaatgtttttatttttagtagagacgaggtttcaccatattggccaggctggtctccaactcctgaccttgtgatctgcctgmcttagcctcccaaagtgctgagattacaggtgtgagccaccgtgctcggccatatactgccacatttctacacagttatatcaaaagcaatccatgtttatggttttaaaaaaatgaacagaaaagaaaaggtaatgactttgcttacttttattttaaattctgttagcccttcaatgattagtctaagtgatgtgtttttctttgcttgagatggagtcccagtctgttgcccagactggagtgcagtggtgcaatcttggcttactgcaatctctgcctcccgggtaatctcaagtgattctcctgcctcagcc

SEQ ID NO: 933890 - DNA, 555 bp, Homo sapiens
taatccagtctactattgatgggtatttaggttgattccatgcccataattctgcaatgggcatatgcgtccgtgtgtctttatgatagaatgatttatattcctttggatatgtacccaaaaatgggatcactgggtcgagtgrcaattctgttttatgttctttgagaagtcaccatactgctttccacaatggctgaaccagtttgcactgccaccagcagtgtataagcattcacttttctccgggaacttaccagcatctgttcttttttttttttttttttttttgtagtaattgccattctgactgatattagatggtatctccttgtggttttgatttgcatttctctgatgattagtgatgttaagcattttttaatgcttggttccttggaagtcttcttttgcaaaatgtctcttaatgtcctttgcccactttttaatggggtgtttgtttcttgttcatttaagttccttatagattctggatattagaactttttcagatgaatagtttgcaaatattttcttgcattctgtaggttgtct

SEQ ID NO: 933891 - DNA, 555 bp, Homo sapiens
gctcattcaggagcaagttatttaatttccatatatttgcatggttctgaaggttccttttggagttgatttccagttttattccactgtggtctcagagagtgcttgatataatttcagttttcttaaattgattgaggttttatggcctatcatatggtctatcttggagaaagttccatgcactgttgaatagaatgtrtattctgcagttgttggatgaagtgttctgtatatatctgttatgtccatttgttccaaggtatattttaaatccactgtttctttgttgactttctgtcttgatggctggtctagtgctgtcagtggagtattgaaatctcccactattattgtgttgctgcctatctctaggaggattatggctgtctctgcaggttgtcagggaagtggggaaagccggcagtcacaggcctcacccagctcccatgcaaaccgaagggctggtttcactcccactgtgccccctgcaacagcccccaatccgtttccaggcagacagcatgacaggcttgaaaacttgccctgggctac

SEQ ID NO: 933892 - DNA, 555 bp, Homo sapiens
gctcattcaggagcaagttatttaatttccatatatttgcatggttctgaaggttccttttggagttgatttccagttttattccactgtggtctcagagagtgcttgatataatttcagttttcttaaattgattgaggttttatggcctatcatatggtctatcttggagaaagttccatgcactgttgaatagaatgtatattctgcagttgttggatgaagtgttctgtatatatctgttatgtccatttgttccaaggtatattttaaatccaytgtttctttgttgactttctgtcttgatggctggtctagtgctgtcagtggagtattgaaatctcccactattattgtgttgctgcctatctctaggaggattatggctgtctctgcaggttgtcagggaagtggggaaagccggcagtcacaggcctcacccagctcccatgcaaaccgaagggctggtttcactcccactgtgccccctgcaacagcccccaatccgtttccaggcagacagcatgacaggcttgaaaacttgccctgggctac

SEQ ID NO: 933893 - DNA, 555 bp, Homo sapiens
agctgcgtcccaaatgtgacctgactgcttttgtaagagggtcctggatcccattcctcctcattgggtgagacctaccaaccagggtctccagtgacctcctacaggtgcctttgggccggcaacagacctgtacctccctgggacaaagctcccagaaaaagggacaaagctgccatctttgctgtttcacagccttccctggtaatatctccaggtactggaaaatatgaggcaactagggactggcctaggcaactaggccccaagcatactscagcagcctaacagaaaagtgaccagcctgttacatgggtgcccattctagtatctcctcaccaggtaggtcctccaggtctgggcctccagtcaccccccaccagagctatcgagccagtagcagcttggcaactccctggacagagcctctcagggcaactaaaagcctctttgctactgcctctgcagtagaactgcccttgacacccttggactaacgaaggagcaaagacccaaagtgtcttatccacacctcaaacaagctgcagttaaccc

SEQ ID NO: 933894 - DNA, 675 bp, Homo sapiens
gactgcaccagttctccaacaagagttcttaaccagactgaactggctggcatgacagaaatagaattcagaacatggataggaaaaaagatcactgagatttaagaggatggcaaaacccaatcccaggaaaatatgaatcacaatgaagcaatacaggagctgaaggatgaaatagccaagataaaaaagaacctaacggttctgacagagctgaataacacaatataagattttcacaatgtagtcacaagtattaacagcagaataaatcaagctgaaggaagactctcacaacctgaagactggttctctgaaatcagacagccaaaaataaagaaaaaagaataaaaaggaatgaacaaaatctcyagaagtatggcattatgtaaaggggccaaatctatgaatcactggtatcccagaaagggagggggagaaagcaaacaacttggaaaacatatttcaggatattgtccatgaaaacttccacaaccttgctaaagaggccaacgatcaaattcagaaaatacagagaactcctgcaggatactacacaagaagatcacccccaagacacataatcatcagattttccaaggtcaaaatgaaagaaagaatgttaaaggcagctagagagaaagggcaggtcacctacaaagggaacctgatcaa

SEQ ID NO: 933895 - DNA, 732 bp, Homo sapiens
aaccattcaatttaattcatttaaaaaatatttagctagacagaatttgagaatttgaactatataaaggacacaaagatataatcattccagaattttaaagttttcctttgttttatattttcttactgcttatcaaaaatttggagttcaaatttttatagactcaaccattttctgcacaaaattgacattattaggataaagcaaagctggattgcctagcttattgatgatatggatgacataatatgacaattttaaaagtttgattctagtaatgtgataaaaggtaaaagtatgaktgtccctgttctgaatgaagtgcattctgctacgtcgacacatttactggatgtactaccttcaacacttccaaaagcaatcttttcctcaaaggagcttttaccatattcccatttttgccaaaagcacattcctggtccttcagacttaaaatcttagagtcataattgcttcctgcagtacatattctccaaaatctaataaccaaatcttggttcttatccttttgctttcttttctactaacccattccatctactaatgcttttctgtatttactttattctatttgccagaaaagaatatttctctatttctcacagttaaatgtgggagattggtcagagtggtgggagaaactataggtaaagaaacaggccttctgaaaggtcagaaggctctggctctgcatacctttgggggaga

SEQ ID NO: 933896 - DNA, 732 bp, Homo sapiens
aaccattcaatttaattcatttaaaaaatatttagctagacagaatttgagaatttgaactatataaaggacacaaagatataatcattccagaattttaaagttttcctttgttttatattttcttactgcttatcaaaaatttggagttcaaatttttatagactcaaccattttctgcacaaaattgacattattaggataaagcaaagctggattgcctagcttattgatgatatggatgacataatatgacaattttaaaagtttgattctagtaatgtgataaaaggtaaaagtatgattgtccctgttctgaatgaagtgcattctgctacgtcgacacatttactggatgkactaccttcaacacttccaaaagcaatcttttcctcaaaggagcttttaccatattcccatttttgccaaaagcacattcctggtccttcagacttaaaatcttagagtcataattgcttcctgcagtacatattctccaaaatctaataaccaaatcttggttcttatccttttgctttcttttctactaacccattccatctactaatgcttttctgtatttactttattctatttgccagaaaagaatatttctctatttctcacagttaaatgtgggagattggtcagagtggtgggagaaactataggtaaagaaacaggccttctgaaaggtcagaaggctctggctctgcatacctttgggggaga

SEQ ID NO: 933897 - DNA, 720 bp, Homo sapiens
cagctagaataaagcaggcagaacgtggaaggacttgacttgctgagtcttctggccttcatctttctctcgtgctggatgcttcctgccctcgaacatcagactccaagttcttcagcttttggactcttggacttacaccagtgatatgctaggggctcttgtaccttcagccacagactgaaggctgcattgttggctttcctatttttgaggttttgggactckgactggcttccttgctccgcagcttgcagatggccaatagtgggacatcactttgtgatcatgtgagtcaattctcctactaaattccccttcatatatatatctatcctattagttctgtccccctagagaaccctaatactgatttctcagacacagcatgactccatgaaatttatgcctacttgctctaaacccaccaattacaactccctgagggaaacctgcttggaaaatgccctggaccccagtaaaagcctcagcccacaggtcacttgtactctttgccctgttccccacccactagttgactgtgcatgtcctagatggctccccacttcctgttggccctgggaggcatgctgccctcttctctctggcatctgtaagtaataaactgctgttatttcttgtgttttgttgagttgcctcccgtgtctcacctgactgatacactcgaccctaacttgtttgtcaggattctcctagaga

SEQ ID NO: 933898 - DNA, 624 bp, Homo sapiens
caggggtggagacacccaaggcctttcggaacccaccccttgcatcagtgtggcctggatgtgagacacagagtcaaaggagattattttggagctttaagatgtaatgattggaagatggccaaataggaacagctcctgtctgcagctcccggtatgattgacgcagaagacgggtgatttctacatttccacctgaggtgcctggytcatctcatttggactggctggacagtgggtgcagcccacagagggcaagccgaagcaggatggggcattgcctcacctcggaagtgcaaggggtcaggggatttccctttcctagccaaaagaagctgtgataaactgtacctggaaaaacaggacacttctggccaaatactgtgcttttcccatggtcttatcaactggcagaccaggagattctctcccatgcctggattggcgggtaccatgcccacagagccttgctcactgctagcgcagcagtctgagatcgacctgccagtctgcagactggtggggtaaggggtgtccaccattgctgaggcttgagtaggtaaacaaagcagccgggaagctgaaactaggcagagcccacctcagctcatcaaggcctactgc

SEQ ID NO: 933899 - DNA, 624 bp, Homo sapiens
caggggtggagacacccaaggcctttcggaacccaccccttgcatcagtgtggcctggatgtgagacacagagtcaaaggagattattttggagctttaagatgtaatgattggaagatggccaaataggaacagctcctgtctgcagctcccggtatgattgacgcagaagacgggtgatttctacatttccacctgaggtgcctggttcatctcatttggactggctggacagtgggtgcagcccacagagggcaagccgaagcaggatggggcattgcctcacctcggaagtgcaaggggtcaggggatttccctttcctagccaaaagaagctgtgataaactgtacctggaaaaacaggacacttctggccaaatactgtgcttttcccatggtcttatcaactggcagaccaggagattctctcccatgcctggattggcgggtaccatgcccacagagccttgctcactgctagcrcagcagtctgagatcgacctgccagtctgcagactggtggggtaaggggtgtccaccattgctgaggcttgagtaggtaaacaaagcagccgggaagctgaaactaggcagagcccacctcagctcatcaaggcctactgc

SEQ ID NO: 933900 - DNA, 538 bp, Homo sapiens
aattttaaagctccaaaatgatctcctttgactccaggtctcacattgaggtcatgctgatgcaagaggtgggctcccatggtcttgggcagctctgcccctgtagcttttcagggtacagcctccctcctggctgctttcacaggctggcattgagtgtctgcagcttttccaggtgcacagtgcaatctgtcagtggatctaccattctgggktctggaggatggtggccctcttctcacagctccactaggcagtgccccagtagggactctgtgtgggggctccaaccccacattttccttctgcactgccctagtagaggttctccatgagagccccacccctgcagcaaacttctgcctgggcgtccaggcatttccatacatcttctgaaatctaggcagaggttctcaaacctcaattcttgacgtctgtgaacccgcacgctcaaaaccatgtggaagctgctaaggcttgaggctttcaccctctgaagccacagaccaagctctgtgttggcccctttcagcaatgt

SEQ ID NO: 933901 - DNA, 569 bp, Homo sapiens
tacatatctgattacctcctctgctctattatttatgtaaaaaatgtagattcactgagccagactaaggcataattgactattcctctacccacctctcacatgtaacttgtgtgttcagtgaaaggctgatcaaagactaaaaagaatgcaactatttgtgtcttacccacctataacctggaagcccccacttccagttgtcccacctttctagactgaaccaatrtacatcttgcacatattgattgatgtctcatgtcttcctaaaatgtataaaagcaggctataccctggccaccttaggtacatgtcatcaggacctcctgaggttgtgtcacaggcatgtccttaaccttggcaaaataaactttctaaattaattgagacctgtctcagatacttccagttcacaattcttaagtatttaatttcatttgtggctactgtaaatgggattactttttaaatttcttttccagattgttcgtgttggcatatagaaatgctactgatttttgtaagttgatcttgtatctttcaacattactaaatttatcagttataat

SEQ ID NO: 933902 - DNA, 461 bp, Homo sapiens
tttatcatttaaaaatgtgtacaatagtagtaacatgctataaatgtttcttactttttaaaactttttcattattttcactcaatattattttaaaaatctatccaaagtgttgtctataattgagtccattatttctgactgctgcatattattctaccctrtgcataaagcatacttcacccaatttcctgttgctagacctcttccaagtccttgttcccataagctttgttacggtaaaaatcctaataaatatcttcatgtgactctgcaagagtttctctgggttatatacacagaagtagaattgcttggccacaccgcataggcatacctaattttattaagttctaccaaattgccctcatcaggttgccaatgatcatgttcttgaatccaaatgtctatcctctgcactcatcctaagtaacctctcaatggcatttgtcaaagttatt

SEQ ID NO: 933903 - DNA, 848 bp, Homo sapiens
ttctctagctttttttcctgaaataaagccttgcgatttatcccatcttacagatgagtaaactgaggcacagagaggtaaagtaatctgcctaggacctcacaaataggggtaactcttggtttccctcctcccccatctgaacacaacctgcctctgaattcaaccagctatgccagtttgccaactaaatacctaactgtttcttatgtcaattcaaggcctttaaaaccaataatcmttcatcatattttaaataatgagattatgtatagtggaaataaccctgagttgagacttgttttcaagtgacttcaacagtgttttggttgtttttcttccctgggcctcagtttcttgtgaaatgaaatctggtttcttgatggaaagggcctcacaggtctcaggccgtctggctcctggttgcagtcagttgaatgcagcacaagcaaaaatcatagtttaatagaaaatatcactaagccatttacattcatcttttctttttaccattacaaagtcaagctaaccccagtcatatcacgttgaagaaaaatcccaaccttttctgactttggcaaacccgtgttgagaaagtagagagaacttgcggcagggccgcccagcgcggcggggacagccgggggacgcaccgaggccaccgtgctcgcgcagccccgggttctcacccaggccaagcctggcacttggcaaccgcattatcctctccctgagcctctcctttcgggtccagagctgcgcggattcgagacaatccctggatcagactgacctctaggggcagcgcggcaatccgcagccaggctcccgcgcacacaaaaggagac

SEQ ID NO: 933904 - DNA, 733 bp, Homo sapiens
ctcctgccagcccctggcacctacctttccactttctgtgtctctgaatttgaggactccagggaccgcatacgagcggatcagacagtgtgtgtcatttggtgactgacttccttcactgagtgttgtgtcctcagggttcatacccactgtggtgtgtgccaggatttcctacctctctaaggctgaggaatattcccctgtctagatggaccatgtctggtttatcccttcatttgttgatggacacttaggtggcgtccaccttttgtctgttgacaataacgttgtcacagacatgtgtttgagtcccggytttcccttccttggatgcacacccagaagtggaagtgctgggtcctgtggtgactccgtgggatattttgaaggattgtcacacccttttccacagtgttgcaccgttttacattcctgccggccgtgcataagggcctgggtatctccacatcctcaccgatgcttattttctgcttttttgataaactggcttctctttgggacaagactgtagggtcaagggccagggcaggaggagctgtccaggtgggagcagaggtgctgagtggcggttgtgtcctgggatggtgggaggtggggcacaggcgttgctgcttggttaaacgttgggttgagagaaaaggaaacaccggggaggggtccagtgtctttggcctgagcaacagacaggaaggcatttcctctgctctgaggg

SEQ ID NO: 933905 - DNA, 734 bp, Homo sapiens
atcatcctgtgtctatcctgggattctgggcttttctgtccattaattcaccgaaggaggaaacttagctccctgatcattcaaaacacttgtgccttttcccctcaactcctcattttcttttcctgaccaacctccagtcgtctgataaataaatcagtgtgacttgycaatagcgacaaacccttttgtaatgtaatgtagcttccaaagtagtgggtgcatttccagaaggtgtccctttatccacccaggccttattttcacagggacttcagaacagaaaataattttggtggcttttagttctcttcaaacgataggcacacagctagctaccaattctgcctgtgtaaggtgggcatcccgagctcagtagaaatgagggctgaggaacacacactgggagaactttaatcacaaaataagaaaaataaacacaaccgcaacttgcaaaggaaataaaaatgaacagcgacttagattttcccctacaaatcccacacattttatgatttgaacaccaggatataaccagcatcccagaattcttgagctaggcctggctccagcccctcattttaaagatgaggaaactgaggtgctgaagggttaaacgcccaaggtcagggtttgtggcagtgggtggcaggcaggccaggtgctgccggtttctggccataactccaggtctctccaggggcagaacagggcggcggggctttgtcaggcgg

SEQ ID NO: 933906 - DNA, 739 bp, Homo sapiens
ggacctggtgccacaggccgccatttcgtcttcctctcgcgtgttggctgattccttccttgccacgctgtcccgtcaggccttctgaccggtctgccgtgcctgcgcggcttccttccttccttctttcctttctctctctctttcttttctttctttctctctctttctttctttctttcttacagagtctcactctgttgcccaggctggagtgcagtggcgtgatctcagcttactgcaacctcacctcctgggttcaagcaattctcgtgcctcagcctcccaaatagctgggactacaggtgtgcgccaccacacctgactaatttttgtatttttcgtaaagatggggtttcaccatgttggccaggctggtcttgaactcctggcctcaagtgatccacccaccttggcctcccaaaktgctgggattatagccatgagccactgtgcctggcccaggcctggctttctgttatgcctggacgtgctctcagcagcttactagctggtatggagaggacgtttcagaggaaacacagactgtctaggctctgaaaagctgcctagattctgtcctgtttgtgagaaggctggcactgaaacctccacatcaccctgaagtcctggtctagacccaggaggcatcagcagtgtgaggtgctaggctagttatctgttgtttcctaacaagccactcaaagcactgtggctttacaaattttatgattctcgt

SEQ ID NO: 933907 - DNA, 739 bp, Homo sapiens
ggacctggtgccacaggccgccatttcgtcttcctctcgcgtgttggctgattccttccttgccacgctgtcccgtcaggccttctgaccggtctgccgtgcctgcgcggcttccttccttccttctttcctttctctctctctttcttttctttctttctctctctttctttctttctttcttacagagtctcactctgttgcccaggctggagtgcagtggcgtgatctcagcttactgcaacctcacctcctgggttcaagcaattctcgtgcctcagcctcccaaatagctgggactacaggtgtgcgccaccacacctgactaatttttgtatttttcgtaaagatggggtttcaccatgttggccaggctggtcttgaactcctggcctcaagtgatccacccaccttggcctcccaaattgctgggattatagccatgagccactgtgcctggcccaggcctggctttctgttaygcctggacgtgctctcagcagcttactagctggtatggagaggacgtttcagaggaaacacagactgtctaggctctgaaaagctgcctagattctgtcctgtttgtgagaaggctggcactgaaacctccacatcaccctgaagtcctggtctagacccaggaggcatcagcagtgtgaggtgctaggctagttatctgttgtttcctaacaagccactcaaagcactgtggctttacaaattttatgattctcgt

SEQ ID NO: 933908 - DNA, 719 bp, Homo sapiens
tggtgcccacccagattaagggtgggtctgcctttcccagttcaccgactcaaatgttaatctcctttggcaacaccctcatagacacacccaggatcaatactttgcatcattcaacccaatcaagttgacactcagtattaatcatcacaggtgggtgtggggttggatggccttccagaagattctgttctgagtgaccttgggaagccaggctgtgacgttggaatgaaggtccagagatgactgtgtacgaagggaaggtcgaatgtgggtgggcaggggacagggcttgctgtgtttctggcattcaatgtccactgtgatggaggaaaaaaactcttcctgaattccagggggaattttgagtgatgtcaggagaagcagtcacacaggtgtgcaatgcatgtttgccaagacagccgcataagccatcggcaggaattaaggtacaggaagggcttcctggggtactcagttgggaaaggggtgctttggagtagctgggagggctggagcacttagaacacttagcccgctgggagtcactccatggacagaacatgataaggcaaaggycacatggaggacctgaacacctctgggtgacctcagacagtcacttctggtctctggtctccgtctcctgttcaatcatcaaagctgtttaccgacttccaagagtcactgtaagtcccaagtgtggcgacaggcgtgca

SEQ ID NO: 933909 - DNA, 563 bp, Homo sapiens
agtgaaataactcagaaacagaaaaccaaataccacatgttctcacttataactgggaggtaaacaatgggtactcatggatataaagatggaaataataggccagtcagggtggctcacacttgtaatctcagcactttgggagaccaaggtgggtggattacttgaggtcaggagctcgagaccagcctggccaacatggtgaaaccccrtctctactaaaaatacaaaaattagccaggcgtggtggcacatgcctgtaatcatagctaccggggaagctgagggaggaggattgcttgaacccaggagacggaagttacagtgagccgagatcacaccactgtactccagcctgggaaacagaacaagactccatctcaaaaaaaaaaaaaagatggaaacaatagacactggggtctctaaaagcggggaaggggcaagggctgaaaaactatgtcatggatattatgttcgctatttgagtgatgggtccattagaagagcaaaccccatcatcacacaatatactgagatcacaaacttgcacatgtgccccatga

SEQ ID NO: 933910 - DNA, 599 bp, Homo sapiens
gatcaacacgcttgcccacgcccggggaaatgtgaatgtggtctgggccatgattcaccaccgttgcttccatgaggtcatctgcggcctctttcccccacggggctggcgcagggggctggaccggctggtccccctctctccctccctctgccgggcaggagggaaggcaggaagacaggctatctgtgccaccatctaattaccccgggaggtaattgctcgggattttctctgacatcttgagatttctctctgagccttccmcagtggagacaaataacccttaaggaggctacgggcccaagacagggcctattgctaaaccctgacaactccccatcagccccgccgcgacgtgcccgagctttgagacagcgtgagtttatgacaggtcccattaagtctcttgcacaagcactgagtgttgaaatacccaacagatgatgacagtgttgaaataacctgtcgtctcagcactttccccgccattagccagatgttccagccctcaaaagcgttcgcagccttttgcagggagggagggggctcggattaaggcagcccaggtcccagtgggagtatggttcggggggtct

SEQ ID NO: 933911 - DNA, 608 bp, Homo sapiens
agctacgatgtttggtaaattaggtgtattaaatgcatttccttcttcttgtctctcttttttttcttttttttgagacagcttcacccttgttgcccaggctggagtacaatggcgtgatctcggctcactgcaacctccgcctcccaggttcaagtgattctcctgcctcagcctcctgagtagctggaattacaggcaccctccaccatgcccggctaatttttgtatttttagtagagacagggtttcaccatgttggtcaggctggtctcgaattcctgacctccggtgatccgccygcctcagcctcccaaagtgctgggattacaggcgtgagccaccgcgcccagccagaatgtgttgtttttatattataatctatatgagtgcggggtgtgtgtgtgtggtgggtgtacatacctacacacatatttctcctaggagctgtaaaccaaaaataaaattctaagcacccccaccagccaagtgaatagttcccttctcttggccaagggcattctaaagtaaatctgaaacactagttcaggctgtgatgggaatggctttggtcagacatgcgtcattatacccacctccctttggaa

SEQ ID NO: 933912 - DNA, 540 bp, Homo sapiens
tttttgtaggctaatatgatgactggtggctgctggctcctgcacagcctcaggatggggctggttgccaggggaaacaaccacgtgtttagaaggttggaactttcagcccaaccctcgacctccagacaggggagaggggttgaaggttgagttgatcattggtggccaatgatgtaatcaatcatgcctatgtcatgaagcctccatgaaaaccttaaaggacagggttcaggggccttctggatagcgggacacgttggggttcctggagggtggtgagccyggagagagtgcagaagctcccctccccttcccacatgcctggcctcacgcccgtctcccatctggctgtttatctctatcctctgtaatatcctttgcaataaataggtgaacataaacatttccctgagttatatgagctgttctggcaaattaatcaaactcaaggggggattgtgagaatccctgattgataattggtcagaagcacaaatcacaacctagggcttgtgattagcatctgaagtggggggc

SEQ ID NO: 933913 - DNA, 707 bp, Homo sapiens
tccagtccttagagcagctccagctggactatttttttctttctcaaaccaggtcatagtttttttttttttttttttttgctcaagactttgtgatggtttcccattacacttataataaaatataaatgtccaaccttggcctacaagtggcagcatgacctggccctgcctgtgtgccagtctcatgctctctcttcaatcccatgtcagtcaccctggtcttttgaacatggcaagccctttccagccaccgggctatggtgctcactgctccctctgcttgargtactctttcattattcttctcattgcttctgcttatgatttaggttggaacttaaatgccatctcttcatggaatggatgccttttattcacccctacctaaggtaagatggcagggttttctttcttcaactgtcaaagaaaaaatgccctggacaaatatgctaaacaaggaagacttatttaagactattgcaatagaggagacagactgaatgcaacaccactgaaacaaaaatccagagagtgtttaagcactgaggtgagctagtggaaaagtcctatagaatgttgagggggaggttctcaatgtgattagatcatctatgtttactaattggttaagttaggctcctaccttcccatagagactgggaaataggagacctaccatccttgattattacatttcaaagctt

SEQ ID NO: 933914 - DNA, 821 bp, Homo sapiens
tgctatcatatccagctagtgtttttttttctttcaccttttgtagagacagagtcttgctatgttgcccaaactggtctcaatctcttggcctccagcaatctgcctgcctcagcctcctaaaagattgggattgcaggcataagccaccaagccaccactccaggccttttttttttttaatcatacaaattattgtaattcaaaataattcaatgttgttctttatttttctttctttttttttttgtttattccttgtagaatgtaatcttcagcaggccagagatctttctggtcttattagacattccatcgtccctacctagcagagggtctggcaaataatagatgcttcataagtattttataagtaaatgactcttgggaatacagagwggaataagttatggcccctgtcttcaagcttccactgctgggtgagagaggaaccctagaaaagggactatccacaattgctattgctgaataggggcctacacaaagttctatggatgacaaaggaacctaaagtgtgtagaaggagggagtgcatggaaaaatatggagaaattaggaatgcttcacccatgagctgatattttaataggaaagaaagttctctttgactgagattcagtctttaagaggaatcagggataccctccccttcctggctcctcacccttccttcggtcctgggaatatatatgagtaggtggtgaaatctacagggatggactacagggattagtccttgttgttctaaactctcttccataattattatctaatactccttgcctttagaaatttcctaa

SEQ ID NO: 933915 - DNA, 421 bp, Homo sapiens
tttaaaggctgtaggagttattctttattgaaattttgtttctaaactaagttcctatggtgtccataataactagattgctgcagtgtccacagtaaccatctgaaaatggattttcatgactgggagggctcagggttaagcgcaagaattcacaaccataactttacaggatgaaaatagtcaggcactgccaggagcggtggctcacacttgtaatcccagcactttgggaggcctaggcagacggatcacttgagatcaggagttgaagaccartctggccaacatggtgaaaccctgtctctactaaaaatacaaaaattagccgggcgtggtggtgggcgcctgtaatcccagctacttgctgggctgaggcacgagaatttcttgaatccgggaggcagaggttgcagtaagc

SEQ ID NO: 933916 - DNA, 701 bp, Homo sapiens
ctcaagcctgagcaatggcgggcgcctctcccccagcctcgctgccaccttgcagtttgatctcagactgctgtgctagcaagagcaaggctctgtgggcataggaccctctgagccaggtgtgggatataatcttgtggtgtgctgtttgtgaagcctgttgraaaagcgcagtattagggtgggagtgacctgattttccaggtgccgtctgtcacccttttttttgactaggaaagggaattccctgaccccttgcccttccggggtgaggatgctgccctgcttcggctcactcacagtgcgctgcaccccctgtgctgcacccactgtccagcactccccagtgagatgaacccggtacctcagttggaaatgcagaaatcacccgtcttctgcgtcactcacactgggagctgtagcctggagctgttcctattcggccatcttggctccacctcccacatctgtgtctttgaagagctctgtaatagctcttctctgtatgtcagatctaactgggaaccacagtcactcaactacaaaatgtaaatacaatgggaataattggattgtgaagtggcagggaccaagtggcagcactcaaccatcataggccaggtgggagtagctactgtaatggacagcagaggcaaagggtgagtcagaatattccaactcctgtactgctctggtattga

SEQ ID NO: 933917 - DNA, 701 bp, Homo sapiens
ctcaagcctgagcaatggcgggcgcctctcccccagcctcgctgccaccttgcagtttgatctcagactgctgtgctagcaagagcaaggctctgtgggcataggaccctctgagccaggtgtgggatataatcttgtggtgtgctgtttgtgaagcctgttgaaaaagcgcagtattagggtgggagtgacctgattttccaggtgccgtctgtcacccttttttttgactaggaaagggaattccctgaccccttgcccttccggggtgaggatgctgccctgcttcggctcactcacagtgcgctgcacccmctgtgctgcacccactgtccagcactccccagtgagatgaacccggtacctcagttggaaatgcagaaatcacccgtcttctgcgtcactcacactgggagctgtagcctggagctgttcctattcggccatcttggctccacctcccacatctgtgtctttgaagagctctgtaatagctcttctctgtatgtcagatctaactgggaaccacagtcactcaactacaaaatgtaaatacaatgggaataattggattgtgaagtggcagggaccaagtggcagcactcaaccatcataggccaggtgggagtagctactgtaatggacagcagaggcaaagggtgagtcagaatattccaactcctgtactgctctggtattga

SEQ ID NO: 933918 - DNA, 618 bp, Homo sapiens
aactctttggctttgtgtcataactttattcggagagatcttgatctcttttcacttccacaaggtatcacactggtccattactttgatgacattatgctgattggatccagtgagcaagaagtagcaaacaccctggacttattggtgagacatttgcatgccagaggatgggaaatgaatctgactaaaattcagggatcttctacctcagtaaagtttctaggggtccaatggtgtggggcctgtcgaaatattccttctaaggtgaagaataagttgctgcatttcacccctcctacacccaagaaagaggmacaatgcctagtgggcctatttggattttggaggcaggacattcctcatttaggtgtgttactgttgcccatttattgagtgatacaaaaggttgccagttttgagtggggtccagaacaggagaaggctctgcaacaggtccaggctgctgtgcaagctgctcttccacttgagccatatgacccagcagatccaatgatgcttgaggtgtcagtggcagatagggatactgtttagagcctccggcaggcccccataggtgaatcacagtggaggcctctaggattttggagcaatacc

SEQ ID NO: 933919 - DNA, 618 bp, Homo sapiens
aactctttggctttgtgtcataactttattcggagagatcttgatctcttttcacttccacaaggtatcacactggtccattactttgatgacattatgctgattggatccagtgagcaagaagtagcaaacaccctggacttattggtgagacatttgcatgccagaggatgggaaatgaatctgactaaaattcagggatcttctacctcagtaaagtttctaggggtccaatggtgtggggcctgtcgaaatattccttctaaggtgaagaataagttgctgcatttcacccctcctacacccaagaaagaggcacaatgcctagtgggcctatttggattttggaggcagsacattcctcatttaggtgtgttactgttgcccatttattgagtgatacaaaaggttgccagttttgagtggggtccagaacaggagaaggctctgcaacaggtccaggctgctgtgcaagctgctcttccacttgagccatatgacccagcagatccaatgatgcttgaggtgtcagtggcagatagggatactgtttagagcctccggcaggcccccataggtgaatcacagtggaggcctctaggattttggagcaatacc

SEQ ID NO: 933920 - DNA, 783 bp, Homo sapiens
tcctaagtcctattagcaagccaaagaggtgtttctcaagaaagctgttatccacagaggatagcaaacttttgttcaaaaatcataagaaactgcaatgggattcaccgatagggaactgtcaaagactccaaagaacatctctatctgtgtatgacactgcaagatgtttgttggattgtatggaccaagtgtcagggtagctttcccagcagtctggacattttgcagagccttcttttgttctgggctctactttaaaactcaaataaggaatatgttgctgaccaaaaaaaaaaaaaaatccaaaaaaggccaactaggtgttgtgctctttttcggttgtagaagaggccaaatgtgacaactatccttaactttagaaggaacgtctcaacacrtttcacacctctgtacccttaaaaatatgtctataatacttgatatttcttgcttgctagttctaaccagaataatattatcaatataatgccttgataatattatttcttctttgcttattgtttcagaggcatgaaacccaaagttactggatggcagtgtaaactttgttttgtgatgttttgtggaaggcagaagtgattgtgtccctatggactaaattatgacatagggttggagaatttatattgctggcattaaaagctcaaaacaaactgatttctggcagtctttcataacaaggataaaggaaaagcatttgcctgaacaatagctgcatatcaggtaccagaggatgccttaatttgctcagacaatgaa

SEQ ID NO: 933921 - DNA, 676 bp, Homo sapiens
ggttgttccattccatgtttagtgcttccttcaggagctcttttagggcaagcctggtggtgacaaaatctctcagcatttgcttttctgtaaagtattttatttctccttcacttatgaagcttagtttggctggatatgaaattctgggttgaaaattcttttgtttaagaatgttgaatatttgtccccactctcttttggcttgtagaatttctgccaagagatcagtggttaatctgataggcttccctttgtaggcaacccgacctttctctctggctgcccttaacattttttccttcatttcarctttggtcagtctgacaattatgtgtcttggagttgctcttctcgaggagtatctttgtggcattctctgtatttcccgaatttgaatgttggcctgccttgctagattggggaagttctcctggataatatcctgcagagtgttttccaacttggttccattctccccatcaatttcaggtacaccaatcagacgtagatttggtcttttcacatagtcccatatttcttgcaggctttattcatttatttttattcttttttctctaaacttctcttctggcttcacttcattcatttgatcttccatcactgacaccctttcttccagttgatcacatcggctactgaggcttgtgcattc

SEQ ID NO: 933922 - DNA, 724 bp, Homo sapiens
gcttccttgtatttattggaaggtggtatttagaaacaaaagtcttgggtgcagggtatgcttattttattgctcctggggtgtcactgcttccaggccctctgttggacagaccctggaaatgcaggtatttcagctaacctgcatgtgcatacatacctacgtttctgtatctatccgcatatattttaaaatacacgtgagttcatattgatatatctgactaattcatcaccacctcttgcttatttgtaacttctttctgtgacattgagaaacttggcacacattatctacattttatttacttatttgtttaaccctagtgtacatgtagagtattttcagaattacagactggtacccttatgagaaacaaatttaccagctagagtacagagtagattgtccaaagttctgtagattagctccccccgacctcctgctccttccatgagattatctcataaaattataatactgttagacttgcwgtatagtttgcattctatcctgagatcccctgacatcctgttttgtttttatttgcatacagtttaccatttaaaaaaagtctttatattgagttgttaactttttaatataaatgttgtaattcctgatattactcatctgccatttatgtagttgatagtcactacttttttttttttttttttttttttgagatggagtcttgctctgtcgcctaggctggagtgca

SEQ ID NO: 933923 - DNA, 664 bp, Homo sapiens
cccttctggctctaaccaatagacagatccttgctgttccacagtttcatgggactggaccccctcccttgggtctgctctctgttctggaaaccacgaaagagtcttgtttattccttttttgtgtgttgccatttagcatatcctttgctgtttcctaataatttgcaaatgtgtcttatatccccaaatagataataacttctttagtagtgggtatgcaattgtattcgtttcattagcctcaatgccttctacataggagttgcttgttttaaaaacaagracccaggctggggtggtggctcacccctgtaatcctagcactttgggaggcggaggtgagaggatcacttgaggtcaggagttcaagaccagcctggccaacatgatgaaaccctgtctttactaaaaatacaaaaattagctgggtatggtggcaggcaactgtagtcccagctactagggaggctaaggcaggagaattgcttgcacccaggagacggaggttacagtgaaccgagattgcaccactgcactccagcctgggtgacagagctagctagactccatctcaaacaacaacaactacaacaacacaacatacaaattaagctgggtgtggtatctcacgcctgtaatgccagcactttgggaggccaag

SEQ ID NO: 933924 - DNA, 664 bp, Homo sapiens
cccttctggctctaaccaatagacagatccttgctgttccacagtttcatgggactggaccccctcccttgggtctgctctctgttctggaaaccacgaaagagtcttgtttattccttttttgtgtgttgccatttagcatatcctttgctgtttcctaataatttgcaaatgtgtcttatatccccaaatagataataacttctttagtagtgggtatgcaattgtattcgtttcattagcctcaatgccttctacataggagttgcttgttttaaaaacaagaacccaggctggggtggtggctcacccctgtaatcctagcactttgggaggcggasgtgagaggatcacttgaggtcaggagttcaagaccagcctggccaacatgatgaaaccctgtctttactaaaaatacaaaaattagctgggtatggtggcaggcaactgtagtcccagctactagggaggctaaggcaggagaattgcttgcacccaggagacggaggttacagtgaaccgagattgcaccactgcactccagcctgggtgacagagctagctagactccatctcaaacaacaacaactacaacaacacaacatacaaattaagctgggtgtggtatctcacgcctgtaatgccagcactttgggaggccaag

SEQ ID NO: 933925 - DNA, 729 bp, Homo sapiens
ttgtcccatcgctgacctggccaacttcttaccttggcatagctaactactcctctgctccaaatcccacatcccttccttgctttcctcttgcttgctttcttgaggaatcctctacgtctccatgacctccaaccccccatctttattcctgtagctgggactacagggcataaaacaaaataagcactaagtaaatgtcttttgaatgaataaatgaagggtcgtgtacagcccagattttccaatatttttgcaaacattttgaactgttttacgtttgtctaattatactgttttttttgggggggggggtaatgagttctttaagctagttaccaagtcaagtaattctcaactgttatcagtagacatkgcagagaatgcaagaagtgctttttcattgaaacacgctggaaatcagtgaaaaagaaactgtgttcattttatcctggtagtatatattttcagatagtttgaacacttgattcacttcttgacctttgcattttcagcctaaagatcaatcccttgtcttcatttaacggaatctcttttcttttccctccctaacccctacctcactctctctctcttcatctttttaggtgcagtgatcaaacatgcttgtagtatttacttttgtagatacctccaattttttttttttttgttaagtttgatcatggctcactgcagcctcaacctcctgggctcaagtgatcctcc

SEQ ID NO: 933926 - DNA, 774 bp, Homo sapiens
cttttatgctgaattgcccttacaccttggtcaaaatcagttgtccatatatgtatggatccatttctggactccctattctgttcctttgatctatgcctgtgtttttgtaccaattccacatcattatgattattgaaactttataagtttgaaagaaggtagtgttaatcttccaacctttatcttatttttccattattttggctatttacatcttttccatttccatataaatttagaatcagcttgtcaatttctacaaaatcttgcttggatttctattgagatgctgaatctatttatggatcaagttttgaattttttgacatcttagtaacattgagtcttctgactcatgaacacagtatgcytcttcaaatatttaggtcttctttaattttttttagcaatgccttcttagttttaactgtaatattttttcacatattttgtcacacttattcttgaagttgtttatttatttatttttaaacttttattttaggtttgtgggtatatgtgaaggtttgttatataggtaaacaagtgtcacaggggtttgttgtgcaggttatttcatcactcaagtattaagcccagtgcccaatagttatcttttctgctcctctccttcttcccatctccccattcatgtagaccccagggtctgttctttccttctttgtgttataatttcttatcatttagctcccacttgtaagtgaaaacatacagtatttggtttcttttcctgagtttgtttgctaaggc

SEQ ID NO: 933927 - DNA, 580 bp, Homo sapiens
atcattctcagcaaactatcacaaggacaaaaaactaaacaccacatgttctcactcataggtgggaattgaacaatgagaacacttggacacagaaaggggaacaccacactccagggtctattgtggggtgggaggagaggggagggacagcattaggagatatacctaatgtaaatgacgagttaatgggtgcagcacaccaacatggcacatgtatatrtatgtaacaaacctgcacattgtgcacatgtaccctgaaacttaaagtataactacaaaaaaagaaagagcagttttccataagaacattgtgcttccagaccaaaagaaaagtgtactgttataggttgaattgcaccacccatcagaaaaagggatgttgaagttctaacccacagtacctcagaatgtgatgctatatgaaaatatgattgtgttgaatgtaattagttcaaatgaggtcatactggagtagtgtgggcccataatcaaatatgactgatgtccttataacaaaacaaccatgtgaagacagaaagacacacaaacagaaagccatgatgaatgcggagattgg

SEQ ID NO: 933928 - DNA, 561 bp, Homo sapiens
taatttacagattatttgcaactgaaaaaaaaaataagcaaagagcagagccagctttgctggaaagagacgtctctaaccaggagcgctggtttctggccaagctcaatttgatgtttgaccttaaataaatcatgtcagtttcctgaatattgattacaaacaaacaacaaacacatcaataagaaatacaaagtttaccatataacctcaaagggtttttctaagtctaaaattttacytctccttcctattattttttaaaaataaaaatagccaaaccaaaatctttcctttactcagacgtgagctacgtttttctcatgttcacattaagcttgacctaatgtatctaatcagcttctatgacagctgttttccattttctgtttgcttgttttgctaaattttgaggtcttcaaaaagtctcctttgtaataatgtaggaacttgatatattcccccaggttgaattcagaaaaatgtcaaaatctttgtaaaggtctacagcgcgccttacagaatctgctcctgacttcctaagagctgattccctgtttc

SEQ ID NO: 933929 - DNA, 611 bp, Homo sapiens
gagcaataaataatacctaaccagagagagtccaaaaactgtcagaagcacatgcctcatgttttcttaaacccttaactatggggaatcagaattttagagctaaaacaaacctctaaagatcaatcgggatgccctcwttttaaagagaaggaaacagatctacaacacacacagcttagtgctgacctagggctagagctcacgtctcctgtctcccagcccgggaaccattcttgtaaccaaggcattcgaaagcactccctgtaggctggttgcaaagggcttctgatttactgtgttttcctattaatgctctaatctgaataaagaagtgttcatcccctttagatattcttgaattattaaatgatgaatacaattacatagcaaaaggtcatcttcagtctgtctgccaccaatgagagacgattccacttgcgcatcggtatgatggacacgctagtttatgggtctgacaccttgcatggaatgttacaaatccctatgatgtccttaagctccctcttcaattgaactgaaagatggctaaaaaccccactcaagcagacgcctccccattggctggccatttgagaatactcaagggt

SEQ ID NO: 933930 - DNA, 611 bp, Homo sapiens
gagcaataaataatacctaaccagagagagtccaaaaactgtcagaagcacatgcctcatgttttcttaaacccttaactatggggaatcagaattttagagctaaaacaaacctctaaagatcaatcgggatgccctctttttaaagagaaggaaacagatctacaacacacacagcttagtgctgacctagggctagarctcacgtctcctgtctcccagcccgggaaccattcttgtaaccaaggcattcgaaagcactccctgtaggctggttgcaaagggcttctgatttactgtgttttcctattaatgctctaatctgaataaagaagtgttcatcccctttagatattcttgaattattaaatgatgaatacaattacatagcaaaaggtcatcttcagtctgtctgccaccaatgagagacgattccacttgcgcatcggtatgatggacacgctagtttatgggtctgacaccttgcatggaatgttacaaatccctatgatgtccttaagctccctcttcaattgaactgaaagatggctaaaaaccccactcaagcagacgcctccccattggctggccatttgagaatactcaagggt

SEQ ID NO: 933931 - DNA, 616 bp, Homo sapiens
cagtggctcatgcctgtaatcccagcactttgggaggccaaggtcggagaatcccttgagactaggagtttgagaccagtctagacaacatagtgagacccctgtctctataaaaaaaattgaaaaaattagccaggcrtggtggcacatacctgtggtcccagctacttgggaagctgaggtgggagcatcacttgtgcccagcggtttgagactgcagtgagctctgatgacaccactgcactacatacagcctgggtgacagagcaagaccctatctcaaaaaaaacaaaacaaaacaaaaaaaaacaccaaaagcctttgccatctcatcaccacttataagaaggtggccaaagtgcggcaatcaatgctgttctcaatgtagcctcaccctgcgccgcccactcctctgctacccttctcctggcatgggtcactcttccatacactctgcaaagccttccctgatgcccctgagcagaattgactcccttttgcatgtgtttcctcaccccttgctttataccatcattgccctcatcattgtctagcatgctgtatataaagttgtgcacattttagtttctcagattgtgaggtcattgaaggcagg

SEQ ID NO: 933932 - DNA, 564 bp, Homo sapiens
ggctcatgcctgtaatcccagcactttgggaggccaaggtcggagaatcccttgagactaggagtttgagaccagtctagacaacatagtgagacccctgtctctataaaaaaaattgaaaaaattagccaggcatggtggcacatacctgtggtcccagctacttgggaagctgaggtgggagcatcacttgtgcccagcggtttgagactrcagtgagctctgatgacaccactgcactacatacagcctgggtgacagagcaagaccctatctcaaaaaaaacaaaacaaaacaaaaaaaaacaccaaaagcctttgccatctcatcaccacttataagaaggtggccaaagtgcggcaatcaatgctgttctcaatgtagcctcaccctgcgccgcccactcctctgctacccttctcctggcatgggtcactcttccatacactctgcaaagccttccctgatgcccctgagcagaattgactcccttttgcatgtgtttcctcaccccttgctttataccatcattgccctcatcattgtctagcatgctgtatataa

SEQ ID NO: 933933 - DNA, 644 bp, Homo sapiens
ctactcagaaaaaaatatttcttctaaaatatcactgctcattggcaatgcacctggtcaactaagaactctgatgaagatgtacataaattaatgttgttttcatgcctgttatcacaacagccattctgcagctcatagatcaaggagtaattttgactttraagtcttatcatttaagagtaatatttcataaggttattgctgccatacatagtaattcttctgatggatatgggaaaagtaaattaaaaacattttggaaaagattcaccattatagatgccattaagaacgtttgtgattcatgggaagaattcaaaatgttgacattaactggagtttggaagaagttgattccaaccctcatggatgactttgagaggttaaagacttcagtggaggaagtaactgcctatgtgtaaatagcaagagaactagaagtagtgcctgaagatataactgaattgctgcaattttatgataaaaatttaatggatgagagatttctttttatgtatgagcaaacaaagtggtttcttgagatgatatctacttctggtgaaaatgttgtgaacattgatgacataacagatttggaatattgcataaacttagtttttaaagctatggcggggtttgaa

SEQ ID NO: 933934 - DNA, 644 bp, Homo sapiens
ctactcagaaaaaaatatttcttctaaaatatcactgctcattggcaatgcacctggtcaactaagaactctgatgaagatgtacataaattaatgttgttttcatgcctgttatcacaacagccattctgcagctcatagatcaaggagtaattttgactttgaagtcttatcatttaagagtaatatttcataaggttattgctgccatacatagtaattcttctgatggatatgggaaaagtaaattaaaaacattytggaaaagattcaccattatagatgccattaagaacgtttgtgattcatgggaagaattcaaaatgttgacattaactggagtttggaagaagttgattccaaccctcatggatgactttgagaggttaaagacttcagtggaggaagtaactgcctatgtgtaaatagcaagagaactagaagtagtgcctgaagatataactgaattgctgcaattttatgataaaaatttaatggatgagagatttctttttatgtatgagcaaacaaagtggtttcttgagatgatatctacttctggtgaaaatgttgtgaacattgatgacataacagatttggaatattgcataaacttagtttttaaagctatggcggggtttgaa

SEQ ID NO: 933935 - DNA, 603 bp, Homo sapiens
ttatccctttattttcagcctgtagggtcactgcagatgatatgggtctattgaagacagcatacagttggtcttgcttctttattcaacttgccacttgatgccttttgagtggagtttttagtccatttccattcaagttcaatattggtatgtgaggatttgaacctgtcatcatgttgtaagttggttattatgtagccttgattgtatagttgctttatagtgtcagtggggtatgtacttaaatatgtttttgtggtggaagtttctgtgtttaactctcccttmaggacctcttgtaaggcagatctggttgtaaacaattaccttagcatttacttgtctgaaatggattttatttccccttcacttttgtagcttagtttgggtggatatgaaattctttgttggaatgctttttgttaaggatgctgaatataggctcccaatctcttctagctagtaaggtttctcctgaaaaattcactgttagactgctgacattacctttgtatataacctgtcccttctctgtcgctgcctttaagatttttgttgttgttgttcacattgaccttggacaatctgatgactatatgc

SEQ ID NO: 933936 - DNA, 796 bp, Homo sapiens
cctacttcataagctacagacgtccatctccttctcggcccaacaagctcacatcatgttaggggacacagcaccccctactgctcagcttctgctaaccacccctctgtcagaggaatatctcttagtttcaccctcacaactgctgggaaatagtactaatcctctcctactggatttacagactctgtttccctgagtctgggccgaatcaaaccccccaggaatggcaaagcaccatctgccagtagttgtagagctcctggccactgctgccagtccaggtaaaacaatatcctgtgagtcagcaggctagagagggaatcgatccccatattcagcgactattacaagctggtatactcccaccatgtgagtccgcctggaatactccatttttgccggtccagaaacccggaacaaatgattaccggcctgtacagatttgtaggaagttaacaagtggacagttaccatccatccaactgtscctaacccttatactttactcagcctgctcccgcccgaacatacaatgtatactgtccttgacttaaaggatgctttctttgctattcctctggcccccaaaatccaacctgtctttgcttttgaatggacagatcctggctcgggagacaccacccaattaacctggactcaattaccccagggttttaaaaactcccctaccctttttggggaagccctccaacaggatcttataccattctgagccagtaaccctcactgcactcttctccagtatgtagaccacctgttattggctattaaa

SEQ ID NO: 933937 - DNA, 565 bp, Homo sapiens
tgagatgggatcatgaacacttcattcaaagtaataaatcatcacctgtgagtaaggatggagagaaattatggaagatttgaaaaggtactataacatccaacagagggaaagagtaaattaactagggaaatatagtgaaatataaactcaaagaacccccttgagtttagttaaagctaaatagttaaagttataccagacagcactcaytatgtgtttttcactagtcctgcctagtgacacacatagaaacacaagaaaggcaaatatttggatgtaatcatggttgatattttaccttggtggctagtttatttatttttcattcatatatttaactcctgagtgcatattttcatagtgcctacaaaataatatacatattttaagggtaaattacactgtatttttaattaactggcttttggttttttaagtaatgattcacttcagggatattttgtagtacattgtagctatataatgcattctgaagcatactgagctctcacccttcattcttaaggtttgaaagaacttatattactatcatttttaattt

SEQ ID NO: 933938 - DNA, 596 bp, Homo sapiens
gtaaagaaatcccaagtcaaaaaccattattaaaaacttgttccaaacaagtgatgcccccagacaaaatcaaaatagaaattgttctagcatgatacttcaaaaacagacatcatatagaatcctataagaaaaaaaaatgtgtgcttcaaaataagctcacagaaaattttttttaaatatgtaatgaaacacaacaccatcggtagaagtagaaaatgcaacaaagaaaaggattaggacactcaaaaaatgaaatagaataatttgcattagactaataaacaattatgtgcaagattattggctacatactttcaaagtatagaatccacaagaaagaaaaaaaagacattagacaaaagctaatggggccgggcgcagtgactcactcctgtaataccagtactttgggaggctgaggcgaatggattacytgaggttaggagttaaagagtagcctaggcaacatggcaaaaccccatctctactaaaatacaaaaattagcctgacatggtggtgtatgcctgtagtcccagctactcgggtggttgaggcaggagaatcgcttgaaccagagaggcggatgttgcag

SEQ ID NO: 933939 - DNA, 737 bp, Homo sapiens
attactctgcctttccctccacctttctgtgtaaaaactggctgtaaagaaatgatctgatccatcttgtttgactgtaggtcatgagaccctcaatccagagggggtcctgccccacacccagaggcaggaatgcgtgctcagagaggccaacaggaatctagacgggccgtgctgggtttccccgctcagtctattagcatcagatcataccctttctgtccaatcatgtttctacatagctgttcctactttgttgaacctaagcataaaacttcacttgaattcttggtcaacagaaatttcccttgtatctttgagtyttcattctgaaggctcccatgtatacctgttgaataaatttgtttgccttttatccaattactctatcttctgtgagttgatttttcagcaaatcttcaggggccaaagagaacttttctcttgccccaacagagtcccagactccctgaatttaaatgaactcattattttctgtcttcctgaaacctttcctactagaggtcttttactaaacccggttcggtttttgtctaacttagtcggatacctaaagccttcttatagaacctaatccagtttctcttgtgacttccacagatagtctggatcaaaactgttcatataaaattggacacaaataatggagctcatatccaagggggacttaccagtgacaccctccaaatgtgcaaagagaagcagtgagcacaagt

SEQ ID NO: 933940 - DNA, 602 bp, Homo sapiens
aaaaaatcatagatgaaacaaaccaatagaaatgcaccccatgctcatggattggaaaaatcaatatcataaaaatgatcataccacccaaagcaatctacatattcagtgtaattcctaccaaaatactgacatcatttttcacacaatyagataaaacaatcttaaaatcaatatggaaccaacaaagagcctgaataaccaaagcaattctaagcacaaagaacaaatctggaggcatacacagtacctgacttcaaatgatactacaaggctataattaccaaaacagcatagtacttgtgtaaaagtggagacatagatcaatgaaacagaatagaaaacaaagccatcaagccaaatacttacaactaaccgatcttcaacaaggcatacagaaacctaaatgggagaaaggacatcctagtctataaaaggtactgggaaaactggatagccacacgtagaagaacaaaactggattcctatttctcaccaaatacagaaatcaaataaagatggagtaaagacttaaatctaatacctgaaaccataaaaattctagaagaaaacctagaaaaaatgcttctggacattagact

SEQ ID NO: 933941 - DNA, 813 bp, Homo sapiens
acaagtgtatttactgtagtagtccattttcacggtgctgataaagacatacctgagactgggaaatttacaaaagaaagaggtttattggacttacagttctacgtggctggggaggccacacaatcattgccgaaggcaaggaggaccaagtcatatcttacgtggatggaggcaggcaaagagagagactgttcagagaaactcccgtttttaaaaacatcagatttcatgagacccaatcactattacaagaacagcatgggaaagacccacccttatgattcaatcatctctcactgggtccctcccacaacacttgggaattatgggagctacaagatgagatttgggtggggacacagagccaaaccatatcatttcatctctggcccctcccaaatctcatatcttcacgtttcaaagccaatcatgccttcycaacagtcctccaaagtctcacctcatttcagcgttaactcaaaagtccacagtccaaagtttcatatgagacaaggcaagtcccttccgcctatgagcctgtaaaatcaaaagcaacttagttacttcctagatagatacaatgggggtacagaaattgagtaaatacagccattccagatgggagaaactggccaaaacaaagggctacaggccccatgcaagtatgaaatccagcagagcagtcaaatcttaaagctccaaaatgatttcctttgattccatgtctcacatccaggtcacgctaatgcaagaggtaggatctcaaagtcttggacagttctggctctgtggctttgcagggtacagccg

SEQ ID NO: 933942 - DNA, 693 bp, Homo sapiens
agtagttaatgtgtgtgcctctcatggagaggaacagaagaggtaagtaaatacaacaccttcaactgaaacatctaggtactcacattggaactaatcaaggaaacaattcagaccaaggagaatggagaaaggcaaggctgggtgaaggcccacgcagggagccaaagagaagctcccctgccctgagaagcagtaaaagaatgtgcgaccctggaaacccatgcttctcccatggatctttgcaactctcaggtcaggaggtcccctcatgaacccagcccaccagcgcttcagtttgacacaaagagctatctgtctcagcaaaggagccactcatgcatgcatggagacgcgggactttaaatactctggctttctgggmatcccagcaaaattagctgcaactttgtcaaagtgggaggttagacccctgtacatacccctaggaaaaaggctgaatccaaggggctgagcagtgatggtttgcaggttctgcttggaacagaaccttatgttgcaggataagacacgctggcttggaattccagccagccattggtaacagcattgtgcttccctgggactcagctcccaggggcaggggcaggccgccatctctgctgtttgggtggcttagccattatggcctttgggctttggagagtccaaaccaactgagagcaaaaggga

SEQ ID NO: 933943 - DNA, 579 bp, Homo sapiens
cattgcagcatgtgccaggatttctttccttttttaaggctgattgctattccactgtgtatatagaccacattctgtttaaccagccaagttctttatctgggttagtgtcttccctttcttttcctccctctttcccttcatctctccctcttctcccatctgccttccttttctcccccacctcttttcagcaaatatttatcaagcacctactatgtacaccctcatagttctaggggatacagcaatgaacacaatagataccccttccaaaaaaatctttgccctactgatctgtatattctggaagaaaaagaaagkaaataaatacgatatacgacattacaagttatgagggtctatgaaaaggtggcagcaagggcttccctgcagtggaaggggtctgtaggtttgggaactgcaagatggtcagtggggggccaagtgggtgaggggagaatagacagtgaggatagtgaggtcatggaaagtctggactcctcgggagaggcactaacttgtccccattttacagacagggaaactgaggctgagagaggaggtggcttgtccaag

SEQ ID NO: 933944 - DNA, 696 bp, Homo sapiens
ccctggccccgaggtggctgggaggtggctcctcaaacagccgctgtctcatcagtgcccggtgctgggtcagggatcgactgaggctctgagctaactgggaaacacagtggccttggagggctggggagtgtcatgggggtggggacagggagtcaccggtcgcatgtgactgaactcttcaccccagtctgtggctttcccgttgcagtgagagccacgagccaaggtgggcacttgatgtcggatctcttcaacaagctggtcatgaggcgcaagggtaggaggcagggccgctgcccgccctgggccagcaccttgtaattctgtcctgcctttttcttcctgtatttaagtctccgggggctgggggaaccagggtttcccaccaaccaccctcactcagccttttccctccaggcatctctgggaaaggacctggggctggtgaggggcccggaggagcctttgcccgcgtgtcagactccatccctcctctgccgccaccgcagcagccacaggcagaggaggacgaggaygactgggaatcgtagggggctccatgacaccttcccccccagacccagacttgggccgttgctctgacatggacacagccaggacaagctgctcagacctacttccttgggagggggtgacggaaccagcactgtgtggagaccagcttcaaggagc

SEQ ID NO: 933945 - DNA, 665 bp, Homo sapiens
caccacatctggctcatttttttttcttttttaagtagagacggggacttgctatgttgcccaggctagtctcaaactcctaagcacaagcgatcctcccgcctcggcccctgaaagtgctgggattgcaggcatgagccaccacacccggccaaaagttgcttttgaggagttattgctgtgtggatgtgatataaccctttctgtcatctcttcacaaaactttctgtaaaacataaaaatcacctggaccttcagagatgagtttgtttatttttttattttttwaaaaattgctaatttacagaacatggagatgagtatgttttgaaggcttggaagcatgcaagtgggagaagaaaggagtcagctacattctggctgtgtgcagaggcaggtcactgtggtgggagtgttcctgtttcatggactctgcaaatcgcaatgcttggcatggcctcccgaccctgatggcagagaagcaaacaccagtcggagagctgggtcctcccagccctcttggccctgtggccaattttttcttcaatagcctcataaaatcacattatttgagtgccatggctccaaaacaagcagggatgcccatggaccctgattatccattgtcacccttccctccaaacagccacctctcccctggagac

SEQ ID NO: 933946 - DNA, 665 bp, Homo sapiens
caccacatctggctcatttttttttcttttttaagtagagacggggacttgctatgttgcccaggctagtctcaaactcctaagcacaagcgatcctcccgcctcggcccctgaaagtgctgggattgcaggcatgagccaccacacccggccaaaagttgcttttgaggagttattgctgtgtggatgtgatataaccctttctgtcatctcttcacaaaactttctgtaaaacataaaaatcacctggaccttcagagatgagtttgtttatttttttattttttaaaaaattgctaattyacagaacatggagatgagtatgttttgaaggcttggaagcatgcaagtgggagaagaaaggagtcagctacattctggctgtgtgcagaggcaggtcactgtggtgggagtgttcctgtttcatggactctgcaaatcgcaatgcttggcatggcctcccgaccctgatggcagagaagcaaacaccagtcggagagctgggtcctcccagccctcttggccctgtggccaattttttcttcaatagcctcataaaatcacattatttgagtgccatggctccaaaacaagcagggatgcccatggaccctgattatccattgtcacccttccctccaaacagccacctctcccctggagac

SEQ ID NO: 933947 - DNA, 665 bp, Homo sapiens
caccacatctggctcatttttttttcttttttaagtagagacggggacttgctatgttgcccaggctagtctcaaactcctaagcacaagcgatcctcccgcctcggcccctgaaagtgctgggattgcaggcatgagccaccacacccggccaaaagttgcttttgaggagttattgctgtgtggatgtgatataaccctttctgtcatctcttcacaaaactttctgtaaaacataaaaatcacctggaccttcagagatgagtttgtttatttttttattttttaaaaaattgctaatttacagaacatggagatgagtatgttttgaaggcttggaagcatgcaagtgggagaagaaaggagtcagctacattctggctgtgtgcagaggcaggtcactgtggtgggagtgttcctgtttcatggactctgcaaatcrcaatgcttggcatggcctcccgaccctgatggcagagaagcaaacaccagtcggagagctgggtcctcccagccctcttggccctgtggccaattttttcttcaatagcctcataaaatcacattatttgagtgccatggctccaaaacaagcagggatgcccatggaccctgattatccattgtcacccttccctccaaacagccacctctcccctggagac

SEQ ID NO: 933948 - DNA, 772 bp, Homo sapiens
ggtagggggtatagataagaggagcaggccttggccaggcgtggtggctcacgcctgtaatcccagcactttgggagggggaggcaggcagatcacgatgtcaggagatcgaaatcagcctggccaagatgatgaagccccgtctgtactaaaaatacaaaaattagccggacgtggtagcgtccacctgtaatcctagctacccggaaggctgaggcaggagaatggcgtgaacccrgcgggaagaggttgcagtgagccaagatcgcaccactgcactccagcctgggcgacagagcaagactcggtctcaaaaaaaaaaaaaaaaaaaaaaaaaaaaaggaaggccttactccgtcccaaactgaaaggattaaatggcttcacctgggagaagataaccatcctgccctccattgctacccccacatactgtccatgttctcagggggtactgtgagtcctgggatctttggggttgcccacctgcctgtgctagttatggagacccccaggtgttgaggcagggctggggtgtccccttccaaccaggctgtcaaggcaccaactctggggcagaggcagtggcagggcagccagggttgtgccagagcctgagcaggttgaggtggggtcaggcagggctgggagtcagggcaggggcagcagcagtggacctgctatgcacacatcttcttctccaaggtttgtgtgcagaacatcctgcccatgctgccccagcagcttcagttggcacctgcctcagtccagc

SEQ ID NO: 933949 - DNA, 763 bp, Homo sapiens
ggtatagataagaggagcaggccttggccaggcgtggtggctcacgcctgtaatcccagcactttgggagggggaggcaggcagatcacgatgtcaggagatcgaaatcagcctggccaagatgatgaagccccgtctgtactaaaaatacaaaaattagccggacgtggtagcgtccacctgtaatcctagctacccggaaggctgaggcaggagaatggcgtgaacccagcgggaagaggttgcagtgagccaagatcgcaccactgcactccagcctgggcgacagagcaagactcggtctcaaaaaaaaaaaaaaaaaaaaaaaaaaaaaggaaggccttactcygtcccaaactgaaaggattaaatggcttcacctgggagaagataaccatcctgccctccattgctacccccacatactgtccatgttctcagggggtactgtgagtcctgggatctttggggttgcccacctgcctgtgctagttatggagacccccaggtgttgaggcagggctggggtgtccccttccaaccaggctgtcaaggcaccaactctggggcagaggcagtggcagggcagccagggttgtgccagagcctgagcaggttgaggtggggtcaggcagggctgggagtcagggcaggggcagcagcagtggacctgctatgcacacatcttcttctccaaggtttgtgtgcagaacatcctgcccatgctgccccagcagcttcagttggcacctgcctcagtcca

SEQ ID NO: 933950 - DNA, 537 bp, Homo sapiens
gtctcaaatccatgactgttctcccagcctaactgttctaggccctgtggaaaattctaactttccaattcctttcccacattcccaaatgccaaccgttcttctccaaatcacaacattatcaactattagtcttttatttagttttaaaacagacacagcattttaattgtttatttttgtttcacggcgtggtggatggctcttctaaaaatatgtgtctgtttgtgaacatttcacatgacagggaagcaaagggtaatcacctgacactctgctgtgacaagtcttcgygcgtctaattttccctaggcacacacaccttaccagaatatctctgggtgaaggtttctttttggaacctttgcagggtgatgtgtcctcagccactgtcctgttttttcctggttctgaatactacaaccgtctggggatgaccaagatacccacaagagccatgtctcttggagtgtctagtaaatatcagtccttctgtcagcttccagaggagagtctgagatattgggtgagcctctc

SEQ ID NO: 933951 - DNA, 515 bp, Homo sapiens
gctgccacgcctggctaatttttgtatttttagtattgacggggtttcaccgtatttgccaggcctgtctcgaactcctgaactagtgacctgcccgcctcggcctcccaaagtgctgggattataggtgtgagccaccgcacatggacgggaattacaatttgagattagatttgggtggagccagaaagtcacaccatatcactgcaaaggatccgcagcaaggaagggcataaaatcctaaattttaaaataattgtcattatttcaatttatgaataaatattatatatcatttataaatgcatatsacattatacacaaggttaaatgcaaatatcctctgaagttggcctggctcagatcaaggaagaagccctgcctgtgagagctgcagcctaggctgttatttttgcttcgctcagcccagtgtctgatcaaatattccctcactcagggcatgaagggtggggcctgaaaccttatccaatcaggagccgtggtctagaaactgt

SEQ ID NO: 933952 - DNA, 552 bp, Homo sapiens
ttgccaattcttcaatttcaacattggaaaatgttgaaaaaaataatgaatttattaataataatctgactttctaactttagactattctactattctatactacaatattgaactttgatcatcgtaacatgaacatttcgtgaatgcrtaagttgttatgtagataggttctcttttagattaacacaataagacaattagagcaaacaattagaaaaagcatttgaaatcaaataaaagtcatcagatccacatctttcaatggcttggcataattgccatgttctttgaaagaagcaaagacaagattttggcttagcccaattattaagtccttgaccttttgaaatctaatatcctggctaaaaaaaacagtagggaatattttttgggtggctgtctaaagtgtccaaggcaatatgagaagaattttaatagttaagtaagaaaatgcataccacatacacacattactcttctctactttgctctaacattgaaagattagaaattgcaaatctagtccctcaatttcgggtaaattagcaa

SEQ ID NO: 933953 - DNA, 583 bp, Homo sapiens
agttttccaaaagaaaataaatcattctaccaaaaagacacatacaattgtacattcattacagcactattcacaatagcaaagacatggaatcaacctagatggccatgcatgatgggttggataaagaaaatatggtacatgtctaccatggaatactacaaaaaataacaagtgcatgttctttgcagcaacatggatgacactggaggtcattatcctaagcaaactaatacaggaaaagcaagccaaataccccatgttctcacttataagtgggagctaaacattgagtacatasggccataaagatgggaacaataaacactggagactactagacaggggaggtaggaagaggggaagagttgcaaaactacttatggggtactacgctcactacttgagtgatgggttcagttgtaccacaaacctcagcatcacataatatactcatgtaacaaacctgcatatgtaccctggatcctaaaataaaagaaaaaataaataaaaatgaaaaaaattaataaaatcctgattttctttctccctagtgatgaagataatcaaagttcagcccatt

SEQ ID NO: 933954 - DNA, 660 bp, Homo sapiens
atctgtgtcagccatatctagactattctgttccattgatacgttcatctcttctttcaccactaccatgctgtcttgatttttgtagatttaaagtaaatcttgaagttgggttgtgtcagtaccccaactttattctccctcaatattgtgttgactattctgggtattttgcatttccatgtaaactttaaaatcactttgtcaatatacacaagataccacgctgagattttgattgggattgtgttgaatctatagatcaaattgggaagaacagacaccttcacaatattgagtcttcctacccatgtacacggaatacrtttccatttagttagatctttcatggcatttcttttcctttccagagttttgtagttttcttcacatagattttataaacattttgcaatatttacacctaagtatttcattttttggtgctaatgtaaatggaattgtgttttaattccaaatttcaattgttcattactagtatataagaaatcaattgacttttacatattaaccttgtatcttgcaaccttgctattagttattacttattaggttacaggaggtttttgttgtttctttgaaattttttacatagacaatcatgtcatctgcaaacaaagttttatatctttttttttt

SEQ ID NO: 933955 - DNA, 644 bp, Homo sapiens
ttattggtctgttcagagtctctatttcttcctgatttaatctaggagggttgtatacttacaggaacttattcatctcttctagattttctagtttgtgcacataaaggcattcatagtagtcttgaatgatcttttgtatttctgtggtattggctgtaatatctcccatttcatttctacttgagcttatttgaatcttctccttttcttggttaatctgactaatkgttcatcaattttgtttatcttttcaaagaactagctttttgcttcatttatcttttgtattttttatttgtttcaattccatttagttctgctctgatctttgttgtttcttttctctgctgggtttggcttggtttgttcttgtttcactagttccttgaggtatgaccttagattgtctatttgtgctctttcaggcttttttgatgtaggcatttaatgctatgaactttcctcttagcactgcttttgctgtattccagaggttttgatagattctgtcattattattgttcagtttaaagaatttttaaatttccatcttgatttcattgttaacccaagaatcattcaggagcaggttatttcatttccatgtatttgtatagttttgagagttccttttggagtta

SEQ ID NO: 933956 - DNA, 694 bp, Homo sapiens; identical to SEQ ID NO: 920733

SEQ ID NO: 933957 - DNA, 754 bp, Homo sapiens
ggcccttgtagacaatggaaaatacatcaaatgtagattacagacatttcattccagaggattaatgaagagtcttcttagttaagtgagtagactttttatctagcttattctttgatctatttaattttaggtgcttwggtttatgcggacaccgggtaaggagcatatgccaaactcatagtattatcctccagatagtcataataatagtctcccttgcaggctgtattctctcaaaggttttaaatatttgcatgcagccatatctagaatatcaaatggtctctcttcaactggaatgacaagagctgaaagaaacgtgagaccatgaagacactgtaacctatgaatgatgtgctgaggccagaaacccaaaatgatggtaactgagagtgatgctaaggccctaagttttagttacactctcacctaagtgaaaacctgaccaaaatgggggaattattttaacaaaattatgggaggccgttgttttggactgagctcattctctaggccctaacagactaaaccaaaccaaaatagaatcactcatgctaaatgtgacataatcaaactaagaccttaagaaaacacgtaagtcctagaacagaccaggttttgcatttctctcataaacagggtgttccataaggaagtactctctactcagtccttgttcccaccttacaaaaccctctgttctgctgtttcccagtgaatttcaagaccaaaacagtatatttatgatagt

SEQ ID NO: 933958 - DNA, 740 bp, Homo sapiens
gtgtctccacccagacctcaagttgaattgtgtctcccagaattcgcatgtgttgtgggaaggacccagggggaggtaattgaatcgtgggggccaatctttcccatgctattcttgtaatagtgaataagtctcatgaaatctgataggatttatccaggggtttccgcttttgcttcttcctcattttctcttgccaccaccatgtaaaaagtgactttcacctcctgccattattstgaggcctccccagccatgtagaactgtaagtccaattagacctctttttcttcccagtcttggctatgtctttatcagcagtgtgaaaatgaactaatacagtaaattggtaccagtagagtggggcgttgctgaaaagatacctgaaaatgtggaagtgactttggaactgggtaacagccagaggttggaacagtttggggggctcggaagaagacaaaaaatgtggaaaagtttggaacctcctagagacttgttgaatggctttgggataaatgttgattagtgatatgaacaataaggtctaggttgaagtggtctcagacggagatgaagaacttgttgggaactggagcaagggttactcttatgttttagcaaagagactggaggcatttgcccctgccctggagatttgtggaactttgaacttgagagagatgatttagggtatctggcagaataaatttcctttttttaattattatactttaagttct

SEQ ID NO: 933959 - DNA, 740 bp, Homo sapiens
gtgtctccacccagacctcaagttgaattgtgtctcccagaattcgcatgtgttgtgggaaggacccagggggaggtaattgaatcgtgggggccaatctttcccatgctattcttgtaatagtgaataagtctcatgaaatctgataggatttatccaggggtttccgcttttgcttcttcctcattttctcttgccaccaccatgtaaaaagtgactttcacctcctgccattattgtgaggcctccccagccatgtagaactgtaagtccaattagacctctttttcttcccagtcttggstatgtctttatcagcagtgtgaaaatgaactaatacagtaaattggtaccagtagagtggggcgttgctgaaaagatacctgaaaatgtggaagtgactttggaactgggtaacagccagaggttggaacagtttggggggctcggaagaagacaaaaaatgtggaaaagtttggaacctcctagagacttgttgaatggctttgggataaatgttgattagtgatatgaacaataaggtctaggttgaagtggtctcagacggagatgaagaacttgttgggaactggagcaagggttactcttatgttttagcaaagagactggaggcatttgcccctgccctggagatttgtggaactttgaacttgagagagatgatttagggtatctggcagaataaatttcctttttttaattattatactttaagttct

SEQ ID NO: 933960 - DNA, 740 bp, Homo sapiens
gtgtctccacccagacctcaagttgaattgtgtctcccagaattcgcatgtgttgtgggaaggacccagggggaggtaattgaatcgtgggggccaatctttcccatgctattcttgtaatagtgaataagtctcatgaaatctgataggatttatccaggggtttccgcttttgcttcttcctcattttctcttgccaccaccatgtaaaaagtgactttcacctcctgccattattgtgaggcctccccagccatgtagaactgtaagtccaattagacctctttttcttcccagtcttggctatgtctttatcagcagtgtgaaaatgaactaatacagtaaattggtaccagtagagtggggcgttgctgaaaagatacctgaaaatgtggaagtgactttggaactgggtaacagccagaggttggaacagtttgkggggctcggaagaagacaaaaaatgtggaaaagtttggaacctcctagagacttgttgaatggctttgggataaatgttgattagtgatatgaacaataaggtctaggttgaagtggtctcagacggagatgaagaacttgttgggaactggagcaagggttactcttatgttttagcaaagagactggaggcatttgcccctgccctggagatttgtggaactttgaacttgagagagatgatttagggtatctggcagaataaatttcctttttttaattattatactttaagttct

SEQ ID NO: 933961 - DNA, 575 bp, Homo sapiens
attgccgcccttctccccaacccaaagcctcatttgcatcttcctctcgtatcccccaaccttaacccacaagtataggacatctctattccttctctggcaaccgatcatatgcccattaccatcccattaaaacctaatcacccttaccccgctcaatgccaacatcccatcccacagaatgctttaaaaggattaaagcctgttatcacttgcctgctacagcrtggccttttaaagcctataaactccccttacaattcccccattttacctgtcctaaaaccagacaagccttacaggttagttcaggatctgcgccttataaacaaaactgtttttcctatccccctcccttggtgccaaacccatatactctcctatcctcaatacctccctcaacaacccattattctgttctggatctcaaacatgctttctttactatccctttgcacccttcatcccagcctctcttcgctttcacctagactgaccctgacacccatcaggctcagcaaattacctaggctgtactgccgcaagacttcacagacagcccccattacttcagc

SEQ ID NO: 933962 - DNA, 575 bp, Homo sapiens
attgccgcccttctccccaacccaaagcctcatttgcatcttcctctcgtatcccccaaccttaacccacaagtataggacatctctattccttctctggcaaccgatcatatgcccattaccatcccattaaaacctaatcacccttaccccgctcaatgccaacatcccatcccacagaatgctttaaaaggattaaagcctgttatcacttgcctgctacagcgtggccttttaaagcctataaactycccttacaattcccccattttacctgtcctaaaaccagacaagccttacaggttagttcaggatctgcgccttataaacaaaactgtttttcctatccccctcccttggtgccaaacccatatactctcctatcctcaatacctccctcaacaacccattattctgttctggatctcaaacatgctttctttactatccctttgcacccttcatcccagcctctcttcgctttcacctagactgaccctgacacccatcaggctcagcaaattacctaggctgtactgccgcaagacttcacagacagcccccattacttcagc

SEQ ID NO: 933963 - DNA, 585 bp, Homo sapiens
gcctcatttgcatcttcctctcgtatcccccaaccttaacccacaagtataggacatctctattccttctctggcaaccgatcatatgcccattaccatcccattaaaacctaatcacccttaccccgctcaatgccaacatcccatcccacagaatgctttaaaaggattaaagcctgttatcacttgcctgctacagcgtggccttttaaagcctataaactccccttacaattcccccattttacctgtcctaaaaccagacaagccttacaggttagttcaggatctgcgccttataaacaaaactgtttttcctatccccctcccttggtgccaaacccatatactctcytatcctcaatacctccctcaacaacccattattctgttctggatctcaaacatgctttctttactatccctttgcacccttcatcccagcctctcttcgctttcacctagactgaccctgacacccatcaggctcagcaaattacctaggctgtactgccgcaagacttcacagacagcccccattacttcagccaagcccaaatttcatcctcatctgttacctatctc

SEQ ID NO: 933964 - DNA, 633 bp, Homo sapiens
tagtgctatccccaagctgccactcttaactcttaaagtaaataaataatctttgctggcaggactatgctgaatctccttaggcattaattaaatatcctgggtcctcccaattcttagacctttaatacctgtttttctccttctcttattccgtttttcaattcatacaaagccatatccaggccatcacaaataattctaaataacaaatgtttcttctagcaaccccacaatatcaccccttaccacaaaatcttccttcagcttaatctctcccactctaggttcccacccgcccctgatcccactcgaagcaggcctgagaaacatcgcccatgatctctgcataccacccccaaaaattttcgccgtcccaacactttaccactatttcattttatttttcttattactataagaagayaggaatgtcatgcctctgagctcaagctaagccatcatataccctgtgacctgcacgtacacatccagatggccggttcctgccttaactgataacattccaccacaaaagaaatgaaaatggcctgttcctgccttaactgatgacattatcttgtgaaattccttctggctcatcctggctcaaaagctcccctactaagtacc

SEQ ID NO: 933965 - DNA, 542 bp, Homo sapiens
atcagttgttagtctgacggacttccctctgggggtaactcgacctttctctctggctgcccttaacattttttccttcatttcaactttggtgaatctgacaattatgtatcttggagttgctcttctcaaggagtatctttgtggcgttctytgtatttcctgaatttgaatgttggcctgcgttgctagattggggaagttctcctggataatatcctgcagagtgttttccaaattggttccgttctccccatcactttcaggtacaccaattagatgtagatttggtcttttcacatagtcccatatttcttggaggctttgttcgtttctctttattcttttttctctaaacttctcttcacacttcatttcattcatttgatcttccaacactgataccctttcttccagttgaacacatcagttactgaggcttgtgcattcatcacatagttctcgtgccatggttttcagctccatcagctcctttaaggactactctgcattgattattctagtctccatttgtctaattt

SEQ ID NO: 933966 - DNA, 613 bp, Homo sapiens
attctaccagaggtacaaggaggagctggtaccattccttctgaaactattccaatcaacagaaaaagagggaatcctccctaactcattttatgaggccaacatcatcctgataccaaagcttggcagagacacacaaaaaaagagaattttagaccaatatccttgatgaacattgatgcaaaagtcctcaataaaatactggcaarccgaatccagcaacacatcaaaaagcttatctaccacgatcaagagagcttcatccttgggatgcaaggctggttcaacatacgaaaatcaataaacgtaatccagcatataaacagaaccaaagacaaaagattatctcaatagatgcagaaaaggcctttgacaaaattcaacaacacttcatgctaaaaaatctcaataaattaggtattgatgggatgtatctcaaaataataagagctatctatgacaaacccacagccaatatcatagtgaatggacaaaaatgtgaagcattccctttggaaactggcatgacatgccctctctcaccactcctattcaacatagtgttggaagttctggccagggcaatcaggcaggagaagggaataaaggacat

SEQ ID NO: 933967 - DNA, 613 bp, Homo sapiens
attctaccagaggtacaaggaggagctggtaccattccttctgaaactattccaatcaacagaaaaagagggaatcctccctaactcattttatgaggccaacatcatcctgataccaaagcttggcagagacacacaaaaaaagagaattttagaccaatatccttgatgaacattgatgcaaaagtcctcaataaaatactggcaagccgaatccagcaacacatcaaaaagcttatctaccacgatcaagagagcttcatccttgggatgcaaggctggttcaacatacraaaatcaataaacgtaatccagcatataaacagaaccaaagacaaaagattatctcaatagatgcagaaaaggcctttgacaaaattcaacaacacttcatgctaaaaaatctcaataaattaggtattgatgggatgtatctcaaaataataagagctatctatgacaaacccacagccaatatcatagtgaatggacaaaaatgtgaagcattccctttggaaactggcatgacatgccctctctcaccactcctattcaacatagtgttggaagttctggccagggcaatcaggcaggagaagggaataaaggacat

SEQ ID NO: 933968 - DNA, 502 bp, Homo sapiens
tctaccagaggtacaaggaggagctggtaccattccttctgaaactattccaatcaacagaaaaagagggaatcctccctaactcattttatgaggccaacatcatcctgataccaaagcttggcagagacacacaaaaaaagagaattttagaccaatatccttgatgaacattgatgcaaaagtcctcaataaaatactggcaagccgaatccagcaacacatcaaaaagcttatctaccacgatcaagagagcttcatccttgggatgcaaggctggttcaacatacgaaaatcrataaacgtaatccagcatataaacagaaccaaagacaaaagattatctcaatagatgcagaaaaggcctttgacaaaattcaacaacacttcatgctaaaaaatctcaataaattaggtattgatgggatgtatctcaaaataataagagctatctatgacaaacccacagccaatatcatagtgaatggacaaaaatgtgaag

SEQ ID NO: 933969 - DNA, 613 bp, Homo sapiens
attctaccagaggtacaaggaggagctggtaccattccttctgaaactattccaatcaacagaaaaagagggaatcctccctaactcattttatgaggccaacatcatcctgataccaaagcttggcagagacacacaaaaaaagagaattttagaccaatatccttgatgaacattgatgcaaaagtcctcaataaaatactggcaagccgaatccagcaacacatcaaaaagcttatctaccacgatcaagagagcttcatccttgggatgcaaggctggttcaacatacgaaaatcaataaacgtaatccagcatataaacagaaccaaagacaaaagattatctcaatagatgcagaaaaggcctttgacaaaattcaacaacacttcatgctaaaaamtctcaataaattaggtattgatgggatgtatctcaaaataataagagctatctatgacaaacccacagccaatatcatagtgaatggacaaaaatgtgaagcattccctttggaaactggcatgacatgccctctctcaccactcctattcaacatagtgttggaagttctggccagggcaatcaggcaggagaagggaataaaggacat

SEQ ID NO: 933970 - DNA, 807 bp, Homo sapiens
tgtggcattctcccaggagcctgtgggacagcgagacctcaggggggaaagcacattctgtttaacttgtccatgtcctacaaaatgtcttagaagcgatgaagcaacaacgatgattctccctcaaagggaagaagaatctgccaggtgtcactttgaggaggcagtggttacaagacaggctgggctgcagagcccaagtgggaggttgcagtgagccaagagcatgccattgcaccctggcctgggcgacagagcaagactccatcttgaaaaaaaagagagagaaaagaaagccatcgagacaccattaggcaatccactgtcatgtgagtttgggaaggaaagtagacaaaggagaaggaagtttatttaaagaaagaatggttgaaactgcctaaatcatgggaaagatttagacatccaagtgcatgaagcttaaagattcctaaggaggttaaaaccaaatatatatatcacaatataatmaaatagtcaaaagccaaagattttttaaaatgttgaagaggcaagagaaaagtggcatgacaccaacaagagaatcttcattaaactatcagcagatttctcagaagaaactttgcaggtcaggagagaattgaagaatatattcaaagtgctgaaagaaaaaaactgccagcaactaatactatatttgacaaagctatccttcagaaagaatgaataaataacatgttccctagacaaaaaaagctgagggaattcaggagcactaggtctactttaaaagtaatgcttaacggagtttttcaagtaaaaatgaaa

SEQ ID NO: 933971 - DNA, 485 bp, Homo sapiens
aggcaggagcatctcttgagcccagttggtcaaggctgcagtgagctatgattataccactgcactccatcctgggtgacagagtgggaccctgtctcaaaatataaatacaaatacaaatgaaatgaattctcaagtcagaccagtcccttctaggctatgtaggccttgcaaccacatagctgcgtgatckggtttgtgtggctgtggatgaggagacccctgccaattgttattagctatataatcagtttatttttcaatatagtaatcaaatatatttcatcatatttgatggtctcaaatatgtgtgggttttggaattccccttggaacaggttgtaacatcttattggctccatcattccataatttttttaatctgatcagtttttaataaggtcagaattgatattagactacctaatcagtttttaatgagaaaatgaaattgtgttgtttgcactttatccaagattggtgtc

SEQ ID NO: 933972 - DNA, 631 bp, Homo sapiens
aggccccagagcgacagggcatgatgggggcatggtttccctcaccctcagaagtccgagaatggacaagcttagaagcaacagtgagaggttttgagttcccatttcactcactggttcttgagtatcacattgggcatcaaaagcgttgcaggacttttccttagttcaagctaaaggcagggttcttcccacagccacggaaattcagactcgcagacgagttgaatggtaacccagggttttattgggygaaaataatgaaaagggggaagcaggaactctctccaggccagagtccctgctagagcgtttcccacccagccattcgaatcccaggttccacacaggaagaggaggggccaggctcctccctgctgctaacgtggtgaacttccccgggctccacttcagtgggcaggctagatggagtttctccagggaacccctcccacctgactgtttcacctgggccttagagttgcccaaagaatggttgatttcaggggctggggcaagagcttggatttccaaactgtgttgttcacacaaaggttcacgagtcccctcaccatctgggatggagccagggacactccatcagggatgaagtgaagggagatggtccagt

SEQ ID NO: 933973 - DNA, 600 bp, Homo sapiens
ttatggttctaagtacccctaacaatactcaatatttcctattaggcatggcttttaggtataacaacacaatgagaattacatttaatttaccagttactgagaacttattgaaaatcagaaattttgctagaactcaggggtgaaaagatgattaagactctaaaaccatgtactactttgaagaaaygcacacttactggaggtgacaggcaagctgataaatacctatgaaattataatgaaaatgtaatcacttctgaaaaatattttaaaaacacactttcataaataagttcataatatagaaaaaataacaaactatccatagctcactacattatttcttcaggttggcccaatttctttcataattattataatagatgcctttctatcttttctatgttagacataattcaatcactattactatataattgacatatacttgtcacatacacaccggacatgagtatattatttcaattttaatgaggaggacacttgaagaacagagaacttcccaaagtcacacaactagtaaaaaggagagaccaggacttttaatcatacattcctgattttacatcctcatcc

SEQ ID NO: 933974 - DNA, 600 bp, Homo sapiens
ttatggttctaagtacccctaacaatactcaatatttcctattaggcatggcttttaggtataacaacacaatgagaattacatttaatttaccagttactgagaacttattgaaaatcagaaattttgctagaactcaggggtgaaaagatgattaagactctaaaaccatgtactactttgaagaaatgcacacttactggaggtgacaggcaagctgataaatacctatgaaattataatgaaaatgtaatcacttctgaaaaatattttaaaaacacactttcrtaaataagttcataatatagaaaaaataacaaactatccatagctcactacattatttcttcaggttggcccaatttctttcataattattataatagatgcctttctatcttttctatgttagacataattcaatcactattactatataattgacatatacttgtcacatacacaccggacatgagtatattatttcaattttaatgaggaggacacttgaagaacagagaacttcccaaagtcacacaactagtaaaaaggagagaccaggacttttaatcatacattcctgattttacatcctcatcc

SEQ ID NO: 933975 - DNA, 557 bp, Homo sapiens
tgctcctgtcccccaggctggagtgcaatggccaagcttgctcaccgcaacctccgcttcccaggttcaagtgattctcttgcctcagcctcccgagtagctgggattacgggtgcctgcccccatgccaagctaatttttgtatttttggtagagatggggtttcaccatgttggccaggctgatctcgaactcctgacctcagatgatctgcccgcctcagcctcccaaagtgctgggattacaggcgtgagccacagtgcccggccttaaaacaaattttaatgaaaagagaaaaaaaaaagataatcttctgytaacgccttttggtaagcagataattgtcatatttaaataaaggtgtaattgcacctggtgggcacccagttctgccattaaaaatgccacactgactgaagagattgtattttcctaaacctgttagtccctgggaacctaaagaataaactgtgcagcacatccaatcacagagtgtagggtatgtcccaggtcatgttctaacatacatgcggtaaggtattttacattcctttgag

SEQ ID NO: 933976 - DNA, 484 bp, Homo sapiens
ggtatctatttttcctgcctctttgcacttatgatttgtgatggtaaacattaataatctaatcagatgcatgggacaattgaagtaaagagagatgtgtatggcatatacccagtgagaggttcctagaacgtagtaaatttrttctaataaaagaatctgacaattgaagaaaggaatgcaaactggcctatggcatagttaccaacttaccatttgtgccaacgaatccttgggtgacctcactgtaaggagctacatgagataaagatgggctcaatgtagaaatgaaaataataaatgccttcaatgggaggataggtcaacatatttgaagtattctggggtactactaagcctgggaaataatctagggacagaagaggtaggcactagtcttggcttccaggctttaattaaacacctatatatgggcagcatcagctgtagttaggaagcagttcattccatccagagacttggt

SEQ ID NO: 933977 - DNA, 484 bp, Homo sapiens
ggtatctatttttcctgcctctttgcacttatgatttgtgatggtaaacattaataatctaatcagatgcatgggacaattgaagtaaagagagatgtgtatggcatatacccagtgagaggttcctagaacgtagtaaatttgttctaataaaagaatctgwcaattgaagaaaggaatgcaaactggcctatggcatagttaccaacttaccatttgtgccaacgaatccttgggtgacctcactgtaaggagctacatgagataaagatgggctcaatgtagaaatgaaaataataaatgccttcaatgggaggataggtcaacatatttgaagtattctggggtactactaagcctgggaaataatctagggacagaagaggtaggcactagtcttggcttccaggctttaattaaacacctatatatgggcagcatcagctgtagttaggaagcagttcattccatccagagacttggt

SEQ ID NO: 933978 - DNA, 607 bp, Homo sapiens
gcactggaagtcctagccagagcaatcaagtaggagaaagaaaggaaaggcatccaaataagaaatgaagtcatactatctctctttgctgatgatttgcttctatacctagaaaaacctactctgccaagagaactgataaatgacttcagtagtttcagtatacaaagtcagtgcacaaaaatcagcagcatttccatataccagtaatrttcaagctgagagccaaatcaagaactcaagcccacttacaataatttgtaattattatctaatgcaatctcatgttaaaaggaacactggaaaaataacaatttgatgtttatctcttggaattctgaatgattcagtcaaggccttacaaattaattaatttaaagtctgcaaggataaaagttctttggcaaggagtccccataaaataatcatgctaacaaaattatactccaataaccattatgaatggatacatttaatataagattttttaacaaaggaaggacttcaggctactttgtcgactgacaatctctgcccaaaaaaaaaaaaaaaaaaaaaaaaaacaaaaaaccccaaataaacaacaaaaatccctcaaacctaaaaa

SEQ ID NO: 933979 - DNA, 561 bp, Homo sapiens
  misc_feature 221: n = A,T,C or G
aagtccagcctcggccagagcccgtgagatgcaatgcaccatccgcagcgggagacgcagccgccgcctaggaggtcgtgcgcgcctctgggtctcgtgccgcacccagaagtgccggggtggcggggaggctgagaggagttggtaacggcatcgccatggcaacagtgacgtccttttaccctggatctaattggaggaaaccccgtgccgaagccggncatgccggccaaccgaacttccccgtaccgacccaccctcctagcctccgcgttcccttccactccgcccccctcgcccccttccgcgcgctcggtcctcattggcacggcgcgctgggggcgggactctcgggasaagctcggcgcatctaatatgggtggaccgcccctcggccccggggtaggctgacacgggagggtcctcagctaaagccaaaagcagatcaaagtggtgggactgcgtcgcggccgcggagacgtgaaggtgagcgcctgggtcggcccgcgggcttcctccggccgcgctcggattgagggcccggcggaggtgccgcccttg

SEQ ID NO: 933980 - DNA, 612 bp, Homo sapiens
caggcgcggtggctcatgcctgtaatcccagcactttgggaggccgagctgggtggatcacgaggtcaggagatcgagaccatcctggctaacatggtgaaaccctgtctgtactaaaaatacaaaaaattagccagrtgtggtagcaggcgcctgtagtcccagctactcgggaggctgaggcaggagaatggtgtgaacctgggaggtggagcttgcagtgagccgagatcgcgccactgcactccagcctgggcgacagagcaagactccatctcaaagtaagtgaataaatgaaacataaatgaattttatatttagacttgggtcccatccccaagatacctcattatgtatatgcaaatatttcaaaatttaaaaaattctgatgaatgaaacacttctggtctcaagcattttggataagggatgctcaatctgtatctctttatttactcctaaaatcagccaaggaaatgggcatctctccgttcccccccttccttttttttttttctttgttgttacatgagttgtactggtttcacttcatttgacagtgttctgctaatgactagacgtgtatctctgacctggacttgttctctggag

SEQ ID NO: 933981 - DNA, 694 bp, Homo sapiens
caagtgcttaaaagaatgcctagcacatgataatgatatgggatgggggcacagaagtgctgggtagagaagggtggggtccctggcaaggtctccacccttggacctgtgcccacatacctaggtgaggacaggcactcctgtttttgcacccaaatgtcgcattttccaagaccaccctggccccccacgtaccccattctgtgactataaaaaccctgagacctggccgggcgcggtggctcatgcctgtaatcccagcactttggaaggccgagacaggtggatcacgaggtcaggagatygagaccatcctggctaacacggtgaaaccccgtctctactaaaaatacaaaaaattagccaagcgtggtggcgggcacctgtggtcccagctactcgggaggctgaggcaggagaatggcatgaacccgggaggtggaacttgcagtgagccgagatcgtgtcactgcctgggccacagagcgagactccatctcaaaaaaaaaaaaaaaaaaaaaaaaaaaacccagaccctagtggtcacagactcgagcgctggacgtcgagaggaacacactgcagaagaacacacacaggcggctggatatcaagaggagcagagtagcggaagtgcacagctgatgaggaggaacagacgcctgtagaccagggtaggacaatcgcagaattc

SEQ ID NO: 933982 - DNA, 694 bp, Homo sapiens
caagtgcttaaaagaatgcctagcacatgataatgatatgggatgggggcacagaagtgctgggtagagaagggtggggtccctggcaaggtctccacccttggacctgtgcccacatacctaggtgaggacaggcactcctgtttttgcacccaaatgtcgcattttccaagaccaccctggccccccacgtaccccattctgtgactataaaaaccctgagacctggccgggcgcggtggctcatgcctgtaatcccagcactttggaaggccgagacaggtggatcacgaggtcaggagattgagaccatcctggctaacacggtgaaaccccgtctctactaaaaatacaaaaaattagccaagcgtggtggcgggcacctgtggtcccagctactcgggaggctgaggcaggagaatggcatgaacccgggaggyggaacttgcagtgagccgagatcgtgtcactgcctgggccacagagcgagactccatctcaaaaaaaaaaaaaaaaaaaaaaaaaaaacccagaccctagtggtcacagactcgagcgctggacgtcgagaggaacacactgcagaagaacacacacaggcggctggatatcaagaggagcagagtagcggaagtgcacagctgatgaggaggaacagacgcctgtagaccagggtaggacaatcgcagaattc

SEQ ID NO: 933983 - DNA, 652 bp, Homo sapiens
gtttacaggcacccgccaccactcccgggtaaattttgtatttttgtttttagtagagatggggttacaccatgttggccaggctggtcttaaactcctgacctcaagtgatccacccacctcagcctcccaaagtgctgggattataggcatgagccactgcacccagactcaagttggttgttttcttttgttttgttttttcagaccaggtctcactctgtcacccaggctggagtgcagtggcgcagtcatggctcactgcagacttgacctcccaggctcaagtaatcctcccaactcaacctcccaagtagctgggacaacaggtaagcaccacgacatctggctaatttttaaatttttggtagagacagagtctcaccrtgttgccctgattggtctcaaacacctgggcgcacgaatccacctgcctcgacctcccaaattaatgggattataggtgtgagccactgcgcctggccacaggtcaagttttaaaggaaaaaaggaggaagtttctatgttgtttatcaagatgttcttaaaataacataagctattgattggctatacattgttctttgtatcacgaatttcagaaacatgaagataatgagtgaggcaactagtcaggaacaaaatatcttta

SEQ ID NO: 933984 - DNA, 604 bp, Homo sapiens
cagagcaaggccctaactctcttccattttttttttttttttctgagattgggtctcgctctgtcacccaggctggagtgcagtggtgcaatcttggctcactgcaacctccacctactgggttcaagctattctcctgcctcagcctcccaaatagttgggactacaggcatgtgccaccatgcccagctaatttttagtacagacaaggtttcaccatgttggccaggctggtctccaactcctrgcctcaagtgatcgacctgccttggcctcccaaagtgctgggattacaggtgtgagccactgcgcttcaattctgtcaaggctgagagaggtgagaaagctgcagaagaaaggttcaaagctagcaaatgttggttcatgcagtttaaggaaagaagctgtttccagaacataaaagtcaaagtgaagtggaaagtgctgatggaaaagctgcagcaagttatccaaaagacctagtaaagatcactgatgaaggtgtctacactaaacaacagattttcaatctaggactttcaaaggtagagaggagaagtcaatgcctggcttcaaagaacaggctgagtctcttgttaggaac

SEQ ID NO: 933985 - DNA, 604 bp, Homo sapiens
cagagcaaggccctaactctcttccattttttttttttttttctgagattgggtctcgctctgtcacccaggctggagtgcagtggtgcaatcttggctcactgcaacctccacctactgggttcaagctattctcctgcctcagcctcccaaatagttgggactacaggcatgtgccaccatgcccagctaatttttagtacagacaaggtttcaccatgttggccaggctggtctccaactcctggcctcaagtgatcsacctgccttggcctcccaaagtgctgggattacaggtgtgagccactgcgcttcaattctgtcaaggctgagagaggtgagaaagctgcagaagaaaggttcaaagctagcaaatgttggttcatgcagtttaaggaaagaagctgtttccagaacataaaagtcaaagtgaagtggaaagtgctgatggaaaagctgcagcaagttatccaaaagacctagtaaagatcactgatgaaggtgtctacactaaacaacagattttcaatctaggactttcaaaggtagagaggagaagtcaatgcctggcttcaaagaacaggctgagtctcttgttaggaac

SEQ ID NO: 933986 - DNA, 599 bp, Homo sapiens
  misc_feature 581, 582, 583, 584, 585, 586, 587, 588, 589, 590, 591, 592,593, 594, 595, 596, 597, 598, 599: n = A,T,C or G
ggtctcaaactcctgacctcaggtgatccactaccctcggcctcccaaagtgctgggattacaggtgtgagccaccgcacccagccggtttcctttaactttgtccacacttttgaaaatagtccctttttgaaattcttctcagttatgctatttgaacgagtcatctcctttttgctgggaccctgactgataggtggtacttctctgggaaaacaaagtgattcagcctatagggagatagtgaagatattatgcagaagccaaagagagagttgmaatagttggttgagtgatagttgaagtggtactaatgttggtgacacccaggaatgggaagagaatgaatagatttccctgccaatgcctcatcttttgtaaacctctggctattaaaaaggaaagttgagcatcatcaaagcattgtttgtgtttgaggatcattttccaggttagtttttgaaatatttctagctgtatataaaaggttaatgtggaatagaaagcctaacaaattaatgaggtcttgttggtatggtggggtcaggggagggaaggagaggctggaagagggagcagannnnnnnnnnnnnnnnnnn

SEQ ID NO: 933987 - DNA, 661 bp, Homo sapiens
gggatcagagtgctaatgggaactgtgaaattcccttccatgaaagcctttagaagtaaaccaggtagccaggtgcggtggctcacgcctgtaatcccagcactttgggaggccgaggcaggcggatcacgaggtcaggagatcgagatcatcctggctaacacggtgaaaccccgtctctactaaaaatacaaaaagttagctgggtgtggtggcaggcacctgtagtcccagctactcaggaggctgaggcaggagaatggcgtgaacctgggaggcggagcttgcagtgagccaagatccggccacagcactccagcctgggcgaaagagcaagactccatcttaaaaaaaaaaaaaaaaagaaagaaataaaccaggtacctcycccccgcaatctggtgacaatgataatgatagcaaaaatcaaggcactaagctaagtactttaattacattctctcatttatcctcccaataaccctacaaggtaggcatgactataattcccattttacagatgaagacaccaagatacagaggccctaacccttccaaagctccagagtttagtaagtatcagaaccaggttgcaaaggcaggacaccaacctgggatcccagggccttagccagataccccactggggactagatggaga

SEQ ID NO: 933988 - DNA, 641 bp, Homo sapiens
ttgatccagcaatgccactactgggtgtctacccagaggaaaagaaatcattatatgaaaaagacacttgcacatgcaagtttatagcagcacaatttgcaattgcaaaaatatgaaaccagcccaaatgcccatcaatcaagtggataaagaaaatgtggtgtgtgtgtgtgtgtatrtatatgtatatttatatatatataaaatatatataccatggaatactactcagccataaaatgacatgaaatgatgtcattcctagcaacctgaatggagttggagaccattattctaagtaaagtaactcaggaatggaaaacaaaacattgtatgttctcacttatatgtggaactaagctatgaggatgcaaatgcgtaagaatgatacaatggactttggggacttgcagggaagggtggcaggtgggtgaggtataaaagactatacactgagtacagtgtacactgcttgggtgatgggtgcaccaaaatctcagaaatcaccactaaagaacttatccatgtatccaaataccacccattacccaaaaactattgaaagaaaaaagacgtattgaagaaagtagaaaaggcaattttacattatctacattaccctttccccaacaccaggcatg

SEQ ID NO: 933989 - DNA, 584 bp, Homo sapiens
taatcagtctaccaccaagtagttggctgatcacgccgaggaacagtgccatatcaaggtgtcagtgttggtctctgttgctggaaaattaggcactcagtggtatctgtggccaagtcagccttggtgagtggaagttaatgttgctgagcccatgcgtaacctccatccctgccaccatggtcattttgttcatgaatccattgggtgwtgacaggggtggctggggaaagaggctgagggagtctatataatgaataatccaatccacttgattattacaatccactgctgaggtcaccctttgatgaacattcacataggacacaaatatcttcacagtattttaccactcagagaggtccatccacatatctcttccccaaattcctttgtcaccaattttccaatcacgcttcttccaagtccctgaccatcccagcaaaccattggctacagcccatgaatcagatataatagtacgtctagccatttctcattctaagcaaagtacacaaccgaggtgcactgctcaaagttctggggaagatttcccgttcacgtgcttgtccgttggtggatat

SEQ ID NO: 933990 - DNA, 584 bp, Homo sapiens
taatcagtctaccaccaagtagttggctgatcacgccgaggaacagtgccatatcaaggtgtcagtgttggtctctgttgctggaaaattaggcactcagtggtatctgtggccaagtcagccttggtgagtggaagttaatgttgctgagcccatgcgtaacctccatccctgccaccatggtcattttgttcatgaatccattgggtgttgacaggggtggctggggaaagaggctgagggartctatataatgaataatccaatccacttgattattacaatccactgctgaggtcaccctttgatgaacattcacataggacacaaatatcttcacagtattttaccactcagagaggtccatccacatatctcttccccaaattcctttgtcaccaattttccaatcacgcttcttccaagtccctgaccatcccagcaaaccattggctacagcccatgaatcagatataatagtacgtctagccatttctcattctaagcaaagtacacaaccgaggtgcactgctcaaagttctggggaagatttcccgttcacgtgcttgtccgttggtggatat

SEQ ID NO: 933991 - DNA, 598 bp, Homo sapiens
ttataggcacacacctccatgactggctaatttttgtatttttagtagagacagggtttcgccatgttggccaggctggtcttgaactcctgggctcaagtgatctgcctgcctcagcctcccaaagtgctgggattacaggtgtgagccaccggatcagccttacttgaatttttaaattatttgcatctgaagaatcrtaacacatatatactccaagtgttttattttagtatgttatacaatgattttgaaacacatagagaataagttagttcaactatctagcaacaaattaaggatcatcacaaagcaaacccaaagaataaggcactgctgcaagagaagcacatcaccactgaactggcttagtaggaactttcctaagagaaacacccctagattaaatagggacagcctggacccaatcaaaccctcccttttgggtcatacacttgctgtgtaaacaaatgtaaggtgggtaacttgagctcagatcattgcacaagtctgcaattcatcctaatcttaaaaggtttgcaaatatcagaacccacaaaaattccaagccaatgagactatctgtatcttattgcag

SEQ ID NO: 933992 - DNA, 607 bp, Homo sapiens
acatctgtaatctcagctactcaggaggctgaggaacaagaatcacttgaacccaggaagcagacgttgcagtaagcctatatcacaccactctactctagcctgggcaacagggcaagactctgtatcaaaaacaaaaaacaaaaaaacttatcatgactccctattgtctataagataaaacctaaactccttatcatggcagcaagggcctccatgatgtgacctttttctacttaacccagcagcactatcttttgtcattctctcttcacctcccggcccttcatattaaaatagtcatgctcatactytgaattccccaacatgccatgctattgcttgagttgcttctgcttcttctccttagaatgccctctctccaactacctgataaatgtcagcttcagttttcaacacttagctcagaatcatctccttcatgaagcctttcctaacatctctcaggcagaactgaccttttccttctccctgtctacactgtaccctacacatatatagatcataacctttaactgcaattatttttatatatgtttatttcctactaagcagagaattccctgtaggccctctcttattcatc

SEQ ID NO: 933993 - DNA, 564 bp, Homo sapiens
aattaaagagcttttgcatggcaaaaggaacagtcagcagagtaaacagacaacccacagagtaggagaaaatcttcacaatctatacatctgacaaaggactaatacccagaatctacaatgaactcaaacaaatcagtaagaaaaaaacaaaagatcccatcaaaaagtaggctaaggacatgaatagacgattctcaaaagaagatatacaaatggccaacaaacatacaaaaaaatgctcagcatcactaatgatcagggaaatgccaatcaaaacaactatgtgataccacctcactcctgcaagaaygtccataatcaaaaaatcaaaaaacagtagatgttagtgcggatgcagtgaacagggaacacttccacattgctggtaggaatgtaaactagtacaggcactaaggaaaacagtgtggaggttccttaaataactaaaagtagaactaccatttgacccagcaatcccactactgggtgaaaagaagtcattattcaaaaaagatacttgcatatgaatgtttatagcagcacaagttacaattgcaaaat

SEQ ID NO: 933994 - DNA, 564 bp, Homo sapiens
aattaaagagcttttgcatggcaaaaggaacagtcagcagagtaaacagacaacccacagagtaggagaaaatcttcacaatctatacatctgacaaaggactaatacccagaatctacaatgaactcaaacaaatcagtaagaaaaaaacaaaagatcccatcaaaaagtaggctaaggacatgaatagacgattctcaaaagaagatatacaaatggccaacaaacatacaaaaaaatgctcagcatcactaatgatcagggaaatgccaatcaaaacaactatgtgataccacctcactcctgcaagaacgtccataatcaaaaaatcaaaaaacagtagatgttagtgcggatgcagtgaacagggaacacttccacattgctggtaggaatgtaaactastacaggcactaaggaaaacagtgtggaggttccttaaataactaaaagtagaactaccatttgacccagcaatcccactactgggtgaaaagaagtcattattcaaaaaagatacttgcatatgaatgtttatagcagcacaagttacaattgcaaaat

SEQ ID NO: 933995 - DNA, 619 bp, Homo sapiens
attctggtgtcttagtttgggctgctgtaacaagtaccatatcctggatggcttataaacaacaaaaatttatttctcacagttctggaggctacaactccaagatcagagtgccagcatggttgggttctggtgagggccccatcttgcagtctgcctacttctcattcattgtatcctcacatggtagaaagagagctagctagccctctgggctcttcttataagggcactaatcccattcatgagggcttcacttttatgacctaattacctccccaaggtcccacctccaaatactgtcacaatgggattagggtttcaacatattaattttgggggggcacaaacattcagtccattacaccaggattatctgggagacagaagagttagtgtcagagtgatscaaagtgagaaggtctcaactggcttattgttggctttgaatatggaaatgggccacaggccaaggaatatgaggctgacatttgaagctggaaaaggcagggaatgagattctctcctagagcctccaaaaagaaacacagccctaccaacaccttgattctgacctacagaactgtaagataatatatttgtgtgttttttttagcca

SEQ ID NO: 933996 - DNA, 572 bp, Homo sapiens
attattggatgcttattggaatagttatcacgagaaatgtttaacactttctagaagcctgagaaagttcttggatatctgtttattgcagtcttatagcatatatctaaatgaatttaattcaaaatatatttcttcaatgccatttgtgtgatcaatttttaccaggagctgaagatatccttccccttccctgcccacaataccacagtgtgtttgagatatattttcaacagtttgtaaaatatatttttatagtttaataatcagaaattgcaggctcacagtttagctaaaagttttcttatttatgcatacagtaattaaccattaaacaaaattgagttataaacaaatccttaaaataaaacgtaatcrtacaaagacatgaggagacactgtttgcgggtagagaatctctgttttggatgaggtataattttggaaaatacaagcaatggatatatgacattgtaaatgtaatcaatgccactggattgtatgcttacaatgtttaaaatggaaaatttatgttatatgtattttaccacaataaaaaaattaaaaacaat

SEQ ID NO: 933997 - DNA, 600 bp, Homo sapiens
ccatgtgttctcattgttcaactccacttatgagtgagaacgtgcagtgtttggttttctgttcctgtgttagtttgctgagaatgatggtttccagcttcatccatatccctacaaaggacatgaactcatcatttttatttatttgtttattatactttatgttctggggtacatatgcagaacgtgcaggtttgttacataggtatacaygtgccatggtggtttgctgcacccatcaacccgtcatctacattaggtatttctcctaatgctatccctcccccaggcccccaaccccctgacaggctccagttgtatgaagttccactccctgtgcccatgtgttctcattgttcaactcccaattatgagtgagaacatgtggtgttttgtattattttcttgtgttagtttgctgagaatgatggtttccagcttcatccatgtccctgcaagagacatgaactcaaccttttttatggctgtatagtattccatggtgcatatgtgccatgttttctttatccagtttatcattgaaggccatttcggttggttccaactctttgctattgtgaagagtgctgcactaaatat

SEQ ID NO: 933998 - DNA, 600 bp, Homo sapiens
gccttttagtcaatcaaaaggtgctttttccaatactactcatggaccaatcagcacacactctctcattctgagcccataaaaaccttggactcagccaaacagagggctacccacttccaggccccctctcacacagaggactacctgctcttgggtcccctctgctgagagctttccttatgtcactcggtaaaattcttctctaccctactcactctcctgttgccatggaccttattactcctggtcatgggacatgaactcagaactcaccaagctgagggtggtggggccaagtgagctgtaacatgyccccggttcactaagatataggtggagagaataaatgagctgtgacacatccctgtttgctgagctgcacgtgggaggaagaagagagagctgtaacatttcttgagggctcagacctctgggatttcctcgggcaagagctggaacaccccttgggctccacagattgctgcggatcttcaagttttggggaagcactcactgtgttccccacatctagatgctggagcccaatgaggaagccactcgggatgcccagttcagccatgagacaagcatggatcc

SEQ ID NO: 933999 - DNA, 729 bp, Homo sapiens
aaggcacaattcctgcaactttaacaacagtgggaatagacaagattacagtatggagcccatcccatatgggtcccagagtggttgggttttattttttgacccaaagagagtccctgggtttaaaggggtgtattggatctatcaggcttatgggcattctttcctgtacccagccatggacacttcacatggctatccctaaagcctgcatttgcctccttaaagttaattcccctagttcacgragattacccttaatttgacttatgattggggatggcttgccgaacagtatttcatagggcgaatacccagtttgtttggtgggggtgcacctaacttgaaggaggaccatgggcaggacttgatcccatctcagaggggtttcttggcaatatttcttcagtagctgtttgagtgtccagttcatgcactctacttttcctaagctctgcagccggtaggctgtgtgtaatttccattttatttttaacactcgtgttagttcctgaattatttcagctagaaatgccagcctgttgtctgaccctagagtcacagacagtccaaatctggggataatgtttcttaatagtattttagtcacttctcatgagttcttgcttctggtagggaaagccttggcccatcctgaaaaggtgtagacaagtactaacatgtaccgatagctccctgcctgaggcaactctgtaagtccataagcag

SEQ ID NO: 934000 - DNA, 563 bp, Homo sapiens
tttggggggcaggtggtcctggtgggggttggggcttttccccagacttaggtcacacccagagccagaaatcttggcacctgctctaggctaaggatgcatctggcccccagggtgcaggtaactgcccacctttcctggtttctgcctgccagggccaatcttcagacctcaggacttcccagcctatcccatctccctctctggccagccttgaaccctcgtgggtccagcactttttccaggccgtctcctggttgtcctcctgccccgaggcctggctcatgctgctccccctcccactcaccatgacccacaaggaccactccacacccagctcagccccaaccccttggatagtcctttctctttcctcaggygaccaggtgcatatcttggtgtcaggaccttccctgcacctgggaatgcctactggtcacctcggtcacagagaccaaggcatttacttgatatgggtgcctttggttcattgtctacatggccagggagggagtcaatgttaggcttttcacttgctgcaagggccagttgtcctggcccca

SEQ ID NO: 934001 - DNA, 563 bp, Homo sapiens
tttggggggcaggtggtcctggtgggggttggggcttttccccagacttaggtcacacccagagccagaaatcttggcacctgctctaggctaaggatgcatctggcccccagggtgcaggtaactgcccacctttcctggtttctgcctgccagggccaatcttcagacctcaggacttcccagcctatcccatctccctctctggccagccttgaaccctcgtgggtccagcactttttccaggccgtctcctggttgtcctcctgccccgaggcctggctcatgctgctccccctcccactcaccatgacccacaaggaccactccacacccagctcagccccaaccccttggatagtcctttctctttcctcaggtraccaggtgcatatcttggtgtcaggaccttccctgcacctgggaatgcctactggtcacctcggtcacagagaccaaggcatttacttgatatgggtgcctttggttcattgtctacatggccagggagggagtcaatgttaggcttttcacttgctgcaagggccagttgtcctggcccca

SEQ ID NO: 934002 - DNA, 503 bp, Homo sapiens
tttagataccatcaagacacctaaaaccttatcatgagccagatgctgtggaagagattctgggagaatcctgaggaccccccagttgcagccatgtcaagactgatgctgaggaggaccccaactgtcacgagcaacacccrtcgaacacagccacctacttggggaaagatcaagaagctgtcacagatggtggaagaaaacctgaggaaagcgggacaacgcagtcacaatgagtaatttaatgatagctatgagagcggtgatcaccattgctgtgagtattccttcagcaagcgctgacacagagaacaattatacttattgggcatatctatcaatcttggctggcaataatgcctggatgtaatcactctatgacgcagttacacatgctttctgatctcagtatttgccataatgaatctgctcctataattaaggcataccaccctcaaaaacctatctgtaaacagaattgaacctggccagaaaaaatgaat

SEQ ID NO: 934003 - DNA, 503 bp, Homo sapiens
tttagataccatcaagacacctaaaaccttatcatgagccagatgctgtggaagagattctgggagaatcctgaggaccccccagttgcagccatgtcaagactgatgctgaggaggaccccaactgtcacgagcaacacccgtcgaacacagccacctacttggggaaagatcaagaagctgtcacagatggtggaagaaaacctgaggaaagcgggacaacgcagtcacaatgagtaatttaatgatagctatgagagcggtgatcaccattgctgtgagtattccttcagcaagcrctgacacagagaacaattatacttattgggcatatctatcaatcttggctggcaataatgcctggatgtaatcactctatgacgcagttacacatgctttctgatctcagtatttgccataatgaatctgctcctataattaaggcataccaccctcaaaaacctatctgtaaacagaattgaacctggccagaaaaaatgaat

SEQ ID NO: 934004 - DNA, 609 bp, Homo sapiens
tccaaactgttccaacctctgcatgttacccagttccaaagtcaccttcacatctttgagtatcttttcagcaacaccccactctgctggtatcaacttactgtattagtccgtcttcatgttgctgataaagacatacccaagactgggaagaaaaagaggtttaaatggacttacaattccacatggctggggacgtctcagaatcatggcaggaggtgaaaggtacttttttttttttctttgagatggagtctcgccctgtcacccaggctggagtgcagtggcgccatctcagctcactgcaagctccacctcctgggttcatgccattctcctgcctcagcctcctgagtagctgggastacaggtgcctgccaccacgcccagctaattttttgtatttttagtagagacagggtttcaatgtgttagccaggatggtctcgatctcctgacctcatgatccacccgcctcagcctcccaaagtgctgggattacaggcgtgagccaccgcgcctggcctgaaaggcacttcttacaaggtggcagcaagagaaaatgaggaagaagtaaaagcagaaacccttgataaacccatcagatct

SEQ ID NO: 934005 - DNA, 704 bp, Homo sapiens
ggcctttaggcaggctcaaaaaatttaaagtcaataatactagattcaattgcatatatggggtgtcccacagtccctgtttccccccactttgcttttgcaactgctgtttcagggagagattcattcattccactattgcttgtccttgagaattatatgggataccagtaatgtgtttaatattccatatagagaaacatgtagcaagagctttgctagtatagcctggggcattatctgttttaatacaagctggaatgcccatcactgcaaaacactgcaaaagatgatgtttaacacaggcagaagactctcctgattggcacatagcccagacaaagtgagaaaaggtgtccacaaatatatgtacataagctagtctccaaatgagggaacatgtgtgacatccatttgccaaagagaattaggttccaatcctcgaggattaactcctcctgtgaaagatgaggaatgtaccatttagcaaattgggcattgctggataatagctttagcttctttccaggtaatgctgtatctgygtttgagaccagaggcattaacatgggttaaattgtaaaagtgtctggcattatatattgcagtagcaactaggcgatcagccatttgattcccttcagttaaaggtcctggaagaggtgtatgagccctaatgtgagtgatgtaaaaagggtgcattc

SEQ ID NO: 934006 - DNA, 621 bp, Homo sapiens
tgaattcttttaaaatgacagtcaatattctgttcctgggcagagatgtggtggctcatacctgtaatctgagcattttgggaggccaaggtgtaaggatcactttaggccaggagtttgagactggactaggcaatgtggtgaaatcctgtctctacaaagaatacaaaaattagctgggcatggtggcatgcacctgtagtcccagctactgggaggctgaggtgggaggattgcttgagctcaggaggtcaaggcagcagtgagccatgttcactgcactgcactccaacctgggcactagagtgagatcttgtctaaaaaaggaaagaaagaaagaaaagaaagaaagaaagaaagaaagaaagaaagaaagaaagaaagaaagaaagaaagagagaaagaaagaaaggagggagggaggaagggagggaaagaaagaaagaaagaaagaaagaaagaaagaaagagagrgagagagaaagaaagaaagaaaaagaaagaaagaaggaaagaaagaaagaaagaaagaaagaaagaaagaaagaaagaaagaaagaaagaaagaaagaaagaaaattttgccctaggaagagggctggcctgatgtgggtccagcaa

SEQ ID NO: 934007 - DNA, 632 bp, Homo sapiens
atatcatactgagttgccccacattttccagtcttcgaatgttgtctctttttttttttttttttgagggggagctttgctcttattgtccaggctggagtgcaatggcgcgatcttggctcactgcaacctccgtctcctgggctcaagcgattctcctgcctcagtgtctcaagtagctgggattacaggtgcccaccaccacgtctggctaattttctgtatttttagtagagacggggtttcaccrtgtagaccatggctggtcttgaactcctgacctcaggtgatccacccaccttggcctcccaaagtgctgggattacaggcgtgagccatcacacctgccctgttgtctgtttctttagcatccaaatacaatagtgatggcacctacttggcatgtatccggccccctcccaaatatttctaagaatccttggggagctctgaacaccttttggttgccccccaccctgccccgacctcttgtgcccatacagcccccaaattcaatcccagatactactgcaggctgctcttccccctggcacagcttacctcccagcacagatgtagtcccagggcatgctacccaaggtgaccctgaattacagacttgagcatgtcag

SEQ ID NO: 934008 - DNA, 583 bp, Homo sapiens
agcgacacaaaagacaggtgatttctgcatttccatctgaggtactgggttcatctcactagggagtgccagacagtgggtgcaggacagtgggtgcagagcacatgtgtgagccgaagcagggcaaggcattgctcactcaggaagcrgggtcagggagttccctttcctagtcaaagaaaggggtgacagacagcacctggaaaattgggtcacttccaccctaatactgcgcttttccaacgggcttaaaaaacggcacaccaggagattatatcccgcacatggctgggagggtcctatgcccacgaagtctcctgatcgctagcacagcagtctgagatcaaactgcaaggtggcagccaggctgggggaggggcgcctgccattgcccaggcttgcttaggtaaacaaagcagccaggaagctggaactgggtggagcccaccacagctcaaggaggcctgcctgctcctgtaggctccacctctgggggcagggtacagacaaacaaaaagacagcagtaacctctgcagacttaaacgtccctgtctgacagctttgaagagagtagtggttctc

SEQ ID NO: 934009 - DNA, 583 bp, Homo sapiens
agcgacacaaaagacaggtgatttctgcatttccatctgaggtactgggttcatctcactagggagtgccagacagtgggtgcaggacagtgggtgcagagcacatgtgtgagccgaagcagggcaaggcattgctcactcaggaagcagggtcagggagttccctttcctagtcaaagaaaggggtgacagacagcacctggaaaattgggtcacttccaccctaatactgcrcttttccaacgggcttaaaaaacggcacaccaggagattatatcccgcacatggctgggagggtcctatgcccacgaagtctcctgatcgctagcacagcagtctgagatcaaactgcaaggtggcagccaggctgggggaggggcgcctgccattgcccaggcttgcttaggtaaacaaagcagccaggaagctggaactgggtggagcccaccacagctcaaggaggcctgcctgctcctgtaggctccacctctgggggcagggtacagacaaacaaaaagacagcagtaacctctgcagacttaaacgtccctgtctgacagctttgaagagagtagtggttctc

SEQ ID NO: 934010 - DNA, 722 bp, Homo sapiens
atgccgaccgggtgcctgcactaagttcggcatcagtgtggtgacctcctgtgagcggggggtcaccaagttgcctaagggtggctgaactggccaaggtcagaaagggagcaggtcagaactcccacatcgaccagtagtgggagtgtgcctgggcggaatagcaagatcttgattcttaaaagtaaaaataaagaacaacagctcattcctctctggggaggggctggctcagggttacacagtgagggtggaggtagaggtgggcccacagtacctcccttgttgggttgtctgaagacccctctggccaccccccacaggacacggaggagaacatctggacagtgagggggaggaggcacctcagcccatgccgagtgtcccagaggacccggagagcagggaggccatggtgagcctgactccccctgcacccattttgccacctttctctgtggtccctccaagacccctttatgctcttcgtttccctgccttctgatttctctggaccctcaccccttcygagagccagtggtcagacaccatttcacctgtgacaaacgtgtactctctgaggccccaagggaagggcctgcactccacctctctgccccgtttgctccgtgtatgcccctacaagaatgctcgcgtcttgccctcaggtggcatttttcaagtccgctggagctagtgcccaggagaagcaggcacagtta

SEQ ID NO: 934011 - DNA, 619 bp, Homo sapiens
gtgtgcatgttggatggcgttatgaaatagtcattcaggagaatgaaggattggctggatagaaaaataatttgaaggctggtcagcatttagggctcacttaagaataataattgtatatttataatatttaaaggcatttgagtttgggcataaattttaaatagtgaattgcyagaggaatactataaagtcagagagaagtgagattcaaggtgagagataatattggctatggaatttaagttgaataaggaagaaattgaggctatgaggatgtcgagggataatgaaaaagcagtaggattaatggattattgtctgaagaggtcaaaaaatgatggacttagggcaaattataaaaagaagtggaatgcttaaagttgaaagtagggaacagtttgttgctattggtaatgaataaataccttgaatatgagtggctgagataaggtggaaaacacaattattagaggagaggagtctaggaagtgcatgttcaagggtcatctttgtggatcctaaagtaaccaaattttgtaaaagaaaaacttgaagaaaatagcagttctcacagagataaaatgtttagagaataagggtgtggagaacattgata

SEQ ID NO: 934012 - DNA, 783 bp, Homo sapiens
ctgcagatgcagaactgcagctataaaggacccaactctacattagcaaaaccacattacaattaactttactacagacctcacttggattcagaagtgtttttctgcactcttttttattctttgtgtatatgtgtatacttctaagaaatttatcactggtgtagatacatataaccaataacataatcaagatatagcattatgctgtcatccgaagaaaggacctcatgatatccctttataatcacactcaccccacttctctaagtccctggctactgctgatctgttccctatttctagaattttgtcatgttgaaaaccttttataatgaaattatatattgtacaaccttttgacattgcattatttatttatttatttatttatttatttatttatttttgagacggagtctcactctgtcgcctggaaggagtgcagtggcgcgatcttggctcactgcaacctccacctcccaggttcaagcaattctcctgcctcagcctcccaagtagctggaactacaggygcgtgccaccatgcccggctcattttttgtatttttagtagagacagggtttcaccgtgttggccaggatggtctcgaactccagacctcatgatctgcccacctcagcctcccaaagtgctgggattacaggcatgagccaccgcacccgtcctgagattgaatttttaaagtttaattcctttgaggtcattgcaaatcattcaacagttcattgcttttttattactaagtactagtccattgt

SEQ ID NO: 934013 - DNA, 743 bp, Homo sapiens
acccaccaccacgcccagctaattttttgtatttttagtagagacggggtttcagtagagacggggcttcaccgtgttagccaggatggtctcaatctcctgacctaacaggtgatccgcccaccttggcctcccaaagtgttgggattacaggcgtgagccactgctcctggcctccttccttacttttttaaagcatgactggatttgaaaagaaaaaaaaagattaccaatgtgaaaaaagaaaatacccaaaaataatgtatctgctaagataggttaaaatataatctttgttcttctatatgaagatatcaaattctaaatcattaataatggggcagaatcaccttttaattgatcagaattaatccagtgctgagcacarctatctggacatggtgcacactctgtggacatctgttatagtgaacaatatgagtttaagctttggagagaaccaagttaaaggggtctcactttttatgggtatcataactgaacactaccttgagaaactgactacagatgtctagaaatgtgtgctggataatgtttcaatggaaaccactgtatacaaagaatgactttgatttctcaagaagaatatatgaaaacataaagcaacaagtcctattatgttaaaaccaggaaaataacagcaccgtgcatgctcatgaaataccacaaaaacgacttctctggtttcccctgtccttatagccattaaggaaaaggcagca

SEQ ID NO: 934014 - DNA, 547 bp, Homo sapiens
tttctcaaggaggagatactattctagtttgacagatcctttcctggacacactctcagaattccctaaggttcttatcgtggctaatggataacaatgcagaggctatgggagtgaataatcactctctctcagctaaaaacttcctttattgacttctctaacttcccgtcaacatcttgctgccaaatcaacctcttgttctaggcaattattaaaagcaattttcttgaaactgaaaaacacatttagccttcaacaataaatcacactaacatcaattactagccaattagattactagaatatcagacccagagatatttgcagtrttgaaatattttcaaaataaagttgtttacatttctatttctgtctttaatccttaaaatgcaaacaaatacaggagtgaagacagatgtattttagttatttcttctacaagataaagtggatagtaatattatgttaagaaaatacttatttagtatctagaatgatagcattatctattctttattaaaagagaaactaaaagtaatataat

SEQ ID NO: 934015 - DNA, 634 bp, Homo sapiens
tcatggttaaaagggcccaacatatagttcaggccattacttcagagggtgcaagccccaagccttggcagcttccacatggtgttgagtttgtaggtgtacagaagtcaagaattgaggtttggaacctctgcctrgatttcagaggatgtatggaagtgcctgggtgtccaggcaggagtttgctgcaggggaagggtcctcattgagaacctctgctagggcagtgcagaaggaaaatgtgtggtttgaggccatacacagagtccccactggggtgcttcctgggggagctgtgagaagagtgctacggttctccagaccccagtatggtagatccattgacagcttgcatcatgcacctggaaaagacacaggcactcaatgccagcccaagaacgcagccaggagggaggttgtaccctgcaaagccacagagctggagctatccaagactatggtgacctggatgtgagacatagagtccaaggagatcattttggagctttaaggtttgatgactgccctattggatcttatacttgcaaggggcctgtagcccctttgttttggccaatttcttccatttagaagagctgtatttatgcaatgcctatatccccattgtatctag

SEQ ID NO: 934016 - DNA, 634 bp, Homo sapiens
tcatggttaaaagggcccaacatatagttcaggccattacttcagagggtgcaagccccaagccttggcagcttccacatggtgttgagtttgtaggtgtacagaagtcaagaattgaggtttggaacctctgcctagatttcagaggatgtatggaagtgcctgggtgtccaggcaggagtttgctgcaggggaagggtcctcattgagaacctctgctagggcagtgcagaaggaaaatgtgtggtttgaggccatacacagagtccccactggggtgcttcctgggggagctgtgagaagagtgctacggttctccagaccccagtatggtagatccattgacagcttgcatcatgcacctggaaaagacacaggcactcaatgccagcccaagaacrcagccaggagggaggttgtaccctgcaaagccacagagctggagctatccaagactatggtgacctggatgtgagacatagagtccaaggagatcattttggagctttaaggtttgatgactgccctattggatcttatacttgcaaggggcctgtagcccctttgttttggccaatttcttccatttagaagagctgtatttatgcaatgcctatatccccattgtatctag

SEQ ID NO: 934017 - DNA, 720 bp, Homo sapiens
ctcctgctggtgacccctcccagctcatgtgcgtgcaccctgtggggatgctgtggctagtcgtacatgcaagtgagcacagatcctgctgccactgccctgagtaagtgctttgactgcctcccccacgtcagagtattgtggccagtgggccaagaacacctcagtccctcaagtacaacaggttcctaatcttgaggggccagaaaatgaagcccagagtaaggacacacagccaaggagtgctgagttgagccttccccgcttaaatcttacagaaacaaagcctgtcaacyttattccacaataaaatccccaagggcatcaaagaagataaaagcgaaaagaaaaaaaaaatccaaaggacagcaactttaaagactgaaggaacatcagcacacctaggtgagaaagaaacagagaaagaactctggcaacttaaaaaggcttcctaccttcaaatgactgcactatttccccagcaatggttcttaaccagcctgaaatggctaaaatgtcagaaatagagttcagaatatggattaatgaagatcactgagattcaggagaaagtcaaaacccaatccaaggatactaaggaatacaataaaataatacaggaactgaaatttgaaaaggttattttaagaaagaatcagatttgacagagctggaaaactcacttcaagtatttcatgatacaatcacaagcattaacag

SEQ ID NO: 934018 - DNA, 587 bp, Homo sapiens
actcctgcaagattggccataataaaaaagtcaaaagataatagatgttggcatggatgcagtgaaaagggaacacttttacactgctggtggaaatttaaatgaatacaatcactatggaaaacagtatggagatacttacagaactaaaagtaaaactaccattcratccagcaatcctactactgagtatctaccaagaagaaaagaagtcattatatgaaaaagacacttgcacacatgtgttcatagcagcacaattcacgattgcaaaaatatggaaccatctcaaatgcccattaattagtgagtggtaatagaaaatatgtgtgtgtgtatgtgtgtaaatatatatatatggaatactacccagtcataaaaaggaacaaaataatggcatatgcagcaacctggatggaacaggagaccattattctaagtgaagtaactagggaatggaaaaccaaacatcatatgtactcgcttataagtgggagctaagctatgaggatgcaaaggcataagaatgatacaatggactcttgggagaggagtgataaaagactaaacattgggtacagtgtgca

SEQ ID NO: 934019 - DNA, 587 bp, Homo sapiens
actcctgcaagattggccataataaaaaagtcaaaagataatagatgttggcatggatgcagtgaaaagggaacacttttacactgctggtggaaatttaaatgaatacaatcactatggaaaacagtatggagatacttacagaactaaaagtaaaactaccattcaatccagcaatcctactactgagtatctaccaagaagaaaagaagtcattatatgaaaaagacacttgcacacaygtgttcatagcagcacaattcacgattgcaaaaatatggaaccatctcaaatgcccattaattagtgagtggtaatagaaaatatgtgtgtgtgtatgtgtgtaaatatatatatatggaatactacccagtcataaaaaggaacaaaataatggcatatgcagcaacctggatggaacaggagaccattattctaagtgaagtaactagggaatggaaaaccaaacatcatatgtactcgcttataagtgggagctaagctatgaggatgcaaaggcataagaatgatacaatggactcttgggagaggagtgataaaagactaaacattgggtacagtgtgca

SEQ ID NO: 934020 - DNA, 590 bp, Homo sapiens
caaaagatgggtgatttctgcatttccatcctaggtaccaggttcatctcactagggagtgccagacagtgggcacaggacagtgggtgcagcataccgtacacgagctgaagcagggcgaggcattgcctcactcgggaagcacaaggggtcaggaagttccctttcctagtcaaagaaaggggtgacagagggcacctggaaaatggggtcactcccacccgaatactgcgcatttccgacrggcttaaaaaacggtgcaccacgagattatatcccgcacatggctgggaaggtcctggcagcgagacgcccacggagtctcctgatggctagcacagcagtctgagatcaaactgcaaggcagcagcgaggctgggggaggggtgcccgccatttcccaggcttgcttaggtaaacaaagcagccaggaaactcgaactgggtggagcccaccacagctcaaggaggcctgcctgcctctgtaggctccacctctgggggcagggcacagacaaacaaaaagacagcagtaacctccgcagacttaaatgtccctgtctgacagctttgaagagagcagtggttct

SEQ ID NO: 934021 - DNA, 604 bp, Homo sapiens
  misc_feature 1, 2, 3, 4, 5, 6, 7, 8, 9, 10, 11, 12, 13, 14, 15, 16, 17,18, 19, 20, 21, 22, 23: n = A,T,C or G
nnnnnnnnnnnnnnnnnnnnnnnagaaacacaacctgaatcccctagcccttccatccctaaataatcattacaatcatgaatttgctttatgtctctgtgtgttttcccattcttgacagttcaaataaatggaatcatatactatatggcttttgtgaccagcttctttcacttatcatgttttcaagcttcctctatattttagcatgtatcagtacttcctttttatggctgaataatatcacatcatacgaatataccacatttcgtyatttattcgtcagttgatgaacacttgggtgtcaccttttggcaattatgaataatgctgagtattagtcagggttcttcagagaaacagaaccaatgggaggttatctatccatcaagatttcttttttttttttttttgagatggagtctcgctctgtcacctctgctggagtgcagtggcgccatcttggctcacttcaagccccgcctcccgggttcatgcagttctcctgcctcagcttccggagtaggtgggactacaggtgcccaccaccacgcccagctaattgtttttttttgtattttttagtagagacggggtttcaccg

SEQ ID NO: 934022 - DNA, 581 bp, Homo sapiens
gccttcagccatgattgtaagtttcctgaggcctccccagccacacagaaccgtgagtcaattaaacttttttcctttataaattagccagtctcaggtatttctttgtagcagtgtgagaacagactaatacagtaaattcataccacaaagagtaggatactgctacaaagatacctgaaaatgtggcagcggctttggaactgtgtaacaggcagaggatggaacagtttggcgggttcagaagaagtcaggaagatgtgggaaamtttgggacttcctggagactcactgaatggttcaagccaaaatgctgatagtgatatggacaatgaagcccaggctgaagtggtctcagatggagatgaggaaactattggaaactggagtaaaggtcactcttgctatgctttagcaaagagattggtggcatttttcccctgttctagcgatctgtggaactttgaacttgagagagatgatttagggtatctagtggaagaaatttctaagcagcaaagcattcaagaggtgacctgggtgcttttaaaagcattcagctttatgcattcacaaagaga

SEQ ID NO: 934023 - DNA, 744 bp, Homo sapiens
catacaacagggaagcagcaaagatttttcagttgaaaacgtcgtaagccttagctgactgacatgacaagagtttacacagtggtttcatgccagcaagggttggactgggtgttacctcgtacctgatgggctttggcatgcaatgcctggtctctaccctccagagagggaacgcacacagatcctccatctttaggattccctgtaatgcccatcagagtggcaatggccctgctgggaggaagggggcttttctcctctcatggagctgcaagtgcaggaacagacatctgccacaatrcccctagaaaggaaaagggaggaaccaacagtgctcctctgttttaggactcggaaaacgtcacagctttccaggtaatccttgtgaaatttaattcagaaagtatgtgctggccccgtgtgctcggccctaatagtaaatgtcccaggggatcaagaggagcacagcacaggtcccctgttctcgagggcagggtccctccaaaaacacagacactaagaggaagacacttgcaagaaacagtcccatgaatgagaaagacaacacgtggctcagtgtaaaaacatggtgccgctgtaaaggctaaaagtcatgagaaacagcggatcccttccaccaccacgttctgagcatgctctgtgtgctctgctccccagcagactctggcaacaccaataaaaagaaccccatttgaccgccaccaaagccacacaggagac

SEQ ID NO: 934024 - DNA, 902 bp, Homo sapiens
gctcctattcaccagctgatctaactactgctactacccaatgtccaatttgcaagcaacagagactacctctgagcctccaagataccatcatccctggagaagactaacaagacacgtctttgcaagttaattacatcagacccctttctgatgcagcaatgcatcttaatggaaaccaacacattttctgagtatggttttgcctttcttgcctagaaagcttagccggcatcacagtctgataaaatttataaaactayacacacacacacacacacacacacacacacacacacacacttttttatccaccaactaaacagcctacataacattgcatattgtgggtcaagagacccactttacaataaaagaagtgtagcagtgtatacctgagcatgcaatcccttggtcctatcatataacactacacatggaagctgctaatttagtgaaggcttggaatcaccgtttgaagatgcaactgaggcatcagcttggaggtgataacctgcaaagatgaaccaccatcctccaggaggcagcctaaacccttcatgaaggaccatcatatggtggtttgtctccaataaacggtcacaagaacaaaagggggaggacagagtggccctgctccccattactctccgcgatctgcttgggaaatttgtacttctcgtgcccacacactccaggtgctgtgggtataaggtcctagttgacagagagggaatgcttcttccagggcacacagtaagagtcccattgtggtttttgcccactctctttaagcttcttgtgacaagagaccaaccagacaggaaagtatttccatcccagcagggccattgaccctgctcgttggggtgggtaagactactgtcatgagtggcagtagg

SEQ ID NO: 934025 - DNA, 581 bp, Homo sapiens
agaaaaagactgacctcccctgagcaagaagaaattctgctgccagattgcttttatttacttgtttgtttgtttgtttgttttttgagacagggtcttgctctgtcccctaggctggagtgcagtggtgtgatcatggctcactggagcctcctaaccttctgggctaaagcgatcctcccacctcagtcccctgagtagctgggactacaggcatgtgccaccaygtccagctaatttttaatttttttgtagagctggggtcttgctatgttgcccaggctggtgtcaaactcctgagctcaagtgaccttcccaccttagccttccaaagtgctggaattacaggcatgagccaccatgcccggcccagactgcctttcaatacaactctttcctgggtctctactcttgatggccaaccctgcagattttggacttgccagcccctaaaactgtgaatcaatccttaaaatctgtctctctcattcttttcatagcctattgtttctgtttctctggaggacgttggataatacaactagtttgccaaatagaaaactctgggggttttaactgct

SEQ ID NO: 934026 - DNA, 576 bp, Homo sapiens
gcaatggtgtaccagagaagaacaagaaccccttttccaagacccttcatgtacagacaggctgcctgcctactggggcagactttccctactgtccctagcaatgcaattgtatctctgaaacttcccattagtggatagatctgggactcaagacctgctgtttagattctttcatctgggtrttcttccctttgatgttgtattcctcctcttccctaaaaatgggaattcctgagaaccatactatagggattgttattgctctcctgggtctagccacccagtggggctaccagattccaggctggtgttaggaaatgtctacaagggatccagtaatgtgacctgtcttcaagtctcccatctgtagataccagcaccagctctgatggaggtggcaggggagcaatgtggattctgtgagattccttggttgtagataggcttagtgtgttggctttcttgaatgctggttataattgtagtgaacttgtcatgtggatagactcaagacctctggttagccagggtgctgtatgcagaggtgatagctgaggtcacatgactgttttc

SEQ ID NO: 934027 - DNA, 576 bp, Homo sapiens
gcaatggtgtaccagagaagaacaagaaccccttttccaagacccttcatgtacagacaggctgcctgcctactggggcagactttccctactgtccctagcaatgcaattgtatctctgaaacttcccattagtggatagatctgggactcaagacctgctgtttagattctttcatctgggtattcttccctttgatgttgtattcctcctcttccctaaaaatgggaattcctgagaaccatactatagggattgttattgctctcctgggtctagccacccagtggggctaccagattccaggctggtgttaggaaatgtctacaagggatccagtaatgtgacctgtcttcaagtctcccatctgtagataccagcaccagctctgatggaggtggcrggggagcaatgtggattctgtgagattccttggttgtagataggcttagtgtgttggctttcttgaatgctggttataattgtagtgaacttgtcatgtggatagactcaagacctctggttagccagggtgctgtatgcagaggtgatagctgaggtcacatgactgttttc

SEQ ID NO: 934028 - DNA, 527 bp, Homo sapiens
actctagtataaccccaccaccatcatcaattcctataaatccgtacagttccaatcatatctctgttcccagccttctccttctaggattcattttctgtaatagttagagaaaactttctaaatcctaaaccaaatcatcttatcttttactccaatggtttctattcaacgttccaatcatttcctattgggagcaatttttttgaaaaactcttaataatggcctaaaaarttctctatgatctcactcctgctttcttctctgacctcatctgcttttgttctcttcactaagacacaatggctttgagcatgccaaagcttttgcacttgctgtttgtggcatggactgcgacttaatctccaacattcattctcccgtgctttcgaacactcaatttgtcagggccacatgatgccctggaatacagactacatatgtggcctaccggcagctagacataaccaaacaattacattctatcaatgggatctaagcagaagtatgtgtaactttcaggaaa

SEQ ID NO: 934029 - DNA, 609 bp, Homo sapiens
gcatggactgtgttatttacacttatacgttttcccctgaactttaagttagtacacactgttgatttggtgtctgttacatacatatatactgatgtttccctgtatatttttgttgtttttctaatcttatcacccctactaagctacaagttctgtgaagcctakattcacctttgtataataactcctagcatactatagattcctagcttctagaacttcccatatcggaaggtctcaggaaacctgcatgggataatatgaatgaaaataaaaagtgacctggatacatacatatctctctccctgaaatattgctagagcatacccttcctgggtatttgtacaaaaaagataatgagcattctggctggctcctttgcaacagttataaaggcaaaaggaataaaaaaaggattccagggtcttttcaaaggagctaatacggtagggtgagatttatattagaaatgcactgtttcagtctatctagtcactattacccattttctggccaccagttcccagctcctgaggtgcatgtgaccctgagcaagctaatcagcatgatccattctctagtcaaagtgttcagggctggccata

SEQ ID NO: 934030 - DNA, 710 bp, Homo sapiens
gaagtgggttgtgtgtttttcagatatttgagaattgtgtggatattttcatcgatttctgatttaattccattgttgttacagaacatattatgtacgatttaacattttaaaatttacttagatgtattttatggcccagtatttagtctgtcttgacgaatgtcccaygtgcgtttgaatggtctagttgtcaggcatagtgtgctagaaatgtcagttaggccaatggttggatgtattgttcagatcttcaattacagaggtcagcgaacttcctgtaatgacccagatagtaaatattttaggcttgtggtccatgcagtttctgcaaccactcagttctatcattgtagcacaaaagcagccacagccagtgtgtgaatgaaccatcatgacctcactccagggaacttcgtttacagatcagactgtgtgggcttgtagtgtgctgaccctcacagatttgccttacatatttgtttcggctgtttgtttactcagtcatgggaggaggagttttacagtctcccaactgtttattttcttctctttaattttcttagtgtttgcttcatgtattttgaggctctgttctaatacatgtttatgatggttatgttttcctaatgaattgactcttttatcatcatggaatgttccttttatctctggtaatattctttatcttgaagtctactttgtctgat

SEQ ID NO: 934031 - DNA, 737 bp, Homo sapiens
aactagatgaggatggtcttagggtttcccggcattctgagaatggaggtaagtaaagaaccacctttggggccaaatcttttcctcttcccagctcttcaaagggccacagggctattttcacttttaaatcattggtgtcaagaatactcaaccatttctaacccaccctcaattttctgggggacagagattcatttcaattcacagtaacaagaaatttgcacatctaaatagccagctctctctggcttattaaagtcacatgaaacagtcatcgtctgaagtctgggtaactgtcagaaagcacctgattatgtctaaggagccacaagatctggtccagtgaagccaggctcccasatccaccccagcgtctgactgggagcggcgccctttctcacatcatcatgtcagtaccaagacctgcagaagaaaaaagactcactagcttggaaggagagatgaggtggttgctttgtacttggcaagcaggctggacccttaatgagctaaaatccatctcccatttgtcgcttgtctctgctacaacacacatgcctgctcagtcattcatcttttattttctaggctataaattattcccagcagccagccagggtgttgtggaataagcgggatgagacccttgaaggtgatctagcacaggaaacgggggcccagagaggttggacatttgcccaagatcacactacaacctgatggcatagcaggtc

SEQ ID NO: 934032 - DNA, 606 bp, Homo sapiens
tttaaatatcctttgaccacctaaggagctgaacagtttgttaaaacagtgaacaatcggccgggcgcggtgactcatgcctgtaatcccagcactttgggaggctgaggtgggcgggtcacaaggtcaggagatcaagaccatcctggctaacacggtgaaaccccatctctactaaaaatacaaaaaattagccgggcatagtggtgggcacctgtagtcccagctactagggaggctgaggcaggagaatggcgtgaacccaggaggtggagcttgcagtgagccgagattgtgccactgcactccagcctgggcgacagagcragactccgtctcaaaaaaaaaaaaaaaaaaaaaaaagtgaacaatctaaatattcttttgttcttaaacttcatattttatgaaattgttttcaaaaaagttcctctcgatgtgcaataaaagtttagccaaaaaatgtttgtgaaatagtaagagctcaataaatattgcaaggtaaatgaaaaaataaatgaatatcaaaggatggcccctgtacattgaaaaactaccatgaaggctaatggtgactacctgtctttcatgtctactgagaaatta

SEQ ID NO: 934033 - DNA, 606 bp, Homo sapiens
tttaaatatcctttgaccacctaaggagctgaacagtttgttaaaacagtgaacaatcggccgggcgcggtgactcatgcctgtaatcccagcactttgggaggctgaggtgggcgggtcacaaggtcaggagatcaagaccatcctggctaacacggtgaaaccccatctctactaaaaatacaaaaaattagccgggcatagtggtgggcacctgtagtcccagctactagggaggctgaggcaggagaatggcgtgaacccaggaggtggagcttgcagtgagccgagattgtgccactgcactccagcctgggcgacagagcaagactccgtctcaaaaaaaaaaaaaaaaaaaaaaaagtgaacaatctaaatattcttttgttcttaaacytcatattttatgaaattgttttcaaaaaagttcctctcgatgtgcaataaaagtttagccaaaaaatgtttgtgaaatagtaagagctcaataaatattgcaaggtaaatgaaaaaataaatgaatatcaaaggatggcccctgtacattgaaaaactaccatgaaggctaatggtgactacctgtctttcatgtctactgagaaatta

SEQ ID NO: 934034 - DNA, 667 bp, Homo sapiens
cgtcaccaaagatgatatgtaaatgtccagcaggcatatgaaaagatgctcaaaaaccgttagtgatcaggaaaatttaaatgaaatatcactacacagtcactagaataagcaaaatttaaaaggctatgacaaaaccaagtgttggcaagaaggtaaagcgactagagttctcatacattgcttagtggtgttgcaaaatggtatacacactttggaaattattttggcagtttctttttgsgggggtgagggggaggcaaggtcttgctctgtcacccaggctggagtgcagtggcacaatcacagcccactctagcagcctgacctcccaagctcaagcaatcctcccgcatcagcctcctgagtagctgggactacaggcgtgcatcaccatgcccagctattttttgtagagatggggtttcgccatgttgcctaggctggtcttgaacccctgggctcaagcaatctgcgtgtcttggcctcccaaagtgttgagatgacaggcgtgagccaccgcaccaggctggcagtttcttataaaattaaatgtgcatgtaccttgtgacccagcagttctgtccctagaaatgaaagcatacgtccacacaaagacttgtatgtgaatgtttctagcagctttattcacctcaaactggaaaca

SEQ ID NO: 934035 - DNA, 599 bp, Homo sapiens
aggtgacttcaccctcccctggagaggactcattagggattgttttgcagccccaggaggcaggcctgggtggtgccccattcctccctgggacgttctggaactttgtggcctccctggcaggaagaagccacgctctgggccccacattaattgatactttactaatgagcttmataaatgccccagggcactcctaaggacaggaaactggaaggaattgagctccagctcagtctcccccaggccctcctaccctcagatttccttcagaccagaggccctatattctagggcacaaggtccgcaggtgagagctgttcattggtcagtcagcaggcacctgatacaattatggtgcagtcagggaaggcttcctggaaggggaacaatataaatgtttcacaagagcagggactctcttttgttacagttgtatacccagctcctagcacaggtcctggcacaaagtaggtggtcaatacatgtgagagacaggaagaaagagagggagagaaggaagaaaggaatatggtcagaaggaaatgaaaggtaataactaagctgaaaacagatgagtatgagctacacccagatag

SEQ ID NO: 934036 - DNA, 738 bp, Homo sapiens
gatacccacggtacatgagggagagaggaaagagtgttctctttccctcttccatccttgcatccccgagtcccggtgaccttggcaggtgccgccatgagtgccaaagtggcttgcacccatgaagcagggagggcctagagaataggaattatccgctctcatctatgcctctatctcctactgtcagtagccttggagttccctagacctcatttatgccatggatatttatgccgtgggtttatccatgaaacaagaagcttgggttggcttaattggcaggaatgagccatgctcacctgcaccgtgccttttaacctctgttgtcatttgtctctggatccctcagatccagttttccttcttaggactttgacccaaagcttgaaattgagtttgggacaaaaatgtgtctcggtggggggtgggggaggtgcatggactccttatcataagccaaatgctaaggtgaaactgtggaattgagtcctcctccaacaagggrgagaaaaagatgtcttgtgacacaaccagataactggtggctatagttatgcttgcgagggtttgggtgcatggtccttggctttgattagctttcttggtcttacttttccaaaaaggaaacctccaagtgatgggcatcctatgtattcaaatcacctagcaggacttgcaggataattgcccagagctagaatattgatccagatttctacattacccatccctttt

SEQ ID NO: 934037 - DNA, 541 bp, Homo sapiens
ctctgaatagttaggcaaatcttccctacagttatagagaaaactgaaaagttaggcacaccttccctatggttatagataataactatacaatatgcagaagtagtgacaagcatggattctagacccagattacacaggttcaaatcctggttttgccacttaccagcaatggaatttggggacaaactactcacccatttgcrctttcattttctcatctgtagaataaggataataatgatgcctgcctcgtagggtttttaatgaggataaaaatgtataaatatttataatgtgtctagaacagtgtctcgcaaataagtactatgtaaaatattcttctcatgttcatttacaatcatggaagacaactagattctctctcaggatgcaagctcactatgctagcttccagacatgggttttattccatcttttccccaacccctgttgctcttggtggcacagttagaattttagactggtagaatcatcagctagccccacctcgagcccaaggcagaaaccccttctgcat

SEQ ID NO: 934038 - DNA, 721 bp, Homo sapiens
acaaaaatacaaaaattagccaggttggtggcatgtacctgtctgtagtcccagctacttgggaggctaaggtaggaggattgcttgatcccgggaggttgaggctgcagtgagccatgatcacaacaccgcactccagcctgggtgacagaacaagaccttgtgtccaaaaaaagaaaaaaatatatatatatccttgatgaagcaggaaaatagtttttaattttattaaattttgaggctgggcatgttggctcacgcttgyaatcccagcactttgggaggctgaggcaggcggatcacttgagatcaggagttcaagaccagcctggccaacatggtgaaacctcacctctataaaaaatacaaaaaaattagctgggcgtggtggtgcatgcctataatcccagctactctggaagctgaggcatgagaattgcttgaacccgggaggtggaggttgcagtgagccaatattgagccactgcaccccagcttgggtgacagaatgataacttgcctaaaattaattaattaatttatttatttataaattttgatccttaagtacacacctttttaatatttggtgtaatggatggaaagtgaacataaagcccttctgctgcagatgaaagtctgttagtcatcttgagaaaagcatttgtgctgttgtttgtgagctgaactagctcccctttcaggaaacatgaattttgcc

SEQ ID NO: 934039 - DNA, 580 bp, Homo sapiens
ctttgttggtttaaagtctgttttatcagagactagaattgcaacccctgcctttttttgttttccatttgcttggtagatcttcgtccatccctttattttgagcctatgtgtgtctctgcaagtgacatgggtttcctgaatacagcacactgatgggtcttgactctttatccaatttgccagtctgtgcctttcaattggagcatttagcccatttacatttaaggttagtattgttatgtgtgaatttgatcctgtcattatgatgttagctggttattttgcttgttagttgatgcagtttgttcctagccttgawggtctttacaatttggcatgttgttgcagtggctggtaccggttgttcctttccatgtttagtgcttccttcaggagctcttttagggcatgcctggtggtgacaaactctctcagcatttgcttgtgtgtaaattatttcatttctccttcactaatgaagcttagtttggctggatatgaaattctgggttgaaaattcttttcttgaagaatgtcgaatattggccccccctctcttctggcttgtagagtttct

SEQ ID NO: 934040 - DNA, 781 bp, Homo sapiens
atcagctgtagcttactggaccttcatggccttaggttggcccaatgcctcagggattggtggctaccacaatccttatagaagatgccaacaagctagccctaggtcagaagttaatagttcgggtgccacacgctgtagtcaccttaatggagccaagaggacatcgttggctgtccaattctagaatgctaaagtatcaaggacttctgtgtgaaaatccccagataacactagagactrtaaataccttgaacccagctaccctgctgtctgtggagaaacccgattggaagggcagtgggttgcctcactgctggcaggaccttccccactgttgcataaatatggtggacgaagtgttctcgagccgggaagatctcagagatacccccttggagaggccagatgttgaatacttcactgatggtagcagtttcataacagatggggtgcgatatgcaaggtatgtagtagtgatccaacactcggtagtcgaggctcaagccttaccttctgggacttccactcagaaggctgaattaaaagcctcagaaggaggagtacatggaaaatttaatttaaccaactgttgccaagaaattgatgataatggcttagctgtcatggaaatcacagctagaatgaacaagttggtccatgttccagttcagatttggtccaggtggtccccagattccttgtttggaggatggttcttagcttttggaggattcaaaaccctctggtgggttcttgcttattcttggtatctgcctca

SEQ ID NO: 934041 - DNA, 781 bp, Homo sapiens
atcagctgtagcttactggaccttcatggccttaggttggcccaatgcctcagggattggtggctaccacaatccttatagaagatgccaacaagctagccctaggtcagaagttaatagttcgggtgccacacgctgtagtcaccttaatggagccaagaggacatcgttggctgtccaattctagaatgctaaagtatcaaggacttctgtgtgaaaatccccagataacactagagactgtaaataccttgaacccagctaccctgctgtctgtggagaaacccgattggaagggcagtgggttgcctcactgctggcaggaccttccccactgttgcataaatatggtggacgaagtgttctcgagccrggaagatctcagagatacccccttggagaggccagatgttgaatacttcactgatggtagcagtttcataacagatggggtgcgatatgcaaggtatgtagtagtgatccaacactcggtagtcgaggctcaagccttaccttctgggacttccactcagaaggctgaattaaaagcctcagaaggaggagtacatggaaaatttaatttaaccaactgttgccaagaaattgatgataatggcttagctgtcatggaaatcacagctagaatgaacaagttggtccatgttccagttcagatttggtccaggtggtccccagattccttgtttggaggatggttcttagcttttggaggattcaaaaccctctggtgggttcttgcttattcttggtatctgcctca

SEQ ID NO: 934042 - DNA, 752 bp, Homo sapiens
agttcagactgctagaacagaatattatagactgggtggcttaaacagcaggtatttatgtctcacgattctggaggctggaagtctgaggtcagggtgccaggatggttgggttctggggagggtctcttctgggctcacagatggctgccttcttgctatgcatacccatggaagagagcagagtgagccatggcaaactcttctgcctgttcttctaagactgctaatcccatcatgggggctccagcctcatgacctcatcacctcccaaaggccccacctcctaacaccatcacagtgcagggtagaatgtcaacattggaattttagggagacacaaatattcagtccataacagatggccatgtcttactcccccaratctgtggatgtgacctcacatgccaaaaggacctttgcagatgtggtgaagatacggaccttgagagggatggttatcctggattaccagggcgggcacaatggtccctgttagaggaaagcaggaggtcacagggaatagaagatgctattctgtggttttgaaaatggaggaaaggggtgagccacaagccaaggaatgtgagcacccttggagccttccaaaggaacaattcctactgatgccttgattttagccccagggaactcattcctgacttcaagatacagaatgcaaacacagaagactacacttcccgttgcccctgcagtttggtggggtcatatgactaattctggccaatgaa

SEQ ID NO: 934043 - DNA, 425 bp, Homo sapiens
catcatgcctagctaattttttttttttagtagagacggggtttcaccgtgttggccaggatggtctccatctcttgaccccacaatctgcccgccttggcctcccaaagtgccaggatcacaggcgtgagtaccgcgcctggccrgcagccctttctttagaaggcttactgtctacgaagcaccactgtgagagtggcaggtatcttttatcagagcttatgtagccctaaggggacttcagaaaagtggttgggcttcaatagcctttgcactgtgattgcactgtaattgcaccattcctagtagaatacaattcctgagtctccttcctgtgcctatcacccaacaaacccaccagttgctattgtttatcctctttgcaggtgaggagattcatcgagatgatgccaatggccccaggt

SEQ ID NO: 934044 - DNA, 425 bp, Homo sapiens
catcatgcctagctaattttttttttttagtagagacggggtttcaccgtgttggccaggatggtctccatctcttgaccccacaatctgcccgccttggcctcccaaagtgccaggatcacaggcgtgagtaccgcgcctggccagcagccctttctttagaaggcttactgtctackaagcaccactgtgagagtggcaggtatcttttatcagagcttatgtagccctaaggggacttcagaaaagtggttgggcttcaatagcctttgcactgtgattgcactgtaattgcaccattcctagtagaatacaattcctgagtctccttcctgtgcctatcacccaacaaacccaccagttgctattgtttatcctctttgcaggtgaggagattcatcgagatgatgccaatggccccaggt

SEQ ID NO: 934045 - DNA, 588 bp, Homo sapiens
gattatccctagatagctggaaatcctttcagatctccttgcttagtttcaacaagacatttatacatcagttacttgaccgggggtggtggctcgcacctgtaatcccagcactttgggaggccgaggcaggtggatmacctgaggccaggagtttgagaccagcctggccaagatggtgagaccctgtctctactaaaaaaaaaaaagcaaaaattagcagggtgctgtggtgcatgcctgtagtcccagctactcgggaggctgaggcaggagaatcatttgaaccaggaggcagaggttgcagtgagccgagagcaagccactgcactccagcctgggtgacagagcgagactctgtctcaaaaaaaaaaattataaaaaaagggggccgggtgtggtggttcacgcctataataccagcactttgggaggctgaggcaggtggatcactggaggtcagaagttcaagaccagcctagtcaacatggtgaaaccccgtctctactaaatatacaaaaaaattagccaggtgtggtgaagggtgcctgtaatctcagctacttgggaggctgaggcaggagaatc

SEQ ID NO: 934046 - DNA, 588 bp, Homo sapiens
gattatccctagatagctggaaatcctttcagatctccttgcttagtttcaacaagacatttatacatcagttacttgaccgggggtggtggctcgcacctgtaatcccagcactttgggaggccgaggcaggtggatcacctgaggccaggagtttgagaccmgcctggccaagatggtgagaccctgtctctactaaaaaaaaaaaagcaaaaattagcagggtgctgtggtgcatgcctgtagtcccagctactcgggaggctgaggcaggagaatcatttgaaccaggaggcagaggttgcagtgagccgagagcaagccactgcactccagcctgggtgacagagcgagactctgtctcaaaaaaaaaaattataaaaaaagggggccgggtgtggtggttcacgcctataataccagcactttgggaggctgaggcaggtggatcactggaggtcagaagttcaagaccagcctagtcaacatggtgaaaccccgtctctactaaatatacaaaaaaattagccaggtgtggtgaagggtgcctgtaatctcagctacttgggaggctgaggcaggagaatc

SEQ ID NO: 934047 - DNA, 684 bp, Homo sapiens
tcattgtttaggaccatttgcataagtaacgtgtgctgcctgcaggaggaaaaagaggctactctgcgctcctgggctacttctcagagtagattccagcacatcttcctttccagattgacttcaggtcacacatacatatgaacacagatgacacactggagtgaggccccaggcacacatctgatgtacaggcgtccatctgtggagcgagcccacacaacatacagtgacactttacacgggtgtgtatatgtgtaccttaacatgaaatctgtatataagcaccacgtatgtgcatactctatgtaagtgtggttagacacacgcacctggtatttatgtgccatttctataactaggcaggtcagctctggacacgcgcacctgtgtgcactatgtctgcacccacacccgcatagcatgtgtttgcatatgctgtaggagcatctgtctataaacacacattgtaagtcctgtatgtatgttgtgtatgtactcataaatatgcagtctgtttactmtaaattccttataaacgcacacagcacacgggcatgggcacctgaatgcctgcgtgtgtgtgcacgtggacactgatgcgcccattcctgtcttttggagtcagttgttgcctgggctagccctgcctcggccccaggttccacctttgtgtttgtaaac

SEQ ID NO: 934048 - DNA, 412 bp, Homo sapiens
ccaagtagctgggattacaggcgcctgccaccatgcccggctaatttttttttttgtatttttagtagagacggggtttcaccatgttggccaggctggtctcaaactcctgaccttgtgatctgtccacctcagcctccgaaagtgctgggattacaggcatgatccaccgtgtccrgcctctataccaacaattctatattctactttgtgatactagagctgggactcgctagacttgtggctctcctgggatccctgagctccttgcaggagatttttaaggtcaaaataattttcataacggtattaagatattatttgcttttcttactcttattctcttttgaatgtacagtgaagttttcaagaggctatatgacatatgatccagtaacagaaacatagcacc

SEQ ID NO: 934049 - DNA, 548 bp, Homo sapiens
ctgtcagcatgcccagataactggtggctataattatgcctgctaagattggttgcatggggcttggctttggtttgctcctttggtcttattttcccagaggaacctctgggttatgggcaccctatttactcctatcagatgtcaggattwgcaggataactgctcagaattaaaatattgatccagattattacattacccatgccttttgtttcttctgagttgtagccagaaattgctggttggttcacaggaataagagggttaatgtaaaatgtaggcaaaaaaaaattcaaaacaactaatgagactagaacttaatgacaaatgtgtggtaagttttgaaacataatttttatctccccagtcctcatttttgttaaaaacaattcatgataggactgagttgtttgcaaaatagacttcagtcttatacttggcctgacagtttgcataaagtgcagcaagaataattattcttacatacacttttaaaattgcttttgatggaattctgttccataaggaatctcagataggacttt

SEQ ID NO: 934050 - DNA, 609 bp, Homo sapiens
tgcctttctgtcttagagctggttgtaaagaaattctctgacctatctcgtctgattgtttcagagggggtcctgccccttacccagtaggaaggaataccacacacagaggccagggagaatctggatgggccttgctgggtgtctgcactcagtcttagtattagatcacactctctgtccagtcaattactgtgaggttggccatgcttcaatcatctctctaatgaaatctctacaaaacgcccaagagaacttctggatagtctaacaggtggaagtttctggagggtggtatgcctggggagggcatagagctctgcgccccctctctatccctcaccctgtgcaycacttcatctgtatgcttggtaatatcctttaaataaaccagtaaacctaagtaggtgttttgtgagccattctagcaaattaatgaagcctaaagaggaggtcttgggaactgcagcttgaagcccgccgttgagaagttctggaggccctgacttgtgtgactgctgtctgaagtaggggcagtcttctgggactgagccctcagcctgtggaatctcacactgttttcagatagtgtctgaaatgaattggatt

SEQ ID NO: 934051 - DNA, 735 bp, Homo sapiens
tttatattttactagagatggggtatcatcctgttggccaggctggtctcgaactcctgacctcaggagatctgctcgccttggcctccaaagtgctgggatttcaggcgtgagccactgtgtccggcctcccctattgtttatgtaaaaatgcagattcactgagccagactaaattgtgtattcagtgaaacgctgatcaaggactcaaaagaatgcagccttttgtatcttatctacctatgacgtaaaagcctccccacaccactccccactttgaattgtcccatcttttgggaccgaattaatgtacatattacacatattgattgatgtctcatgtctccctmaaatgaataaaagtaagctgtaccctgaccaccttgggcacatgtaatcaggaccttctgatgtggctgtatcatgggtgcatgcttaagcttggcaaactaaactttctaaatagattgagacctatctcaaatattttgggttcacattctgtctttaaaaaatattttaaaattagctggctttggtggcatgcacctgtagtcttgaagcagcctcattgtctggggtaaaacctgaggttcattgtctcacagccacagagatcaaggacatggacacacaaagagtgaggttaacagcaggaagtttaataggcaaaagaaagaaaatagctctctgctacagagaggggtcccagaaaaatgggttgtcgacccacgg

SEQ ID NO: 934052 - DNA, 494 bp, Homo sapiens
tttaaaaaatattttaaaattagctggctktggtggcatgcacctgtagtcttgaagcagcctcattgtctggggtaaaacctgaggttcattgtctcacagccacagagatcaaggacatggacacacaaagagtgaggttaacagcaggaagtttaataggcaaaagaaagaaaatagctctctgctacagagaggggtcccagaaaaatgggttgtcgacccacggtgaaatgcagaaggttttatagatgagctggttggaaagttgtgtctgatctacgtagggcacaaaaagctggttaggaccaggtgtgccatttgcatggggcacgattttctggcagcccccaccccagtattttattatgcaggcgggttttcagcctaagctgtgccatgttgcccacttctttcttactgtacacgtgctaacaaaaaggaagatgaagcttccatgatggacatgcctggcccccaggtaccccttttct

SEQ ID NO: 934053 - DNA, 620 bp, Homo sapiens
gctttgtttaccacctattcaagcctcagtaatggcagatgcccctccccacaccaagctccagcgtcccaagtcaacttccaattatgatgctcataatcaaattatgatggaagcgtgaatctggcaccagctactttggtgtcaagtagccaagtcacgtactaatttatttttaatgtaaagctatacaaccttctttctatacttaaaattttaattaaaatattactaaaaatttcttaatgattttatttcatggtgaaagagactcagtctggaatgtaaagtatgtcttacaagtatttctcattttgcaggacattgtctaggtgtccctctcccatggatgatcattagtgtggtttatctttatgctttgagaaaataagtctgtagtatgttattatattctactatataaagatactcttcaacttatgataagatyatgtttcaataaacccatcataagttgatactattctaagttgaagatgctgttttttttaaacaaaatgtagactcttgccatgttgcccaggctggagtgcagtggctattctcacgtgtgctcatagtgcactatagtctcaagctccttgagctcaaacaatcct

SEQ ID NO: 934054 - DNA, 783 bp, Homo sapiens
tcagggatgacacatgtatccaagaccaagagtcctatgaaaacaggggcattgactaagactccttctgtatccccactccaggccccgtcctctctgagtttcccaggatgctggcagccagcttacacctgacaggctaaagactaggaggtctctttctgagtatactgacacatcagtagaagagacttacgggtcgtggtatttagagatggcacagtgaagtagctgaggccccacccaaatgctgaagcccacccatcaaagcttcatctgggaatgctgtgcttctagataatgtttcttgattcatttatgaaagtgaacaaagagctaagmagcaccagtcattttaaaaacctctaatgttagaaaaataaacacacaaaaagcaatctcaggggaaagaaagatattgcaaaatacacataatgcattacctcagagaaattagaaaagatattgcacctataaaataagaataaatagaacatcacatcatacaagaaaaaggaacatcagagaataaaatgttctttaagaaatttgagagtagaaatgaaaattttaatgaaaatgttgagagatagagaatacctcccatgagtaacacaaaaagagaagaaaaattacagaaagtacacacttaaaaaaacatagaggagtggctgggcgctgtggctcacacctgtaatcccagcattttgggaggccgaggcgggcggatcaggaggtcaggagttcaagaccagcctgaccaacatggtgaaaccctgtctc

SEQ ID NO: 934055 - DNA, 461 bp, Homo sapiens
tccatttgaatgaatctggggaaacgtacactcaccatggctccagtgaagcggatggagaaataaagctggtggtctctgcaggcactactagaaagcacctgccaggaaagggtaggaagagtcgtgaacagcatgtgctgcctgctccaagctgggagacccaggtctgcaaaatccaggcacccagacaaccagctcctgactatgtgtgcttggattactaggaagtctggcatcttgtcccccttcccttttatccatttcctctcccttyctggtgcctctgttttgatcttgaattgcaggaacaaccccagcatattacatgggaagaagtttcagcacctgcaagtaatgcaatgagtgagagccacaggcagctccctccacaggctctcctgttttcttccttttctttttttggagacagggtctctttctgttgcccaggctggagt

SEQ ID NO: 934056 - DNA, 653 bp, Homo sapiens
ggtgtggtggctcacgcctgtaatcccagcactttgggaggctgacatgggcggatcacgaggtcaggagattgagaccatcctggctaacatggtgaaacctgtctctactaaaaatacaaaaaattagctgggcgtgcgtggagggcactgtagtcccagctactcgggaggctgagggaggagaatggcgtgaacccgggaggtggagcttgcagtgagccaagatggtgccgctgctccccagcttgggcggcagagtgagactccgtctcaaaaaaaaaaaawaataataataataataataaaataataaaaaaaaaacccatgcaaccgccattacagacatagaaactttccaacatcccagaaggctccctcatatctcttcccaatcattatacctcaaagttaaccattagtttgacctctataatagaatagtttggtttggttttgaacttcatataggtggaatcatatagtatgtactcttgtgtctgacctcctttgctcaacattatttctaagtatatagatacatatagataacattatatccatgttgctgtacatagtagtagcttgtaatttaaccttttttttttttttttttgagacagggtctcattctgtactccaggctagagtga

SEQ ID NO: 934057 - DNA, 655 bp, Homo sapiens
cttgtggcctatggagaaatacatcaaatgtagattatgaaaatttagttgtaggggattaatgaaaagactacttagtcaagcaagtagactcttcatctagctcattttgtaatctatttaatattagataatttggtttacagggactctgtgtatgggtaaggagcatactccaaattcttattatcctcctaataatcatcataatagtctccctggtgcactgtattctctcaaaggttgtaaatgtttgcatgcagccatctctagattgtcaatggtctctcttcaaatggaatgagaaaaggtgaaagaaatttgtgaccatgaggacactgtaacctatgaatgacacagtgagacaggaaacccaaaatcatggtaattgaragtggtgctagggccttaagttttggtcattctctcacctaagtgagaacctggccaaaaaggaggaattttttaaacaaaattatgggaggcaattgttttggactaagctcatgcactgggccccaacaggctaaaccaaacaaaatggagtcacttgtgctaaatgtgacaatcaaactaagactttaaggaaacccatagatcctagaacagaccaggtttggtttttctcatgtaaacagaacattccagcataaag

SEQ ID NO: 934058 - DNA, 542 bp, Homo sapiens
gcagtggggtgatcctagtgcactgcagccttgaactcctgggtttatgtgatcctctcacgtcagcctcccagtagctgggactgcaagggtatgccaccacatctggctacgttgtccaggctgatctcaaactcctgacctcaagtgatcctscagcctcagtctccaaaatattaggattacaggtgtgagccactgtgttcagttttccacattttaaaaatcaattcatcaattaatggacatttgcgttttttccatatcttactattgtgaataatgctgcagtgaacattggaatgcatataactcttcaatatttcaattattttgggtagatactcagaagtgagattgctgcataatatggtagcctggtactagatagcctggtacagcgtaaatataatgatatcaaaagctgaatgcagaggtaggtctatgttttgtgtgaactgagacatatacaattctattttaattttttgaagagccttcatattggtttccacagtggctgtaccactttacattccacc

SEQ ID NO: 934059 - DNA, 542 bp, Homo sapiens
gcagtggggtgatcctagtgcactgcagccttgaactcctgggtttatgtgatcctctcacgtcagcctcccagtagctgggactgcaagggtatgccaccacatctggctacgttgtccaggctgatctcaaactcctgacctcaagtgatcctgcagcctcagtctccaaaatattaggattacaggtgtgagccactgtgttcagttttccacattttaaaaatcaattcatcaattaatggacatttgcgttttttccatatcttrctattgtgaataatgctgcagtgaacattggaatgcatataactcttcaatatttcaattattttgggtagatactcagaagtgagattgctgcataatatggtagcctggtactagatagcctggtacagcgtaaatataatgatatcaaaagctgaatgcagaggtaggtctatgttttgtgtgaactgagacatatacaattctattttaattttttgaagagccttcatattggtttccacagtggctgtaccactttacattccacc

SEQ ID NO: 934060 - DNA, 741 bp, Homo sapiens
ttaggcaaaaagagaaattattcgaaaaaaaatcaagtatattttagaagataatgttaaaagcagtgtcaataatttcttatataaaacatatttatagaagtaagatgtgggaagcacctagtgaataaaatcagataacttatgaaaactcagaaaccattgtgtagactttatatacagcatataagtctgaaggactttccatgtaaaaattgaatttccattcttagaagttaagagctttcttataaaggtttaagtatgaatatttttatgtagattttgctttaggtaggtttcttcttgatcagactaatttgggaaaaataatatttgaacatattaataattgagagcgctttagggttttttcatgagaaggaactgaattaccgaggttttaacatatttgataagcatcctcaagtgtcctggtttcagctacctctcccttcagaagtgttgcttcatgtagacacttgttttctatcgtttctatagatacggaagactcagttttcagtatctatagtcttcagatactgaaaactcagttttytatcatttcaattacaaaactctttgaaaaaataaaatttcatctcgtcatttcaaactcaggcttatacatggagattgttaacaaggcttcttcagtaaaatgatccttccatcttttgttctcaaatgctaatgtaaacaaaacagttgattattttatatccattacaatcttga

SEQ ID NO: 934061 - DNA, 584 bp, Homo sapiens
gagtttgaggccagcctggccaacatggtgaaaccttgtctctactaagagtacaaaaattatctgggtgtggtggtgggtgcctgtaatcccaggtactcaggaggctgaggcaggagaatcgcttgaacctgggaggcagaggttgcagtgagccaagatctcacgattacactccagcctgggcaacaagagcgagactccgtctcaaaacaaacaaacaaacacaaagacaatagtggttaaagttccataatgccaaatctaatcttagctgagagggactttayggagaggggcctctcaccccctaaatcttaggaaagactaacttttctaagttgcacctcaaacacgagtttcgtcaagtgttcttgccttttattaaaagggaccttttatcttatctgtcttaggagacactctaactcccctaaattggggtattaacccaatcccattctttacccaggtgtgccatcacttacaaaaagttagccaattggcgattcagtctatttcctttgggttgggcgtttccttagcatcatccttttgtgattcactgaaaagaagattccaga

SEQ ID NO: 934062 - DNA, 584 bp, Homo sapiens
gagtttgaggccagcctggccaacatggtgaaaccttgtctctactaagagtacaaaaattatctgggtgtggtggtgggtgcctgtaatcccaggtactcaggaggctgaggcaggagaatcgcttgaacctgggaggcagaggttgcagtgagccaagatctcacgattacactccagcctgggcaacaagagcgagactccgtctcaaaacaaacaaacaaacacaaagacaatagtggttaaagttccataatgccaaatctaatcttagctgagagggactttacggagaggggcctctcaccccctaaatcttaggaaagactaacttttctaagttgcacctcaaacacgagtttcgtcaagtgttcttgccttttattaaaagggaccttttatcttatctgtcttmggagacactctaactcccctaaattggggtattaacccaatcccattctttacccaggtgtgccatcacttacaaaaagttagccaattggcgattcagtctatttcctttgggttgggcgtttccttagcatcatccttttgtgattcactgaaaagaagattccaga

SEQ ID NO: 934063 - DNA, 567 bp, Homo sapiens
cctcagcctcctgagtagctgggactacagacgcccgccaacaccctggctaagttttgtatttttagtacagacagggtttcaccgtattggccaggctggtctccaactcctgacctcattatccacccgcctcaccctcccaaagtgctgggattacaggcctgagcccccacgcctggccatgaattacaatttgagatgagatttgggtggagccacagagccaaaccatatcactgcaaaggacccgcagcaaggaaggtcataaaatctgaaattttaaaataattgtcattatgttttttcagtttatgaataactatattatataccatttataaatgcatatgacgttatacacaaggttaaatgcaaatgtcctctaaggttggcctggctcagatcagggaagaaggcttrgctgtaaaggctgcagcctagcctgttatttttgctttgtttagcccagtgtctgatcacatttttcgtcactcagggcgtgaagggtgggtcctgaaaccttatccaatcaggggccatatattagaaactgtacaatcaggc

SEQ ID NO: 934064 - DNA, 779 bp, Homo sapiens
gtggctaaaaggggccaaggtacaagcttgggttatttcttcagaaagtgcaatcctcaagccttggtggcttccgtgtggtattgggcatgtgagtgcacataaaacaagagttgagctctgggaacctctgcctagatttcagaggatggataaaaatgccgggatgttcaggcaraagtcttctacaggggcagagccctcatggagaacctgtaatagggcaatgcagaagggaaatgtggggttggagccctcatgcagagtccgccctgaagctgcctactggagctgtgagaaggcctctatactccagaccccagaatgacagatccaccatgaacttgcactgtgcacctggaaaagccacaggcattcaattccagtccatgaaggagctgctcaaggccacgagggcccaccccttgaatcagcatggcccaggagtgggacatgaagtcaaatgagatcatctcagagctttaagattttattactgccccgttggaattcaaacttgcatgaggcctgtagctctttggttttggcaaatttctcacatttgaaatggaagaatttatctaatgcctgtacccccattgtatcttggaagtaactaacttgcttttgatttacaggctcataggtagcagggacgagactttggagttagacttttgggttaatgctaaaatgagttaagagttttggggactgttgggaaagcatgtttggttttgaaatataaaaagggcatgagatttgggagcggccaggag

SEQ ID NO: 934065 - DNA, 774 bp, Homo sapiens
aggtaataaaatatcacaaggcatatggaggcagggtgagatcacaggaccacaggaccgggcgaaattaaaattgctgatgaagtttcaggcacgcattgtcattgataacatcttatcaggagatagggtttgagagcagataaccggtctgaccaaaatttattaggcgggaatttcctcgtcctaataagcctgggagtgccacgggagaccagggcttatttcttccctccgctatgactgtaaaagacagccatctccaaagcggccatttcacaggcctccccttagggatgcattctctttctcagggatgttccttgctgagaaaaagaattcagtaatatttctcctatttgcttttgaaagaagagaaatatggctctgttccgcccagcccacaggcagccagagtttaaggttatctcccttgttccctaaacattgctgctatcctgttcttttttcaaggtgcccagatttcatattgtttagacaatttgtgcagttaacrcaattatcacagggtcctgaggcaacattcatcctcagcttatgaagatgatgggattaagagattaaagtaaagacaggcataggaaatcacaagagtattgattggggaagtgataagtgtccattaaatcttcacaatttatgttcagagattgcagtaaagacaggcataagaaattataaaagtattaatttggggaactaataaatgcccatgaaatcttcacaatttatgttcttctgccatggcttcag

SEQ ID NO: 934066 - DNA, 774 bp, Homo sapiens
aggtaataaaatatcacaaggcatatggaggcagggtgagatcacaggaccacaggaccgggcgaaattaaaattgctgatgaagtttcaggcacgcattgtcattgataacatcttatcaggagatagggtttgagagcagataaccggtctgaccaaaatttattaggcgggaatttcctcgtcctaataagcctgggagtgccacgggagaccagggcttatttcttccctccgctatgactgtaaaagacagccatctccaaagcggccatttcacaggcctccccttagggatgcattctctttctcagggatgttccttgctgagaaaaagaattcagtaatatttctcctatttgcttttgaaagaagagaaatatggctctgttccgcccagcccacaggcagccagagtttaaggttatctcccttgttccctaaacattgctgctatcctgttcttttttcaaggtgcccagatttcatattgtttagacaatttgtgcagttaacgcaattatcacagggtcctgaggcaacattcatcctcagcttaygaagatgatgggattaagagattaaagtaaagacaggcataggaaatcacaagagtattgattggggaagtgataagtgtccattaaatcttcacaatttatgttcagagattgcagtaaagacaggcataagaaattataaaagtattaatttggggaactaataaatgcccatgaaatcttcacaatttatgttcttctgccatggcttcag

SEQ ID NO: 934067 - DNA, 581 bp, Homo sapiens
gccatgaaagactttcattattgctgtaaactaaaaacaaaaaacaaaacaaaacacacacacaacacacacacacacattactgaaggggaagtacagtgcttggaaaattcacaagaatgggacaaaaaatgtccctatgttaaagcaagagaaagaaatgaaggtttctcagaaaccatttccactggagcagagcttctggaagcatgtttaaaggtttggcttcctccttgacattgggatccgtcatttgtgtcatctgcttcattcactcccacctacctgggtgtttggctactgcctcctgtctcttcactttccaaggctcttttctttgctccagacaggtcatcaagtctggcttaaagatagcaagacctgttttaktagaaaaaaaaacatgactcttgctaggataatctgattactaatctagtactatgctcagtagagaagagagaacattatagaagactctagaaaattaattttaatatactgtttcctaacagaaactttagaatatttagaaagtattttaaatttgtggttcttagctctattacccagtaatactg

SEQ ID NO: 934068 - DNA, 557 bp, Homo sapiens
gaagcaggcctggcagagttcaccacaagctgaccgaagaccacttaggtcttcagtggatatcagcagtagcctagcagtacttgttgtggactctgggtggtggtggccatggggagtggtttcttatgcttgataaaagagaaaaaagagtaggaaggatgttgtctcatggcctcggtgccagctaagccacaacagaatagagcaccaagtagattcctaaggtttctgactccatgttcttgctaccaaaggcattttgctacccmcagcccagagctcactgccctgaaggaaaggacatgagcctggctggattcaccacctactgaagagaacttgggtcttgagtgaacatcagtagtagctaggtagtggtcactgtgggccttatgtgagagccagtcctgtgctggctttgggtctgacttagtgtagtcctagtgatggtggccacaggggtgctagtgttacacccactccagctccaggtagctcagcatgcagagagagagagattccatttatttggcagaatgtaaaaaaatagaaaa

SEQ ID NO: 934069 - DNA, 461 bp, Homo sapiens
acaaaataccaggaataagttcttatttatcaataaaaaaaagaatgtaaatggaccactcttcaatcaagagacatagagtagctgaatgaataaaacaaaagcaagacccagtgatttgttgcctacaaaaatcacacttcacctataaagatacacatagactgacaataaaggaatggaaaaatatatttcatgcaaacagaaaccaaaaaaaatgcaggagtagctatatcagacaaaatagtaattttaaatatatataccgaaaaayatataaagaaaatattattcaaacaatatagagagatagacccccaatgtaataattgctgaaggcttgaaggctccattttctgcattggagagaccatccagacagaaaatcagcaaagaaatatcagacttaatctgcgctatacaccaaatggacctgaaagaagacatttacagaacatttc

SEQ ID NO: 934070 - DNA, 586 bp, Homo sapiens
gactgaattgtgtgtttcgccacaacgacaccgccaagttcatatgttgaagccctaacccccagtgagactatttggagatggagcctttaaggaagtatttaaggttaaatgaggtcataagagtggaactccgccgggcgcggtggctcacgcctgtaatcycagcactttgggaggccgaggcaggcggatcacgaggtcaggagatcaagaccatcctggctaacacggtgaaaccccttctctaataaaaatacaaaaaattagccatgcgtggtggcgggtgcctgtagtaccagctactcgggaggctgaagcaggagaatggcgtgaacccgggaggcggagcttgcagttagccgagattgggctactgcactccagcctgggcgacaaagcgagactctgtctcagaaaaaaagagtggaactctaatccaataggattggtgtccctacaaaaggaagagatggatatcagagctcactctctctgcaagcataaagataaggtcaaggtcatgtcaacacgcaatgagaaagcagtatccacaagccaggaacgaaggactcaccagacaccg

SEQ ID NO: 934071 - DNA, 586 bp, Homo sapiens
gactgaattgtgtgtttcgccacaacgacaccgccaagttcatatgttgaagccctaacccccagtgagactatttggagatggagcctttaaggaagtatttaaggttaaatgaggtcataagagtggaactccgccgggcgcggtggctcacgcctgtaatctcagcactttgggaggccgaggcaggcggatcacgaggtcaggagatcaagaccatcctggctaacacggtgaaaccccktctctaataaaaatacaaaaaattagccatgcgtggtggcgggtgcctgtagtaccagctactcgggaggctgaagcaggagaatggcgtgaacccgggaggcggagcttgcagttagccgagattgggctactgcactccagcctgggcgacaaagcgagactctgtctcagaaaaaaagagtggaactctaatccaataggattggtgtccctacaaaaggaagagatggatatcagagctcactctctctgcaagcataaagataaggtcaaggtcatgtcaacacgcaatgagaaagcagtatccacaagccaggaacgaaggactcaccagacaccg

SEQ ID NO: 934072 - DNA, 586 bp, Homo sapiens
gactgaattgtgtgtttcgccacaacgacaccgccaagttcatatgttgaagccctaacccccagtgagactatttggagatggagcctttaaggaagtatttaaggttaaatgaggtcataagagtggaactccgccgggcgcggtggctcacgcctgtaatctcagcactttgggaggccgaggcaggcggatcacgaggtcaggagatcaagaccatcctggctaacacggtgaaaccccttstctaataaaaatacaaaaaattagccatgcgtggtggcgggtgcctgtagtaccagctactcgggaggctgaagcaggagaatggcgtgaacccgggaggcggagcttgcagttagccgagattgggctactgcactccagcctgggcgacaaagcgagactctgtctcagaaaaaaagagtggaactctaatccaataggattggtgtccctacaaaaggaagagatggatatcagagctcactctctctgcaagcataaagataaggtcaaggtcatgtcaacacgcaatgagaaagcagtatccacaagccaggaacgaaggactcaccagacaccg

SEQ ID NO: 934073 - DNA, 586 bp, Homo sapiens
gactgaattgtgtgtttcgccacaacgacaccgccaagttcatatgttgaagccctaacccccagtgagactatttggagatggagcctttaaggaagtatttaaggttaaatgaggtcataagagtggaactccgccgggcgcggtggctcacgcctgtaatctcagcactttgggaggccgaggcaggcggatcacgaggtcaggagatcaagaccatcctggctaacacggtgaaaccccttctctaataaaaatacaaaaaattagccrtgcgtggtggcgggtgcctgtagtaccagctactcgggaggctgaagcaggagaatggcgtgaacccgggaggcggagcttgcagttagccgagattgggctactgcactccagcctgggcgacaaagcgagactctgtctcagaaaaaaagagtggaactctaatccaataggattggtgtccctacaaaaggaagagatggatatcagagctcactctctctgcaagcataaagataaggtcaaggtcatgtcaacacgcaatgagaaagcagtatccacaagccaggaacgaaggactcaccagacaccg

SEQ ID NO: 934074 - DNA, 788 bp, Homo sapiens
cctcagaaaacttagaagcatggtggaaagtgaagaggaagaaagtaagtcttaccatggtggggcaggagagagagggcaagagagaatgacgggggaagtgctacacattttcaaacaaccagatctcatgaggactcactcactatcacaacaacagccagggggaaatccgcccccatgatctaatcacctcctaccaggtcyctcccctaacattagggattacaattctacatgagatttgggtgggaacacaaagccaaaccatataaattgcctttgtcccgatcttaagagaaaagcatccagtttatcaccatcaagtatgatgttaagtgcagtttccttggacatgttcttcctacgttgaggaagttctctattcttagcttgctgatttttttttaatgaatacatgttgaatttagtcaaatacttctatccatgtcaattgataagatcataatgtttgtttcttcaggttgttcatgtggtggattaaattaattcatatctgatgtttaaagaagactcgtatacctgaaataaattccagatgattgtgttgaataattcttttaaacattgctggattcaatttgccagtaatttgttgatgattattaaatttgtgttcaaaaaagatattggtctgcagtgcagtttttctttctcataatgtctttatctattttttgtgttaggatggaataatgctggcttcaaagaattagaaagcagtttttctgcttcaattttgtgaaagatattgagaggatttgttt

SEQ ID NO: 934075 - DNA, 788 bp, Homo sapiens
cctcagaaaacttagaagcatggtggaaagtgaagaggaagaaagtaagtcttaccatggtggggcaggagagagagggcaagagagaatgacgggggaagtgctacacattttcaaacaaccagatctcatgaggactcactcactatcacaacaacagccagggggaaatccgcccccatgatctaatcacctcctaccaggtccctcccctaacattagggattacaattctacatgagatttgggtgggaacacaaagccaaaccatataaattgcctttgtcccgatcttaagagaaaagcatccagtttatcaccatcaagtatgatgttaagtgcagtttccttggacatgttcttcctacgttgaggaagttctctattcttagcttgctgatttttttttaatgaatacatgttgaatttagtcaaatacttytatccatgtcaattgataagatcataatgtttgtttcttcaggttgttcatgtggtggattaaattaattcatatctgatgtttaaagaagactcgtatacctgaaataaattccagatgattgtgttgaataattcttttaaacattgctggattcaatttgccagtaatttgttgatgattattaaatttgtgttcaaaaaagatattggtctgcagtgcagtttttctttctcataatgtctttatctattttttgtgttaggatggaataatgctggcttcaaagaattagaaagcagtttttctgcttcaattttgtgaaagatattgagaggatttgttt

SEQ ID NO: 934076 - DNA, 613 bp, Homo sapiens
caagacttgcagccagggccagagttggtgacctggagccagtctgtgtgtttcatttttaagtgccccagcctgctcctccaagattatggcacagcaaggacctctctgctgcatctccaggaagaaattcgggaattcagagcactcacttgctgratcagcagcctgagccaccccacccttcctgtgcatagactgtggtagaatgggggcactctctaccccaaacataggcagatctctaggcatttggagcacctgctagcatggaccagcagcctgagttgccccactcttcctgtgcaggaggaggtccctctctgcttcatacccaggcagatctctagtcattcaaagcacctgctttcctggtttagcagcctgagtcaccccaccccttctgtgcagagatcttggtgcagggggcctctctttgctccaagcccaggcacatctccaggaaatcatagcacctgctcacccaaattggcagcttgagccatcccacccttcctgtgcagagatctgggtccagagagtctctacttcatggtcaggcacctctccttggttcagcagccttgagtgcttggttctgttgccccaccat

SEQ ID NO: 934077 - DNA, 734 bp, Homo sapiens
atttgtagattgcttttgacagtatggttattttcaatattgattctacccatccatgagcatgggatgtgtttccatttgtttgtgtcatctatgatttctttcagcagagttttgtagttttccttatagatgtctttcacctccttggttaggtatattcctaagtattttattttaattttttgcagctattgtaaaaggggttgagttattgatttgattcttkgcttggttgctgttggtgtatagaagagctactgatttgtgtacattaatcttgtatctggaaactttgctgaattcttttatcagttctaggagctgaaagtgtttataatactttcaaattgcatctaattgatatccaggctgtaagttttgtgcaagaagagaacccagagtatacctcctgagcccattgtggttaggtgaggtgacagccacagagacttaagtggggatttactctgagactcagagttataaacccctaaactgtaccctgctgtgacaatctgagcaaattctactcttctctgccttgtacttttaaagtttgtagccagatacacataacttaatgtatcatcttaacgatttttgaaaatacagttcagtaatgttaagtacatttacattattgtgcaactccaatttccaaaactctttatcttgcaaaactaaaactctatgcccattaaacatcaactgtccattctctcttcccttca

SEQ ID NO: 934078 - DNA, 650 bp, Homo sapiens
acatagatagatatgatagatagattatagaataggttgatagatatgatagattaaatagatagatagatagatagatagatagatagatagatagatagaattgatgtatgagagagagatttttttaaattttagagactgggtaataagacttagatgttgtcccctttaagtcccatgttgaattgtaatcctcagtgtcaaaggtggggcctggtgggaggtgtttgggtcatgagcttggatccttcatggcttggtgctttcctcaagatagtgagtgagttctcacgagatctgattgtttgaaagtgtgtggtatctctcccctcccttccttctgttctggccatgtgacatcccatctccttttttatgccagcctgccacactgcataaaatctccctgaggcctccccagaagccaagcagatgccgtcgtcatccttcccgtacaacttgcagaaccatgagccaattaaacatttttcctttacaaattactcagtttcaggyattcatttatagcaatgcaagaatggccttgcacacagcgtctcactctgttgcccaggctggagagcagtggtgcaatcatggctcactcactacagccttgaacacctggactcagggaagccaccaac

SEQ ID NO: 934079 - DNA, 580 bp, Homo sapiens
tctgtccacaaggcctggtgtggatcccggggttgtaggtgctggcttggctctggcatggacctggagactggatcccatgggggccagtttagtgctggggtctacagggttgggcctagaccctgtgtctggctggagcttgtggtcacagggcccagcctggagctggtatccatggaggctctcctggagtgggtgtcttctggtgtcaacctggtaccaggatgggtcatgaggctgggtctgtgggtgctgacctggagtctggtgctgtggggggctggcctggtgctgggaatgatctatagcctgagtctttggggccagcctgacgttggggtgtgcckggagactgagtttaggcaaccaccccagagccaggggtcttaggggctggctggcattgaaccaggtttaaaggctcagtctatgggtgctggcctgaaatctagggcttcagtggctggtttggcagtgggacaggcctggagactaagtctgtggggccagtgtagaacctgggtccagcctgatggtagattgggactggagcctgagactgtgggagccaacctag

SEQ ID NO: 934080 - DNA, 655 bp, Homo sapiens
  misc_feature 25: n = A,T,C or G
gtgctaagcccctcactgcccgggngctggtgacgccggcctgctgctcccagtgtggggcggccaagccatgcccacccggaactgcactggcttgcgagtgccgccgcgcagcctgattcccgcctgcgcctctccctccacacctccccgcaagctgagggagccggcttccacctcggccagcccagaaaggggctcccacagtgcagaggcagcctgaagggtcctcaagcgcagcagaatgggcgcccaggcggaggaggcaccgagagcgagccagaacgagcaagggctgcgagggctgccagcaggctgtcacctctcaatctttggagaaatgcctatgcaagtcctttgcccattttaaaattgggttatttggttggttgtttgctttgttttgttttttagatggggtcgcactcwgtcactcaggctggagtgccctggcgcaatcttcgttcactgcaacctttgcctcctgagctcaagtgatccccttatcttggcctcccaagtcgctgggactacaggtgcctgccaccactgcctggctaattttttatagttttggtagagatggggtttcactatctttcccaggctggtcttgaactcctgaactcaagtgatccacccacctcggcctccc

SEQ ID NO: 934081 - DNA, 499 bp, Homo sapiens
gtattttaaaagctctttttacatactgacaaattactctccagaaaggctgcttcaattaacactcctatgaagagaacataatagttcctgttttactgtaacctgagcatcatggatagtttagcttttaaatcttgcataatttgataggcaaaaaaaatcaacttattttcccagtctacatttctctgacttgcggagaagttacatatgcttcaaatatttcttccctggttgttttccttttcagccagccctctgttcttgacccattcatcttttgcatacttagagagtttcttatctattttcataggctcctgcacgatgaggataataactcttcatcccccatcactgtttgtacgttcctttacagcargggtccctagcccccaggccagtactgctctcagcctttaggtgtgaggaacccggcacaaagcaggaagtcagcagagtaagcaaagcttcatctgcatttacagccacctcc

SEQ ID NO: 934082 - DNA, 633 bp, Homo sapiens
agaactttaaaaggaacatgtttatataatgacactcagtacaaggtatgtagcccagaaaacgactgaccagatgtgtgttatgacccctgtcagcttcccatgtccacagtttttgaaatgagattaaggactgaaggctggtggggactcataaatgatacaagtaaagtattagtcagaacagaggaaaaaggggtgcccaaacacataaccttgaaatttgatgcctgtgctgtcattaatagcagtaagttagaaaggggatgtggctgttttagttgggaaaaaggctatatgaccgaaaataagtacatttgtcatgaattaggactgtgtggaaatgaatgtggatactggtcttgcgtcatttgcgccacttggattaaaaaaaatgaaaaggatccagtccaccttcagaaaggaaaaaatggcccttcctatactaagggaaaatgtaaccccttagagctagtaataaccaatccccttgawccttgctggaaaaaaggggagcgtgtgaccttaggaatcgatggggccatactggatccttgactaaatatcttagttcgaggagaagtttacagacgctctcctgagccagtgtttccaactttctatgatgaacta

SEQ ID NO: 934083 - DNA, 772 bp, Homo sapiens
cccaagctagaaggctggagtgcagtggtgcaattatagctcactgcagcctcaaactcctgagctcaagtgatcctcccaactcagcctctggagttgctgagattacaggcatgagccactgcactgggctgccttctttttatataaaatttacttagtgcctgaaactattttatcccagtgctccaaaaggcctaccatgtgcccctaaattcatcagtttttctaactcccatactttttgtccattcattcctgctctttcttcctggacggctccgtctagcatctcttgaaccccatctccaacatgaactgtttgtctatggaacctggtgaatggctgtcaccctggccaccaactacacttctctcctccaccggatctcctaactttctgaatccacctcttacttgttctcagtttgcgccrtccattttctgaagaacatcttgtagtagctgtctaagaaaaggtgtcaacaaaaagagtcaaactctgtaaaatatttgaagaaatttattctgagccaaatacgactgaccatggcccattacacagccctcaggaggtcctgagaacatgtgcccaaggtggttggggtgcagtttggttttatacattttaggaaggcatgagacagcaatcaaatacatttgagaaatacattggtttggtccagaaaagagacaagtagaagtggtgggtgggggcgagggggtggaggaaagggggttccaggctgtgggtgaatttaaacattttctg

SEQ ID NO: 934084 - DNA, 670 bp, Homo sapiens
taaatcctctgaagtcaagcaaatctggacatggttttcttcagcaggaattagctgtttggggcttgatggttttctttataacaatgataacatcttcagtgggatgatccctgtagacttccatgatgttctctttattatgattctcttccatagtattgacagtcctttccataaaacactgtattagttttttcttatgctgctaataaagacatacccaagactgggtaaattataaaggaaaaaagtttaattaactcacagttcagcatgactggggagggctcaggaaacttacaattatggtggaaggggaagtaaacatgtccttcttcacatggtggtagcaaggagaagtgccaaccaaaaggagaaaagactcttataacaacttcagatctcaggagaactcattcactatcactagaacagcatggaggtaactgcccccatgattcaattacctccaaccaggtcactctcaccacacktggggattatgggagctacaattcaagatgagatttgggtgaggacacagccaaaccatatggaaaaccatgtgtaatgagcttaaatggtccttatgaccctttgtggtattgaactttcagggttccaggtgtccaggagcattgtccaatatcaaaagaacttgagaagg

SEQ ID NO: 934085 - DNA, 839 bp, Homo sapiens
tctataaattttgtatgtttctccttttgaaaatttcttctttaatgtctctcaaaatattgtatgattttctgagcggaaatattattcctcttcaaaaatattattcctactttataatagagtctgactaacagaagtcaccttgagcgaaaagaaaaaattacttacatatatatctaaatttagacataatatttataatttaataataaatttcacaattttgacataatattctacatatatagccatgtgtcaatgatggggatacattctgtcattaggtgatttcataattgtgtgaacatcatagagtgtacttacacaaaccaaaattgtctagcatactacacacctaggctgtgtattataacccattgctcttaggctrtaaatctgaacagcatattactgtgctgaatactgtaggtaattgtaaaacaataatatgtatttgggtcccaagatatctaaacataggaaagaaataggaacaaaaggtataaaagataaaaaatggtatatttgcatagggcacatactataaaaatagagattgcagtactggaagttgctcttagtgagtcagagagtgagtggtgagtgaatttgaaggcctatggcattactgtacactgcagtaggctttgtaaacactgtagtcaggctatactacatatattttactactacaaatatactactacgaacgttttataaaaatatttttcttactttaataaattaaccctagtttactttaacttttttttactttataaactttgtttttaaattttgactctcataataacatttaccttaagacacaaaca

SEQ ID NO: 934086 - DNA, 839 bp, Homo sapiens
tctataaattttgtatgtttctccttttgaaaatttcttctttaatgtctctcaaaatattgtatgattttctgagcggaaatattattcctcttcaaaaatattattcctactttataatagagtctgactaacagaagtcaccttgagcgaaaagaaaaaattacttacatatatatctaaatttagacataatatttataatttaataataaatttcacaattttgacataatattctacatatatagccatgtgtcaatgatggggatacattctgtcattaggtgatttcataattgtgtgaacatcatagagtgtacttacacaaaccaaaattgtctagcatactacacacctaggctgtgtattataacccattgctcttaggctgtaaatctgaacagcatattactgtgctgaatactgtaggtaattgtaaaacaataatatgtatttgggtcccaagatatctaaacataggaaagaaataggaacaaaaggtatraaagataaaaaatggtatatttgcatagggcacatactataaaaatagagattgcagtactggaagttgctcttagtgagtcagagagtgagtggtgagtgaatttgaaggcctatggcattactgtacactgcagtaggctttgtaaacactgtagtcaggctatactacatatattttactactacaaatatactactacgaacgttttataaaaatatttttcttactttaataaattaaccctagtttactttaacttttttttactttataaactttgtttttaaattttgactctcataataacatttaccttaagacacaaaca

SEQ ID NO: 934087 - DNA, 731 bp, Homo sapiens
ctgaaccggaaagtgtaaatgaaggatcattgatgaaatgtgttacaatgagagcaaaatgtgaaatgttgctgaactaaaatgaactttgttttgtctccagggcagtcatgacttaatgaagtacagctataagcaagataagtcagactttgtgcagaaaactgacaatgaaagtgattacataggaaaaatgccccctaagtagattgtgtgtgtgtatatgtagatggttgtgcatatgtttgtatgtatatgtatttatatacatgcatgtgtatttatagtatatatgttgtagataaagatattgtagatagatatatagatattgtagatagatatattgtagatagatatagtatatatagtagatagatataaagattttcattttcattttatattaagatatttatatttaatttatattttatatataatatataatataatatataattatatataatatattatattatatattatatatatttatatattgatataaatatataaaattataataatataatttwtatattatttaatataaaatatttatattattttaaatatttaagatgttttatcttaaatatttggaatgcttttgttacacagttgagagatctaaagcccatcattttaacatcaaatagcataacttgcattttttttattaaaaatacttgcccttactatgtcttttctcaaagacaagacgt

SEQ ID NO: 934088 - DNA, 731 bp, Homo sapiens
ctgaaccggaaagtgtaaatgaaggatcattgatgaaatgtgttacaatgagagcaaaatgtgaaatgttgctgaactaaaatgaactttgttttgtctccagggcagtcatgacttaatgaagtacagctataagcaagataagtcagactttgtgcagaaaactgacaatgaaagtgattacataggaaaaatgccccctaagtagattgtgtgtgtgtatatgtagatggttgtgcatatgtttgtatgtatatgtatttatatacatgcatgtgtatttatagtatatatgttgtagataaagatattgtagatagatatatagatattgtagatagatatattgtagatagatatagtatatatagtagatagatataaagattttcattttcattttatattaagatatttatatttaatttatattttatatataatatataatataatatataattatatataatatattatattatatattatatatatttatatattgatataaatatataaaattataataatataatttatatattatttwatataaaatatttatattattttaaatatttaagatgttttatcttaaatatttggaatgcttttgttacacagttgagagatctaaagcccatcattttaacatcaaatagcataacttgcattttttttattaaaaatacttgcccttactatgtcttttctcaaagacaagacgt

SEQ ID NO: 934089 - DNA, 731 bp, Homo sapiens
ctgaaccggaaagtgtaaatgaaggatcattgatgaaatgtgttacaatgagagcaaaatgtgaaatgttgctgaactaaaatgaactttgttttgtctccagggcagtcatgacttaatgaagtacagctataagcaagataagtcagactttgtgcagaaaactgacaatgaaagtgattacataggaaaaatgccccctaagtagattgtgtgtgtgtatatgtagatggttgtgcatatgtttgtatgtatatgtatttatatacatgcatgtgtatttatagtatatatgttgtagataaagatattgtagatagatatatagatattgtagatagatatattgtagatagatatagtatatatagtagatagatataaagattttcattttcattttatattaagatatttatatttaatttatattttatatataatatataatataatatataattatatataatatattatattatatattatatatatttatatattgatataaatatataaaattataataatataatttatatattatttaatataaaatatttatattatyttaaatatttaagatgttttatcttaaatatttggaatgcttttgttacacagttgagagatctaaagcccatcattttaacatcaaatagcataacttgcattttttttattaaaaatacttgcccttactatgtcttttctcaaagacaagacgt

SEQ ID NO: 934090 - DNA, 792 bp, Homo sapiens
  misc_feature 1, 2, 3, 4, 5, 6, 7, 8, 9, 10, 11, 12, 13, 14, 15, 16, 17,18, 19, 20, 21, 22, 23, 24, 25, 26, 27, 28, 29, 30, 31,32, 33, 34, 35, 36: n = A,T,C or G
nnnnnnnnnnnnnnnnnnnnnnnnnnnnnnnnnnnncccaatgggtattttgagtgctttgaggcctatagtgaaaaaagaaatattttcacagaaaaactagacagatgtattctgcaaaacttctttgtgaagtgtgcattcatctcacagaattgaatctttctttggattcagcagttttctaaacagtccttttgtagaatctgcaaagagataattctgagcccactgagtcctatgctgaaaaaggaaatatcttcacacaaaaacctaagaaccagacagaagcattctgagaaaccwctttctggtgtgtgcattcatctcacagagttgaacctttctttagtttgaacagtttggaaacagtcttttttttgaatatgcaaatggatatttgggagccctttacagcctatggtgaaataggaaatatcttcacataaaaaccagacagaagcattctgagaaacttctttgtgatgtgtgtattcatctcacagaattgaatatttctttggatgcagcagtttggaaacagtctttttgtagtatctgcagagggatattcatgagcagtttaaggcctatggttaaaacggatatatcttcacagaaaacctcgacagatccattgtgagaaacttctttgagatgtgtgcattcatctcatagagttgaacctttctttggactgagcagttttctaaacagaccttttgtagaatctacaaagggatacttctgagcccattgaggcctatggtgaaaaaggaaatatcttcacat

SEQ ID NO: 934091 - DNA, 753 bp, Homo sapiens
cagatgtgaacctttattttgattgagcagcttggaaagagtcttttgtagtgtctgaagtgcgctattattgagtggactgaggcctatggtgaaaaaggaaatggcttctcaaaaaaagtatacagaagcattctgagagacttctttgtaatgtgcgcattcatcttacagtgttaaacctttcttttgattgggctttttggaaacactctttttgtagcatctgcaagagtatacttctgagcccattgagacctattttgaaatatgaaatatcttcacataaaaattagatagaaggtttctaagaaactcctttgtgaagtgtgctttcatctcatagagttgaaactttcttgtgattaagcagtttgaaaacactctttttgtagattctgcaagtggatatttggagcgctttgaggcccatggtgaaaaargaaatatcttcacataaaaactaaacagaagttttctgagaaaattctttgtgatgtgtgcattcatcacacacagttgaaccattcttttgattgagcaatttggaaaaagtctttttgtagaatctgcaaatggatatttggagcactttgaggcctatggtgaaaaatgaaacttcttcacataaaacaagacaaaagcattctgagaaacttctttgtgatgtgtgacaaaatttagcctttcttttcattgagcagtttgcaagcagtctttttggagaatctgcaaagggatatttctgagccc

SEQ ID NO: 934092 - DNA, 767 bp, Homo sapiens
taggtgctctgtcccagggagatgggagttttgtctataatcccatgactggggctgctgcctttctttcagagatgccctgcccagtgaggaagaatctagacagggagtctggctacatggttttgctgagctayggtgggctccacccagttcaaacttcccagcagctttgcttacactgtgagggaaaaccgcttgctcaagccttagtaatggtggacgcccctccccccaccaagcttgagcacccaagtcgacttcagactgctgtgctggcagtgacaatttcaagccagtggatcttagcttgctggactccatgagtgtgggatccactgagctagaccacttggctccctggcttcagccccctttctaggggaggaaacggttctgtctcactggcactccaggcaccactggagtatgaaaaaaaactcctgcagctagcttggtgtctgcccaaatggctgcccagttttgtgcttgaaacccagggccctcgtggtgtagtcacctgagggaatctcctggtctgcgggttgcgaagatcatgggaaaaacacagtatctgggctggagtgcaccgttcctcagggcacagtctctcacagcttcccttggataggggagggagttccctgacaccttgcgcttcctgggtgaagtgacgccccaccctgcttcgtcttgccctccgaaccagtcccaatctgatgagctgggtacctcagttggaaatgcagaaatcacccagcttctgt

SEQ ID NO: 934093 - DNA, 730 bp, Homo sapiens
ccaatgactaaacctctcggagcttttgtgtccccatctgtaaattgcagatgactgcctttccgggtcatcagaagagtaaacatggttccaggctcccattttgagttacacagacacaaattggaatttttaataaactagaaaggaaatataaaatcaagtttcaacactctttgggtaagagcttataataatataaatatcaaactatttctgggttagttgagagaagtatagattgtgagtcgtttggtgttgatgacttaggaaaatcagcaggatgaatcytcattcaagttagactctatttcccaaagtaggtttggtgaaacacttgtagcaagggctctatagctaaacaaacagtaggagcacagcctatgatagccctctcttagaaagtcacaatgcacattggtatgataaaggtcctgagaattcctgccgcaaacaggcctgttcagtccacaatttcccaactgacttcatcatggaactcttccacccactgtccatccacagaatgggtggagtgctgtcccacacaaacatctcctacccaccctaattccactgaattagtacttagcagagtacactttagaaaatgctgagatggagggcttgtagcctctctttagctcaagccagaaaaaatagtcttcacgagttccctagcactaaaaaaagcaaaccagactcgagcaaggcccatgtggccaacagc

SEQ ID NO: 934094 - DNA, 754 bp, Homo sapiens
caagaccctgagccaatgactaaacctctcggagcttttgtgtccccatctgtaaattgcagatgactgcctttccgggtcatcagaagagtaaacatggttccaggctcccattttgagttacacagacacaaattggaatttttaataaactagaaaggaaatataaaatcaagtttcaacactctttgggtaagagcttataataatataaatatcaaactatttctgggttagttgagagaagtatagattgtgagtcgtttggtgttgatgacttaggaaaatcagcaggatgaatcttcattcaagttagactctatttcccaaagtaggtttggtgaaacacttgtagcaagggctctatagctaaacaaacagtaggagcacagcctatgatagccctctcttagaaagtcacaatgcacattggtatgataaaggtcctgagaattcctgccgcaaacaggcctgttcagtccacaatttcccaactgacttcatcatggaactcttccacccactgtccatccacagaatgggtggagtgctgtcccayacaaacatctcctacccaccctaattccactgaattagtacttagcagagtacactttagaaaatgctgagatggagggcttgtagcctctctttagctcaagccagaaaaaatagtcttcacgagttccctagcactaaaaaaagcaaaccagactcgagcaaggcccatgtggccaacagcagacctcactgt

SEQ ID NO: 934095 - DNA, 758 bp, Homo sapiens
ttacctaagcaagcctgggcaatggcgggcgcccctcccccagccttgctgctgccttgcagtttgatctcagactgctgtgctagcaatcagtgagactccgtgggcgtaggaccctccgagccaggtgcgggatataatctggtggtgcgccgttttttaagmtggtcggaaaagcacagtattcgggtgggagtgacccgattttccaggtgccatctgtcacccctttctttgactaggaaagggaactccctgaccccttgtgcttcccgagtgaggcaatgcctcaccctgcttcagcttgcgcacggtgcgctgcacccactgtcctgcgcccactgtctggcactccctagtgagatgaacccggtacctcagatggaaatgcagaaatcacccgtcttctgcgtcggtcacgctgggagctgtagaccagagctgttcctttctgcctgattctaaaaaaagaacctagaagtggcttcaggctcacttactgttttatgcttttcttttgtcctatttctggttcttagagataaccatattatttttgatcacagtacatccttttggtttttctcgtcttatatttatacatcataactttgtgtttggaatagagaggtaatcaaagaatgaattcattacaccttctcaaacagatgtctctttctagaagtatttgtacttaatagagaccatttaagaataaatgcctccaataatataaaataatcataacagtgtgtctt

SEQ ID NO: 934096 - DNA, 554 bp, Homo sapiens
attcaaattccaactgctggggtgggcaactttcctcttgctagggctagtttaaatgctccctacatgagtgggcatcaactgaatttgtctagttttgctttctgctataataaaggcagcactgagttcaatgtctcacagttgctggctctctctctcccaagaccacagaaatgctctctgcacctcactactgctggggatgggaggaggtcacatcagcaattcaagactgttttgcttacctctttcagtgcctttttcagtgatatgaagttaaaatcagstatcatgagtgcctacctgatttttggttcttcgaaggtggcttttttgtgaagatagttcttaatttggtgtcctctgagggtgggatgatcagtgaatcccctttgttccaccattttcctccacccttcttttctttaatttctaaagcaaatgatttgtgtccttttcttccctctttctctaagagtgcaattcatcgattataactgtattcaactttttggaatcttctttcctcttttatttttttctgcttacac

SEQ ID NO: 934097 - DNA, 632 bp, Homo sapiens
cccaggtgctctgtcccagggagatgggagttttatctataagcccctgacgggagctgctgcttttctctcagagttgccctgcccagtgaggaggaatctagagaggccgtctagctacattggtttgccaagctgcagtgggctctgcccagttcaaacttcgtggtggctttgtttacactgtgagggaaaaatctcctactcaagcctcagtaatggcggacgcccctccccccaccaagcttgagcatccctggtcaacttcagactgctgtgctgagtggaacttagcttgctggtctccgtgggggtgggatttgctgagctagaccacttggctccctggcttcagccccttttccaggggagtgaacagttctgtcttactggcattccaggcaccattagggtatgaataaaatctcctacagctagcttggtgtctgtccaaattgccacccagttttgtgcttgaaayccagggccctagtggtgtaggcacccgagggaatctgctggtctgcaggttgtgaagactgtgggaaaagcgtagtatctgggatggagtgcaccttttctcatggcacagtccttcacggcttcccttggctaaaggagggagttccctg

SEQ ID NO: 934098 - DNA, 536 bp, Homo sapiens
aaatcatgctgctataaagacacatgcacacgtatgtttattgtggcactattcacaatagcaaagacttggaaccaacccaaatgtccaacaaggatagactggattaagaaaatgtgggacatatacaccatggaatactatgcagccataaaaaatgaagagttcatgtcctttgtagggacatggatgaaattggaaatcatcattctcagtaaactatcgcaaggacaaaaaaccaaacaccacatgttctcactyatagatgggaattgaacagtgagaacacatggacacaggaagggggacatcacactctggggactattgtggggtggggggaggggggagggatagcattaggagataaaactaatgctaaatgatgagttaatgagggcagcacaccagcatggaacatgtatacatatgtaactaacctgcacattgtgcacatgtaccctaaaacttaaagtataataaaaaaaaaaaaaagaatgttgaatattcgtccccatgtcttctggcttgtagag

SEQ ID NO: 934099 - DNA, 540 bp, Homo sapiens
atctcccccactcccccaccttctggatccccatccatctcactgagagccagcactcaataaaaccttgcactcatcctttgagcctgcatgagatccgattctgggacactgggcaagaggtcaggatactgaaggctgtcacastggccctctgcccctgcgataagacagagggtccattgagctgattaacattcaagctgcctgtggactgcaaagctgaaagagctttgtaacgctggggctgtgggcacacacccctagacactactgcaagacagacagcccaaagcactctccatggactctgcacctgcctgtctgcatgctcgccctagtggtttcagcttaggggcaactaaacaggccagtcacactgctgtcaaacatcttgcaaggggaatcaggaaactctcccatttcactaggaaagtctcccttttgactatcataaagtcaaataattaaaagccttaattgtatctgtaaaattatttcactcctgccatataaaataacttagtaacaggagcgata

SEQ ID NO: 934100 - DNA, 561 bp, Homo sapiens
tcatatatattctggacataagtctcttgccagattgcaaacactgtctcccattttatgagttgtcttttcacttccctgatagtgttttttgaagcacaaaagtttttaatagttttctttctttcttttttttaagagatgcagtttcactatgttgtccaggctggtcttgaacttctgagctcaagcaatcctctcatctccctataatcccaatactttgggattataggtgtgagccaccatgcccagtcaaaaagcttttagttttgatgaagtccaattyatctattttttcttttgttgcttgttgtcatacctaacaaattattaccaaatctaaggtcacaagtatttacgactctgttttcttctaggaattttgtagttttagctcttaagtttaggcctttgatctatttaggattaatttttatatttggtgtgaggtaaatatatttatttattttattcttttgcatgtggttatgcagttgtcccagcactatttgttgaaaagactattcttccctcattgaacgtttttgcatcactgtt

SEQ ID NO: 934101 - DNA, 478 bp, Homo sapiens
tgttagctgtgggcttatcatatatgacctctattatgttgaggtaaattgtttctatacctaataagttgagagtttcatcataaaggatgttgaattttgtcaatgcatttctgcttctattgaaatgatcatacagtttttatttttatttttgttaacatcatgtatcacatgtattgatttgtgtatgaatttcttaaaattagttttttgcctctttctctcttcttctgttaccataatttgtaaattcatttgcttgatagtatygcatggcttctttattatgctttcttaattcttttaatttcttcttttgttttggttcctctaattggctaatttcaaataatctgtttttgatttgctgatttttttcttctgcgcgatcaagtctgttgttgaagctctctactgattttttttcattctgtcattatattcctcagctctaagattttgtttggttcttttc

SEQ ID NO: 934102 - DNA, 478 bp, Homo sapiens
tgttagctgtgggcttatcatatatgacctctattatgttgaggtaaattgtttctatacctaataagttgagagtttcatcataaaggatgttgaattttgtcaatgcatttctgcttctattgaaatgatcatacagtttttatttttatttttgttaacatcatgtatcacatgtattgatttgtgtatgaatttcttaaaattagttttttgcctctttctctcttcttctgttaccataatttgtaaattcatttgcttgatagtatcgcatggcttctttattatgmtttcttaattcttttaatttcttcttttgttttggttcctctaattggctaatttcaaataatctgtttttgatttgctgatttttttcttctgcgcgatcaagtctgttgttgaagctctctactgattttttttcattctgtcattatattcctcagctctaagattttgtttggttcttttc

SEQ ID NO: 934103 - DNA, 618 bp, Homo sapiens
tggctttgtagggttggcctcccaggctgctctcatgtgctggagttgaatgcctgtgggttttttgggagcaggatgcaagcggctaatggaactgtcattctagggtctgaaggatggtagccccctttctgaagctcccccaggcagtgcctcagggaggtctctgtatgggtcttccagcccaacatttctcctccatgctaccctagaagaggttctctgaaagggctccacccctgcagcaggcttcttcctggacacccaggcttttccacacatcctctgaaatctaggtggtagctcccaagcagccttcacttttgcattctgtgtgcctgctggcttaacaccatgtggaagctgccaaagcytatggcttgcaccctctgacacagaagcttgggctctatctggaatcctgtgggccaaggctggaaccagagcagcagagatgcaagaagcagtgtcctggggtcctgaagctgcacagggcagcagggcccttggcttttgcccatgaaaccattcttctttcctagacctctgggcctctgttgggaggggttaccatgaagatttcagaaatgctttagaggccttttcctcattgtcttg

SEQ ID NO: 934104 - DNA, 610 bp, Homo sapiens
caaaaacagttctttaaatttattcagtcagacaaaaataaaaaagaataacaaaacctctaagaaatatgagattatgtaaagagaccaattctacaactcagtggcatccctgaaagagagggaaagaaagcaagcaacttggaaaacacacttgaggatataawccatgcaaattttcctaagcttgctagagaggtcaacattcaaatctaggaaattcagagaacccctgtgagacaccatagaagacaaccatccccaagacaaatagtcatcaggttatccaaggttgacatgaaataaaaaatattaacagcagctagagaaaagaggcaggtcacctacaaagagaatcccatcaggataacagtggacctttcagcagaaaccctacaatccagaggggactatatacagcattcttaaaagaaattccaactaagactttcttatccagccaaactacacttcataagtgaaggagaaaaaagatctttttcaaacaagtaaatgctaagggaattcattaccacaaacctgccttacaagaaatccttaagggagtgctaaatatggaaattaaagactgttaccagccatcacaaaa

SEQ ID NO: 934105 - DNA, 560 bp, Homo sapiens
tattgctgatatggagaaagtttgagtggtctggatagaagatcaaaccagccataagattctcttaagccaaagtttaatccagagcaaggcccgaactcccttcaattctataaaagctgagagtggtgaggaagcttcagaagaaaagcttgaggctacgtaaattggttcatgaggtttaaggaacataagaagacaaagtgaagcagcaagtgctggtggagaagctgcagcaagttatccagaagatctagctgagattactgatgaaggtggctgcataaacaacagattttcaatgtagatgaaacactcttctattagaagaagakgctatctaggactttcatagctagagaggagaagtcaatgcctggcttaaaagcttcaaaggacaacctgactctcttgttaggggctgatgcagttggtgatttaagatgaagccaatgctcatttaccattctgaaagtcctagagctcttaagaattatgctcaatataatctgcctgtactctagaaatggaataacaaagcctagataagagtacatctg

SEQ ID NO: 934106 - DNA, 569 bp, Homo sapiens
caaattaattgagttatttctgacctcgaaagctacaacattaaatccagaatctctgcttcgtgggctcatatcaataagtttggcctgattcaactttgtgttctttccaccactattctacacccttgatttccattcccacacctattscctagatttctgcttgggtaaattgcaaaagccatgcagttattttggagtgtagcaaatcttttcatgagtctttttaggacttactgggactgagtccagttgtaggtctagaagcaaagcagcatggtatggatgggtcctgaggagaatcgcactgtcttgcatggaaaatcctccagcaaaggccattataggctcatcaggcacagaaggattaacctttacaggagtggagtggtagcttctactggcaaagaagacttgggtgaatttaaaggatagttgtcctctccttcatctggatctacacacatgtcacaatgtcaattttcaggatttcatcactttacaatcaatgcaaccactttaagagcagatacctgaagaggctggggattctatttccattgtaa

SEQ ID NO: 934107 - DNA, 620 bp, Homo sapiens
aacactggtgtctttctaagagaaaggagaggatgctgtgacagagacatggggaagaaggtcacaaagatggagggagaggttgaagttatgttgccccaagccaagaaacgccgatagccaccagaagctgaaaaaagcaagcaaggactttttcctagagcttttggaggaagccctgttgacaccttgattttggacttttggcctccagaactgtgcaagaataaatttctgttgttttaagccaycacatttgcaacaatttcttgtggtagccctaaaaaattctaattggtagaaaatgttaaaaccacagtttacattctctgatcttcttttaagataagaatcaaggccaggtgcggtgtctcatgcctgtaatcccagcactttgggagatgggcagatcacgacaaggtcaggagatcgagaccatcctggctaacacggtgaaaccctttctctactaacaatacaaaaaattagccgggcatggtggcgggcgcctgtagtcccagctactcaggaggctgaggcaggagaatggtgtgaacccaagaggtggagtttgcagtgagccgagatggcgccactgcgtgctagcctgggtgacagag

SEQ ID NO: 934108 - DNA, 620 bp, Homo sapiens
aacactggtgtctttctaagagaaaggagaggatgctgtgacagagacatggggaagaaggtcacaaagatggagggagaggttgaagttatgttgccccaagccaagaaacgccgatagccaccagaagctgaaaaaagcaagcaaggactttttcctagagcttttggaggaagccctgttgacaccttgattttggacttttggcctccagaactgtgcaagaataaatttctgttgttttaagccaccacatttgcaacaatttcttgtggtagccctaaaaaattctaattggtagaaaatgttaaaaccacagtttacattctctgatcttcttttaagataagaatcaaggccaggtgcggtgtctcatgcctgtaatcccagcactttgggagatgggcagatcacgacaaggtcaggagatcgagaccatcctggctaacacggtgaaacccyttctctactaacaatacaaaaaattagccgggcatggtggcgggcgcctgtagtcccagctactcaggaggctgaggcaggagaatggtgtgaacccaagaggtggagtttgcagtgagccgagatggcgccactgcgtgctagcctgggtgacagag

SEQ ID NO: 934109 - DNA, 590 bp, Homo sapiens
agattgctcacgttatgttcattgtcccatacaatccactcaacagctccccgaggtcagcattattattagctccattttatagattggaaattgagactcagacaggtgaagtcttttctcaaagttacatagctagtaagtgataccacttgtcaagaactgtgaaagcactgagattttattatgtttgtaaactaaaacattagcctgctacacgttcatggatgctggcaggagacatgaaacttcagagacaaagtacagtttattactaagatcaataacaatagccagagtatctgtaattttgtttcaggatcctgatctgtactccccacagggtaacccaaaggtgacacctgcacataccatggcacatgttacaagagacgaatctggagcttagggaaygcccatttttttttctcttaacaataagcatgcctgttgattgctccagaaaaagttactttctccatgttctaagcctataagcaaacctgccttttgcttcagagagagatgtaatctctatcttccaaggacatttaccttattaacatccttgaaaatagagtctaaggcac

SEQ ID NO: 934110 - DNA, 571 bp, Homo sapiens
tctttgacatatgattcacaaaccatatcattctcttttgtagtatacaattaaatggttttagtatagtttggtacaaaagtaattacagtttttgccatttagagtgaaactgtgaaactgattccattaagactccttttctttataaattacccagtctcaggtatatcttaatcagcagtgtgaaaacagactaawacagtctctaaagttggaaatactggactgaattaaatgataaagtatttatgtgaaatgttcagagtagacaaattacttttaatggcaaaaaccataattactcttgcaccaacctaatatattgacaaagttgtgcaaccatcaccattatctacttccaagacatttttgtcactacaaaaataaaccattaattggtagtcacttcccattccccacatccctcaccccttagcaatctgtaatctactttctatctgtatggatttgtctattctggacgtttcatataaatactttctcacttaattcagtccagtatttcccactttataggctgtattagtccattttcatactgctggtt

SEQ ID NO: 934111 - DNA, 598 bp, Homo sapiens
ccaggaggtggttacatacggcagaggtctggattgatcaccttgagaaactgggaggaggtagagaaatggaaaatatgtcaagagttactttttgccaaaaagaagtccaacttatattcaaaatgaatgccggggcaacatataggaagtcactacaataagacggctgacatgactatagaaatatcagacaaaataggccttaaggtgaaataattgactaggcatggtggctcatacctgtaattccagcactttgggaggctgaggtgggtggatcacttaagcccaggagttcaagaccagcctgagcaacatggtgagamccctctctacaaaaagtacaaaaattagccaggcacggtagcaggcacctgtagacctagctacttggaatgctgtgtgggagaatcgcttgagcccaggaggcaaatgttgcagtgagccaagattgtgccactgcactccagcctgggtgacagagtgagaccctgtctaaaaaaaaaagatgaaactttttatgagaaataaagggtcattttacaatggtgaaagagtgaattcatcaggaaggtataataattataaacatata

SEQ ID NO: 934112 - DNA, 573 bp, Homo sapiens
tacatctgcaaaattccttcacagcagcagccggattagtgttcaattgaataattgggagaaggtgtacaaatggctgcttcctctcttacctcctccagctttcacaagggaatatcccttatagtccaccctaatcagaaagatactagaaaggaactggggaatgtaatataacagatgaaaacattacattaataattcaagatattcccacaagaaaagcccaggcccagatggcctcattgttgaattcaaccaaacatttagaaaataaataataccaattctttacaaacttttccaggaagtagaggaggagaaagtagctcccagctcattctatgaggccaatctgtgagacatcataagaaaagacaactgtgggagttcagtcaggctggtaggaaaaaatttaagatkaagttaaaggatataaatacaaaccctcttggaaggcctggaggtttacataaagtgtttggctgaaggcagcaaatccacttaatagcttagggcatagatacataggaatgtagaggagtttatctaaagagcttgtttactcatgtg

SEQ ID NO: 934113 - DNA, 575 bp, Homo sapiens
agcctctaagtagcgtcaggatggggctggtcactggaaagatcaaggcaggattagatggttgtgactttcggccccaccctctcaccttggggaaggctgaaagttgagttgatcaccaaagaccagtaatttaatcaaacatgcttacatgaggaaacttttatacaaacccaaaagrgctgggtttgggtgagcttctgaagagcagaacacacggaggtttctggcgggtggtgcacctggagagggcatggaaacaccaagcctcgccacccccacttttctcacctatgcatctcttccatctggttgtttatttgtgtgccttgtaatattctttataataaacttgtaaatgtacgtatgtgttttcctgagttctgtgagccgctctagcaaattaatcgaacccgaggggggacagtggaagtctgatttatagccggtgggtcagaagttatggaagtctagacttgtgactggcatttgaagtgggggtagttttgtgggactgagccctcagcctgcgggagctgatgctatctctaggtagacagtgccagaattaaatt

SEQ ID NO: 934114 - DNA, 586 bp, Homo sapiens
aggacagacattgtatcccctgagcaatcattatgcctttttgctcagcagcatgtgctgcttgtgtgttccaacaccgattctcccacaccagccagtgtccgatgattcaattcaagtctgacaccaaacacctggagttagtgcagccctcacaggttaaagggtaaaatctccaagaagactgccccagttcagataccagtcacaagtggagtcccgcttctactttgctcactgcaaattcataagttcccacaacaactattaggtttgcgaatttgctagaatgactcacagaatggtgaracgtgcttattttccattaccattttattataaaggatatagatgaaaagcaagatggagaggttgtaggcagggtcaaggagggtcccaagcacaggaacttctgtctccacagagttggggtgccttgccctcctggtatatccatgagttcaccaatcaggaagctctctgagcctggtgttcagtttttatccatgctccatgacacaggcaagcttggttaaatcactgcccatgtgattaaatttggtgtctagccccctcccctccctgg

SEQ ID NO: 934115 - DNA, 563 bp, Homo sapiens
atcttaaaccctcaatttctcaatatgaattttggactgccacaaacattcaaaccgtagcattccgcccctgatcccccaaaattcatgaccttctcacatacgaatacattcattccattccaaaatcccccaaatttttgacttatttcagcaccaactcagaagtttgaagtccagagtctcatctaaatatcatttaaatcagatatggatgagactcaaggtatgatttatcctgagacaaattgctttccacctgtgaatctgtgaaatcaaacaagtttttgcttccaaaatgcaacggtaggacaggcatagaatagatgttcccatttcaaaagggrgaaataggaaggaagaaatggaaacaggtggcaagtaagtacaaatctcaccaaggcaaagaacattaaatcttgaggcttgagaatgatctttgactctatgtctgctttctggatatactggggtggaagttgggtccgcaaagctcagaacagtcctgccccctagctttgctgggcacagcccacacagcagctttcatggcattgcagtgg

SEQ ID NO: 934116 - DNA, 603 bp, Homo sapiens
agaaataggaaggaagaaatggaaacaggtggcaagtaagtacaaatctcaccaaggcaaagaacattaaatcttgaggcttgagaatgatctttgactctatgtctgctttctggatatactggggtggaagttgggtccgcaaagctcagaacagtcctgccccctagctttgctgggcacagcccacacagcagctttcatggcattgcagtggtactcctgcagctctcctgggctgaaattacatgctggtggctctgctggtccagggtcttggaagtagtcctgcccacacagctttactggatatttgccctagtggaagttcttttcggcatccccarccctatagctcccctgagcattgccccaatggggactctgcagtgaccctgagcctgaccccatggatctgctgggtgttaccttactaggggctttctgtgatagccctgcctgtgcctggaccctgaggcttttggggttatcctctgaaatctaggtggaggtagccaagcccccatagctcttgtactctgcatgcctgcagagttgtcactatgttccagcagggtggcccaagctgcacctgggcctact

SEQ ID NO: 934117 - DNA, 603 bp, Homo sapiens
agaaataggaaggaagaaatggaaacaggtggcaagtaagtacaaatctcaccaaggcaaagaacattaaatcttgaggcttgagaatgatctttgactctatgtctgctttctggatatactggggtggaagttgggtccgcaaagctcagaacagtcctgccccctagctttgctgggcacagcccacacagcagctttcatggcattgcagtggtactcctgcagctctcctgggctgaaattacatgctggtggctctgctggtccagggtcttggaagtagtcctgcccacacagctttactggatatttgccctagtggaagttcttttcggcatccccagccctatagctcccctgagcattgccccaatggggactctgcagtgaccctgagcctgaccccatggatctgctgggtgttaccytactaggggctttctgtgatagccctgcctgtgcctggaccctgaggcttttggggttatcctctgaaatctaggtggaggtagccaagcccccatagctcttgtactctgcatgcctgcagagttgtcactatgttccagcagggtggcccaagctgcacctgggcctact

SEQ ID NO: 934118 - DNA, 700 bp, Homo sapiens
gaaagataattttctgaagctgttgtgggccataattacactgcaattacacagcaatatccataaaagcagatgaggattctatgtgtccttttacctcattagaggttgcagaaatgatagatgcagcctatcctagtttgactactgccctctattggcaaaatcaatttttggcataatccaaaagatagaagcaataaaaacagagatagactgtgcttgtttgcttttgctttgtttcgttttcaaaccatagtagtatattgggtcaccagtttaacattatcaaatatttcaaaaactttttttttacaattacaatttaaaacatacttttaaaacctagctacttaaaattacttaaactagtgttatgtgaattggggcttttttacagcaccaaactacagagcactaatcttttcttcctcactggaaacctacttgatcatatccatcttttcagtacagaatcagttggatcttttccttgttcccagtatgaatcctcctctttgaagcaacastctccaagcaaattgagattttttttttttttttttcctcctgagatggagtctcactctgtcacccaggctggagtgcagtggcgcgatctcagctcactgcaacctccgcctcccgggttcaagcaattctcctgcctcagcctcctgagtagctgggactacaggtg

SEQ ID NO: 934119 - DNA, 604 bp, Homo sapiens
agctttagtgaggaagacaagtcacaagccaaataaggctgaaagctaggcctcttgtgccaaataatttgccaagttatgaatgcaaaggaaaagttattgaaggaaattaaacatgctactccagtgaacacacgaatgctaagaaagcaaaacagcctcattgttcatagggagtcagttttagtggtatggttagaagaccartccagccacaacattcccttaagccaaaagcctaatccagaacaagggcctagttctcttcaattctatgaaggctgaaagaagtgaggaagctacagaagaaaagtttgaaggtagcagaggttggcttgaggtttaaggaaagaagctgtctctgcaacataatggtgcagggtgaagcagcaagtgctgatggagaagctgcagcaagttctccagaagatctagctaaactcattgctgaaggtgtctacactcaacaacagattttcaacgtagacagaacagccttctattagaagaaggtgctatctaggactttcccacatagagaggagaagtccatgcctggcttcaaagcctcaaaggacagcctgactctcctgtgagaggcgaa

SEQ ID NO: 934120 - DNA, 604 bp, Homo sapiens
agctttagtgaggaagacaagtcacaagccaaataaggctgaaagctaggcctcttgtgccaaataatttgccaagttatgaatgcaaaggaaaagttattgaaggaaattaaacatgctactccagtgaacacacgaatgctaagaaagcaaaacagcctcattgttcatagggagtcagttttagtggtatggttagaagaccagtccagccacaacattcccttaagccaaaagcctaatccagaacaagggcctagttctcttcaattctatgaaggctgaaagaagtgaggaagctacagaagaaaagtttgaaggtagcagaggttggcttgaggtttaaggaaagaagctgtctctgcaacataatggtgcagggtgaagcagcaagtgctgatggagaagctgcagcaagttctccagaagatctagctaaactcrttgctgaaggtgtctacactcaacaacagattttcaacgtagacagaacagccttctattagaagaaggtgctatctaggactttcccacatagagaggagaagtccatgcctggcttcaaagcctcaaaggacagcctgactctcctgtgagaggcgaa

SEQ ID NO: 934121 - DNA, 599 bp, Homo sapiens
gtgtatatatatgtataaaatatatatttatataatatataaaatatataatataaagatttatataaatttttttatggcagcacaaaatttttttaattttatttttctattagttattggggtacaggtggtatttggttacatgagtaagttctttagtggtgatttgtaagatcctggtgcaaccgtcacccgatcagtatacactgcaccatatttgttktctgttatccctcgcccccctcccactcttcccctgaagtccccaaagtccattgtatcgttcttatacctttgcatcctcatagcttagctcccacatatcaatgaaaacatatgatgtttggttttccattagaataatactctcgaatctcatccaggtcgttgcaaatactgttaatttatttctttttatggctgaatcatctctagattacttatagataatacaatgtaaatgctgtgtaaataattcttatgctttatttgtattttttattgttgtattgttcttactgggcttttaaaaaatattttcagtctgcagttggttgaaccgatggatgcagaaaccatggatataaagggttggc

SEQ ID NO: 934122 - DNA, 588 bp, Homo sapiens
ggacaacagagtgagactccatctcaaagaaaaaaggaaaaaagatcagagagttgccctggggactctgtatccaggctcagaagcctgggtggctttctggaacagggctgtcctgtgaggtgagcatatggcctgagtgacaggctgggatggtggccagractgcagtattgacaaacagcaggagtaaagccgagagacctgagccctgcttcctcccatgtctcactcctgcctcccacttccattcccctgctgctctggtctctcgacagcttgcccgctacaccaaggaaggcttcctgcacttgggtgccctggggaccaccacactcctccctgacacccgctgcctggtggacaactccaagagtcggctgccccagctcctggactgcgacaaggtcaagagcagcctgtacaagcgctggaacttcatccaggtgagtgctgtatggacagagccagcacccagagtagctgcaagaggctgcagaccacagaggggaatcctgcttccccaggggtccccagcaaagagcgaccccgaacccaggtctccctgccccgggctgggcttgtgga

SEQ ID NO: 934123 - DNA, 692 bp, Homo sapiens
gaagtgggaggattgcttgagcctcaggtggttgaggctgcagggagctatgattgcacccttgcactgcagtctaggcaacagaccaggaccttgttgcaataataataataataataataataataataaatttttagaaacaattagttttgggacaagaagkctaaatggaaatttcatggatagatttaccaatatttttcttccttttttttttttttttttttttttgagacaggagtctcactctgttgccaggctggagtgcagtggcatgatctcggctcattacatcctccgcctcctgggttaaagctattctcctgcctcagcctctcgaatagctgggattacaggtgcgtgccacgacacccagctaatttttgtatttttggtagagacagggtttcaccatgttggctaggatggtcgctgtctcttgaccacgtgatctgcccatcttggcctcccaaagtgctgggattacaggcgtgagccaccacgcctggccccttgacaattttgactctcacccttgaagctactgtctgtagatatgcagaatgtcatggatgggaacttcttcaatggagacccatatgcaaccagtgtctgccttacaggaaacaaagtggtacccgtttcactattttctcatgaattcccttcccttttgaaaatctaaaagg

SEQ ID NO: 934124 - DNA, 692 bp, Homo sapiens
gaagtgggaggattgcttgagcctcaggtggttgaggctgcagggagctatgattgcacccttgcactgcagtctaggcaacagaccaggaccttgttgcaataataataataataataataataataataaatttttagaaacaattagttttgggacaagaagtctaaatggaaatttcatggatagatttaccaatatttttcttccttttttttttttttttttttttttgagacaggagtctcactctgttgccaggctggagtgcagtggcatgatctcggctcattacatcctccrcctcctgggttaaagctattctcctgcctcagcctctcgaatagctgggattacaggtgcgtgccacgacacccagctaatttttgtatttttggtagagacagggtttcaccatgttggctaggatggtcgctgtctcttgaccacgtgatctgcccatcttggcctcccaaagtgctgggattacaggcgtgagccaccacgcctggccccttgacaattttgactctcacccttgaagctactgtctgtagatatgcagaatgtcatggatgggaacttcttcaatggagacccatatgcaaccagtgtctgccttacaggaaacaaagtggtacccgtttcactattttctcatgaattcccttcccttttgaaaatctaaaagg

SEQ ID NO: 934125 - DNA, 659 bp, Homo sapiens
cagtggtccttttggtcttggtggtcaccgagctactgaccacttgacatccaatcatgtcctatgtagcatcttctttcttgtccaggatccaatccaacttcataccttgtacttatttgtcatatcactttaatatcatttaatctgaaataattccttcatttttcctttcacatcttgatatttttttttattattattattattattattattattattattattattatttgagacggagtttcactctgtcgcccaggctggagtgcagtggcacgatctcggctcactgcaagctcggcctcccgggttcacgccattctcccgcctcagcctccgaagtagctgggactacaggcgcccgccaccacgmctggctaaattttttgtattttttagcggagacggggtttcaccgtgttagccaggatggtcttgatttcctgacctcgtgatccgcccgcctcggcctcccgaagtgctgggattacaggcatgagccaccgcgcccggccacatcttgacatttttaaagggtagtccttcaatttgagttcatctcatgtttccttatgattacagtcaggtagttacttggggctagaatactgaataaataatgtgttcttctcatcaaatcacattagggtaca

SEQ ID NO: 934126 - DNA, 598 bp, Homo sapiens
attcgtcttcttagaattctctgctccctcttccagcctctccttccctcccctgaccccaccataccaacaagacctcattaatttgttaggctttctattccacattaaccttttatatacagctagaaatatttcaaaaactaacctggaaaatgatcctcaaacacaaacaatgctttgatgatgctcaactttcctttttaatagccagaggtttacaaaagatgaggcattggcagggaaatctattcattctcttcccattcctgggtgtcaccaacattagtaccacttcaactatcactcaaccaactattkcaactctctctttggcttctgcataatatcttcactatctccctataggctgaatcactttgttttcccagagaagtaccacctatcagtcagggtcccagcaaaaaggagatgactcgttcaaatagcataactgagaagaatttcaaaaagggactattttcaaaagtgtggacaaagttaaaggaaaccggctgggtgcggtggctcacacctgtaatcccagcactttgggaggccgagggtagtggatcacctgaggtcaggagtttgagac

SEQ ID NO: 934127 - DNA, 745 bp, Homo sapiens
gattatagcgtactacagcccggaactcctggctcaagtgatcctcctgcctcagcctcctgagtagctgggactatagagtcaggccagtgagcctgactcttttcttttttaaaagtacactttggccggggggcatggtgactcacacctgtaatcccagcactttgggacactaaggcgggaggattgcttgaggccaggagttggagaccagcctgggcaacatagtgagaccctatctttacaaaaaattaaaaaaattaaccaggtgtggtgtcacatgcctgtagtcccagctacttgggaggctggcttgagcataggaggttgaggctactgtsagtcttgattgtgtcacctcactctagcctgggagacagagcaagaccctgcctcaaaaaaaaagtacattctataaaattaaaaccaacttatttacccccatactcatagtagcattattcatagtagccaaaggtagaggcaaacaagtatccatccacagatgaattaataaacaatatgtgacacatgcatacaatggaatattagccttaaaaaggaaggaaatcttggcctggtatgggggctcatgcctgtaatcccaacagtttgggaggccaaggcatgaggatcacttgaggccaggagcttgagaccagcttggccaacatggagaaacccccccatctactaaaaatacaaaaatttgctgggcgcggtggcacatgcctataatccc

SEQ ID NO: 934128 - DNA, 702 bp, Homo sapiens
ttgtgcccacctagtttaagggcgggtctgcctttcccagccccctgactcaaatgttaatctcctttggcaacaccctcacatacacacccaggaacaatactttgcatccttcagtccaatagagttgacagtcaatattaaccatcacaagttcaccccttgtcaactttaacycatacacatcttctgaaattatacataatcttcaaataaagataataataaggtcataattgtgcctaagataataataaaagtattcttcatacaactggaaatgcaccaatcctgaacccaaatgcccttatataaaactaacacttagatgcttatatgaagtcaatataagttattcacacaataaaggaaaaaggaaatgaaatattcttagtacaagcttatatatgcacaaacatgtttttaacaaaaggaggaaatactcatgacaattacagtcctcgtttctgtagctggtcacatggtcatagctggtattgatgactgcctttttctattacccattctgtattctttttgccttcagaaagcatctcagcaggttttttcctggagtgacccaagccttcattcctgaagggtctgggccatttgtagtcctgcctgggttgggctgttatagtttcccattgaccttaatcacagggcatctcctgtattccatgcatattcttccttacc

SEQ ID NO: 934129 - DNA, 702 bp, Homo sapiens
ttgtgcccacctagtttaagggcgggtctgcctttcccagccccctgactcaaatgttaatctcctttggcaacaccctcacatacacacccaggaacaatactttgcatccttcagtccaatagagttgacagtcaatattaaccatcacaagttcaccccttgtcaactttaacccatacacatcttctgaaattatacataatcttcaaataaagataataataaggtcataattgtgcctaagataataataaaagtattcttcatacaactggaaatgcaccaatcctgaacccaaatgcycttatataaaactaacacttagatgcttatatgaagtcaatataagttattcacacaataaaggaaaaaggaaatgaaatattcttagtacaagcttatatatgcacaaacatgtttttaacaaaaggaggaaatactcatgacaattacagtcctcgtttctgtagctggtcacatggtcatagctggtattgatgactgcctttttctattacccattctgtattctttttgccttcagaaagcatctcagcaggttttttcctggagtgacccaagccttcattcctgaagggtctgggccatttgtagtcctgcctgggttgggctgttatagtttcccattgaccttaatcacagggcatctcctgtattccatgcatattcttccttacc

SEQ ID NO: 934130 - DNA, 694 bp, Homo sapiens
tctaacatagttgtgcccaagcatttacatattggaatgtgtgttattttattttatttatttatttttgagacggagcctcactctatcacccaggctggagtgcagtggcacaatctcggctcactgcaacctctgcctcccttgttcaagtgattctcctgcctcagcctcttgagtagctaggactataggtgtgtgccaccacatccggctaattttttgtatttttagtagggacagggtttcaccatgttgtccaggctgatctcgaactcctgacctcaagcaatccacctgcctcggcctcccaaaaatgacgggattacaggtgtgagccactgtgcccagcccatgttattttattatacttggcttcttcttcttcatattgtgttgatatagtggaggaaattatggatgttggaaggcaatatgataaaggggtgtgttatatattttattgtttttaattatttatwtttttgagatggagtctcgccctgtcgtccaggctggagtgcagtggcgcaatcttggctcactgcaacctctgtctcccgggttcaggcgattctcctgcctcagcccccaagtagctgggattacaggtgcccgccaccacgcctggctaatttttgtatttttagtagagttggggtttcaccaagttggccaggctgttctcaaactc

SEQ ID NO: 934131 - DNA, 465 bp, Homo sapiens
gtttcctgcggctgctgtaacaaattcccacaaatggttgcttaaaacaacagaaatttattctctcacagttctggaggccagaagtctgaaattggtatcaatgggttgcaattaagggctgtagggcagcggtcctcaacctttttgggaccaaggaccagttttgtgkaagacagtttttccatgggcgtgggggtaggggatagttttgggatgatccaagcgcattacatttattgtgcactttatttctattattattacatggtaatgtgtaatgagataattatacaattcaccatcatgtagaatcagtgtgaggcttcacttgtttttttgcaactagatggtcctatctgggggtgatgggagacagtgacagatcatcaagacttagggccttataaggaatgtgcagcctagatccttctcatgtgcagttctcaacagcattcttgcttc

SEQ ID NO: 934132 - DNA, 551 bp, Homo sapiens
atgtttataataggaaaaaactggggaaaagctgactggccattgatagaaaatggatacattgtagcttgtttatacaatggcatggcaaccatatactgcttataatgaatgaaacggaattctatgtagtaacatggatctatctaatagcacagtaagtcagggactggaacatccactaaaatatcactyagataaagtaactcacagacaacactctgtattgtgcaaagatgcatacatgtaattaaagtgaaaaacagagaaagataaactgactatactatttgtttctgggaagaaagaaattgaatggaactaaaaaggaaaatgagaagtatttcaaacttggcaatgttctcttattattttaaaaaaaggtcaaaaagaaaaacacttcaggccaggcactgtgcctcacgcctgtaatccttgcactttgggaggccaagttgggaggatcatgaggtcaggagttcgagaccagcctgatcaacatggtgaaaccccgtctctactaaaaatacaaaaattagccgggggtggtg

SEQ ID NO: 934133 - DNA, 550 bp, Homo sapiens
  misc_feature 76: n = A,T,C or G
ccagaaattgtgatgtttttattcatgctatttatttctctggatacttttccatcatatcctccatcattttttntaaatttctttaagttggtatttatgtttctctggttcctccttgagtagcttaataattgaccttctgaattctttttctggaaatgcagagatttcttcttggtttggatccattgctggtgggctcgtgtgatcttttgggggtgttaaagtaccttgctttgtcatattaccagaattgtttttttgattccttctcatttgggtagactatgttagagggaagatctagggctcaagggctgttcagatattttttgtcccacagggtgctcccatgatatagtgctctctctcttcttctagagctggggtttcttgccaaacttgccaaayttcagtgattgttttttctcttctgggtgtcaccatccagtggagctactgggctctggactgttgtttgtagttttgtttagtgtgctggttttttgttggttttcctccaaccaggaggtagcactttcaagag

SEQ ID NO: 934134 - DNA, 671 bp, Homo sapiens
aaacccactgtgaaatctgcatcacctgtgggatatgagaagcaagaaaaatcaatttaagcagaagttcatgctaactactatgctatgagtaataacattctttttaaaaaaagtattcacaggcaaaaattgtagtgcactacagcctggaactcctaggctcaagaaatcctcccacctcatactcccaagtagctgggactacagggttgtgccaccatgtcagctaacattcttttttcttgaatcaggagtcttgtgtcttctgctggcatctatgaacttgttagcttacaagtagggtaaacatctcagactcttcccagtttttgacactaataagcagactccaagaaggagatttgcatgtcccaaatcaaygggaaatgctcttggatcaacaccattgtggcaatgaggaaaagagagttgctgcaagacaagaagctattggatttcagtacagtcaaacaaaagcctcactcagttccgtggggagctctgaagccaggatggcctttcagagctgcccctagtggaactgagggccttgggcctctatactgtttgcatggacaaatctttgaatacaagcttcttccaggatgtgggcttgaccttgggtgagtcagccccttttagctgagggcaagcaaaggagatgagac

SEQ ID NO: 934135 - DNA, 470 bp, Homo sapiens
ttcctttgtcttaactttagataacctgatgtcaatgtgcctaggtgatgatctttttgtgcgatgaattgcccaggtgttctttgagcttcttatatttggatgtctaggtctctggcaaggcaaggaaagttttccttgattattcactcaaatatgttttccaaacttttagatttttattcttcctyaggaatgccaattattcttaggtttagtcatctaacacaatcccagacttcttggaagttttcttctttgttttcgtattcttttttgtctttgttggatggggttaatttgaagaccttgtctttgagctctgaggttttttcttctgtttgtttgattctattgctgagactttccagagcattttgcatttctgtaagtgcgtccattgtttcctgaagttttgattgtttttatttatgctatctatttcattgactatttctcccttcacttgt

SEQ ID NO: 934136 - DNA, 534 bp, Homo sapiens
ggaaagtggcactgagtatggggaccaggaaaggccaccggggaagaccattccagatggaaatatttctgggggaattctctgacatggggacaaaaatggggcatgtgagaaacagccaggaagtctctgcagcctgggcacattgggcagggtatgaatgaaagtaaacagagacagagaagaaaccagggaccagttcattccggctacacaggccatggcaaggacttcagattttgttctaagtgggatagaaagctactggaagtctataagcaggasagtgacatataggatttaccttaaaaggatcactattacaggggaaagagactgtaggagaggactggaagtgggaaaacgatgaggttggtttaattttccaggtaaaagatgatggggacatgggctagtggggtggggacggaagaggtgagaaatcgttggatttagagtctatttttaaaataattcaggatttgtcaataggttggatatggtgtgcaagagaaagaaaagagtcaaggacgc

SEQ ID NO: 934137 - DNA, 522 bp, Homo sapiens
atttaatttttacgtttctacggaatgggcaaaatgttgatgttgttgaacttagatgatggatgcactgttctttttacttttatgtttgttaaacaatatccataatgaaattaaataacacccacagcatgtcagggcgatgtgaccgtatgtcccactttcctaagcagtcacaacttcacataaaaatggtctaacttaayatataggtaaatgtgatttacttttcaaagtgtcattgttcatatgactaattcggtgattagaaaaatattttgttaggccttgtcatctctacttttattcagaatgtgatcatggtttctatgggccaaattattgtcccaaagagaaactcttgactctgcaaaaccattgcatgtcaccatctgggaattctgtcatcaaattgtctaactttgtcatgaggattcttggtcaggagcaggactcatttctgtattttcttgccccttcctacagatccattggaggaaatagcagaaagttctccccaga

SEQ ID NO: 934138 - DNA, 625 bp, Homo sapiens
atctgggggctgctggctccttagagggacttgcctctaaaagtgaagaccagagaggtaaaggacaagggacatggctgtgtgacgccgtgcatgtgattcccaccatgtgctggtaacacggatgagagatgctaccatttatgctggcgtggttcttggtttaggtgtgctggcccatgtcatcgtcctaagcaccccggctgcaggcaccagtctctgccttacagtcgtgttgatggaggtgtcagtagattatgtggcctgcccaggttcacatgggacctgcatagtagagcaaaagtcagtgccctgaggtgtggactcagtgtctccatcctctttggagtcacacaggtgaggactgcagtcccgactcaggtctggggtggcctgggcgaaggagcacacaccctgcagatgttggtcctggcttcaggtctgagtgtgctgtgggttgcctgagtgaygcaagtgggtaaagggcagcgtctctgtgaatttctcttcactccatctgtgagaaggaaaccctatcccagtgcctggcccggggaaggtgtgaagaaacgctcgttcacatccacctttcatgtactaggtgtgtgactgagcaaacagctgt

SEQ ID NO: 934139 - DNA, 651 bp, Homo sapiens
gaaggccacgcaagaagttctgataaggccgggcgcggtggcgcacgcctgtaatcccagcactttgcaaggccaaggcaggtgatcacccgaggtcaggagtttgagaccagcctgaccaatatggtgaaaccctatctccactaaaaatacaaaaattaccrgatgtggtggcgtgtgcctgcagtcccagctactcgggaagctgaggtgggagaatcgcttgaacctgggaggtggaggttgcagtgagccaagatcgcaccactgcactccagcttgggcaagcgagctagacactgtctcaacaacaacaacaacaaaactttcaattttgttttaagaggcatggaaagccttaagaagtttttgaccaggggtcagatgagactgatcccatttttaaaagatcgctctggctgctgggtggaatatggcagtagggggcaaagatgaacaccagcagagaacggaaggaggctgcaacccaccgagcaaccttgaaaatagcacagcctctttctcagtcctagttttctcagattcaagcaagagaattggtctggatgatctctaagacagtgttctcaaccaggggagattttgtcctccagggtccatatggcaatgtctgaggacatgctggtgtca

SEQ ID NO: 934140 - DNA, 779 bp, Homo sapiens
agagcatcagttgcttgctaatttggggcattttagaaactattctggagccatctctattgtcctttatggcttggccaggatttaaaatacactaacagcacttctattatctcttgctcattttcaggatgtcttgggtatttttaaggcttctattatgactgcactgcctcatagcaatgactcctcagtttcttggagagttttaccttcccttgatctgatctttggtttttttttttattctttattttatttacagttatcttttctgacatttcaacaacttcacatatgttaagaagaaaaatcaagtaactagtagtaaaatctgtaaattcatgataacaaaagtatttgtatacatatacagaatataaattgcatagatgcaatataaattgcataccactgtgactatacatgactaagaaaccaaatacatgcttcattgctacatacccttgttttaccttactttcctcatccatagactgggccttttttttttttttttgagacagagtcttgytctgtcaccccggctggagtgcaatggcgcaatcttggctcactgcaacctccacctcccgggttcaagtgattctcctgcctcaacctcccgagtagctgggattacaggcgtgcaccaccacacccggctaatttttgtatttttagtagaaacggggtttcaccatgttggtcaagctggtctcgaactcctgatcttgtgatccacccgccttggcctcccaaagtgctgggattacagg

SEQ ID NO: 934141 - DNA, 857 bp, Homo sapiens
ttattaatatggtgattttacattgattggtttttaaaagttgagtcaaccttgcattcctagtataaacctcacttgggcatgatttttatccttttctttttattaatattgctacatttggtctgctaatattttgttaaagatttttatgtttcttagtacatattttctttttctataaaatctttgtttttattaggaatcaggtatcaggattatgctggtcacgtacatgagttggaaagtgttttctcttattttcagaaagattttgtgtacaattggtgttattacttgcttaaatgtttgtgggaaaattttttattatgaattcaatttcattaatagaatcattttgcatcagttttgttaattgtgtttttcaatatgttttctcattttatctaagttgtcaaatttattggcataatgttattcatayctcttttttttaatgtttagtaaggtctgaagtgatagtttctcttttgttcttttccttttttttttttttttttggagatagaatcttgctgtttctcccaggctggagtgcagtggcacgatcttggctcactgcaacctccgcctcccgggttcaggcaattctcctgctgcagccttccatgtagtcgcgattacagacacgaggtaccacgcctgactaatttttgtgtttttagtagagacaggatttcaccatgtaggccaggctggtctcgaactcctgacctcaggtgatccgcctgcttcggcctcccaaagtgctgggattacaggtgtgagccaccactctggcctctcttttattcttgatattagtaatttatgttttctctctctcatcagtctag

SEQ ID NO: 934142 - DNA, 581 bp, Homo sapiens
gtgtgagatggtatctcgttgtggttttgattttcatttcttgaattatcagtgatgttgagcttttttttatgtttgttggccgcatgaatatcttcttttaagaagtgtctgttcatgtcctttgcccactttgtaatggagctgtttgtttttttcttatacgtttgtttaagttccttgtagactctgaatattagacctttgtcagatggatagattgcaaaaattttctcccactctgtaggttgtctgttcactctgatgatagtttcttttgcygtgcagaagctctttagtttaattagatcccatttgtcaatttttgctttcatttaattgcatttggcatttttgtcatgaaatctttgcctgtgcctatgtcccaaatggtattgcctagattttcttctaggatttttatagtcttgggttttgcacgtaagtctttaatccatcttgagttaatttttgtatatagtgtaaggaagggatccagtttcaattttctgcatatggctagccaattctgccagcaccacttactgaatagggaatcctttccccattgcttgtttttg

SEQ ID NO: 934143 - DNA, 577 bp, Homo sapiens
gtatgtggtcttatttctgggttctctattctgttccattggtctatgtgtctgttcttgtaccagtaccatgctgttttggttactggagacttgtagtgtagtttgaagtcaggtagtgtgatgcctccagctttgttctttttgcttaggattgtcttcactattcaggctctttttttttaggtccatatggattttaaaatagttttcttctaattmtgtgaagaatgtcaatggtagtttaatggggatagcattgaatctataaattgctttgggcagtatggccattttcaccatattgattcttcctatccatgaacatggaatgtttttccatttgtttgtgtcctctctgatttctttgagcagtggtttgtagttctccttgaagagatccttcacttcccttgttagctgtattcctaggtattttattttttttgtcaaaagtgcccttaatctttcagagttcatactaaaccgtttctggatgaagtgacataatggttgggatttgctttaagacagtatggaagagggtagaatgagtgatgaaataagcttggctatg

SEQ ID NO: 934144 - DNA, 642 bp, Homo sapiens
attagcttgattgtggtgattaattcacaatgtatacctatatcaaaacatcaagtggtacaccttaagtatatatcatgtacatttgtcaattgtatctcaataaacctggagggaaaaagacacactttagtccaagtaaaattaatctgctatccagtgattctgattgagaacttgagaatgtaatgagtcaatgggaagacaatttctgatactctatagaagtgttcttttccccagctcagtgtgagttctgctgtagactcaggcccacatttagagaatttctcagatttctatgggaacaagtcagtatattgttttccctttaatctgttgtagcccaaaacttttataagacataatagaaataaattactagaacaaagaaatgaaaagacataaggaatacaagccctgctattcatttgkttttgtttttgattttttagattcaacagccataaattccactggtaagtcatactcaattttctaagggttcactttcaattcttgtgtttatttccttgcaagctgaccacagagtcctgacatctcaaaaataaagagcccttcatgtcacagaccctcccgaatataaattctttaaaggaccctgagtggccaggctggcag

SEQ ID NO: 934145 - DNA, 588 bp, Homo sapiens
tgactgacattttcaaagaaccacaggctattgtgttaagaggaagcaatagagaggattgaggctgggaagctaatggcaataatgagatgagacatgagggtgccttagatggggaacagtggaggtgataagaagtgattagattctgagcatatttagctggtacagccaaaggatttgcagatggattggaatgcaggcaatgaaaaatgtggagtagagaggyctaataaaggggaaggatgaatttgccattactgtgctggattcctgaagaagttttctgactggtctcctggattccatgttcagtcttctataatccattgtcaacagagtagctggagtgaacctttcaaaactgaaatgagatgatgttactcctctgcccagtgtcccatcccaaatatttacaatggcctacagagtcctaaataacctgactccctgcgacctttctgttcacatctcctaattcactctgttccagctgtgttcctctctggccttactgtttctacaaatcaccctacaggattctaactcaaggcctttgcacttatgttccttgatatgcatggctcc

SEQ ID NO: 934146 - DNA, 585 bp, Homo sapiens
atttaatgtagactctttaaaccaagacatattgcactgaacaactgaacttcagggacacaataattatttagatataaagacaggcttctgtttcctgctgggaaggataaggggggttagggaaagatgatccaggatcgcaaagagacaggaggctgcagaaatagacagtatgagaacacatgtttatctgaggcagacacaactcaatccagtaagaacaatttagctagaatagttaacagttgatgkaggtaaatgtgggttgctaagagagtgggggaatccatggagctgaaaatgcaaggggaatttgcaccctcttgacaacttttgttacatgggcccaacttgttgagagtactgaagagttgcttttcatggtgtagtttagggatgataaaagtcttcactgggacccttccaaatttcactatatggaataagagatttaatttgtagaagggcaatataatctgccactcttagtgcactggtaaaacccattactgctatggaaggggagagaaaaaaaaaatctttagttctgaggaagaagcagaaatgactgccggccccaga

SEQ ID NO: 934147 - DNA, 585 bp, Homo sapiens
atttaatgtagactctttaaaccaagacatattgcactgaacaactgaacttcagggacacaataattatttagatataaagacaggcttctgtttcctgctgggaaggataaggggggttagggaaagatgatccaggatcgcaaagagacaggaggctgcagaaatagacagtatgagaacacatgtttatctgaggcagacacaactcaatccagtaagaacaatttagctagaatagttaacagttgatggaggtaaatgtgggttgctaagagagtgggggaatccatggagctgaaaatgcaaggggaatttgcaccctcttgmcaacttttgttacatgggcccaacttgttgagagtactgaagagttgcttttcatggtgtagtttagggatgataaaagtcttcactgggacccttccaaatttcactatatggaataagagatttaatttgtagaagggcaatataatctgccactcttagtgcactggtaaaacccattactgctatggaaggggagagaaaaaaaaaatctttagttctgaggaagaagcagaaatgactgccggccccaga

SEQ ID NO: 934148 - DNA, 630 bp, Homo sapiens
cctgaccactgtgggcacatgtcattaggacttcctgagattgtgtcacggttgtgtccttaacctggtcaaagtagactttctaaattgactgagacctgtcacagatattttgggctaacatcgccaatctccttaatctggggttcccctgagtaccttccatgggccatagaacactgggctgggtgggcttaccccacatactctcaaggcacatcaaacccaagagccttcaggttctgctcatgctgactcctgctttcagaaatctttaggccagaagaggtgctggtctctgtgttttgtgtgagcccacactctgagggccatgtccaataactcccttcccttgctctgctttgagagggctttggctccactgcaggttctacactgtgggatgagctcgcagcctctgtccttgcaggtggcaccagcctttccaggtgattccagtagactccccttycccttggcttagggaagaggaagaactttcatgggaagggataacagtataacagtttacacctcaaacactgcactctccccagggataacccctttccttccccaccccgtcatacacagatgtgaggcaaaggggatggggtgggggcgggggaa

SEQ ID NO: 934149 - DNA, 628 bp, Homo sapiens
gattggtaggatcaatactgtaaaaatgaccgtgctttattagcagtgtgagattggacaaatgcagtaaattggtactgggtgttggggtgctgctgtaaagatacccaaaaatgtggacgcaactttggaactgggtaatcagcagaggtggaaacagtttggagggctcaaaagaagacagaaagatgtgggaaagtttggaacgtcctggagacttgttgaatggctttgaccacaatgctgatagtgatgtgtacaatgaagttcaggctgaggtgatctcagatggagatgaggaacttgttgggaactggaataaaagtgactcttgctatgttttagcaaagacactggtgacattttacccckgccctaaagatctgaggaactttgaacttcagagagatgatttagggtacctggtggaagaaatttctaagcagcaaagcattcaagatgcaacctgcatgctgtttaaagcatttggttttatgtattcacaaagatatggtttggaattggaacatatgttgaaaagggcagcagagcataaaagttccaaaaatttgcagcctgaggatgcaatagaaaagaaaaacccattttctgaggagaaattccgttc

SEQ ID NO: 934150 - DNA, 607 bp, Homo sapiens
  misc_feature 594: n = A,T,C or G
caaatataaagcaggcagaaaaacatgaagaggagagatgggcctagcctcccagtctacagactgatatccttgatgaacacagatgctaaaatccttaacaaaatactggttaacctaattcaacaatgtatcagaaaaatagtccaccatgatcaagtgggtttcataccagggatacagggatggtttaacatactcaagtcaataaatgtcatacaccacaaaaacagaattaaaaacaaaaatcacgtgatcatctcaatagatgcagaaaaagcatttgaaaaaatccagcatccctttatgattaaaactcacagcaaaatcagcatacaaggcacatacctcaatgaaataaaaatcatctatgacaaacccacagccaacagaatactgaatggggaaatgttgaaataattccctccagaactggaacaagacaaggatgcscactctcagacttctcttcaatcatagtactggaaatcctagccagagcaatcagacaagagaaagaaataaaggcatccaaattcgtaaggagaagtcaaactgtcactgtttgctcacaatatgattgttacctcaganatcctgaagcctc

SEQ ID NO: 934151 - DNA, 505 bp, Homo sapiens
gactcttgtcatgttttagcacaaagactgttggcattttgtccctgtcctagagatttgtggaactttgaacttgagagagatgttttaaggtatctggcagaagaaatttctaagcagcaaagtattcaaaagatgatttcrgtgctgttaaaggcattcagttttaaaagtgaaacagagcataaaagtttggaaaatttgcagcctggctagtgatagaaacgaaaaacccattttctgagaagaaattcaggtctgctgcctgtatttgcatacgtaatgaggagccaaatgttaatccccaagacaacggggaaaatatctccagggcatgtcagaggtattcatggcagcccctcccatcacaggcctggaggcctaggaggaaaacatggttttgtcggtcaggcccagggtccctgtgtgcagcctagggactttgtgccctgcatctcagccactccagccatggctgaaagaggccaacacagaactgaagtca

SEQ ID NO: 934152 - DNA, 718 bp, Homo sapiens
catggcagcccctcccatcacaggcctggaggcctaggaggaaaacatggttttgtcggtcaggcccagggtccctgtgtgcagcctagggactttgtgccctgcatctcagccactccagccatggctgaaagaggccaacacagaactgaagtcatggcttcagagggtgtaagccccaagccttggcatcttccatgtggtattgagcctgcaagggcacagaagtcaagaattggggtttgtggacctctgcctagattttagaagatgtatggaaatgcctggatgcccaggcagaagtctgctgcaggggtggtgccctcatggagaacttctgctagggcagtgcaagagatgtggggtcagagcccccatacatagtccctactgggacactgctttgtggagctgtgaaaagagggccactgttctccagaccccagaatgctagatctactgacagcttgcaccatgcacctgtaaaagccacagacamtcaatgccagcccatgaaagcagccaggagggaggctataccctgcaaagccacaagggcagagctgcccaagaccatgggaacccacttcttgcatcagcatgacctatatgtgagacatggagtcaaaggagatcattttggagctttaagatttgattgccccactggatttcagacttgcctgggtcctgtaacccctttgttttggccaatttt

SEQ ID NO: 934153 - DNA, 494 bp, Homo sapiens
atttctccccagaaaatggggagaaattttctactacatcatcaggctacaaactttttaaacttttatgctttgcttcctcttgaacacttagaacacttagaaatttcttccaccagatgacctaaattatctctctcaagttcaaagttccacaaawctctagggcaggggaaaaatgctgccagtctctttgctaaaacataagaagagtcacctttgttccagttcccaagaagttcctcatctccgtctgagaccaccttaacctggacttcattgttcatatcactatcagtgttttggtcaaagccagtccacaagtctctaggaagttccaaactttcccacatcttcctgtcttctgaactttccaagtatctaggaagttccaaactttcccatattttcctatctttttctgattcctccaaattgtccaaccttcatctcttacctggttctaaagttgcttccacatttttgggtatctt

SEQ ID NO: 934154 - DNA, 598 bp, Homo sapiens
tcacacttctcctgcctcagcctctggagtagctgggactataggcgcccgccaccatacccggctaattttttttgtatttttagtagagaaggggtttcaccctgttagccaggatggtctcaatctcctgacctcgtgatccgccagcctcggcctcccaaagtgctgagattacaggcatgagccaccacgcctggccggatattttccttttcttaggggaagcagttcatgtagggaggctggagctccaaggaacaactaatggactaagaacttaaagcagatgggctctagcgcagtggctcccaaatgtcagtccttcttagactgacctttcacagcagcctatgaaagcyggttctatgggtgagacattcaccaacaatactctccagtcctctctaatcttctgttcttaactagtcaatcccctaccatggattaatccaaccatccattttctcatgagtgtggtcaacaaatatcctggtaagtactgattggtttaattactgatatataattacagccttggttggcctttaaattttatttatttattttttgagacagagtttcgtgctgttgccca

SEQ ID NO: 934155 - DNA, 750 bp, Homo sapiens
aagaacttgcttatagactgagaatggaagaggccggcacctaggaagaggcacagttgacggcgaagccaccagggatggccacagtgcatgcatctgtgtccatgtgtgctcatgtgtgtgcrcacacacatcctggaagcctcggtttcaggcgtcttctctgtgagcagagaccctgtggggatggatgcatgctattatagattcataaacatctgctcgtgtggcctgggtagtcccttctagaaggaaagcccctttgcttctgtcactcctgacaaaaatacttgcgtacacagcattatgatacataccattctctagcaacttcggaatcagggtcctaatgccacacactgcagatgagctgatagagagcagtgatgagaatcagacctgcttgtgcactttccgaagactttcatccacattctctcacacgagccttagagcgacagcagcctgtgaggcaaacattgctctctgcattgctcatggatcaggacttgcccatcctcagagctaataaatggcaccaacgggacataaagtcaggactttcacgatgcccctccatcccatggacattttgacacaggatatggtttgtcacggcacctccctcacctccctttccagggcccttttcctctgcctctgggttctgtttcctgtgtccttggctcctcagggctctcctctcctatgtcagccacactgatctccactcccagatttctggtccgt

SEQ ID NO: 934156 - DNA, 725 bp, Homo sapiens
cttagggaggatgcctgaatctcccacagtgaggttttcaaaacaagacctggctaggcacggtggctcacgcctgtaatcacagcactttgggaggccgaggcgggcagatcacgaggtcaagagatcctggccaacatggtgaaaccccatctctactaaaaatacaaaaattagctggatatggtggcacgtgcctgtagtcccagctactcgggaggctgaggcaggagaatctcttgaaccygggaggcagaggttgcagtgagccaagattctgccactgcactccagcctggcggcagagtgagactccgtcttaaaaaaaacaaaaaccaaaaaaaccagacctacagcagccatgcacgggggtggaagggtgggacgatgagaaagaagggatgggccagtgagtgcggaagggcagcctgccttgtgaaagggtggggagagaggaggcccaggctggcaagtggtaacagcctaccacttaagagccaagaaggtgaggctggaggacttccccagatacagagctgctcccattccataccaaccccagccatgatggggctcagaggaggggtggttacagaaaagacgggggcttgggaggggtatctgaacccagaagggtaatctcatttccattcagatttggatacagaagccatctatatttctaatgtcctcaaggttgaatctgaatataatcaaatttggaa

SEQ ID NO: 934157 - DNA, 794 bp, Homo sapiens
cggttggggacttggagaactcttgtgtctagctaaaggattgtaaacgcaccaatcagcactctgtaaaaatgtaccaatcggcactctgtaaaatggaccaatcggtgctctgtaaaatggaccaatcagcactctgtaaaatggatcaatcagcaggatgtgggtgggggccaaataagggaataaaagctatccaccagagctggtaaaataaagctggctgctgctagggttttgtgtccaggctaacttatgagctgtaaccctcaccacgtggggctgcgaagtcagtgagaccaggatgccaccagggaggaacaaacagctctgcacatgccacctttaagagttgtaacactcattgtcaaggtctgcctcttcactcctgaagtcagtgagaccaggaacccgccagaaggaagaaactctggagacatctgaatattagaaggaacagactccggatacactatctttaagaactgtaacactcaccgtgagagtccatggcttcattmtttaagtcagcgagaccaagagcccaccagaaagaaaaaattccggacacagcaccactacactccagcctggagacagagtgagagtctgtatcaaaaacaataacaaaaattgatttctaaatgtttatagttttatgctttatatttagacagcttgagtaatttttttgtataaggtatgagattcaggtcaaggtttttctctgtttttttttaagagatgggaggtctttctatgttgctcaggttggacttgaactcatggactca

SEQ ID NO: 934158 - DNA, 595 bp, Homo sapiens; identical to SEQ ID NO: 933207

SEQ ID NO: 934159 - DNA, 590 bp, Homo sapiens
ttagtcgtacatacaaagaaaatagccattcttcaccgctctcgtagtgttttacttaaacattacttaaacatttccagaaagtggcctcaggagattcaaatatggaaccaagttgcagattgttccacatccaaaagatgtgctaaacaattcattggcagccttattgcctccagccagaccaccaggttgcccattacccaatatgaccgtggcaaccagatatgcaaacctgcatgccctacccctgatgtcaattcctgcgctttgcctcataaaaaaagccctamatgctctttctggggagccagccagagaatccttccatctctgccatctccctcgcactcgagcacaagccccaaaataaagacttgtctgggaaatcttcttggcctcttgttaatttcagttacatgggaagcctaagagcctgtggtctctgaaaaatctactcaaatctcaccttcccttcaaggcaacaccattcctaccactctcataaagtctttataaacctgagacctctcacctcctccatgtcccctgctccctagaatactttatacttctctcaaaacaattat

SEQ ID NO: 934160 - DNA, 646 bp, Homo sapiens
attcaatgcttcttactgtcaaccccgcccctggctgcccagtagtctctagggaacttataaaaattcccaggcacagattcctcccacctcagaatcttcaggggtgaacccttggcactgatattttttaaaagctctcagagtgattctcatgcccagcrgggatgcagcatcactggcctccagtctgtcagatgctgtgctaagcatttaacttggagtaccccatttaaggaagcaggtgcttatgggatgctgaaatgtggcccccacagatgtccacgtatgagccaccagcacctgtggatatgtgagcttgcatggtaaggactgtccagatgggattaagttaaggattttgagttgagagattatcctggattatccaggagagccctaaatataatcacaagtgtccttataagagggaggcagaagatttgactacagaagaggagtgtcagaataatgcatggtgaaaaaaactatcagccattgctggtttgcagatggaggaagggggcatgagccatggaaagcagatagcctccagaagctgggaaaggcaaggctgcagactctccagaaggaacccaggccttttggcaccttcatgttaagtcagtgaaactgacctcacact

SEQ ID NO: 934161 - DNA, 646 bp, Homo sapiens
attcaatgcttcttactgtcaaccccgcccctggctgcccagtagtctctagggaacttataaaaattcccaggcacagattcctcccacctcagaatcttcaggggtgaacccttggcactgatattttttaaaagctctcagagtgattctcatgcccagcagggatgcagcatcactggcctccagtctgtcagatgctgtgctaagcatttaacttggagtaccccatttaaggaagcaggtgcttatgggatgctgaaatgtggcccccacagatgtccacgtatgagccaccagcacctgtggatatgtgagcttgcatggtaaggactgtccagatgggattaagttaaggattttgagttgagagattatcctggattatccaggagagccctaaatataatcacaagygtccttataagagggaggcagaagatttgactacagaagaggagtgtcagaataatgcatggtgaaaaaaactatcagccattgctggtttgcagatggaggaagggggcatgagccatggaaagcagatagcctccagaagctgggaaaggcaaggctgcagactctccagaaggaacccaggccttttggcaccttcatgttaagtcagtgaaactgacctcacact

SEQ ID NO: 934162 - DNA, 584 bp, Homo sapiens
aggggacccaagaggagtgctgcggctgggactggagggcagcggcactcaccactgttggcttgttccaaacggtctgcaggcagtgcttcactgccccgcagtcggacgccgtcttcacattctggcaccacactgccgagcccctggtgcattctttcagtccaaggaccgggccggctagagctaaaatgaaaaccaacgtgaggaggtggcccattttgtagcaaaccaggtcgacctgacttatttccccagggctgagggcgactgtccttgagytggactctgctactcagcccctcaccaagctgtatgggacaccagccacacagatacacgcctgtcccggtcaagaagctggcttgtctgtcacagggctagaagggactcatgtatctggttcacgttcatcctctctagctacctttaaacagtatcagggagtatcagaactttaaccttaaaatgtttccataagtaataaggtatcatcataaccttaaaatgtttccataagtaacaaaagaaaccataggagaaaagactaacaaattcaaatacagggaagattttgacttctg

SEQ ID NO: 934163 - DNA, 610 bp, Homo sapiens
caggtaaaacacacaactgtgtctctccagggtggcagcaagagagaagggcatttgcgagggattccataaagctattgacttaagatgttagttacattctgagagcagagacaggcacaatggttaaatgactgccattttgaggaaatattgactctgaccagtggattccgtggcttgtttcacaatgcctggacacaatggcctgttacttgcacgtgtgtgtgcacatgcacgcacatacacaagcaatcagttaataattaaagccttgcttatgtgtccgcattgaaaaatgcttccggctttcatttcatgtcatactgtctcccacttcaccctcaaatgcatgctttgaaggaggattatttctattttgtatgctctggaaattaactgatagatgtgtgcatttctatcccccgcttctccatttgtgtccctccttaccttttattcttgtctgctctctgctcctcccycctgattttcaccaacttgtttctttgctttaaatctctccctcatctgaggctgcttgtcttccctgccccactgccccctccacttccctttctccttcttctgtattcctttctgactcctt

SEQ ID NO: 934164 - DNA, 732 bp, Homo sapiens
gattctttatccttgaaattaaaaactttttttttttttttgagacagagtctctctctgtcgcccaggctggagtgcagtggcgccatctcagctcacggctcactgcaagctccgccttccgggttcatgccattctcctgcctcagcctcccgagtagctgggactacaggcacccgccaccatgcctggctaattttttgtatttttagtagagacggggtttcaccgtgttagccaggatggtctcgatctcctgacctcgtgatccacccacctcggcctcccaaagtgctgggattacaggcgtgagccaccgcacccggccgaaattaaaaacttttaccaasatttctaggtgtttgtcttttctcattatttgttcctggaacttgctacgtctgtttgacttgcagatagttgttctcaactcagcaaagtttgcttcatcatttctgtgtgctcttttgtttccttcttatcagacagtatcaagtgttctggattcatgctccacgttttttcatgtttcctcttcattttcatgtcttcatggggtgctacaagggggttctgtcctcaggaatttgctggtggtattcctgctgcccagttagatccgacgtgttatcagctatttgtagaaagctgttatgatcctccctcactgttcctcatcctccaaaacacatactgttattacgggagccagagggatgcagttgaggagc

SEQ ID NO: 934165 - DNA, 741 bp, Homo sapiens
caagaacttcaaaacacctaagccacagcagtcaggcattccttcaggacttcctcccccaggatcttgcttcaagtgccagaaatctggccactgggccaaggaatgcccgcagcccgggagtcctcctaagccgtgtcccatctgtgcaggaccccactggaaattgaactgtccaactggcccaaggctctgactgacttcttcccagatcttctcagcttagcggctgaagactgacactgcstgatcacctcggaagcctcctggaccatcacagatgcttctggtaactcttactgcggaggataagtccaaccccttcttaatcaatatggaggctacccactccacattaccttcaagggcttgtttctcttgcctccataactgttgtgggtattgacggccagtcttctaaacctcttaaaattccccaaatctggtgccaacttggacaatattcttttatgcactcctttttagttatccccacctgcccagtccccttattaggctgagatattttaacaaaattatctgttttcctgactattcctaggctacagccatacctcattgctgcccttttccccagttcaaagcctccttcacatcctccccttgtatctccccaccttaacccacaagtatgggacacctctactccctccttgatgacgaatcatgcaccccttaccatcccattaaaacctaatcacccttaccctgctcaatgcc

SEQ ID NO: 934166 - DNA, 741 bp, Homo sapiens
caagaacttcaaaacacctaagccacagcagtcaggcattccttcaggacttcctcccccaggatcttgcttcaagtgccagaaatctggccactgggccaaggaatgcccgcagcccgggagtcctcctaagccgtgtcccatctgtgcaggaccccactggaaattgaactgtccaactggcccaaggctctgactgacttcttcccagatcttctcagcttagcggctgaagactgacactgcgtgatcacctcggaagcctcctggaccatcacagatgcttckggtaactcttactgcggaggataagtccaaccccttcttaatcaatatggaggctacccactccacattaccttcaagggcttgtttctcttgcctccataactgttgtgggtattgacggccagtcttctaaacctcttaaaattccccaaatctggtgccaacttggacaatattcttttatgcactcctttttagttatccccacctgcccagtccccttattaggctgagatattttaacaaaattatctgttttcctgactattcctaggctacagccatacctcattgctgcccttttccccagttcaaagcctccttcacatcctccccttgtatctccccaccttaacccacaagtatgggacacctctactccctccttgatgacgaatcatgcaccccttaccatcccattaaaacctaatcacccttaccctgctcaatgcc

SEQ ID NO: 934167 - DNA, 782 bp, Homo sapiens
cctaagtcctattagcaagccaaagaggtgtttctcaagaaagctgttatccacagaggatagcaaacttttgttcaaaaatcataagaaactgcaatgggattcaccgatagggaactgtcaaagactccaaagaacatctctatctgtgtatgacactgcaagatgtttgttggattgtatggaccaagtgtcagggtagctttcccagcagtctggacattttgcagagccttcttttgttctgggctctactttaaaactcaaataaggaatatgttgctgaccaaaaaaaaaaaaaaatccaaaaaaggccaactaggtgttgtgctctttttcggttgtagaagaggccaaatgtgacaactatccttaactttagaaggaacgtctcaacacrtttcacacctctgtacccttaaaaatatgtctataatacttgatatttcttgcttgctagttctaaccagaataatattatcaatataatgccttgataatattatttcttctttgcttattgtttcagaggcatgaaacccaaagttactggatggcagtgtaaactttgttttgtgatgttttgtggaaggcagaagtgattgtgtccctatggactaaattatgacatagggttggagaatttatattgctggcattaaaagctcaaaacaaactgatttctggcagtctttcataacaaggataaaggaaaagcatttgcctgaacaatagctgcatatcaggtaccagaggatgccttaatttgctcagacaatgaa

SEQ ID NO: 934168 - DNA, 638 bp, Homo sapiens
ctaggaagcagtcagcctccttgctccctgacactgcctttcccttcacccacctttggctggctctggctactaacatgggataacagctttgagatcccttgccacaggtgttggtgtcacccatgatctatcctcctgtatggccaaatcccctgcccccataggccacagatgccatggcccacgtggccggcttcactgtggctcatgacgtgagtgctcgtgactggctaacaagatgcaatgggaaacagtggctgctgggaaaaaccttcgacaccttctgccctctgggccctgccttggtgaccaaggacagtgtagcaggtaggttcctgatccctgcccccttrtacctaccattgcacagatgaacagccctccagggaggagcacgggttcaggtacatgtggcacctgccctccctggctgccctttcactgctgactccatacagggaaagtcttttatcctcagccacgagttctcccatgggcttccttcccaagccccctagagggaacacaactgcagaggatgtgaaactgcatgcgtgaagtaaattacaaagaacactgagctgatgggtggatcgggcttcctgcggctgccaccatctgaaataatctaagtt

SEQ ID NO: 934169 - DNA, 574 bp, Homo sapiens
aacatgagatttggagggaccatccaaactatatcacacggtaagacatgatgcatgtttatacactttattggacaatttgtttactgacagccaaaagcaccctcacaaatacaaaggctcagcactgtctggggagtctttccagcctcattttccaccactgctctttgatgcctctctgggtgaaccrtgtgttgctttctctttgctttggctgctaactgccaggcccctctagtgtcctcaaattggtgaactcctagtcatccttcaaagcccaactcaaattcccccacctctgcaaaggcttctgagctcccctaggcagaactcaaagccctgtcttgctgccttcaaatgtcttcactgtggaatttctcacatcattctccagccacttgtctgctggccagtctgctgcactgtgagctcttgggtgctgcagctctttctccatgatctgttatcccctagcattgcacctggtatgctgcaggtgctggtcaatgctgcatattgcattactgaaaatactgcttcctccaggcctcctgtaacccttggctctcct

SEQ ID NO: 934170 - DNA, 588 bp, Homo sapiens
  misc_feature 571, 572, 573, 574, 575, 576, 577, 578, 579, 580, 581, 582,583, 584, 585, 586, 587, 588: n = A,T,C or G
agctttttttcatatgtttgttggctgcataaatgttttcttttgagaagtgtctgttcatatccttcgcccactttttgatagggttttttttttcttataaatttgtttaagttccttgtatattctggatattagccctttgtcagacggatagattgccaaaattttctcccattctgtaggttgcctgttcgcactgatgatagtttcttttgctgtgcagaagctctttagtttaattagatcccatttgtcaattttggctgatactgtctcacaagtcattgatgttcttcttcattttgttttcagtcttacatatatgttttattttcaagttttaactgtttttcttctataaactctmtggttattcttttcatctattgtttgtttgttttttaattccagagactttatttttcatctccaaaattttgacttgccatcttttccataagttatgttttgtttctgtgtttgttttgagacagggtattcctctgttgcccaggttggagtgcagtggcaagatctttgctcagtgcaacctctgtctcccagactnnnnnnnnnnnnnnnnnn

SEQ ID NO: 934171 - DNA, 763 bp, Homo sapiens
atttctgtgccccattgctgaagcagatctctcccccataagttaacaagaatcagtatgtaagtactactccagtatgtgcttgaattccctttaagtttaagctggaccttctcagtgtaagtcccaccatgccatttggcaatgggctgtaaactcccgttgggaccttcctaggaggctccccaggatggagggatacagctttggtacagcataaatctactgccctgcctttagctgtggaggaggacaattgctgtacatttgtacagggatagactgtgccaggaacactctgtttggagtcagggatgtcctgtcctgaattgggaatgccccgttttgaatcagagcytggggctggcccctctgtctgtttcccggcaagggctgtctgctattatcaaactttgaatgacattgattagctcagtgttttcctttcttacatctaggacaggtacctggttcgctgctttttcctcctgagttttgccttttttggctctttgtacactcttcgtatgtcctatctctccacaattatagcaagatccagggaacactcatgtgttttttgttacccttagtccagccattgcctgagcaaggagactggccttataagtgccccccaatgccatcacaggttttaatgtattcacttaatgttttttcctcatttagatctgcctttcccttaataggtctaattgctgcctgacattatgtatttgcattttcataagcaagcagctga

SEQ ID NO: 934172 - DNA, 551 bp, Homo sapiens
agtgtatagaaatataattgaattctgtacatcaatctataattgtatcaaactgattcattctaagggtattattttagtgaattccttaggattttctatgtgcaagatcatgacacctatgaatacagatagtttgtcttctttctttccaatgtcggtccagttttttattattacccaagtgctctggctagaacctcaacttcaatagtgaatataagtatcaagagcagctatccttgtgtttttcctgatctttgagggaaagcattcctttatcaccatcaagtatgtttgttgytggtttttcatagataccttttatgaggttgaacaagctcttttctattctgaattatctgtgttctttaatcatacacattggtttaacatgttaaatgctttgttctctaccctttgagatcatgtattttttattctttattctattaatgtggcacattaaactgatttgtttttgtatgttaaacaaatcttgggataaatcccacctggaactaatgtataaatacttctcatatattgca

SEQ ID NO: 934173 - DNA, 540 bp, Homo sapiens
ttttttccttctaacttactgtatgtttgtacactttaacccagttctccttatcctcttcctcccaccactcatgattcccagtctctggtatctgtctttccctctctaccactatgtgatcaaattttttagcttccacatataagtggaaacatgtgacatttgtctkttttgcttggctgttttcacttaaaataatgacctctggttttatccatgttgctgcaaatgacatgacttcattctttttgtggctgaatagtgtttcattgtgtatatgtaccacatttcctttatccattcgtccgctgatgggcacttagtttgattccatatctttgctattgtgaatagtgctgcaataaacatgggggtgatatatatcagtatatcatattgatttcttttcctttgggtagatacccagtagagggattgcaggatccagtggtaattctaattttagttttttgagaaatcttacttctccatagtggctgtttaaattctcaccaacagtgggtaagaattcttttt

SEQ ID NO: 934174 - DNA, 583 bp, Homo sapiens
gtttgagattgtcatgatgatgttaaattatgttcagtcttctgagtgttttgttgattaatttgtgttactactcttttattaggatttatgttgtctggtgtattgtagcatctgtatttctgtcaccattgaaaatcagttagaaaacatcagtaacttattttgttcacttggaaaagctttccaagttaacattcctctacaattatcatggttaacagaagtaatagaaagagcatggactttagaatcagaagatgttagattgtacaacacttttctgtgttcatgaagaaaaaaatataataaaggcaaaaaataataataatacaaaacaacagaaaaagaaaaaagataattaaaaaacactttcacgtgtattattatttaaagtgtaaagtgcctattaaartggcaaaaatgtaaataagataaaatatatcattttagagtttttacttttggaattttttgcaaatgaaagcccttaattaatgtcttttatttttagttgcctgtgcccctggagtctgtaaaagagatgcttaattcagtcatgcaggaactcgaagactatagt

SEQ ID NO: 934175 - DNA, 815 bp, Homo sapiens
agcccattacaacatctgcaggcacaataacacagtgctcaggaaggagaaaacctttgcacagtttcatctatcatcatttcttgcatcaccctggctcaccaggtctttagtttgtctgtgtgccagtatatcactactgcacctggcatttgagaaagttaacacactaaggctatttataggctaaggaaatctcacatagtctatgtctctgccctgccacccccatcagagctgatgttggtgcctgctactggaagacttgaggataagtcacatcactggatcccctgcagatattccccagaacccacctaaagtgtggcagccccactggcacctagacccagaggagcagcaggattcacagtagtatggccctcaggarctgctactcctaggggaagagagagtgcaccccatggtgcaaaagaaaccagactgcaggccttgcgtttatgaactttttacttgtgtgaaatatctttcagcagaagcacaggtgcagtgctgggctcagtgggaaagtcttcagctctaccccaacagtcaggcagccctgctcatgaagggtcttggagaagaggactccttctcctctttgcaatccctctctacagggaagatcaacattcctgcagatgaaaagaggtgcctatctgatctgaatagctggaacactgggttaggggtatgactgggaagtagatcactttcccactggtctggaaggagagctgtggtggcttcctccattccccctgaaaagactgcagtgcatttcactgacagttgacccagctgactctgtc

SEQ ID NO: 934176 - DNA, 680 bp, Homo sapiens
aagtaaaatacacgggtttttttttttttttttttgagacggagtcttgctctgtcgcccaggctggagtgcagtggtgcaatctcggctcactgcaagctccgcctcccgggttcacgccattctcctgcctcagcctcccgagtagctgggactacaggcgcccgccaccacacccggctaaattttttgtatttttagtagagacgggctttcaccctgttagccaggatggtcttgatctcctgacctcacratccgcctgcctcagcctcccaaagtgctgggattacaggtgtgagccaccgcgcccggccaatacacggtgttataaaagaagccgattaaatcaaattactcttatgaaaataattacaatgtaaaattttgatagtgtaatagatgtgtttccttattaatgtccattgtttttcacaggaggcatgtgcctgctgcagagctccccaggattcatgggagtgctcctgctaaccccgagtcagggccagcgccatagctggtgcccaccacacgcttcgtataatgttccatcacctattgctgcagaacaaactggcccccaaactcagtgacttcaaacaactgttttattttgctcatgatttggtgggtcaggaatttggaaagatcttagctgggcaatttgtctaggatctaca

SEQ ID NO: 934177 - DNA, 664 bp, Homo sapiens
tagatagacggtggaaccagggcagtcacacagggccccacagttgtgttttaacgctctgtggttgctgccttgaaattcttaataacattatctttgaatatggattttgtgagtgaagtccaatgggacaatggagcatgcgtcaggaccttggagcttcagcttcacatggtcctgcctccctctacctgccctggagaggctctcaggagtctgctcccytactccctgtcattctccaccccagttcatttccccctctcctccctacaatgactgccatcctctgctcctggcgggagcatgggggtaacataaagaggatagagttaggtatctgcattctgacatctcaggatagggcatggtggcagcccctgagccctggtttgacagcaccactgcccatacctctgttgagcagcccatcagaggctgcatctaggtgggctgggtgggaggcgggggcagcctctcccctatcccacctagatcctgagcacatttcagccctgaggtttaaagatgcttggggatcacccatctcatgtggattgaggcagcactctcaatttccatagaccctagccccactgagtggtatgggttcatggctggcaggagcagaacctggtaactgactcagtaccaagcacgcatg

SEQ ID NO: 934178 - DNA, 664 bp, Homo sapiens
catagctggtattaatgactaccttcttcactacccgttctgtgttccctttatcttcagcaagcacctcagcaggttgtggtattttcctggtggagtgacccaaaccttcattcctgaagggtctgggtcacttgtagtccttcctggattgtgctgttgtagtttccggtagaccttaatcacagggcatggtagtatcacatggtaatactaagagacaccccaggctgggcgtggtggctcacgcctgtaatgacaccctaggccgaggcaggtggatcacgaggtcaggagatcgaggccatcctggctaacatggtgaaaccccgtctctactaaaaatacaagaaaattagccaggcgtggtggcggatgcctgtagtcccagctatgtgggaggctgaggcaggagaatggcgtgaacccgggaggcggagcttgcagtgagccgagatagcatcactgygctccagcctgggtgacggggcgagactccgtctcaagaagaaaaaaaaagagacaccctaatggatctcctctattccatgcatactcttccttacctccgctgtggagtagtagactgatttcatcttgatagtgcgggtcagtcaccccagcccacactgtaactcccttcttagcctgttgatttaaaggt

SEQ ID NO: 934179 - DNA, 634 bp, Homo sapiens
gaggctgaggcaggagaatggcgtgaacccgggaggcggagcttgcagtgagccgagatagcatcactgtgctccagcctgggtgacggggcgagactccgtctcaagaagaaaaaaaaagagacaccctaatggatctcctctattccatgcatactcttccttacctccgctgtggagtagtagactgatttcatcttgatagtgcgggtcagtcaccccagcccacactgtaactcccttcttagcctgttgatttaaaggtaggaggagcccaaagtgtccaggtggcaatcttaacttccagtttaatggaatcgtgtctcctggtggcagcrttcctccctctggaactaagacctctaggccagcagaacataatgtcacaggaacaggaagcaaaaattttgctagtggattactaggggtgatggtgagtggtgccacttccacttcaaccccttgattcctggatccgtgaattctggctatgggagaaacggtaccatatattggacgctgattcagagcatacatggtcttgtggagaactttaccccagccctgcagagtattgtcacctagttggagttgtaattgtgacttcaattacagtgaaggccattccaccatt

SEQ ID NO: 934180 - DNA, 578 bp, Homo sapiens
ccaccttcagccttatttaaatctttctgagattcacatgcacccttagcagaaaattgtatatcttttatcattagctttggtccaagaaaccccatccctttttcactaccttgtcttcatagccaattgttcatatctttttctcttcctaagctgcaaagttcacccaaaataaatggaaatcacaccagactctcagttttctactgagtttttcgtgtcattacagactgccttttctcctccaggttctttctggttcctgcccacgtccctgcagtasgggtggctgaggtgtgggagctcttcacccaggctctagcagatagcgtggattttggcaaggcgaggactcacagaggtgcctctgcgccttccagcaaggactcacccttcaatgtcgcacgttgttgtgaatgtgaagtgtctgttcacagatgtggggggaatagtccctagggtctggccatgtggtatccttgcttgtcagagtttaaagagacttgacagtaagatccaggttccaagccacacagcatttcttttttccttggggaaaataaaataatctcttt

SEQ ID NO: 934181 - DNA, 475 bp, Homo sapiens
cagggtgggctgggagtgaggggccatgtccaaccacagggctttcactgttgtcacggatatggggtttcccaaatgtggtggtgcccttcttccctggtgtggcaggcatgccccagagtctggaggacaagtwtatcaatggccaaaaaaaaaaaaaaaggccagtaatggtaatgggttttcctagctgttttgggaggaaaagaggcacgcatacctttacctttttggttcaggcccgaaagagcagaaatagcactttaaaattacttattttattttttagagataacactttgatggtggtgtattttcttgctgaaattacttggcaactctggttctatgcttttcaaagcaaatagtgtctaactaaattaaaactaaaaattaaaaaaaatgattctaatcttatacaaatgaaaatggagggatagaaagaaaacaaatgcagttcattctgtttgtgaaa

SEQ ID NO: 934182 - DNA, 770 bp, Homo sapiens
aaagtggccaacctacagctcaggccattgcttcagagggtgcaagcccccagccttggtggcttacacatggtgttgggcctctgggtgcacagaagtcaagaactgaggtttgggaacctccacttagatttcagaggctgtatggaaatacctgggtgtcctggcagacatttgctccaggggtggggccctcatagagaacctctgctagggcagtgtggaagggaaatatgggataggagccctcacacagagtacctactcgggcacttcctaatggagctatgagaagagggccaccatcctccagaccccagaatggtagatccactgacagcttgcaccatgcaccttgaaaagccacagatactcaacaccagcccatgaaagcagccaggaagggtgctctaccctgcaaagccacagaggcagagctgcccaaggctgcaggagcccacctcttacatcagcatgacctgaatgtgagacatggagtcaaaggagatcattttggaactttaaartttaatgactgcactatagatttcggactttcatggggcctgtatcctctttgttttggccaatttctcccatttggaatgggtgtatttacccaatgcctgtacccccttgtatctaggaagtaactaccttgcttttgatttgccttgtctcaggtgagactttggactgtggacttttgagttaatgcagaaatgagttaagactttgggggtctattgggaaggcatgattggttttga

SEQ ID NO: 934183 - DNA, 770 bp, Homo sapiens
aaagtggccaacctacagctcaggccattgcttcagagggtgcaagcccccagccttggtggcttacacatggtgttgggcctctgggtgcacagaagtcaagaactgaggtttgggaacctccacttagatttcagaggctgtatggaaatacctgggtgtcctggcagacatttgctccaggggtggggccctcatagagaacctctgctagggcagtgtggaagggaaatatgggataggagccctcacacagagtacctactcgggcacttcctaatggagctatgagaagagggccaccatcctccagaccccagaatggtagatccactgacagcttgcaccatgcaccttgaaaagccacagatactcaacaccagcccatgaaagcagccaggaagggtgctctaccctgcaaagccacagaggcagagctgcccaaggctgcaggagcccacctcttacatcagcatgacctgaatgtgagacatggagtcaaaggagatcattttggaactttaaagtttaatgactgcactatagatttcggacttkcatggggcctgtatcctctttgttttggccaatttctcccatttggaatgggtgtatttacccaatgcctgtacccccttgtatctaggaagtaactaccttgcttttgatttgccttgtctcaggtgagactttggactgtggacttttgagttaatgcagaaatgagttaagactttgggggtctattgggaaggcatgattggttttga

SEQ ID NO: 934184 - DNA, 622 bp, Homo sapiens
agggaggcacagagcggtccctggggcactggcctacctgaccacagcgtccaaagctcgtggcctctgggctttccactaggaggggtgattggaagaaagagtgaaaggcatccaggagctaaatgataagaactcatgamcacaaagaagaaaataacagacacgggtctacttgggggtggagggtgggggaagggagaagagcagaagagatcactactgggtactgggcttaattcctgggggataaaataatctgtgcaacggatgtcgtgacatgagtttacctatgtaacaaacctgcacatgtacccctgaacccaaaataaacgttgacaagaagaaaggcatcaaggaattaaattgttaaactttgggaaaaagttgcagctcaggcagacttggaggagagagaaaccagtgttttggagtgagagagaggaaacaggcagttctgaattctttggagcagtcgagggagcccaggcaggggctaaagacacccgctcgagggcgtggctgccttcccgaaccccttcgccctggccaaggcctcctcctctatgagaacaaagtcagaattgagaaaaactacacacaaaaggataatcatccattc

SEQ ID NO: 934185 - DNA, 622 bp, Homo sapiens
agggaggcacagagcggtccctggggcactggcctacctgaccacagcgtccaaagctcgtggcctctgggctttccactaggaggggtgattggaagaaagagtgaaaggcatccaggagctaaatgataagaactcatgaacacaaagmagaaaataacagacacgggtctacttgggggtggagggtgggggaagggagaagagcagaagagatcactactgggtactgggcttaattcctgggggataaaataatctgtgcaacggatgtcgtgacatgagtttacctatgtaacaaacctgcacatgtacccctgaacccaaaataaacgttgacaagaagaaaggcatcaaggaattaaattgttaaactttgggaaaaagttgcagctcaggcagacttggaggagagagaaaccagtgttttggagtgagagagaggaaacaggcagttctgaattctttggagcagtcgagggagcccaggcaggggctaaagacacccgctcgagggcgtggctgccttcccgaaccccttcgccctggccaaggcctcctcctctatgagaacaaagtcagaattgagaaaaactacacacaaaaggataatcatccattc

SEQ ID NO: 934186 - DNA, 622 bp, Homo sapiens
agggaggcacagagcggtccctggggcactggcctacctgaccacagcgtccaaagctcgtggcctctgggctttccactaggaggggtgattggaagaaagagtgaaaggcatccaggagctaaatgataagaactcatgaacacaaagaagaaaatamcagacacgggtctacttgggggtggagggtgggggaagggagaagagcagaagagatcactactgggtactgggcttaattcctgggggataaaataatctgtgcaacggatgtcgtgacatgagtttacctatgtaacaaacctgcacatgtacccctgaacccaaaataaacgttgacaagaagaaaggcatcaaggaattaaattgttaaactttgggaaaaagttgcagctcaggcagacttggaggagagagaaaccagtgttttggagtgagagagaggaaacaggcagttctgaattctttggagcagtcgagggagcccaggcaggggctaaagacacccgctcgagggcgtggctgccttcccgaaccccttcgccctggccaaggcctcctcctctatgagaacaaagtcagaattgagaaaaactacacacaaaaggataatcatccattc

SEQ ID NO: 934187 - DNA, 631 bp, Homo sapiens
ccctggccaagggaggcacagagcggtccctggggcactggcctacctgaccacagcgtccaaagctcgtggcctctgggctttccactaggaggggtgattggaagaaagagtgaaaggcatccaggagctaaatgataagaactcatgaacacaaagaagaaaataacagacacgggtctacttgggggtggagggtgggggaagggagaagagcagaagagatcactactgggtactgggcttaattcctggggkataaaataatctgtgcaacggatgtcgtgacatgagtttacctatgtaacaaacctgcacatgtacccctgaacccaaaataaacgttgacaagaagaaaggcatcaaggaattaaattgttaaactttgggaaaaagttgcagctcaggcagacttggaggagagagaaaccagtgttttggagtgagagagaggaaacaggcagttctgaattctttggagcagtcgagggagcccaggcaggggctaaagacacccgctcgagggcgtggctgccttcccgaaccccttcgccctggccaaggcctcctcctctatgagaacaaagtcagaattgagaaaaactacacacaaaaggataatcatccattc

SEQ ID NO: 934188 - DNA, 631 bp, Homo sapiens
ccctggccaagggaggcacagagcggtccctggggcactggcctacctgaccacagcgtccaaagctcgtggcctctgggctttccactaggaggggtgattggaagaaagagtgaaaggcatccaggagctaaatgataagaactcatgaacacaaagaagaaaataacagacacgggtctacttgggggtggagggtgggggaagggagaagagcagaagagatcactactgggtactgggcttaattcctgggggataaaataatctgtgcaacggatgtcgtgacatgagtttacctatgtaacaaacctgcacatgtrcccctgaacccaaaataaacgttgacaagaagaaaggcatcaaggaattaaattgttaaactttgggaaaaagttgcagctcaggcagacttggaggagagagaaaccagtgttttggagtgagagagaggaaacaggcagttctgaattctttggagcagtcgagggagcccaggcaggggctaaagacacccgctcgagggcgtggctgccttcccgaaccccttcgccctggccaaggcctcctcctctatgagaacaaagtcagaattgagaaaaactacacacaaaaggataatcatccattc

SEQ ID NO: 934189 - DNA, 594 bp, Homo sapiens
gagacataaaactgcaaatattaactatttccttgaaatataatttaaacttggtgactaggacaagaaaatgtcacattcctttctcttgctaaggaaattgcatatttcctttgcaaaaataaagaatatgcagtctttgaaagagtgtatgtgacagttttaaagttgttttktttcatgttaaaagtttctataaattttcatgattgtgtcaaagctgaaaaatgaaaagaaacaaagacgaaaaaggaaaacattattaatcttaggcatacaagttttgtttctcaccaatgtcaaaaacaacatttatgccatatctgtattttgttctttctaaatgttatcttgagttatataattttcaaatccatctgagaatgaatacacttttaaatttttgcttaggtttccctccatgatctgcaatattctaaacagaatattctaaatattctgtctttgccaggatttgtgaagcaaatggatatgcattttactaagtggaaaatgtagctgcgacatgggcggttaactgctggcgagtgtgcggtgtttggtttatggactaaaggacaccataagctttgg

SEQ ID NO: 934190 - DNA, 567 bp, Homo sapiens
catagccagaatccatatctacaaaaaaattcctctcatgaactgtgtatttgtatacatcaatcaacctctctttatcccctcaccacctttacactgaagtatatcattctactctctacatccatgagaccaagtttttagcttccacatatgagtgagaacatgaggtatttgtctgatggtgcctggtttatttcacttagcataatgacctccagttccatccatattgcagcaaatgacatgatttaattctttgttatgaccaaacagtattcaaataggtatatataccacatttttttwatccattcatctattgatggacacttagcttaattccatatcttgaatattatgaatagtgctgcaataaaaatgggagtgtaggtatccctttgacatatactaatttatttgcctttgaataaatacatagtagagggattgctggattatatggtagttttatttttggtgttttgtaaatctccatactgtttaccatagtggctgtactaatttacatttccgctgacggtgtataagagttcccttttctcc

SEQ ID NO: 934191 - DNA, 591 bp, Homo sapiens
ccctacaactgagctggtttgatgatggattgacctatttatcctctctttgttcaggcccattgatcactgtcaacaattacaatgtgggaggattcccctagatgaggcgtacaaatattaatgtctgatcatgcctgctttacagaaaatagatttacctgaattacaaacacagcaaattttacagagcagaagtttctattcattttgtagcayaatttttatgttagcttggttcttgtgtgcatggttttgtatgtatgtttcttaatcagaaaaggacttcatttgcctattcagagctctaacttatttcattcttcaaatgtaatggccttcatcatttcactaagcaacttaagcacaagttcactcttgtttagaaattagggaatctgcttccattaatcttgatagtatcttgatctgtgtttcaagctgggttttccaaaatccaaaacactgagatggagtttgggtacaaaatctttattaggaatccacacctgggaaaaggaaacaggtggaagtagctttgggcagatgaagcagaagtgcagtgcaggcccccgtgagagagtctagaac

SEQ ID NO: 934192 - DNA, 632 bp, Homo sapiens
actccaatcaatagaaaaagaggaaatcctccctaactcattttatgaggccagcatcatcctgataccaaagcctggcagacacacaacaaaaaaagagaattttagaccaatatccctgatgaacattgacgcaaaaatcctcaataaaatactggcaaaccaaatacagcagcacattaaaagyttatccaccatgatcaagtgggcttcatccctgggatgcaaggctggttcaacatgagcaaatcagtaaatgtaatccagcatgtaaacagaaccaaagacaaaaaccacatgattatctcaatagatgcagaaaaggcctttgacaaaattcaacagcgcttcatgctaaaaactctcaataaattaggtattgatgggacgtatctcaaaataataagagctatttatgacaaacccacagccaatatcacattgaatgggcaaaaactggaggcattccctttgaaaactggcccaagacagggatgccctctctcaccactcctattcaacatagtgttgaaagggcaatcagacaggagaaagaaatgaagggtattcaatgaggaaaagaggaagtcaaattgtccctgtttgcagatgacatgattgtatatttagaa

SEQ ID NO: 934193 - DNA, 555 bp, Homo sapiens
ctcagttgaatgcctacaatagtcaatacataatattaattcaccaaatgttttaaaaactattttaaatgtttacaaaactttgcgaaatgaataaagctactttttcttttttaaaacacatattttaccttagtgaaagtatgtaaaacaccccaaagggagcagcagttattagatcacactgagatagttatgtccaaaagtagtatgacttttttcccccttttttggcacaactgagttggaatgactattaaattatgataaaataaggtaacattttataaaattcccaatttcatacmaagcagcatttcctaaacttccacaatctcaattgcatattaaatttcaatgtcagtaccaggttaattttctaaaaacactctttagaaaagaggtttattgaatgtcttttatgtgttcagcattatgctaagcaattttcatatattatctaatttaattctcacactataagataaataccattaaagtcctaattttacagcagagaaaaggaggtttggagagattaagagatttatccaa

SEQ ID NO: 934194 - DNA, 646 bp, Homo sapiens
aggatcatgatgaaatttcaaaggcagtttttaaaaactctatgtccctttataaatgtgaggggtttgtttgtttgtttgtttgtttgtttttgagacagagtcctgctctgtggcccaggttggagtgcagtggcacaatctcggctcactgcaacctctgtctcccaggttcaagcaattctcctgtctcagcctcccaagtagctgggattacaagtgcgtgcctccacacccggctaatttttgcatttttagtagaggcggggtttcgccakgttggccaggctagtctcgaactcctgacctcaggtaattcgcccaccttggcctcccaaagtgctgggaatacagacatgagccactgcacctggcccactttattatttaataataatccaagtcacctgagacaaacttgtcaaggctgcttatttagtaattatttacaaggttgccattcactttaaaatatatgtgacttagcaagaagaaattatcatatctaataactgccataaaataacaatgaaagcttctaccaacctggccatttgcttgtaagcttcttcagctactgcaaagatatgtggatccatatcacccatgttctgaccactgtatgcattaataatatcttctccat

SEQ ID NO: 934195 - DNA, 625 bp, Homo sapiens
gggtatctgagcagccggagattcctggggaacaaggagtgctgccgatgagtgtattaaaaaatcaaactcagcatgaatgctttctctgtgcgaaaagtctttgtcctcagagagactggcagcacgaaaaggctcttagcaattacctcatccaggaaaccaagagctattcccagacggaagtgacctgcccaaggtctcatggtaggtactgccaaatactcccccagtgaggccctccaacacctccaggccatcagccagccacgtctctattgcacaggtcaggggccaggctgcctgaggcttgagcccagactaagtggacactcggacttaacaatttttctgctttacaatggtgtgaagtgacacttgtttagtactctcctcgacatacaatggggttgcgtccaaatgaatacatcgtaagttaaaaatactcttaagtcrttttttacttagggtacagtgggcttattaagatgtagcaccatcgtaagacgaggagcgccggcatataacacgtgtggggttaaaccccagctcacgactcactcgctctgtgatataggggaaatttcttctcctctctgtgcctccgctttctcatctatgaagt

SEQ ID NO: 934196 - DNA, 738 bp, Homo sapiens
tcgggtgggagtgacccgattttccaggtgccgtctttccaggtgccacccctttctttgactaggaaagggaactccctggccccttgcgcttcctgagtgaggcaatgccttgccctgcttcggttcgcacacggtgcgcacacccactgacctgtgcccactgtctggcactccctagtgagatgaacctggtacctcagatggaaatgtagaaatcacccgtcttctgcgtcgctcacgctgggagctgtagaccrgagctgttcctattcgaccatcttggctcctccctcccctctatatctaattttgacatgattcttgaaaaggtctgttgcttcatctgggatttgttggacaaatgtggtcttttaaaaatgctgagccacatgaaattagagtttctgccaactcatgaaaaatagtggcttcatgtcatctagctgcttagcccatgctttccagaacaattcagtccctttctgcccttgaaaaaacatcacatcatactaaatgacaccaatgctcccacctccaaatttaaaaggaaacagaaagagaggtgttgtactagaagatttaaagtcatgcaaaaccagggcttgtcctctggtgaggtcagtcttccaaagactttttcacatctcccctgtccttatgtttcccacgaccctccccatcctctcagcaggcaacctcaaatcttccttcctatggcctacagggcatgccagg

SEQ ID NO: 934197 - DNA, 634 bp, Homo sapiens
  misc_feature 609: n = A,T,C or G
gttgtctctatgagagttcctggagaaagcttctcttaactcctagtatcaggaaaagctgttcttctgagtacttggtcttcgatcttgtggacatggagctcttggctttggctcccaggaaactcagagctgaattggtcatccccttctagcaaatgtatagctccttggacatgcagttctagaagtgggacataattatatakagagagaagatacaggcaaaatcagccctcagtagcctcctctttctttgtcctttgtcctatggactgaaacctgaaaaattagccctttcttattccagaacctgatagtccacaaatgaagaggtcagcagcttgctttcccattgaccttgtctttcccagggccctctgagcaaggccctccatcaaaactgcttccagggaagaatgtgagcatctaatccacaccagttgcttatgactggtaaaagcttagcctgcaacttttctcagaggcttgtgtaatttgttggttcataaaccaaaagaatgcagttcttaatgtgaaatttgaagattaagaacagaagggcatctggggaccaggaagggaaggactcaagtggtgccttctggngctggctactgggtagctggtaatt

SEQ ID NO: 934198 - DNA, 599 bp, Homo sapiens
agtccaaaaccccttactcttctctgtatttctgaaaggatttattgagatataaattacatagtgtagagtgcacacattaatgtctacaagtcagtggcttttagtatatgcacagataagtggagccatcatcacaatgaattttagagcattttcatcacttcaaaaagaaaccccaccttctctagctgttaacctcctatgcacccatcccctactcaatcctaagcaaccacaaatctgttttctgtctctatagattttcctattctgtttttatctaaatagaatcatacaataggtggccttttstgcctggcttctttcagttggcataatgctatcaaggttcatgtacgtattggtactttatttctttttataactgtataacattcaattacatggatataacattttgtttataaaatattatttttattgacatttgagttgtgttcagcctttggctattttaaatactgctgctaaaaatacttgtgtacaatttgtgtttgaacacctctttccaataatctgtgtgtatacctaggaataaattcctgggtcatatgacaattctatgtttcatatat

SEQ ID NO: 934199 - DNA, 549 bp, Homo sapiens
acaccaaagcaacacaaaatcacaggaacttaccataagattttataaggcaagttttctcataatacggagtgatttctggtactgcaaaagccgaagagaaaaagtggagtaattttagatctgggaggactctgtcctcttgagattccctgaggaaaaacagaagttcctccccaaaagaggaatccaccacatctttttctgttttccttaaggaatttcagtctgttagaaaaaaaattttcttgtcccctcatgtggcaccgatggtggcaagaygcaacaggggctgacagaaggaaaaggagaaacaggcagagggagcacatatgtgactgccatgggtgcaaggagagagaaatttagccaatggagaaattcttacaaagacagaacagaggacttaaagactcttatgcatacacacatgtgcacaagtgtatgcgcacacacacacaacgtacatataacctaaatagcagtttcaattaagttgacttttgactatccagctctttaaaaatcctttcaaacttattagagaat

SEQ ID NO: 934200 - DNA, 621 bp, Homo sapiens
agttggggggcactctggggacaaagcacaggacgtagagcttggaggccaagtgcctgccatgcctttacctggctgtggtcttggccaagtcctcagtgggtattgggtacttgtactgtgaaggtacagaagagtacctttagtatgttaccatttctgtagagagaggaaacgtgtgtgtgtgtgtacatattatgataatatacataaaayatgtttgcaagtgttcataaaaactcaggagagagcaacagggtggctgggagatacttcccttctgtaccttctgagtctgggactatttgaatgtattatcctttcaaaaagtgaacaaaagattaattttccccttcctagctgtgcccccacccccagcaagaaaaatgggcttagagaattggatagatctgggtgtttaaatcccagctctgcctaagtgatcttaggcaagcacttaacctcaaatactccatgttttttcatctacacaatagaggtcatcatagtaactgtctcccatggtggttgtgaggattaaatgggattgctagcatggtatctggtgaagcactccataaaagttcaaacagtggtaataataacagtaataacaacagc

SEQ ID NO: 934201 - DNA, 583 bp, Homo sapiens
aattgtaaggctggaatggatctcagaaattgtttgttttttttttaagtccaatactttttctaaatcaggtacatctgagagagagagaaaaagagattgagagagagaacaaaaaggcatccctggtctactgtgcaggaatcttatccattcctacattcagagacttttctgggatcccagtgcactcttcatgctcagtcacctatgtgtaaatactctcttgacttttttcttttttttctttttctttttctttttttttttttttgagatggagtcttgctctgttgccagcctggagtacaggggcgcaatctcagctcactgcaacctctgcctcccgggttcaagcgattctcctgcatcagcctcccaagtagctgggatgacaggcatgcgccaacacacccggctaatttttgtatttttagtaragatggggtttcaccatattggccaaaatggtctcgatctcttaacctcgtgatctgcctacctcagtctcccatagtgctaggattacaggcgtgagccaccgcgcccggccttttgagctatttatgtctatattgacccc

SEQ ID NO: 934202 - DNA, 393 bp, Homo sapiens
gaaagagctcactctgccatgcactctccaaaaaggctttgtctaactcatgtgatcttcataaatgcctggcagagtcaatacctggaatctgtagaagaaagacacttttcacatggggaaattctttcccctcaggctagtgccttcagaccgagtctaatgtactctgcaggctctgcttggatcatttgtgcctgatgtctgaaaaaaaaaaaaaaaaaaaaaaccacccagaasccctccctacatttgaaaaaaaggacatctgggaattaatcctgaagttgggaggaaggttgctgagtctggattcagcctgaggggcagatggctagggatgtccccagagtgtccccacctccacttcatgtgcagatgacactgacagct

SEQ ID NO: 934203 - DNA, 750 bp, Homo sapiens
aatcttcatgtggctgggtcctcccattgttcaggtctcagcaccaagatcccttcccagagaagcattccctaatcatcttatctgaagtagcctgaactctaaccccccagagctctctacatcactcactgattttattatctctacagtactcttcactctctgaagttatcttttctattttttatttattgtcttccccactgtaattcaagcttcaagagagggatttgttcatcttgttgacttctgtatcaggacatctgcccgatacatagtaagtgctcaaaatatatttgctagatgagcaagtaaatgaatagatggatatatgaatgaatagatgaatgaatgagtttctgccctcagaatctgtattagtcagggttctctgaagggacagaactaataggataggtgtatatatgaaggagagtttattaaggagtactgactcacacaatcacaaggtgaagtcccacartagaccgtctgcaacctgaggagcagggaagccagtcccagtccccaaatctcagaagttgggaagatgacagagtgcagctttcagtctgtggctgaaggcccaagggcccctggcaaaccactggtataggtccaagagtccaaaagctgaagaacttggagtctgccgttcaagggcaggaagcatctagcccaggagaaggatgaggatcggaagactcagcaagtctagtccttccacgttcttctgcctgctttatt

SEQ ID NO: 934204 - DNA, 614 bp, Homo sapiens
atgtaaattagttctgccacttggaaagcaatttggagatttcttttttttttttttccgagacggagtttcgctcttgttgcccaggctggagtgcaatggcatgatctcggctcactgcaacctctgcctcccgggttcaagcgattctcctgcctcagcctcccaagtagccaggattgcaggcatgcaccaccacgcctagctaattttgtattttcagtagagacaggatttctccatgttggtcaggctggtctcgaactctcaacctcaggtgatccactcmcctcagtctcccaaagtgctggaattacaggtgtgagccactgtgtccagccgggggtgaatttcttaaagaacttagaacagaactaccattcaacctcacaatcccattatggggtatatatccaaaagaaaataaattgttctaccaaaaagacacatgcactcctctattcatcacattagtatttacaataacaaagacgtggatcaacctaggggccccccattagcagtgaatcaaataaagaaaatatggtacatatacaccatgaaatgctacacagaaataaaaaaagaatgaaatcatgatttttgcaggaata

SEQ ID NO: 934205 - DNA, 614 bp, Homo sapiens
atgtaaattagttctgccacttggaaagcaatttggagatttcttttttttttttttccgagacggagtttcgctcttgttgcccaggctggagtgcaatggcatgatctcggctcactgcaacctctgcctcccgggttcaagcgattctcctgcctcagcctcccaagtagccaggattgcaggcatgcaccaccacgcctagctaattttgtattttcagtagagacaggatttctccatgttggtcaggctggtctcgaactctcaacctcaggtgatccactcccctyagtctcccaaagtgctggaattacaggtgtgagccactgtgtccagccgggggtgaatttcttaaagaacttagaacagaactaccattcaacctcacaatcccattatggggtatatatccaaaagaaaataaattgttctaccaaaaagacacatgcactcctctattcatcacattagtatttacaataacaaagacgtggatcaacctaggggccccccattagcagtgaatcaaataaagaaaatatggtacatatacaccatgaaatgctacacagaaataaaaaaagaatgaaatcatgatttttgcaggaata

SEQ ID NO: 934206 - DNA, 540 bp, Homo sapiens
gcttccctttgtgggtaacccaacctttctctctggctgcccttaacattttttccttcatttcaactttggtgaatctgacaattatgcaccttggaggagtatgctcttctcgaggagtatctttgtggcgctctctgtatttcctgaatttgaatgttggcctgccttgctagggtgggraagttctcctggataatatcctgaagagtgttttccagcttggttccattctccccatcactttcaggtacaccaatcagacgtagattttgtcttttcacatagtcccatatttcttggaggctttgttcatttctttttgctcttttttctctaagcttctcttctcacttcatttcattcatttgattttccatccctgataccctttcttccagttgatcaaatcagctactgaaggttgtgcatttgtcacatagttcttgtgccatggttttcagctccatcaggtcatttaaggacttctctactctggttattctggttagccattcatctaatcttttttcatggttt

SEQ ID NO: 934207 - DNA, 760 bp, Homo sapiens
aaggtgcctacccacactgagggtaggttttcctctgccagtccactgactcaaatgccaatctccgctgacaacacactcacagacacagccagaaacaacactttactagccatctagcatccttcaatgcaatcaaattaacacctaatattaactgtcaggcctctgagcccaagctaagccatcataycccctgtgacctgcacgtacacatccagatggccggttcctgccttaacggatgacattccaccacaaaagaagtgaaaatggcctgttcctgccttaactcatgacattatcttgtgaaattccttctcctggctcatcctggctcaaaagctcccctactgagcaccttgtgacccccactcctgcctgccagagaacaaccccgctttgactgtaattttcctttacctaaccaaatcttataaaacggccccacccctatgtcccttcgctgctgactctcttttccgactcagccctcctgcacccaggtgaaataaacagccttgttgctcacacaaagcctgtttggtggtctcttcacacagatgcgagtgaaattaaccatcacactgattgaatgttttattttgagaagtgtctgttcatgtcctttacctgttctttaatggggttatttgctttttgcttgttataagcttcttacagactctgcatattagacctttgtcagatgcataatttttcaattatctctctttgctgatgatatgattctatacct

SEQ ID NO: 934208 - DNA, 774 bp, Homo sapiens
ctggtggggacgtggagaacctttatgtctagctcagggattgtaaatacaccaatcggcactctatatctagctcaaggtttgtaaacccaccaatcagcaccctgtgtctagctcagggtttgtgagtgcaccaatcgacactctgtatctagctactctggtggggccttggagaacctttgtgtccatactctgtatctaactaatctggtggggatgtggagaacctttgtgtctagctcagggattgtaaacgcaccaatcagcgccctgtcaaaacagaccacgcggctctaccaatcagcaggacatgggtggggccagataagagaataaaagcaggctgccggagccagcagtggcaacccgcttgggtccccttccaccctgtggaagctttgttctttcgctctttgcaataaatcttgctactgctcactctttgactccacactgctttcatgagctgtaacactcactgcgaagatctgcagcttcactcctgaagcyagagagcccacaagcccaccgggaggaatgaacaactccagatgcactaccttaagagctctaacactcaccgccaaggtctgcaacttcactcctgagccaacgagaccacgaacccaccagaaggaagaaactccaaacacatctgaacatcagaaggaacaaactccaggtgcgtcaccttaagagctgtaacactcaccacgaggatccacggcttcattcttgaagtcggtgagaccaagaacccaccaattccag

SEQ ID NO: 934209 - DNA, 774 bp, Homo sapiens
ctggtggggacgtggagaacctttatgtctagctcagggattgtaaatacaccaatcggcactctatatctagctcaaggtttgtaaacccaccaatcagcaccctgtgtctagctcagggtttgtgagtgcaccaatcgacactctgtatctagctactctggtggggccttggagaacctttgtgtccatactctgtatctaactaatctggtggggatgtggagaacctttgtgtctagctcagggattgtaaacgcaccaatcagcgccctgtcaaaacagaccacgcggctctaccaatcagcaggacatgggtggggccagataagagaataaaagcaggctgccggagccagcagtggcaacccgcttgggtccccttccaccctgtggaagctttgttctttcgctctttgcaataaatcttgctactgctcactctttgactccacactgctttcatgagctgtaacactcactgcgaagatctgcagcttcactcctgaagctagagagcccacragcccaccgggaggaatgaacaactccagatgcactaccttaagagctctaacactcaccgccaaggtctgcaacttcactcctgagccaacgagaccacgaacccaccagaaggaagaaactccaaacacatctgaacatcagaaggaacaaactccaggtgcgtcaccttaagagctgtaacactcaccacgaggatccacggcttcattcttgaagtcggtgagaccaagaacccaccaattccag

SEQ ID NO: 934210 - DNA, 551 bp, Homo sapiens
tcttaggttacaaaatcaatgtacacaaatcaatagcactgctatataccaacaacaaccaagctgagaatcaaatcaagaactcaatcccttttacagcagctacaaaaccaaaaccaaaaaaacctaggaatatacctaaccgaggaagtgaaagatctctacaagaagaactacaaaatactgctgaatgagatcatagatgacacaaaccattggaaacacatcccatgctcacagatttgaagaactaatatagtgaaaaygaccatgctgtccaaagcaatctacagattcaatgcaattcccataaaataccaacaccagttttcagaaaattagaaaaaaaatcctaaaattcataaggaactagaaaagagcctgaatagccaaagaaattataagcaaaagaaacaaatctggagacatcacgttaccagactttaaattatactacaaggctgtagttttcaaaacagcgtggtactgatataaaactaggcatatagaccagtggaacagagtagagaacccagaaataaagctaagtc

SEQ ID NO: 934211 - DNA, 708 bp, Homo sapiens
tccctctctgtgctgagctgcctagagctggggaaagggtgacacaagaacccctgtggctacaaccactgggactgcactgggccagatccaaagctagcacagcactgtgtctctcccaagacccagtgaccactgcctggctactgcctatgttcactcaaagcccaagggatctacaatcagcaggtggaaaattcagccaggtttgtrtccttcccttcagggtattgatttccctcagccccaggtgggtttggagatggcatccgggtgccacggcctggagtcaggaaactcaggaatctactggtgctttgttctcctgtgactaagctagccctcaagttgcaagaaaaaattcttgccactctttcttccactttcctcaagcagaggaatctctctgtggccaccactgccccagcttgcagccaagtactcctggctactgctgatgttcactcaaggccccagggctcttcagtcagcttgtggtgaatgctgctagtcctgggtctcccctttcagggaaatgggctcccctgtggccccgggcaggtccaaaaatgccatccacgagccaaggtctggagcaccagaagcttgcttggtgctctctcccactgtgttgaacggtggtacccaagctgcatgacaaagtcctctgtacacttcccactcattttctcaagcagaaggggtctc

SEQ ID NO: 934212 - DNA, 584 bp, Homo sapiens
tttggatctatgcccccatccaaatttaatgttcagttgtaatccacaatgttggaagtggagtctggtgggaggcaactggatcatgggcgtgttttctcatgaatggtttagtaccatctcctcagtgctgttcttgtgatagtgagaaagtgagttatgatgagatctggttgtttaaaaaaagtgtgtggcacctccctgcctctctcttcctcctgctccggccatgtgaagatgcctgctctggctttgccttctgccatgagtaaaagctccctgaagtrtccccagaagcagatcctgccaagcttcctgtacagcctttaactgtgagccaattaaacctcttttcttatgaattacccagtctcaggtatttatttatagcagtgcaagaatggactgacacagaaaattggtttcaaatggggactctgtgtggtggctccaatcccacatttcttctctgcactgctctccatgtcccagtctctccagttccagccatggctccaaggggcccgaatatagctcatgctgctgtttcagagggtgcaagccataggttttggcagcttcca

SEQ ID NO: 934213 - DNA, 587 bp, Homo sapiens
agctccaaaatctcattttagggcctgctctctccatttctggcaagaagactctgaggcagatatttgcattcaggaaattactggggaggcctcttggggtcaatgcctttaggagagtgagggaagagggactgcacagagaaacaaagtgaggagggatgaagttgtaacaaagacctcagcaaattctagaggagctctggagctaggatagcccttcacaattgttccaagttttggaggaggagctgtgtcttttacactctttaattgaccaatgtaggrtaccgccaaagctataaggcatgcactggtgagaggttcaccagcattaaagataagtcaattatggcagtactttgtaggccaacatgaacagtagaagatgctgtatcagaatgatacagtgaagacaataggatgccaaaatgatagaagccaggtggtagcacttagccatcagaaataaggtgagtgtagttattagaatgatcaacgagtgcagactggcagccagaggaggccaacatgcagagagatatgaagagggttaataaaacacagtgttcctagtcagaagatag

SEQ ID NO: 934214 - DNA, 715 bp, Homo sapiens
accactgctgtcttcaaagctgtcagacagggacatttaagtctgcagcggttactgctgtctttttgtttgtctgtgccctgcccccagaggtggagcctacagaggcaggcaggcctccttgagctgtggctgccgcccatttcgagcttcctggctgctttgtttacctaatcaagcctgggcaatggcgggctcccctcccgcagcctcgmtgccgccttgcagattgatctcagactgctgtgctagcaatcagcgagactccgtgggcgtaggaccctccaagccaggtgtgggatataatctcgtggtgcgccgttttttaagcccgtcggaaaagcgcagtattccggtgggagtgacccgattttccaggtgccgtccgtcaccccttttttgactcggaaagggaactccctgaccccttgcgcttcccaagtgaggcaatggctcgccctgctttggctcgcacacggtgtgcgcacccactgacctgcgcccactgtctggcactccctagtgagatgaacccggtacctcagttggaaatgcagaaatcaccgtcttctgcgtcactcacgttgggagctgtagactggagctgttcttattcggccatcttggctcctccccctaggtaacattcttgccttgttcctaatcttaagttgaatgtatcaaatattttaccattaagtatgtaattttctct

SEQ ID NO: 934215 - DNA, 715 bp, Homo sapiens
accactgctgtcttcaaagctgtcagacagggacatttaagtctgcagcggttactgctgtctttttgtttgtctgtgccctgcccccagaggtggagcctacagaggcaggcaggcctccttgagctgtggctgccgcccatttcgagcttcctggctgctttgtttacctaatcaagcctgggcaatggcgggctcccctcccgcagcctcgatgccgccttgcagattgatctcagactgctgtgctagcaatcagcgagactccgtgggcgtaggaccctccaagccaggtgtgggatataatctcgtggtgcgccgttttttaagcccgtcggaaaagcgcagtattcsggtgggagtgacccgattttccaggtgccgtccgtcaccccttttttgactcggaaagggaactccctgaccccttgcgcttcccaagtgaggcaatggctcgccctgctttggctcgcacacggtgtgcgcacccactgacctgcgcccactgtctggcactccctagtgagatgaacccggtacctcagttggaaatgcagaaatcaccgtcttctgcgtcactcacgttgggagctgtagactggagctgttcttattcggccatcttggctcctccccctaggtaacattcttgccttgttcctaatcttaagttgaatgtatcaaatattttaccattaagtatgtaattttctct

SEQ ID NO: 934216 - DNA, 746 bp, Homo sapiens
taaagatgtgttgattccttttctttttttttcgagatggaatctcgctctgtggcccagcctggagtgcagtggtgcaatcttggctcactgcaacctccgcctcctgggttcaagcgattctcctgcctcagcctccctagtagctgggattacagggatgcaccactgtgcccagctaatttttgtatttttaggagagayggggtttctccgtgttggccaggatggtctccaactcctgaccttaggtgatttgcacatcttggcctcccaaagtgcaggaattacaggcgtgagccaccgcgcccggcaagtccttcttttcatgaaaccaaaccagaccccaacgttaagtataaaatacatgagaaatagagacatcaaataaatatttcgataatttcccactttcaaaatctcttcattcattccttccttccattcattcattcttttcatgcacactcactgatcaccagccctgcgtggggcagtctcagaggccctgggacgcaaaggctcaaacacacaagtgaacgagtggttacagcccggggtggcgctgggggtggccagccctgcacacaaaggccaggaggtccctgcgaggggtgacatgcaaggtgggcctcgcaggatacatcagagctcactggaccgggaagtgaggggagggcatcccagcagagccggtgggacaaggagtctgagacggggccagggcatggaactggaatggaggt

SEQ ID NO: 934217 - DNA, 619 bp, Homo sapiens
caccgtagatgtatgaatttatctctgggttttctatttttgttccactgattgttgtgtctgttctgatgccagtaccatgcctttttggttaccataactctgcagtgcaatttaaagtcaggtaatgttattcccccagttttgttctttttttttgcttgggatagctttggctatcctgggtctttagtgcttccatataaattttaggatttttaaaatttttgtctagtcgttggtattttgatagggtttgcattaaatctgtaaattactttggatagtatggactttctaacaattttgattctttaaatccatgaatatgaaatatctcttatatttttgtgtcctcytccatttcttgcatcaatgttctatagttttcattgtagaggtctttcacttcttttgttaatccttatatattttatcttagttgtaactattgtaaataagattactttcttgatttcttcttcaggttttttgttttggcatatagaaatgctactgatttttgcatgttgattttatagccttcaactgtactgaatttgtttatcagttccaatagtttgttggtggaggctttaggtttctccaaatatataat

SEQ ID NO: 934218 - DNA, 537 bp, Homo sapiens
gctgaaagcaatgctacacttttaaagttagatttctttgtgtattaatacaaacaccagagaagatggtcaataaagtaattactgtacaatgactatcataatacttaaacctggaagaaaatcagtaaatgttaagtgaatagaattggtgaattgcttccattttatacaattttttgttcattttagggcttaccaaaacttgcagctctgaataaggcccaattatttactccttcaaataaaacaaggctgcaagaataagtgtgaatgctttgttttgttttgtttttcactgaaatattccagtctgtasctgctccaaatcacactgatctttctagagtctgatacaggtcctggtctcaaggccagtgttaccataatcaccatcttttgtgcttcaaggttgagccctcctaatttacctgcatgaaattggaaaagtcccatttcatactttaagcaacccagatgtctctttcactgaaagtggtattcttcttgtgtgtgtgttttttttttgcagcaaat

SEQ ID NO: 934219 - DNA, 618 bp, Homo sapiens
cttgttggccatttgtatatcttcactggtgaggtgtctatttaagtcctttgccccacttttaaattgggttgtttgtctttttgttgttgagatgtgggagtttgttatatattctggatactaggctttcgtcagatatatcattcgcaaatattttctcttattctgtargttttcttttcactttctttttaatgtcccttgaaacacaaaggttttaaattttgaagaagtctaatctatctgccttttcttttgctgctaatgcttttgatgtcacatccaagaatccattgccaaactcctttggtaatgatgaagactgatctgcttttatttcattaattttttaaaaataaattttattatgtatatttaaggcttataacatgatcatgttatggaatacatatagatagtaataaggttactatatggaagcaaattaacatatccatcatctcacagttactttttttgcatgtggcaggagcagttaaaatctactcatttggtatgaattgcaaatacagtgcaagtttattgtttatctccctcatgttatacattacatttctagacctgtttattctacatatctgctactttgtaccc

SEQ ID NO: 934220 - DNA, 559 bp, Homo sapiens
ttttttcttttttttggttccatataatttttaaaagagtttttttctagttctgtgaagaatgtcattggtagtttgataaaaatagtattgaatctgtaaaatactttgggttggccatttttaacaatattgattctgggatgttattccatttgtttgtgtaatctctgatttctctgagcagtgttttgtagctctycttatagagatttttcacctccctgttacctgtattcctaggtattttatttttttgtggcaattgtaaatggaattccattcttgatttggctcttggcttgactgttattggtgtataggagtattagtgatttttgtatgttgattttgtatcctgagactttgctgaagtttttttatcagttgaaggagattttgggcagagactatggggttttctagatatgggatcatgtcatctgcaaacagggacggtttggcttcctcttttcctatttcgatgccctttccttcttccttttgcccaattgttctggccaggacttccaatactatgttgaatagaagtggtgag

SEQ ID NO: 934221 - DNA, 588 bp, Homo sapiens
aagcacagaggtggtagactcacagaggcaacaactttctctccatgatagttctactttagtaactggacatgcttatcaagtttccctgcaagctctgacttgtctactgaatagtgccttaggaggtctggttaggacttattctctgaccccatggctctttttctttacttctttcagaattttattttcccagcaacccctataattgggtaatatgcaatttttataataaattccatcctttattctaacacattcattgtcacagagtgactgaactttggtaacatcactytgtgtcttcttagcttccccagaaccagaatttcagaagccactgctatctaagataattttttttttcatagccatcccaagggaagacacttgggacatgaatcatcactcagaactgaggctgagaggcagggcaaacagtcaacttccttcctaattcaataggtgctaatccatttatctctactataagggcatgctgcttcaagagctcaatttgttttgcctgcactagaggactgtggacaagaagaaaatgaacactttctaaggctgaaaaagtaa

SEQ ID NO: 934222 - DNA, 589 bp, Homo sapiens
gagtagctgggactgcagacacatgccaccacacctggctttgagtaagtcttataaaaaacttataagaacactcttcttaatgtcttttggtgagaatatgtatccatatctcttggctatgttcctaagagtggaattgttagatcataggctaggtatgtgtttagctttcatagaggctgccaaacasttttctaaagtggttgcaccaatttgtttatttatttatttacttatttattattatttttttgagatggagtcttgctctgtcacccaggcaagagtgccgtggcatgatctcagctcactgcaagctccacctcccaggttcaagcaattctcctgtctcagcctgctgagtagctgggactataggcgccccccaccacgcccagccaatttttgtattttttttagtagagacggggtttcaccatattaatcaggctagtcttgaactcctgacctcaggtgatccgtctgccttggcatcccaaagtgctgggattacaggcgtgagccactgtacccagccggttgtatcaatttaatactctcaccatcaatgtatgagagttccagt

SEQ ID NO: 934223 - DNA, 589 bp, Homo sapiens
gagtagctgggactgcagacacatgccaccacacctggctttgagtaagtcttataaaaaacttataagaacactcttcttaatgtcttttggtgagaatatgtatccatatctcttggctatgttcctaagagtggaattgttagatcataggctaggtatgtgtttagctttcatagaggctgccaaacacttttctaaagtggttgyaccaatttgtttatttatttatttacttatttattattatttttttgagatggagtcttgctctgtcacccaggcaagagtgccgtggcatgatctcagctcactgcaagctccacctcccaggttcaagcaattctcctgtctcagcctgctgagtagctgggactataggcgccccccaccacgcccagccaatttttgtattttttttagtagagacggggtttcaccatattaatcaggctagtcttgaactcctgacctcaggtgatccgtctgccttggcatcccaaagtgctgggattacaggcgtgagccactgtacccagccggttgtatcaatttaatactctcaccatcaatgtatgagagttccagt

SEQ ID NO: 934224 - DNA, 781 bp, Homo sapiens
ctgggagccgtggggaaagagaggagtggtagcgcctgaaaaatccctgaactgggaccctgtcccacggctcccactgctgcccctccaccggaggctgtcatgatggtgtgtcctctccatctgagcaagggtcgtcggtatttctctgtgggatttttcaatgtaggtcttttcccaacaagatgctaagctccactgtttggtcggttgggagataaattcatttattggttggttggttggttggttggttggttggttggttgctcagtttgttagtaagttggtcggtargttgattagttggtaggtcattggttgattaattcgttggttttctttgaattgtgatcatgtacaacatggtcagtgagtaccatgtatatagtaggtctgtgattgatatctgctgagtattctcacctctatgttatctcgttttattcttacaacatctaggtgctccaggaagggaaggaagtgatcatttctaagttacaggtgagaaaaccctgactcagagagggatggcaacttgcccacagtgctgcagccaggaaggggcacagagatcccagccttggccccctgatgcccagcctagtcttcctacttctgggcattaaatcctgctgtcccacaggacctggataggctgtcctcacgagaagtgggtaaagattcactacaaaaacaacatgactcatgaatggctctggatcccaggatccaaggttcaagtaggctgggctgccttcagagctatggcactcatgtt

SEQ ID NO: 934225 - DNA, 642 bp, Homo sapiens
gaaagaacaatcctcagaggcccgatacgttccaagttaagttaaaagaaaaaacatagtctaggcgcagtggctcacacctgtaatcccagcacttagggaggccaaggcgggcaggtcacaaggtcaggacttccagagcagcctggccaatatggtgaaactcggtcgctactaaaaatacaaaaaaaattagccaggcatggtggtgcatgcctgtaagcctgtaatcccagctactcaggagggtgaggcaggagaattgcttgaacccgggaggcagaggttgcaatgagccgagattgcaccactgcactccagcctgggcaacagagcgagactccatctcaaaaaaagaaaaaacrtaagtgaaactgcagggaaccaaaaataaaggaaagatgtcctaagtacgagagaaaagatagattatacattgaagagggacaggctgacagttgacttttgtgcaaaaccaaaaggagtcagccagaagaccatggaatgatattttcaatgcgctgagaaaaaaatcactggcaacctgcaattctgtactcagcaaaaatatattgcaaaatgaagattaaattcagtcattttcacatagacaaaaacagaaaatttaccaccaatggactc

SEQ ID NO: 934226 - DNA, 591 bp, Homo sapiens
agaattgaagaaagaacaatcctcagaggcccgatacgttccaagttaagttaaaagaaaaaacatagtctaggcgcagtggctcacacctgtaatcccagcacttagggaggccaaggcgggcaggtcacaaggtcaggacttccagagcagcctggccaatatggtgaaactcggtcgctactaaaaatacaaaaaaaattagccaggcatggtggtgcatgcctgtaagcctgtaatcccagctactcaggagggtgaggcaggagaattgcttgaacccgggaggcagaggttgcaatgagccgagattgcaccactgcactccagcctgggcaacagagcgagactccatctcaaaaaaagaaaaaacgtaagtgaaactgcagggaaccaaaaataaaggaaagatgtcctaagtacgagagaaaagatagatyatacattgaagagggacaggctgacagttgacttttgtgcaaaaccaaaaggagtcagccagaagaccatggaatgatattttcaatgcgctgagaaaaaaatcactggcaacctgcaattctgtactcagcaaaaatatattgcaaaatg

SEQ ID NO: 934227 - DNA, 633 bp, Homo sapiens
agcatgtaaataaatcattacatatttatgcaattatacaatgaataaggagtcagaggattgctctcactcacacctatatctaattatcccttttcccccagcacaaaatcattgttcatcttgttactcacaaaaaaaaatctcagcaactgttctcatttccctctataatttctatggatataaagacatgtacagataacattgctgacatgcatatctatatgtaattttcaaagatgcaaaaccaactttagcattttctctggaaagataggtagtaccatgcaatgatagggaagaaaaattgattgcatacakttgtgctgcttgagaattttatcacatcaatgtattattttacaaattaattaattctggccgggtgtggtggttcatgcctataatcccagcattttgggaggccagtgcgagcagatcacctgaggtcagcagttcgggaccagcctggctaacatgctcaaacctcctctctactgaaaatacaaaaacttagctgggagtgtgggtgaatgcctatagtcccagctacttgggagactgaggcatgagaatcacttgaacccgggaggcggaggttgcagcgagccgagatcatgccactgcact

SEQ ID NO: 934228 - DNA, 555 bp, Homo sapiens
catctctaccttgatcacagcaaatacaaaagaaaagaaaagaaaacttctgaataattaaaattgatgttataaaaatctatgtactcaaattcatatactttgctgtttgagagttgctatttataggttttgatctggcagcctaacagatataatattttaaaagaccaaaatctgtacctttgccatgtgatttatttgaggatgttagtctcatggaattttataaaagcaatttctcctactcttcaaacatatgacatttgtgaaaagcactatgacaaccaagttaacacaggcttggttgtaaagtttagcctcgaccactrtgtaacacataaacaagcatgggggtagtgtctaggctctgggaatttacctcacacaagtgcttcattaattctttggggatatgtccaatcactactgctgcgtaataaaaatcccaactttaatagtataagcaaccattttattatgcacatggattctgtgctttggaaattcagagagggctcagcaacagtggtttgcctctgttctacaacgtca

SEQ ID NO: 934229 - DNA, 638 bp, Homo sapiens
gttgaacataattattttgttatatactcatgctattgcaggtatcaatatctcatttgattttataactgagtagaatcatattgcatgcatatacacaatttatttatatctttacttgttgagggacattcggactgtgtcagtcttggttcagtagaaataaagcttctatgaacacttgtatattaatatagatatctttgtatgcaaatatatttttttctcttagttaaataactaggaatgsactggttgaatcacgatggtatggtaggtacatttacattttagaaaattctgtcaacttcttttccaaagtgtctgtatcattttatatttctaccacaatgcgttaatctcccagctcttccacgtccttgccagtggttatatatttgtttttaaactttagctattctaacaggtatgtagtagttactcattgagcttttaatttgaatttgtctactgacatgcttttgagcatcttttcttgtgcttttaaattttatttttaaatgacaaataataattatgaatatttattgggtacaatgtgggttttgttttgttctgttttgtttttgagacaggacctcagtgtcacagaggctggcatgcaattgtgagcatca

SEQ ID NO: 934230 - DNA, 718 bp, Homo sapiens
agtgttccatctgctattctactactcctcagggattcttcaggccccctcccttccttacacatcaagctcggagatttgcccccacccaggactggcaaattagctttactcaacatgccccaagtcagaaaacaaaaatacctcttagtctaagtagacactttcactggataagcaaaagcctttcctacaaggtcggagaaggccaccacagtcatttcttcccttctgtcagatataattcctctgtttagccttcccacctctatacagtctgataacagaccggcctttattagtcaagtcagccaagcagtttttcaggctcttagtatccagtgaaacctttatatcccttacggtactcagtcttcaggaaargtagaacggactaaaggtcttttaaaaacacacctcaccaagctcagccaccaacttaaaaaggactggacaatacttttaccaatttcccttctcagaattcaggcctgtcctcagaacgttacagggtacagcccatttaagctcctgtatggacgctcctttttattaggccccagtctcattccagacaccagaccaacttcgactatgccccagaaaacttgtcatccctactatcttctctctagtcatactcctagtcaccattctcaactactcacacatgccctgctcttgattacactgccagtttacactgtttctccaagcc

SEQ ID NO: 934231 - DNA, 718 bp, Homo sapiens
agtgttccatctgctattctactactcctcagggattcttcaggccccctcccttccttacacatcaagctcggagatttgcccccacccaggactggcaaattagctttactcaacatgccccaagtcagaaaacaaaaatacctcttagtctaagtagacactttcactggataagcaaaagcctttcctacaaggtcggagaaggccaccacagtcatttcttcccttctgtcagatataattcctctgtttagccttcccacctctatacagtctgataacagaccggcctttattagtcaagtcagccaagcagtttttcaggctcttagtatccagtgaaacctttatatcccttacggtactcagtcttcaggaaaggtagaacggactaaaggtcttttaaaaacacacctcaccaagctcagccaccaacttaaaaaggactggacaatacttttaccamtttcccttctcagaattcaggcctgtcctcagaacgttacagggtacagcccatttaagctcctgtatggacgctcctttttattaggccccagtctcattccagacaccagaccaacttcgactatgccccagaaaacttgtcatccctactatcttctctctagtcatactcctagtcaccattctcaactactcacacatgccctgctcttgattacactgccagtttacactgtttctccaagcc

SEQ ID NO: 934232 - DNA, 598 bp, Homo sapiens
cctggtgctatccccaaacctccactcttaactcttaaagtaaataaacctctgctggcaagactatgctgaacctccttaggcactctctaattagatgtcctggtcctcccaattcttagacctttaatacctgtttttctccttcttttattccatttagtttttcaattcatacaaaaatatatccaggccaccactaataattctacatgacaaatgtttcttctaaaaactccacaatatcaccccttaccacaaaatcttccttcagcttaatccttccyactctaggttcccacgccacccctaatcctgctcgaagcagccctgagaaacatcacccattatctctccataccacccccaaaaattttcgccgtcccaacactttaccactatttcattttatttttcttattaatataagaagacaggaatgtcaggcctctgagtccaagctaagccatcatatcccctgtgacctgcacgtacacatccagatggccagttcctgccttaactgatgacattccaccacaaaagaagtgaaaatggcctgttcctgccttaactgatgacgttatcttgtgaaatt

SEQ ID NO: 934233 - DNA, 648 bp, Homo sapiens
catgtgcctctaatcccagctacttgggaggctgaggcaggagaatcacttgaacccgggaggcggaggttgcagtgagctgagattgcaccattgccctccagcctgggtgatagagtgagactccatctcaaaaaaaaaaaaaaaaaaaagttatgaaatcattttataaaatagagacttaccactctagtaacctttgtgactgtgtggtaatctcatgcatattggacaaaagaagaacaattttgctgaaccttgttttgttatcagcatgaaagaggttaaccatgctggtggctcctctggatgttgtaggaatcatataccacctatggaaatgctactctgatcactcaytgaagattctgaaaaggtaaaagctttcattcatattcagagcaagaatagagtctccaggtgctagtcagactcatttgccatagagggagggttgggggtgagctgcttgtgttcagaggagacagtggcctcaggcctcaggagaaactcggggccaaccctactccagacagacagctactgctgattcaagagcacccttaatttcttagccttctcaatgctgctcctgcagcttcccagaagtcacgtgaatcacatgcatcttcagactaagcccccttc

SEQ ID NO: 934234 - DNA, 648 bp, Homo sapiens
catgtgcctctaatcccagctacttgggaggctgaggcaggagaatcacttgaacccgggaggcggaggttgcagtgagctgagattgcaccattgccctccagcctgggtgatagagtgagactccatctcaaaaaaaaaaaaaaaaaaaagttatgaaatcattttataaaatagagacttaccactctagtaacctttgtgactgtgtggtaatctcatgcatattggacaaaagaagaacaattttgctgaaccttgttttgttatcagcatgaaagaggttaaccatgctggtggctcctctggatgttgtaggaatcatataccacctatggaaatgctactctgatcactcactgaagattctgaaaaggtaaaagctttcattcatattcaragcaagaatagagtctccaggtgctagtcagactcatttgccatagagggagggttgggggtgagctgcttgtgttcagaggagacagtggcctcaggcctcaggagaaactcggggccaaccctactccagacagacagctactgctgattcaagagcacccttaatttcttagccttctcaatgctgctcctgcagcttcccagaagtcacgtgaatcacatgcatcttcagactaagcccccttc

SEQ ID NO: 934235 - DNA, 641 bp, Homo sapiens
acactcgtatgtatataatgtctaggtacataggcatgtatattatgattactaacatacataattttttttcagatggagtctcgtcctgttttccaggctcgagtgcagtggcatgaccttgtctccctgcaactgccacctcctggattcaagtgattctcctgcctcagcctctcgagtagcaggaactacaggcatgtgctgccatatccagctaatttttgtatttttagtagagacggggtttcaccatgttggccagcctggtctcgaacaactggcctcaagtgatctgcccgcctcagtctcccaaagtgctgggattacaggagtgagccaccgcacccagccaygattaataacatataggactttaatacaaaaactgaacaacgatatgaagcataataaaataattatttattgtagaaaatatgtattcaattacatattcatggtgactttaagtttaccccttaaaaaatagttttcagagaattcaagctgtaacctacacataatcaggtattttattaaatgtcacatcctcaaaggtatccttctgcctcctccattcaaatttagtttccctaatgtatgctctcgtaacactatatttttcttatctgtacttatta

SEQ ID NO: 934236 - DNA, 600 bp, Homo sapiens
tgtcagagtgttctcagtttagggtagtctaccatcatcttccaggatacatgttatttttgcaaaggcaaaattgaaggaaaatccattgaatgaagatggataggaaccaacgctgctcagttcttcagatttactgtgggggctcttgtttcttcggttccttggggaatatggtagtgcttctgactttttcttcttgggagttgaaggacttgcacttttacatcttctaccttaatgtcttttcctccattggtcagggaaccaaggtaaaattatttcagtttctaattatatctcttccaaatttgcatttttggcagagaaatcaccccaggcaggtgcacataatcactggatccactgatagagaaaaatyttcatttttcaccttgcttctatatgccaccattgtatctgtaggatgattatggcgttcagatatcctgacttcagtggcagctcagatatgtgtctaataatcctccaaatctcattatctcacatccttagtgtagagactccctagaaggtggctgtaattgcctttctggagggataggaggaagagtctcgaggaaacattacaggagtttt

SEQ ID NO: 934237 - DNA, 633 bp, Homo sapiens
ccttacaaaagaattttaacatctttggtgcctgaaggaaaatgttaaaagtaaaacacccaaatgcaatgctgacaggtatttcttttgtgattttacttttctcaattttctttttttcttttttttttttttttgagayggagtctcgctctgtcgcccaggctggagtacaggggcgcgatctcggctcactgcaagctccgcctcccgggttcacgccattctcctgcctcagcctcccaagtagctgggactacaggcgcccgccactacgcccggctaattttttgtattttttttagtagagacggggtttcaccgttttagccgggatggtctcgatctcctgacctcgtgatccgcccgcctcggcctcccaaagtgctgggattacaggcgtgagccaccgcgcccggccctcaattttcttaaacatcattctttttccaacacaaaaagaatgaaaattagaaatgacacagctacgtaagcctttccttaatgcctgctgctaacgattcccctacgccccctctccagtctttctcttcatgtatcctatttctttatcatccaaatccatgtatttcttaacaataatatacaatctacaggcagtttgacataagc

SEQ ID NO: 934238 - DNA, 605 bp, Homo sapiens
gtattaatgaaagttttgaatcctagttttacaaactggtttatataatcttgacttgaagacatttaggttcatctattctgtaatcatcccaggtttctccccaacctctccctcctctgctgcatttaatcagtttccaaaactcataaaatctgtcacggtaacagccctgttatctgacccttcttctcccctctcactactcctaccttttggagaatgtcaccccttcttgccgtgaccagtgaagttrtctcttgttctctctgaagtcaaccttccacattctctcatttgcctttccaaatgcaattgctaatggatgttgagagcttgctaaagtctacagaaaagtccaaactccttagcctgtatacgagactgctgggatcttttttctctctggagtatgtaacggttaagaacacaagttgtctgagatgaacatgcatttctacacttcttagctctgtaaccttgagctctttatgtaaccatgagcgttgctcccattgttataaaatcaaatagcgacagtgtctctctaggtttgttgggcgaagtgagtgagtttataattttactattaaagagcgtaactt

SEQ ID NO: 934239 - DNA, 605 bp, Homo sapiens
gtattaatgaaagttttgaatcctagttttacaaactggtttatataatcttgacttgaagacatttaggttcatctattctgtaatcatcccaggtttctccccaacctctccctcctctgctgcatttaatcagtttccaaaactcataaaatctgtcacggtaacagccctgttatctgacccttcttctcccctctcactactcctaccttttggagaatgtcaccccttcttgccgtgaccagtgaagttgtctcttgttctctctgaagtcaaccttccacattctctcatttgcctttccaaatgcaattgctaatggatgttgasagcttgctaaagtctacagaaaagtccaaactccttagcctgtatacgagactgctgggatcttttttctctctggagtatgtaacggttaagaacacaagttgtctgagatgaacatgcatttctacacttcttagctctgtaaccttgagctctttatgtaaccatgagcgttgctcccattgttataaaatcaaatagcgacagtgtctctctaggtttgttgggcgaagtgagtgagtttataattttactattaaagagcgtaactt

SEQ ID NO: 934240 - DNA, 615 bp, Homo sapiens
cctatcaaggaaaagatcacttgcggtttgaatccaggtacgttagctctctactattacaaaaccaagaattcgtgaaatcaaaaaccagtatcatgtattacttacagtgtccacttatcaacaaaaatatatcagacatgcatataaacaaaaaaaaattttaaaatttgaacaaaatatagataatcatctgtatgtactgcagagtaaccaccttaagcatcaagttaacacaatgagaaaaaagtctatacaacaaatggtgctagatcaaytgcctgctcccttgtaaaaactacccccaacccccacctcatgccatatacaaaattactttaatttggatcatagacccaaacctaaaagataaagccataaagcttttagaaaaaaaagtgacctcagcttaggaaaagatttcttagtacgaaaaaagactttatcagaatttaaacttctgtacatacaaagacctcattaagtaaatgaaacataaagtcacaggcagaaagtatttaaaatagatatctctgacatataattttatcttatattcatatataagatacttatatatacctattatatatataaaacctattatctatatat

SEQ ID NO: 934241 - DNA, 593 bp, Homo sapiens
gcatcacattacctaacttcaaaacatactataaaactatagtaaccaaaaaagcatgatattggcataaagacagacacatagaccagtggaacagaatagagaacagagaaataaattcatgggtttataggcagcttgttttccacaaaggtgccaagaacgcactttggagaaaagaaagtctcttcaataaatggtactgagaaaactggacgtccatgtgcagaagaatcaaactagacccacatctctcactatacatgacaatcaactgtaaataaattaaaggcttaaatgtaagacctgaaactatgagactactagaagacaatatagaggaaatacttcaccaaattggactgagcaaggtttttttktgtgtgtgtgtaagtcctcaaaagcacaggcaacaaaagcaaaaatagacaaatgaattaaatttaaaaagcctctgcacagcaaaggaaacaataaatagagtgaaaagacaacctgtagaactggagaaaatatttgcaagctatgcatctgaaagtatctagaatatatagggaactcaatagcaaaaaaaacacaatttttaaaatagg

SEQ ID NO: 934242 - DNA, 540 bp, Homo sapiens
gaggctgagtcactttccaaggacatccagtgtgtgagtggcatggctgaaccctacttaatataaagcctgaaagtggctccgagtaggaaagatcaggttcctcaaaagactattctgggggtctcgcagcgtgggaaggatgctatgcctatttytgtagagccccaccggatctggggcgctcttcactgtggcttttttttttttttttttttgagacagagtttcgctcttgttgcccaggctggagtgcaatggtgcaatcttggctcaccgaaacctccgcctcccaggttcaagcaattcttctgcctcagcctctggaatagctgggattacaggcatgtgcaccaagcccggctaatttttttgtatttttagtagagacgaggtttctccatgttggtcaggctggtcttgaactcccaatctcgggtgatctgcctgcctcggcctcccaaagtgctgggattacagatgtgagccacgcgcccggcttcattccggctttgctgagctaagagggccaacgcttag

SEQ ID NO: 934243 - DNA, 540 bp, Homo sapiens
gaggctgagtcactttccaaggacatccagtgtgtgagtggcatggctgaaccctacttaatataaagcctgaaagtggctccgagtaggaaagatcaggttcctcaaaagactattctgggggtctcgcagcgtgggaaggatgctatgcctatttctgtagagccccaccggatctggggcgctcttcastgtggcttttttttttttttttttttgagacagagtttcgctcttgttgcccaggctggagtgcaatggtgcaatcttggctcaccgaaacctccgcctcccaggttcaagcaattcttctgcctcagcctctggaatagctgggattacaggcatgtgcaccaagcccggctaatttttttgtatttttagtagagacgaggtttctccatgttggtcaggctggtcttgaactcccaatctcgggtgatctgcctgcctcggcctcccaaagtgctgggattacagatgtgagccacgcgcccggcttcattccggctttgctgagctaagagggccaacgcttag

SEQ ID NO: 934244 - DNA, 557 bp, Homo sapiens
cttcttcccttgaagccaggagcagggcccttctggatgccgcatggtcaagcctcatctactgtacctggagccttctcctgaccctgaaccctgcccttgcccagcctggctctcctgggggctcatgggactcctgaggccctcccatcaccggtcaccccgcccgccaggcccctggcagcctcatatctgccaatacaaagccatacatcttggtgtgtgacaaatcactttttaattgcctgaaggaagaaatccattagtctttcctttccgtgagaaacatcataacgttcagcagagcccaggctggctggaggccgaggctgggggcgcggggctatttttagtttgmgtcaacatccccctccaagcatccattctagaaagggaggaattaaatcttcctgacaccccgggggccacaccggggagagcttgctgcagacccggggaggagaagccactgtggatggagtgttatttgtccaaatgaatttgtgtcacgtttcacaaaaaatctgcttccctgtaaacaagtggcagtcctcacc

SEQ ID NO: 934245 - DNA, 659 bp, Homo sapiens
cttgtggcctatggagaaatacatcaaatgtagattatgaaaatttagttgtaggggattaatgaaaagactacttagtcaagcaagtagactcttcatctagctcattttgtaatctatttaatattagataatttggtttacagggactctgtgtatgggtaaggagcatactccaaattcttattatcctcctaataatcatcataatagtctccctggtgcactgtattctctcaaaggttgtaaatgtttgcatgcagccatctctagattgtcaatggtctctcttcaaatggaatgagaaaaggtgaaagaaatttgtgaccatgaggacactgtaacctatgaatgacacagtgagacaggaaacccaaaatcatggtaattgaragtggtgctagggccttaagttttggtcattctctcacctaagtgagaacctggccaaaaaggaggaattttttaaacaaaattatgggaggcaattgttttggactaagctcatgcactgggccccaacaggctaaaccaaacaaaatggagtcacttgtgctaaatgtgacaatcaaactaagactttaaggaaacccatagatcctagaacagaccaggtttggtttttctcatgtaaacagaacattccagcataaagaggt

SEQ ID NO: 934246 - DNA, 841 bp, Homo sapiens
cccaccaaaaggcccaagggttagtatttttccacgtcttcaataacacttgttattattttttaattatcaccatcttattgggtgtgatattacattgtggttttgatttgcatttccctagttactagtgatgttgagcatgttttcataggctttctggtaatttctatgtctttttggagaaatgtctattyaagctatttgtctttttttttttttttttttttgagacggagtctcgctctttcgtccaggccagagtgcagtggcgctatctcagctcactacaagctctgccttccaggttcacaccattctgctgcctcagcctcccaagtagctgggactacaggtgcccgccaccacgcccggctaattttttgtatttttagtagagacggggtttcaccatgttagccaggatggtctcgatctcctgacctcgtgatccgcccgcctcggcctcccaaagtgctgggattacaggcgtgagccaccgtgcccggcctatttgcccatttttaaattgttttttgatgttgttgttcagttgtaggtgttttttcttttatattgggatatgaaccccttatcaaatatgtggtttgcaaatattttctcccactctgtatgttgccttttccttctgttggtgttttcctttgctgcacagaagttttttaaaattgatgtagtcccatttatctctttttgcttttgttgcctgcgctgttggtgtcatccaaaaaaaaattgccaaatacaatgtcatgaagagtttctccagttttttgttttgttttgttttgtttgtttgtttgttttcccttggagtttt

SEQ ID NO: 934247 - DNA, 581 bp, Homo sapiens
ttatgctaagtggagtaagacaaaaggacaaccactatataatctacttatatgtggaatctaaatatgtcaatctccttgaaacagagagtaggaaggtgattaccagaagttgggaagtgcgggggaggagaagggatagggacaagggagatattgatcagaggatacgaatgttcatttagactggatgaataatttttagtgcaataatctattgcactgcatggtgaccacagttaataatgtattgcgtatttcaaaattgcyggaaaaataaatttttaacattctcactacaaaaaataatggtaagaggatgaggtaatagatatgttaatttgcttggctgaatgttggggtgatcagacccaacaccaggtcgtgggggcgatgaagttcggtggagtcaaaagattgataaaagacggtttgagagagaaaggtgggaccagggggccatcacaatcatgaaagctgcaaagtccgcgagctctgggagcccaatctattggtaatccaacagagaaacaggtggtgagaatgtggaggtcaaaagggcacatagcattaagcacatg

SEQ ID NO: 934248 - DNA, 595 bp, Homo sapiens
gctggagtgcagtggtgcgatcacagctcactgcagcctcaaactccctggtctcaggtgatcctcccacctcagcctctggagtagctgggactttacagatgtgccaccattcctggataatgttttaaaaatttttttattgagagatgggctggtttagaactcctgggctcaagccatgtggctgctttggcctctcaaagtgctggtattacaggtgtgaaccactgcactcagcctcaacamtcttctttttgatcactctgtacctagtcgtactggctttttgtttctctcctgcaccaattcaggaccattgtgcttgctgtcccctcctcatgtgtttttctcacatgcacatggtgaaaaacttttgagactctgcttaaatattattttatttaaaaagtcttctctaccaatcttataaaatgaaatattaattgcatggaccttgttatttcccacgttgctttattcctcttcataacacttatcactctattacccatttatatgtgtgtttgttttttctaactcttcctacaagaatatcgtcttcatgagtatgggaactttgtattttcgctgc

SEQ ID NO: 934249 - DNA, 595 bp, Homo sapiens
gctggagtgcagtggtgcgatcacagctcactgcagcctcaaactccctggtctcaggtgatcctcccacctcagcctctggagtagctgggactttacagatgtgccaccattcctggataatgttttaaaaatttttttattgagagatgggctggtttagaactcctgggctcaagccatgtggctgctttggcctctcaaagtgctggtattacaggtgtgaaccactgcactcagcctcaacaatcttctttttgatcactctgtacctagtcgtactggctttttgtttctctcctgcaccaattcaggaccattgtgcttgctgtcccctcctcatgtgtttttctcacatgcacatggtgaaaaacttttgagactctgcttaaatattattttatttaaaaagtcttctctaccaatcttataaaatgaaatmttaattgcatggaccttgttatttcccacgttgctttattcctcttcataacacttatcactctattacccatttatatgtgtgtttgttttttctaactcttcctacaagaatatcgtcttcatgagtatgggaactttgtattttcgctgc

SEQ ID NO: 934250 - DNA, 704 bp, Homo sapiens
acaaaagatgacacgtttaatgaggatgtggcgaagtttgaacgcttgtacactattggtgggaatttaaaattatgcagctactatgggaaacagtatgaaaagtcctcaaaaaaatkaaagataaaaatactatatagtccagtgggaactactggggaggggaggtgggggcaaagggttgaaaaactatctattgggtgctatgttcactatctgggtggtgggaacattcctaccccaaacctcagcatcacacaatataaccacgcaacaaacctgcacattttaccccttgaatctaaaataaatgttgaaattatcaaataagaagaaataccatataatctggaaatcccacttctgagtatatgtatttaaaaaactgaaatcaaaattttgaagagctgtctgcactgctatattcattgctgcattgttcataatatccagtgtatgaaagcagcccacgtgtctatccaaagatgactggattaaaaggcagcatataatacatacaatagaatatagtttagccttaaaagagatctctgccatttgtgacaatgtggatgaaccagaaggacagtccgttatgtaaaaataagccagtctcagaaagacaaatattgtatgattctattcatatgagttatctcaactggtcattctcatgaaagcagataatagaatgctggctgcca

SEQ ID NO: 934251 - DNA, 704 bp, Homo sapiens
acaaaagatgacacgtttaatgaggatgtggcgaagtttgaacgcttgtacactattggtgggaatttaaaattatgcagctactatgggaaacagtatgaaaagtcctcaaaaaaattaaagataaaaatactatatagtccagtgggaactactggggaggggaggtgggggcaaagggttgaaaaactatctattgggtgctatgttcactatctgggtggtgggaacattcctaccccaaacctcagcatcacacaatataaccacgcaacaaacctgcacattttaccccttgaatctaaaataaatgttgaaattatcaaataagaagaaataccatataatctggaaatcccacttctgagtatatrtatttaaaaaactgaaatcaaaattttgaagagctgtctgcactgctatattcattgctgcattgttcataatatccagtgtatgaaagcagcccacgtgtctatccaaagatgactggattaaaaggcagcatataatacatacaatagaatatagtttagccttaaaagagatctctgccatttgtgacaatgtggatgaaccagaaggacagtccgttatgtaaaaataagccagtctcagaaagacaaatattgtatgattctattcatatgagttatctcaactggtcattctcatgaaagcagataatagaatgctggctgcca

SEQ ID NO: 934252 - DNA, 664 bp, Homo sapiens
ttttggttattgtgctatgtgagggcttttttaaaattttgaatacaagtcccatatcagatatataatttgtgagtattttctaccattctctggttttctttccactttcttggtaagatcacttgaagtacaattttttaaaattttgagaaaataccttctattatttyttatcccttgtgcttttaatgtcttatgtaagcaggctttgcctaatccaaagtctcgaaaatttattcctacatttttatttaagagttttacagtttaatgcttacatttcagtctatgattcatgttgagatagttttgtgtatggtatgatgaaggcattcaaccaattgttttacatgtggatgtccaatgtcccaattccatattttgaaaagactatttttccccattgaattttcttggcactgttgttgaaaatcaattgaccgttagtgtagttgtttatttctagactctaaaacagatttcattgttctatatgtctagtcttaggccagtatcacactgattactgtagctttgtagtaagctttgaaattaggaagtgtgagtcttacaacttcacatctccttttcataattatttggctcttctgggtcccttgcaattccatgtgaattttagaatcaacctgccaatttctaa

SEQ ID NO: 934253 - DNA, 636 bp, Homo sapiens
agtaccctgccatgtgaggtgtcagtctgcccctgctgggggggcttcccagttaggctgctcaggggtcagtgtcagggacccatttgaggaggcagtctgcccgttctcagatctccagctccgtgctgggrgaactactgctctcttcaaagctgtcagacagggacatttaagtctgcagaggttactgctgtctttttgtttgtctgtgccctgcccccagaggtggagcctacagaggaaggcaggcctccttgagctatggtgggctccacccagttcgagcttctgggctgctttgtttacctaagcaagcctgggcaatggcgggcgcccctcccgcagcctcactgccgccttgcagtttgttctcagactgctgtgctagcaatcagggagactccatgggcctaggaccctctgagccacgtgcgggatataatctcctggtgcaccgtttttttaagcccgccggaaaagcgcagtattcgggtgggagtgacccgattttccaggtgccgtctgtcacccctttctttgactaagaaagggaactccctgaccccttgtgcttccagagtgagggaatgcctcgccctgcttcgactcgcgcacggtgcgtgcacccactga

SEQ ID NO: 934254 - DNA, 636 bp, Homo sapiens
agtaccctgccatgtgaggtgtcagtctgcccctgctgggggggcttcccagttaggctgctcaggggtcagtgtcagggacccatttgaggaggcagtctgcccgttctcagatctccagctccgtgctgggggaactactgctctcttcaaagctgtcagacagggacatttaagtctgcagaggttactgctgtctttttgtttgtctgtgccctgcccccagaggtggagcctacagaggaaggcaggcctccttgagctatggtgggctccacccagttcgagcttctgggctgctttgtttacctaagcaagcctgggcaatggcgggcgcccctcccgcagcctcactgccgccttgcagtttgwtctcagactgctgtgctagcaatcagggagactccatgggcctaggaccctctgagccacgtgcgggatataatctcctggtgcaccgtttttttaagcccgccggaaaagcgcagtattcgggtgggagtgacccgattttccaggtgccgtctgtcacccctttctttgactaagaaagggaactccctgaccccttgtgcttccagagtgagggaatgcctcgccctgcttcgactcgcgcacggtgcgtgcacccactga

SEQ ID NO: 934255 - DNA, 538 bp, Homo sapiens
ggaggcaggacctgtgggtatttggtgttttaagtttgaaatcatctgcagcctgtctgagggcctcagcaggacgcgcggggcgcccctgactatttctttgctccgaagccggttggggacaccaggcgaaagcggagctgttctgtttaaacgccctttgtgtgtgaggacgcggcctcagtgcagctacgctgggtyccgcgtagggagcgcaccccagaaagggagggtctcggccgacggtccgggaggcccccaggttggtatcttgcctggtgcttccagagggagggagaaggggaggcgaacagtcagaaatgcagaagtgcgagccgctcgagttcggggtacccacccgcccccgagctagagtttttggaaacgaaagcggtctaagcccagggacgctgcgttttcgtttaagaacaaaactccagcaaatacttggaaacacttgagtaacgcgcgttgtttctttaaaacattttgtcagaggttgggtgagttcttttaatggcacaaattaaattcagct

SEQ ID NO: 934256 - DNA, 595 bp, Homo sapiens
tgaattctaccagaggtacaaagaagagctggtaccatttctactgaaactattccaaaaaatgaaaaagagggactctccactgattcattttatgaggccagcataatcctgataccaaaatctggcagagatacaacaaaaaaagaagacttcaggccaatattttttwattttcttctgctaacctagaggttggtttgcttttgttctgctagtttctctaggtgtgacattaggctgttaatttgagatctttctaacttcttgacgtgggtatttagcactataaactttccttttaacactggtttcattgtgtcccaaagattctggtatattgtgtctctgttttcattagtttcaaagaattgtttgatgtctttcttaatttcattctttatccaaaagttattcagaagtagcttgttcaacttccacattattgtatggttttgatggattttcttggtacttatttctatttttactgcactgtggtccatgagtgtatttggtacgattttgatttttttaaattttttgagacttgctttatggccaagcatgttaatgatcttagagtatgtgtcac

SEQ ID NO: 934257 - DNA, 645 bp, Homo sapiens
tcattatccaaagatcattctagccttatcccttgcttgtctgtaacctcccactccaaaagtaagaaacctggtacctaccatcctgtcattaatgaactgaattgttcagttccagtgtacatatatagtagtgtagaacttttaacacatacccctgtgggaaacaactttattaactagaacatggtgtttatgtgcatttttttcctttagtcttacagactccactcatttccaaagcaaattaggtcagcattcccttatgtgaagttatagcatatatctaaaatagtgttacattcttttgtcccagctaacattctaaatcagggctccccaccctctgggccatggacagctatggccatggcctgttaggaactgggccatacagcaaaaggtgggcagcaggtgagtgagcattactgcctgracactgcctcctgttagatcagcagcggcgttagattctcacagaagcccgacccctatcgtgaacggtgcatgtgagagatctagattgtgctctccgtatgagaatctaactaatgcctgatgatctgaggtgggacagtttcatccccaaaacccccaatccttcctgtctgtagaaaaattgtcttgcaagaaaactggcccctg

SEQ ID NO: 934258 - DNA, 624 bp, Homo sapiens
  misc_feature 393: n = A,T,C or G
aagttcaaaacattgggttcaaaatctcagagattgagatatattccaaccaactcaaccctgtggaagtgccaaggtttcctcagtgccactcttgaaactacatcaccaactgaccctttaatgtatttttgcactatataacatttatttcttagagtaagtccttccctagaaaagaagcagtttggacacatatattattaaagccgtcacatagaatattatcctctcattgctagaaggtggccttcaagatggctgactagaggttccaggcactgtgtcctccmaaagaaagaccaaaacagcaagtagataatcataccttgaagagggcatgaaagatggcactagaattcagcagcaaagtgacgaggaatctctgaggtntggaaggaaaggaaaatgaagcagcagcccagccagaatcagcttaaagccaggacaggctctccagtgtggtgaaaaggtaaaaaagagagccccagtggtccatattcccactgtggacactgaaatcctagccaagggacagtctctcagccctcgcaggccctgagactactatagggagctgcctggaatctatgtgatggtcattgtcccagagaaggagttggc

SEQ ID NO: 934259 - DNA, 620 bp, Homo sapiens
gtatggctgttaatcctagctactggggaggctgaggcaggagactcatttgaagccgggagacagaggttgcagtgaaccgagatcacgccactgcactccagcctgggcaacagagcaagactctgtcttaaaaataaaataaataaaaattacgaaaaaatgtgcttggatgggcttggcaaactttagccattagctcacgtaccactttggaagggcatacctttagtcacttcaccctttaatccctttgctcaagactaaagttccgagaggaagtctaattgactgagttgtgtccatgtgggcagtgcaggaaagggtgcaaygggaggcggctccagggacgtctttggcttccatcatgggggagcaagcgcctggattatccaccctaacaaatctggacaaaggaaaacgaggttctctgaggaaggagacatagagcccaaggagctaaccaagagactaatagtcatcctgtcttgtcattttcttttacacatgtgtgtgcattatcttacacttatcactttgttttctttctctcctttaattgcaccctgttgccaaaagttaaaataaaatgaaagtattgagatagctcagtaactgac

SEQ ID NO: 934260 - DNA, 482 bp, Homo sapiens
ctgcagcaatcagagggccccccccaaagaggcaagggaaggggggccctgggaaagaaactcagcttggctgtcagagtttgcagcataaccagtgtgcttattgtaaagaaataggacagtagaaaaacaaataccctcagcttaaaagaaaacaaggtgactcagagcaggaggccccggacaakgaggaaggggccctgctcaacctggcagaagggttcttggacagagggagaccgggctcaagcgtccccaaagagcctgtgctcagaatgacagtcaggggtggagacactgactttcttgtagatagcggtgctgaacattcgctagtaaccgccccagtcgcccccttatccaaaaagactattaacatcatcggagccacgggggtttcagcaaagcaagctttctgcttgcctcggacttgtactgtaggaggacatcaagttattcatcagttttggtacatgcctgac

SEQ ID NO: 934261 - DNA, 482 bp, Homo sapiens
ctgcagcaatcagagggccccccccaaagaggcaagggaaggggggccctgggaaagaaactcagcttggctgtcagagtttgcagcataaccagtgtgcttattgtaaagaaataggacagtagaaaaacaaataccctcagcttaaaagaaaacaaggtgactcagagcaggaggccccggacaaggaggaaggggccctgctcaacctggcagaagggttcttggacagagggagaccgggctcaagcgtccccaaagagcctgtgctcagaatgacagtcrggggtggagacactgactttcttgtagatagcggtgctgaacattcgctagtaaccgccccagtcgcccccttatccaaaaagactattaacatcatcggagccacgggggtttcagcaaagcaagctttctgcttgcctcggacttgtactgtaggaggacatcaagttattcatcagttttggtacatgcctgac

SEQ ID NO: 934262 - DNA, 702 bp, Homo sapiens
gacagtcaggggtggagacactgactttcttgtagatagcggtgctgaacattcgctagtaaccgccccagtcgcccccttatccaaaaagactattaacatcatcggagccacgggggtttcagcaaagcaagctttctgcttgcctcrgacttgtactgtaggaggacatcaagttattcatcagttttggtacatgcctgactgtcccttgaacttttcaggaagggacttgttcagcaagctgagagccactatctctttgacagagcatggctcttcgctgctaaagttacccggaacgggagtcattatgacccttatggtcccccgagaggaggaatggagacttttcttaactgagctgggccaagagagaagaccagctctggctaagcggtggccaagagtatgggcagaagacaaccctccaggattggccagttaagactggggccctgccagtgaggcaaaaagaggagccggtccccagagaagcccttcaaggtatccaggtccgtctcaagcacctaagaacttttggaatgattgttccttgtcaatctccatggaacactcccatccttcctgttcccaagccatggaccaaggactactggccggtacaggatttgcgcttgcttcatcaagctacactgactttccacccaacagtacctaacccgtccacattgttggggt

SEQ ID NO: 934263 - DNA, 627 bp, Homo sapiens
cctctccacacctttttcttttatttttattttttaagttctgggatacatgtgtagaatgtgcaggtttgttacataggtgtacatgtgccatggtggtttgctgcacctgttaacccgtcatctaggttttaagcccygcatgcattaggtatttgtcctaacgctctccctccccttgtcccccacctccgacgggccctggtatatgttgttcccctccctgtgtccatgtgttctcattattcaactcccacttatgagtgagaacacgcagagtttggttttctgttcctgtccacacctttttcttctgtgcacacaagcacatgtatttgcacataagtgtttattgtaaccttttttaaaaaaatggaataatgctatatttattctttggaaagcctgcttttcaggcagcatgtctttgacattgtctcacgttggaacctgggaaccaccttcttctcccagcagttattctgacgtgtggatgcaccacgcttcgtttaaccagccctgcaccgatacgtctttggatggtttctgccttttcccaatcacagacggtgttctgatgaatttcctcgcacacatcacttggtgctctgtgcgtgcatttctgtg

SEQ ID NO: 934264 - DNA, 607 bp, Homo sapiens
tgagaaatagctaagcaggtgtttgtaaacagggatgcagtaagccgcgagggaaagcgcaaagagaatgaaggtcaggcctggtgaaacgctgacctgtttgttagctgcagtaatcagagctgtccccccaaagaagcaagggaaggggggccttgggaaagaaactcagcttggctgtccgagtttgcagcgtaaccagtgtgcttattgtaaagaaataggacagtggaagaacaaatgccttcagctcaaaagaaaacaaggtgacttagagcaggaggccccggacaaggaggaaggggcccggctcaacatggcagaagggttattggactgagggagaccgggytaaagtgtccccaaagagcctctggtcagaatgacagtcgagggtggagacattgattttcttgtagataccggtgctgaacattcgctagtaactgccctggtcgcccccttatccagaaagactattaacgtcaccggagccacgggggtttcagcaaagcaagctttctgcttgcctgggacttgcagtgtaggaggacatcaagtgattcatcagtttttgtacatgcctgactgtcccttgcccttgttg

SEQ ID NO: 934265 - DNA, 730 bp, Homo sapiens
agcatgctgggcgaatggttcatgcctgcaatccaagcactttgggaggctgaggcgggaggattgcttgagaccaggagtttgagaatagcctgggcaacatagtgagactctgtctctaccaaaagtaaaaaaaattagaccagacacagtggctcgtatcggtaatcccagcactttgggaggccaaggtgggtggatcacaaggtcaagagatcgagaccatcctggccaacatggtgaaaccccgtctctactgaaaatacaaaaattagccgggtgtgatggtgagcgcctgtagtcccagctactcaggaggctaaggcaggagaatcacttgaacccggraggcagaggttgcagtgagccgagattgtgccactgcactccagcctggtgacagagcgagattccgtctcaaaaaaaaaaaaaaaaatacaggcatggtggctcatgtctgtagtcccagctactcaggaggctgatgtgggaggatcatttgagcctgggaggtcaaagctgcagtgggctgtaaacacagcactgcacctagccttggcgacagagtgagaccctgtcttagaaatgactgcaattatctaggagatacaaaaaaaactaatgaacactttaaggaataacatgtaatttcttatttacattcaattatcaagatatagatgcagaaaaattttaaaggaactaacgcccagtgtcaattacattctaa

SEQ ID NO: 934266 - DNA, 730 bp, Homo sapiens
agcatgctgggcgaatggttcatgcctgcaatccaagcactttgggaggctgaggcgggaggattgcttgagaccaggagtttgagaatagcctgggcaacatagtgagactctgtctctaccaaaagtaaaaaaaattagaccagacacagtggctcgtatcggtaatcccagcactttgggaggccaaggtgggtggatcacaaggtcaagagatcgagaccatcctggccaacatggtgaaaccccgtctctactgaaaatacaaaaattagccgggtgtgatggtgagcgcctgtagtcccagctactcaggaggctaaggcaggagaatcacttgaacccgggaggcaraggttgcagtgagccgagattgtgccactgcactccagcctggtgacagagcgagattccgtctcaaaaaaaaaaaaaaaaatacaggcatggtggctcatgtctgtagtcccagctactcaggaggctgatgtgggaggatcatttgagcctgggaggtcaaagctgcagtgggctgtaaacacagcactgcacctagccttggcgacagagtgagaccctgtcttagaaatgactgcaattatctaggagatacaaaaaaaactaatgaacactttaaggaataacatgtaatttcttatttacattcaattatcaagatatagatgcagaaaaattttaaaggaactaacgcccagtgtcaattacattctaa

SEQ ID NO: 934267 - DNA, 581 bp, Homo sapiens
atctctcttgcttgcctcaggcctccctatttcctaagacacaacaatattgaaattaggccaattaataaccttacaatggcttctaagtgttcaagtaaaaagaatagccacacatctctcactttaaatcaaaagctagaaatgattaaacctagtgagaaagccatgtcaaaaactgagataggccaaaagtgagacctcttgtgccaaatcatttacttttataaatgattttttaaaatgaaaaataatatttgatgacatataaaattatgactaaaatttatgtgtaagaattgtgagtaaaattgttagtaacattgtgaatgcaaaaaaccagttattgagggaaattaaagktgctactccactgaacacacaaatgataagaaagttaaacagccatattgctgatagggagaaagttttagtggtctggatagaagacaaaactaaccacaacattcccttaagccaaagcctaatccagatcaaagccctaaatatcatcagttctatgaaggctgagagatgtaaggaagctgcagaagaaaagtttaaaactagcagaggttagt

SEQ ID NO: 934268 - DNA, 663 bp, Homo sapiens
tacagaagacagcaaaggtattggggatcacatggaaactatatactgcttactgaccacagagttccagaaaagtggagcagatgtatcggactacgaaaaatagtttagggaaagtgtgtcaagaaataggattaaagtgggtataaactctccctatggtattgttcaagattagatgtaccccttctaaaagaataggatattccccttatgtaatattatatcatatatatatatatatatatatgccccctcccatactacagggactcccagacactccttgagagctaggtgaaattgagttacagcaacagctacaggctttagggaaaattacacaaaaaatttcagcctgggtaaatgagaggcrccccatcagcttattctccccagttcaccctttctccccaggtgatcaggtgtggatcaaggattggaacgtagtccccttgcggccatggtggaaaggaccccagaccatcgtcttgaccactcccacagccataaagatagagggaatcccagcctggatctaccacagccgcataaaacctgcagcacctgagacctgggaggtgaagccaagtgtggacaacccctgcaaagtgactttgaagatgacaagccatgcttcagtcacacccggaagctgactgg

SEQ ID NO: 934269 - DNA, 588 bp, Homo sapiens; identical to SEQ ID NO: 920388

SEQ ID NO: 934270 - DNA, 583 bp, Homo sapiens
aatcttttcttctcaaacaaaaaccaatattttattataaataaatgacttgttttattttaacttttagttaatgctctcagtttataacactgaaataaaattctcactgaatgatttaagaggttaactttatattttaattcacttggaatttgaaatatttgattactttttttaaagaacaaccacattttattatcattatttttgggcttataaaagcctgaatgtcaatgaagatgcyattattattaaagaagcaagccgcttctttaagaaaatttcagtggttctcagactcagtcttgtcattggaaactaagataatattccccagttaggagaaagtgccattaaagtaaaagtttctgattgcaattttccttagtaaaatttcaggaaagaaacatttttttggcactcataatctcctaggattgtgggtttctgtccactcttccttagacccaattcctttatgtgcccagtaggtctttaatttcaaaatacgtggtatccacaccctggtaactatcagctgttgccaattcctccttagaagctttccttgtataatccc

SEQ ID NO: 934271 - DNA, 582 bp, Homo sapiens
ggccctgagggccatccagcctccgtctcccaacactaagttcactttgtgtctctcatgacagggagaaaacttagcattccttggagacctgaagggatgcagtaagcttaagaattttcaagagtttatcaatcagtcagcccttgttcatcctctagtggatgtgtggtggtattgtggtggacctttactgggcactctgctgaataacttaagtggcatttgtactttagtccagttggctatcccttttaccctggcatttcatcaaccagagggaggaaaaataagacatcataaagcwagagaagcctcttatgggtctttcaactctcacgtctatttagacacaactggagtcccatggggaatacaagatcaatttaaagcttgaaatcaaatagctgcaggatttgagtcaatattttggtgggtgacacttaataaaaatataatttggataaactacatctattacaaccaatagcaataagcttttcatgagttaaaaactcatggccccagccctggggctacctgacctgacaaaaccctttacactctaggtgtcagaaagag

SEQ ID NO: 934272 - DNA, 582 bp, Homo sapiens
ggccctgagggccatccagcctccgtctcccaacactaagttcactttgtgtctctcatgacagggagaaaacttagcattccttggagacctgaagggatgcagtaagcttaagaattttcaagagtttatcaatcagtcagcccttgttcatcctctagtggatgtgtggtggtattgtggtggacctttactgggcactctgctgaataacttaagtggcatttgtactttagtccagttggctatcccttttaccctggcatttcatcaaccagagggaggaaaaataagacatcataaagcaagagaagcctcttatgggtctttcaactctcacgtctatttagacacaactggagtccmatggggaatacaagatcaatttaaagcttgaaatcaaatagctgcaggatttgagtcaatattttggtgggtgacacttaataaaaatataatttggataaactacatctattacaaccaatagcaataagcttttcatgagttaaaaactcatggccccagccctggggctacctgacctgacaaaaccctttacactctaggtgtcagaaagag

SEQ ID NO: 934273 - DNA, 582 bp, Homo sapiens
ggccctgagggccatccagcctccgtctcccaacactaagttcactttgtgtctctcatgacagggagaaaacttagcattccttggagacctgaagggatgcagtaagcttaagaattttcaagagtttatcaatcagtcagcccttgttcatcctctagtggatgtgtggtggtattgtggtggacctttactgggcactctgctgaataacttaagtggcatttgtactttagtccagttggctatcccttttaccctggcatttcatcaaccagagggaggaaaaataagacatcataaagcaagagaagcctcttatgggtctttcaactctcacgtctatttagacacaactggagtcccatggggaatacaagatcaatttaaagcttgaaatcaaatagctgcaggatttgagtcaatattttggtgrgtgacacttaataaaaatataatttggataaactacatctattacaaccaatagcaataagcttttcatgagttaaaaactcatggccccagccctggggctacctgacctgacaaaaccctttacactctaggtgtcagaaagag

SEQ ID NO: 934274 - DNA, 588 bp, Homo sapiens; identical to SEQ ID NO: 925001

SEQ ID NO: 934275 - DNA, 442 bp, Homo sapiens
aaatgcaacatttaggcagaaaaacagggtcagctgttttcacttagggccttggttccaggtttaagggtggggtttagccgggagcgcagcccatatgtatcaatagggtctcactctgtcgcccaggatggggtccagtgaagtgaacatggttcactgyagcctcaatcttctgggcttaagcaatcctcccaactcagcctccttagtagctgggattacaggtacataccacctcactcagctaattttttatgttttgtagaggcagggtcccactatgttgcccaagctattctcaaattcctggtctcaagcaatcctcccacctaacctcccaaagtgctgggattacaggcttcagccaccgcacctagcacactatatattcttaacctctatgcatactctcttgatgttgaaattggtagctggatat

SEQ ID NO: 934276 - DNA, 598 bp, Homo sapiens
ttttcttgcctgattgtcttagccagaacgtctaatactacattgaataggagtggtgagaaagggcatccttctctggtgccagttttcaaagggaatgcttccagcttttgcccattcgatatgatattggctatgggtttatcataaatagctcttattgagatatgtccatcaatacctagtttattgagagtttttaacatgaagggagttgaatattatcaaaggacttttctgcatctattgagataatcatgtggtttttgtctttgattgtgtttatgtgatgaattatgtttattaatttgcatatgttgaaccagccttgcatcccagggataaggccaacttgatcgtggtggataagttttttgatgtgctgctggattcagtttgccagtattttattgaggattcttgcatcactgttcatcagagatattggcctgaagttttstttttttgttgtgtctctgccaggttttggtatcaggatgatgctggcctcatgaaatgagttaggaaggagtccttcctttttaatatttggaatagtttcagaagggacagtaccagctcctctttgtacctctgg

SEQ ID NO: 934277 - DNA, 614 bp, Homo sapiens
cattttggactgattgttatgaaagttattgtttatttcctgaattgtcactagacatagcaatctggctttctgcaagcctgctttataccaggtcagcaccctgggttgtttattgtatataaggggttgctttcctgggcaggttgctgcaagttctggattaaagttctatttttatgttgccagscaatttccatttgcatattaaatctattaatttattaatatacagtaaaattcactctttttggtggacaatatttttgagttttgataaattcatagaatcctgtatttatggccacaatcaagatatggaacagtttccaccacccacgagaagctcctgcatgctgttcttttggggtcaacatctcccccgactcccaacccctgccaactactgatcttttctccttcctatcattttgccttttctctcagaaaaggtttcgttccatgcacttgcctgcatgccactgttgctagctagattgttagcccaatagtgtgaagtgggggagttctgtggttctgatgaaggctcagtctcaggtggcacctgttcctgggtctctgatgctgctttctcagtggtcctggtgcatccc

SEQ ID NO: 934278 - DNA, 610 bp, Homo sapiens
tttgagtcatttaaacttttaagctattatgaataatgcttctacaaacacgtgtatacaggtttttgtgtgaacatatgttttatttatcttgcataaatacctaggaatgaaattactgggccacatggcaactccatgtttagcacttggaaaaattgccaaagtgtttttcaaagtggcagtatcattttataatactaccaccagtgtataagtgttcaaattctattcaatgatttttaatyatatattttttagttattttctgttaacttttaagttcatgggtacatgtgcaggtttgttacataggtagatttgtatcatgcaggtctgttgtacagattatctcatcaatcagatattaagcccagtattcattatttttcctgatcctctccctcttcccaccctcccctctctgatagactccagtgtgtgttgctcccctctatgtgtccatgtgttctcatcatttagctcccacttataagtgagaacatccagtatttggttttctgttcctgtgttagtttgctaaggatgatggcctccagctccatgcatgtccctgcaaagaacatgatctcattatttttatggccgc

SEQ ID NO: 934279 - DNA, 586 bp, Homo sapiens
cttacactttattccaaataaagtaagtccacttaggaagatctgtggagctctctagccttatagcctgcctatcttcatgggcagaatgtctattttaacacagtggagctgggggtagggacagtggcctgcatcttccagagggtgatatccttgstctatgagcagggctttgagcaaggagagtagcccccgatctcaggttgcttttcctgttataaaattcccaccctataagaaagatggggtgggtgcttcagagcccagtattcttggcctgtcattccttgatacagtttggatatgtgacctgtgtaaattccatgttaaaatgtaatctccaatgttggtggtagggccaggtgggaggtgtttgggtcatgcagtcgatccctcatgacttggtgctctcttcaccatagtgagtgaattctaatgatatctggttgtttcaaagcatggggcacttcccccttctcttgctcctgctcccaccacatgatgtgctagctcccactttaccttatgccataagtaaaagctccctcagacctccccagaagcagatgtcagtgtcatgctg

SEQ ID NO: 934280 - DNA, 586 bp, Homo sapiens
cttacactttattccaaataaagtaagtccacttaggaagatctgtggagctctctagccttatagcctgcctatcttcatgggcagaatgtctattttaacacagtggagctgggggtagggacagtggcctgcatcttccagagggtgatatccttgctctatgagcagggctttgagcaaggagagtagcccccgatctcaggttgcttttcctgttataaaattcccaccctataagaaagatggggtgggtgcttcagagcccagtattcttggcctgtcattccttgatacagtttggatatgtgacctgtgtaaattccatgttaaaatgtaatctccaatgttggtggtagggccaggtgggaggtgtttgggtcatgcagtsgatccctcatgacttggtgctctcttcaccatagtgagtgaattctaatgatatctggttgtttcaaagcatggggcacttcccccttctcttgctcctgctcccaccacatgatgtgctagctcccactttaccttatgccataagtaaaagctccctcagacctccccagaagcagatgtcagtgtcatgctg

SEQ ID NO: 934281 - DNA, 671 bp, Homo sapiens
ttggagtttgctagaggtccactccagatgctgtttgcctgggtatcagcagcagtggctgcagaacagcagtggctgtagaacagtggatattggtgaaccacaaatgctgctgcctgatcgttcctctggaagttttgtctcagaggagtactgggccatgtgaggtgtcagtctgcccctactgggtggtgcctcccagttaggctgctcgggggtcagggacccacgtgaggaggcagtctgccggttctcagatctccagaaacaaaggcaggacaattgaagcaataagcaaaggtaatacaaataaatccaaatagatcaataacttcagtgaatataaaagggatcagttcagcaattaaaagacagagactggcaggttgggtttttttaaagttctgtgtagaagagacacacatataggtggaaccaagatggccgaataggaacagctctggtctacagctcccagcgtgagccaygcagaagacagatgatttctgcatttccatctgaggtactggcttcatctcactagggagtgccagacagagggagcaggacagtgggtgcagtgcactgtgtgcaagccaaagcagggtgagtcattgcctcacgcgggaagcgcaaggggtcagggagttccctttcctagtcaaagaaag

SEQ ID NO: 934282 - DNA, 599 bp, Homo sapiens
cattcagaggtcaggtttggtatcatcaagacctatcaattttagctcctaaatatttctcaatttctttctatttctctcaatttctactgctgcaacagagtagcatactggtccaagcaagctatcatcacctttctcatggatgactgcaattgctgggtttgtttttttgctaaaagaatacaaatttattatcttacagttctggaagttagaagtgtgaaatgggtcttatggggctaaagtcaagttattgagaaaactgatttcctacttgagaatctagtggaaattttgtttccttgcctttcccagctcctggaagcaattcctattccttggcttttggttccacatcactctgacctctgctcctgtcatgatatcttctctgtgactcctgcctcgccttttcagtgttttttaaaacaacttttgcwatagctttttaactggttatcctgtacttctcatttgatctgcatattatggatagtgtgatctcaaatacttagattatcatgtcattctcttgcttcaatcattttcatgacatctagtttctcttacaataatgaccaaagccattacatctg

SEQ ID NO: 934283 - DNA, 602 bp, Homo sapiens
gatatgcattttttgaatttggagaacagagacacttctgtttcaatctgctgggagaagcctacacacaaaaggtgggttagctgggcattaggtgggagagagaaggtatgaaaatttaagtggcttatgagaaagctgctttattcccatcaatggagaagccaatatgcatgtgtcctagaggttggccccagagctcacctgaaattgtcttcacagggatgtcatctaagatgccagtccacaggggccaagaaacccctgyagaagggaagtttaggggaagcccatgggctgagaaggggagtgtcctaaaaacctgttagtgtttagagtgcttcaccaggcattcctcagcagaagaatctctccaaaaaccatgtgagctccctgggagatttacaaaaagaaaaagatgaagaaaaaaacaataatcatattgattacaattgtatcagcatcatgagattaggctcatacttctctctgcctttgggttctgaagtagcctccagcaagtagggaaggaagagcaagaaatattaacaaaaccaacctggtgcttttgcctcactgcaggatttttgtccctaaaatga

SEQ ID NO: 934284 - DNA, 577 bp, Homo sapiens
ctgtcatgaagattaaataagcaatttgtttaaaaatcacagctctattcattcccttttcctccaactgctcttggcaggcagctgcagaggtacccactgccccaacacataaacccagcctccaatgtggccaaggtcagcgttctagaacccacatttcagtgggccatgcccctgttaaaacccttctcccctcacatcttccctgtaagaaagagttgtttctccattgcagagatgaagaaatggggttctgggragggaggtgactacccaccatgctctggccaccacgcagtggtgagctcccactgtgtgtcagacgccaggtgggagggtccagggctgcagaatggacaagaggggaggccgggtgcagtggctcacacctgtaatcccagcactttgggaggccgaggagggcggatcacttgaggtcaggagtttgagaccagtctggccaacacggtgaaaccccatctctactaaaaatacaaaaattagccaggcgtggtggtgcacacctgtaaccccagctactcagaaggctgaggcatgagaattgcttgaaccc

SEQ ID NO: 934285 - DNA, 587 bp, Homo sapiens
tccgagctaaaagaggaagttcgaaccaacggcaaagaagttaaaaactttgaaaaaaaaattagatgaatggataactagaacaaccaatgcagagaagtccttaaaggacctgatggagctgaaaaccacggcatgagaactatgtgatgaatgcacaagcctcagtaaccgatgcaatcaactggaagaaagggaatcagcgacggaagatgaaatgaatgaaatgaagcatgaagagaagtttagagaaaaaagaataaaaagaaacgaacaaaacctctaagaaatatgggactatgtgaaaagaycaaatctacgtctaattggtgtacctgaaagtgacggagagaatggaatcaaggtggaaaacactctgcaggatattatccaagagaacttccccaatctagcaatgcaagccaacattcaaattcaggaaatacagagaacaccacaaagatactcttcaagaagagcaactccaagacacataattgtcagattcaccaaagttgaaatgaaggaaaaaatgttaagggcagccagagagaaaggtcgggttacccacaaagggaagccaatca

SEQ ID NO: 934286 - DNA, 627 bp, Homo sapiens
acacgactacttcgagttcttcgccgccgacctgagtctttatcctcatctctactcaagagcatacattaattttaggaatcctgatgacatccttctttttagagatcgttttgatgggatatatcttccttgacagcaaagatccagaatataagaagtttttagaaacctactgtgtggaggaagagaaggccagtgccaaccctgagactctgctgggggagatggaggcgaagacaagagagctcattgctagaagaaccacacctcttttggaatatattaaaaatagaaaattagaaaagcagagaattcgagaagagaagcgagaagaacggaggaggagagagttagaaaakaaacgtttgcgggaagaggaaaaaagaagaagaagagaagaagaaagatgcaaaaaaaaaaagagagacagataaacagaagaaaattgcagagaaagaagtaaggattaagcttcttaagaaaccagaaaagggagaggaaccaaccacagagaaaccaaaagaaagaggagaggagattgatactggaggtggcaagcaggaatcctgtgcccccggtgcagtcgtaaaagccaggcccgtggaaggctcgctggaggagccc

SEQ ID NO: 934287 - DNA, 584 bp, Homo sapiens
tcatctatttcacttaaactgctgtcatcatctccttgtagcagaccacaagttactaaattagccttctcaaacactggtgtaatcagagattattttagagattattttgaggtacattttttattttcatttttctttacttccttcatatgtaacgcagaaccacaactttaaaaaatctacaaaargccaatgttttataataattctactgataacaaataaaaaaaattttgtaaaattccaattcttccccatctcaattcattaattcaaaaaacacagttatgaattatcaacaacatataaagaaatatatatttcctgcctcaaaaaccaggtaatatgcaattatgatacaatgtgtagtttaagagttgatatatggaaagttatattttagcacaaggaagtcattacagaagaggcaaaatataagaggagctcaccagggaaaaaatagagaaaactactccacttggagaatggaatgacagcacaaagattagtcccatggagtctaggtgtttcctaggaacttgaaaggaaaagtgtaaaacacaaagaaagtaagaatggaa

SEQ ID NO: 934288 - DNA, 671 bp, Homo sapiens
ttgtagacacagggtctctgtgcctggaactggagttcactggtgtgatcatacctccctgcagccttgaactccatcctcctgcctcagcgtcctaagtagttgggactccaggtgcacattctcatgcttggctaactttttaagtgttttgtagagacggggtatcactatgttgctcaggatgatctccaattcccaacctcaagcattacttctgcaaaattggcctcccaaatcattagtatgacagacatgagccatcatgcccagcccagaacattttttatataaatgtttttctacattcctaaactgtttgctttgaataaattctccaatatagaattattggttgaaatataggaactttttaaaaagacctctgatcaayatttcttaatttttcacaagaatgtttgtgttaatttatagttcaagcaacagagcatgaactggtcacttttctaaacccaaagtaattttcaaaaaatttatacagttttattctttttgaaaacttttttttaatttcatagctttaggtatacaagtggtttttggttaaatggatgaattgtatggtggtgaagtctgggattttagtgtgcctatcacccgagtagtacacattgtacctcagtaggtagtttctcatccctcatcctcct

SEQ ID NO: 934289 - DNA, 675 bp, Homo sapiens
ctcatgagcttattgcaattcggtcacatcttcaggctccacttctaattctagttttcttgcgagttctgccacatctgccgttcctttctccactgaaggcttgaacccctcaaagtcatccagggtggttggaatcaatttcttccaaactcctgttgatgttgatattctgacctcctcatgaatgttcttaatggtatctagaatggtaactccaatccacaacgctttccatttactttgcacagatccrtcagaagaatcactatctatgacagctttagccatatacaaaatgtatttcttaactaataagacttgaaagtcaaaatcgctccttgaaccacgggcttcacaatgcatgctgtgttggcaggcgtgaaaacaacattcctctccttgtacatctccatcggagctcttgagtaaccaggtgtgtgtcaaaaagaaataatattttgaaagaattctttttttttctgagcagtaggtctccacagtgggcttcaaatattcagcaaatcatgctgtaaacagatgtcttccaggctttgctgttaagtgtacagagcacaggcagagtagattgaacataattcttaagggctgtagcatttctgggatggtaaacaaacaacggcttcactttaaagtcatcaccagctatgttag

SEQ ID NO: 934290 - DNA, 603 bp, Homo sapiens
tatagtatgataaggttaaaagagcactgtgtatagcatcgcgacctctatttgattttgtgacatttaccagcttatgatattgaacatgttatttaatttttctgagccttagttttttcttttgtaagctgcagatagtaatgcttcccttggatgaatcacacaggttgtgacagaataagtcaactttaaatatgatttttaaatctatgttcatgtttataggtacatagtaggtttaaatatttgtggggtacatgagatattttgatacaaacatataatcacatcactgtaaatggagtatcatcacttcaagcrtttatcatttctttgtgttccaaacattctaattatacccttttagttattttaaattgtagagtaaattattgttgactgtagtcaccctgttatgctatcaagtactggatcttattcattctatctaactgtggttttgcacccattaaccatctctgtttcccatccctactacccttcccagcctctggtaatgatcactctactctacattttcatgagttcaattcttttaatttttagctcccacaaattagtgagaacctgtgaagtttg

SEQ ID NO: 934291 - DNA, 563 bp, Homo sapiens
acatctgggttgtttccagtctttgactactaaaagtaaagctagtatggatatttgtgtgagtaaatgttgtcctttctgttaggtaaattttaggaatagaatggctgcgctgaatttgaagtacacgtttagctatttaagaaacagctaaatgctttccaagtaactagatatgctgtttcgcgaaagggctatatatgcaaagcaacccccaaatgcagaaggagcagagaaagcaaacaatgaggcagacaaagccagtttgacagtagagatgcttcattagggaacttarggtcagaagtgtagtcttgggtggctctaaggtagctagatcttcacactgtcaccccaagacccggagcttatatactttagtgaaagggtatgcatgcttcagaagaaataggtaggacaaccaaagttgatgctttaaggaaacaaaagaatgctatatgcaacacagcctataattcacttaagagcaggatttgtgataactatgtgcccttacactgaacagtggataaagtagaaatcttccaggtgttcattcggaa

SEQ ID NO: 934292 - DNA, 793 bp, Homo sapiens
ttgtatagtagcgctttaatttgattaacatttgatcaaagaagttcgttttccacaaatctttacatgtcttatgagcagaggctatgactatctctcctggactatcttcacaaggatgtctgtagagtaaacagccttggaagacagagatagtgcccccaacaggggcagaaatcacacaggcctactgttaccagttctatcaaataagaatacactgtgtccagttaactttgaatttaagataaagtatgtcctatgcaatgtttggtacatatttatactaagaaattatatgttgtttatcaaaacttcaaattaactaggcacactgtactttatcaggcaaccttccttaccgttcattataaacaatgtattttccctaagtttggtctcctctcccaaaacccgtggtgtgcccaggcacggcctggccctcttaccttggctgatagggaccgggcctcaggaagctggtgcatgtgctggcgctctggctgctgctgtggctgtgagaaacactctttcattctgactcgcaagtctcaagtcttctgccagcatccatgaaattgtgctaggctgcttgagcttataaatggagtcwaatctcagacacatcagacaaatcttgacacctatctccctcactaaagtataaaagcctttgacagcagggactacttatgttttgtttaacactgtgtctggcatattgccactacctctcactaagtaaatagttgttgaaaaggtgaataaaagcataattgaacgagctgtcagt

SEQ ID NO: 934293 - DNA, 784 bp, Homo sapiens
tctaaacaagagatagacagtctgaaagtatataacaaactgatgaagtggaccttccagaagtctgtttacaagagggctgaggagactttgagagaatttttaacaagatggtcctagatatgactagcttatggacttgatagagaaatcctgggctgtcagaggggagaggtcactctgagtacaacatggtgtctgtagcttgggtttgcctcttggtccaagtccttcagacctcatatttaagttctttggaagtagagtgttattgaatgaagctctgtaaaactctggagcctaagcatctttgtcttagcatccctccaacccaacatctagaaaagggagacttcatttggatcgttttagttgcaataaacagagctgcactgatttagtsgggggtttactgaaatgatcagcacagtgacaaagaagaaagactatctaggaatccaagaacagaaaccaggcctagggtacactgttcattgtgggcaaaggcagttttaggagcttttggagtagaagttcatgtatcttccttttaatatgataccattattaacatgaaccagatactctctgaatgttggcttccttcttcatcctttaatcattttttgatggtaatggtccggttgcttcattcttggcttcctagttcaaattcttatgcttgaataaccaccagtcttgtttggacagtgttttactccaggctaagtcagaggccattagcaagacaataggctgcccatgactctggggcctgccccag

SEQ ID NO: 934294 - DNA, 604 bp, Homo sapiens
ttggcatcacaggttccagtggaggtcattacctattggggaacctgcccccgatagtcatgtaggttcttttctattttccctaagcatcggctgggttgagaaataaagggacagagtacaaaagagagaaattttaaagctggctgtctgggggagacatcacatgttggtagattccgtgatgccccacaagccgcaaaagcagcaagtttttattagtgattttcaaaaggggagggagtgtacgaatagggtgtgggtcacagagatcatgtrcttcacaaggtaatagaatatcacaaggcaaatggaggcagggcgagatcacaggaccacaggaccggggcaaaattaaaattgctaatgaagtttcgggcacacattgtcattgataacatcttatcaggagacagggtttgagagcagacaaccggtctgaccaaaaatttattaggcgggaatttcctcgtcctaataagcctgggagcactaagggagactggggcttatttcatccctacagtctcgatcatagaagatgaccacacccaagggggccattttagaggcccaccctcaggggcacattctctttcttagg

SEQ ID NO: 934295 - DNA, 591 bp, Homo sapiens
ccatcagatctcatgagaactcattcactatcacaagagcagcataggggtaactgctcccatgattcaattacctcccactgggtccctcccaccacaggtggagattatgagaattataattcaagatgagagttggatggggacacagccaaaccatatcattctgcccctggcccctcccaaatctcatgtcctcacatttcaaaacataattatgcctttccaacagtcccccaatgtcttagcccattccagcattaacccaaaagtccaagtccaaaatttcatctgagacaaggcaagtcccttccacctataagcctgtaaaataaaaaacaagttaattayttcctagatacaatgtcggtacaggcattggatgtatacactcattctaaatgggagaaattggccaaaacaaaggggctataggcaccatgcaagtctgaaatccaatagagcagtcatgaaaccttaaagttccaaaatgatctcctttgatgccatgtctcatatccaggtcatgccaatgcaagatgtgggctcacaagaccttgggcagctccacccctgtggctttgcaaggca

SEQ ID NO: 934296 - DNA, 569 bp, Homo sapiens
atactctattgacagcagtagacatgtcatccagacagaaagtcaacaaagaaacagtggacttaaactatacaacaaatggacttaacaaatatttaatgaacattctacccaacaactgcagaatatacattctattcaagaacaatccaaacccaaagccagcagaagaaaagaacgaagatcagagcagaattaaatgaaattgaaacaaacaaaaaaaatacaaaagataaatgaaacaaaaagctggttctttcaaaaggtaaataaaattgatagaccattcttgaggttaaacaggaagagagaatatccaaataagctcaatkggaaacaaaacgggagatattacaattgataccacagaaatacaaaagattattcaaggctattgtgaacacctttacatgcataacctagaaaacctagaggagatgaataaattcctggatgtataccatcctccaaggttaaaccagaaagatatagaaactctgaacagaccaataacaagcaccaagattgaaatggtaattaaaaaattaccaaccaaaaaagcccagaac

SEQ ID NO: 934297 - DNA, 675 bp, Homo sapiens
tcctcttagcactgcttttgctgtacactagaggttttggtatattgtatctctatttttctttgtttgaatttttttttatttttggcttaatttcattgtttacctgaaagtcattcaggagcaagttgtttcatttccatgtacttgtatagttttgagagttgcttttgttattgatttctgattttattacattgtggtctgaaaatatacttgatatgatttcattttttgaatttgtcgaagtttgctttatgaataagtatatggtcaatttttgagaatgttttgtgcacagataaggaaaatgtatcttctgtggttgttgggtagaatgttctgcaaatgtctattagttccattcggtgtagagcccagtttaagttcacagtttttttattgactttctgccttgatgacaygcctaatgttttcagtggagtgctgaactcccccaccattcttgaattgctgtcaatctattttctttatctaatagtacttgttttatgaatctgggttctctgatgttggatacacatatatttaggatagttaaattttcttattgtattgaaccctttatcattatataatgtcctttattttactgttgctggtttgaagtctgttttaatggttgtaaaaatggctactttgtttgcaaaccac

SEQ ID NO: 934298 - DNA, 633 bp, Homo sapiens
gcttgtgttttgaaatgttttagatagattcttttaagtttagggattgtttttatactttgtgcttgaaaataggtttgaattaaaaatacagatattttaaatttaattttaaattagaaaagatttcagtaacagcttaaaatgttgaacataggtcagaaagttttgttttgattatatcagaggttattattatgttctatgtaaatatactgtaagatttaaaatccaggactcaaaattattaaaattaacatgaaattcagtcatgtcagtgttactagtagagcaaaaagcccagctagggaactgaagcaatgtcaggaatcttgtatggaagggaatcgccgtgaattaggtactatcagaatccttttttttcacttgagatttgatcatggagatctttggatyttcctgaggtcacatggcaggcagaggggagggctcctcctgcctctagcagctactgccctttgcttcagatgacacaggcttctgcccgcttcataggggcaggaggtgaggaattattggctttgactttgaggctgaactcagtcgggaagtgggggtcaactgaagagggctcaggttgttttctttacagttttatcagaaaataaaatg

SEQ ID NO: 934299 - DNA, 621 bp, Homo sapiens
caccacagcttgccacagtgggcaggactgttcctagttttgagtggaaccaagagatttggggaaggattgcaaaagaagataaaattatcgagggctcccaggaggtgctggcctcatcactctcaagctggaggcagcatcatttcccgcccctgctgatgaagctatagtgactatagtcactgcaagtggaggcccaagatccttccccaaatcactgagatccaacygcaggtgaacaaaagggctccagttactctgcttatattacagatataagagaagtgaaacagcctgtctaggtcccatagtaggtaagtggaaaccacgtgttatgcgtcaacctcattcactcatttgtccactcaaaagacattcaatgaacaccaactatccgaaagccaccaggagggaagcaccatgtcctcagtgaccctacaattgagaccagtgctgtcccatagagggagatatcatgcaggccacacttacaatctaaaatgttctagcagccaccttcgaaagcaaaaagaggcaggtggaataaattctaatcatttatttcactcaatatatccaaaatatcattttaacatgtaattaatatttaacaaatat

SEQ ID NO: 934300 - DNA, 638 bp, Homo sapiens
ctcctggcctctcccttctttgaaccagttggcttcattggttctcttcccagactgaccagaatattctacttctattttggcctaatcacttgagcccttcaggccttagtttcctcatctgcaaaatggggacaacaataaagtctacttctcagggtcattttgaggattagakgagagcccacaaggaaagcacatagcatggtacctggcacatagtaggcactcaggaagtagctactgtaaaccttacagagggtggtttcccaagtgccggggcagggatagcaggaatgttgctttgcctttcacctgacagcatttctcaatgttcagtgtatgtaagaatcacagcgggaatctgatgcaatgcgggttcccagacaccaccctgagtaattctggttcagtgggtcgggctgtcctgggaacctgctcttgatcgctgccccgtgatgattctatcaggccaattctgaggctggtggtctctgtttcactttgagaactgatgattgagcgtcgcttttacatgagcgggttctgcagtgaacgccaaacacatttgtcatctgtgcaaaatgcctggctcatggcgacttaatatctcactgacacagaagaccgatagaggc

SEQ ID NO: 934301 - DNA, 638 bp, Homo sapiens
ctcctggcctctcccttctttgaaccagttggcttcattggttctcttcccagactgaccagaatattctacttctattttggcctaatcacttgagcccttcaggccttagtttcctcatctgcaaaatggggacaacaataaagtctacttctcagggtcattttgaggattagatgagagcccacaaggaaagcacatagcatggtacctggcacatagtaggcactcaggaagtagctactgtaaaccttacagagggtggtttcccaagtgccggggcagggatagcaggaatgttgctttgcctttcacctgacagcatttctcaatgttcagtgtatgtaagaatcacagcgggaatctgatgcaatgckggttcccagacaccaccctgagtaattctggttcagtgggtcgggctgtcctgggaacctgctcttgatcgctgccccgtgatgattctatcaggccaattctgaggctggtggtctctgtttcactttgagaactgatgattgagcgtcgcttttacatgagcgggttctgcagtgaacgccaaacacatttgtcatctgtgcaaaatgcctggctcatggcgacttaatatctcactgacacagaagaccgatagaggc

SEQ ID NO: 934302 - DNA, 671 bp, Homo sapiens
aaacttctgcactcaagcaatcctcctgcctcagcctccccagtagctgggactacatgcatgttccaccatgcctaattttaaatttctttttttttttattttttgagacagagtatcgctctgtctcccaggcagtggtgcgatcttggctcactgcaacctctgcctcccaggctcaggcaattctctgcctcagcctcctgagtagctgggattacaagcgcataccactatgaccggctaatttttgtattttttgtagagaaggagtttcgccrtgttggccaggctgttctcaaactcctggccccaaacaatcctcctgccttggcctcctaagatattgggatcacaggtgtgagccaccgcgcctggccctgcccacgttatttaacctgcagcccttaccttccggacttgctatatattaatatttcgcttgcttatctgtttattacccggctccccatctagagtgtgagcaccacaagggcagagatttttattttatttcccatctaaggcacagttggtgctccaaaaaatagctgttgcccaggtcaatgaataacagctcccatttaccaggcgcctgggatgtgctgagccctttacatacctgcgacccctggtcctcatagaaaccctgcaaagtggttactatcatt

SEQ ID NO: 934303 - DNA, 671 bp, Homo sapiens
aaacttctgcactcaagcaatcctcctgcctcagcctccccagtagctgggactacatgcatgttccaccatgcctaattttaaatttctttttttttttattttttgagacagagtatcgctctgtctcccaggcagtggtgcgatcttggctcactgcaacctctgcctcccaggctcaggcaattctctgcctcagcctcctgagtagctgggattacaagcgcataccactatgaccggctaatttttgtattttttgtagagaaggagtttcgccatgttggccaggctgttctcaaactcctggccccaaacaatcctcctgccttggcctcctaagatattgggatcacaggtgtgagccaccgcgcctggccctgcccacrttatttaacctgcagcccttaccttccggacttgctatatattaatatttcgcttgcttatctgtttattacccggctccccatctagagtgtgagcaccacaagggcagagatttttattttatttcccatctaaggcacagttggtgctccaaaaaatagctgttgcccaggtcaatgaataacagctcccatttaccaggcgcctgggatgtgctgagccctttacatacctgcgacccctggtcctcatagaaaccctgcaaagtggttactatcatt

SEQ ID NO: 934304 - DNA, 555 bp, Homo sapiens
aagaatggtttaactctgtgtgatgaatggactcatcacaaatcagttaatcagaaagattctttctagttttttctgaggatttatcctttttcaccatgagcttcaatgcgctcccaagtatcttttcacagattccactaaaactgtctttgaaaattgctcaatcaaaagaatgcttaacctctgtgagamggaactgacattacaaagcagtttctctgaaagtttcttcctagtttttatgtgaagatatttgatttttcgccataggaatcaatgcattcccatatatcccttgacagattctacaaaaacagtgcttccaaactgctcactaaaaggaaagttttaactctgtgagatgagtacatatatcacaaagcagtttctcagaaagcttcttactagtttttatgtggagatatttcctttttcaccacaggcctcaggtgctcccaaatatcccttcacagattctacaaaacagtgtttctatgatgcacaatcaaaagaaaggtttatctctgtgtgatgaatggactaatcacaaag

SEQ ID NO: 934305 - DNA, 733 bp, Homo sapiens
acaatgactaatagcaagtggaagtgatgtgtggatgagaagcaaatgtgtcttctctgcatctcttttttaatcaattggctgaagaaagagaatgcagatagaaggtgaaagaaaatataatccctgaaagatcttgaaaaagtcctttgaatcagaaaaaaaaggaaatggtgatttgagcagaatatatakttaaaaagacttctttttttaatctttcttctttttatgaaatataaaaaaagctgaccaaataaagtctaaatgaattaagtatagctcctagtataactcacagttaatataagttgactatcctctctgtagacaacatttttcatcagcatttttcagcatacagctagacctcaactaacactcattatgtgtcacaaaaatgaatcaccttagaagccatcttaataatgagataattgacttctggtacccaactcagaacatctacaaaaggagtggtgaacagatttcaacagtgatgcaaaaattttattcatggcatggtagctgagtgctgtgttaaggattctaaagtcactatttattaagtggaagtagatcatcataaaggtcttcattctcatcatcttcacactgagtagggctgctttcttttccacagttgtgtttaaaactgtccaaagacactctccaaatgcttggctttctgtctagaagcttcaaatggggcttttgggtgtgcatctttttc

SEQ ID NO: 934306 - DNA, 531 bp, Homo sapiens
agggaaatttatggcattaaatgcccataagagaaagcaggaaagatctaaaattgacaccctaacatcacaattaaaagaactagagaagcaagagcaaacacattcaaaagctagcagaaggcaagaaataactaagatcagagcagaactgaaggagatagagacacaaaaaaccctccaaaaaatcaatgaatccaggagctggttttttaaaaagatcaacaaaattgatagatggctagcaagactaataaagaggaaaagagagaagaatcaaatcgacacaataaaaaatgataaaggagatatcaccaccaatctcacagaaatacaaactaccatcagaaaatactataaacagctctackcaaataaactagaaaatctagaagaaatggataaattcctggacacatgcaccctcccaagactaaaccaggaagaaattgaatccctgaatagaccaataacaggctcttaaattgaggcaataattgatagcataccaataaaaaaaagtccaggacc

SEQ ID NO: 934307 - DNA, 574 bp, Homo sapiens
ctcatgcctgtaatcctagcactttggtaggacgaggtggggggatcacttgaggtcaggtgtttgagaccagtctgatcaacatggcaaaaccccatctctactaaaaatacaaaaattagccaggtatggtggtttgtgcctgtaatcccagctacttgggaggcttaggcaggagaatcacttaaacccaggaggcaagtttgcagtgagtcaacatcgcaccactgcactccagcctgggtgacagcgcaagactcaagaaaaaaaaamaaaaaaactgccaacaaaaaacgtccaggacaagatggattcatagctcaattctatccaaaattcaaagaattggtaccagtcctactgaaactattccaaaagatagagaaaaagggaatccttcctaaattattctatgaagccagtatcactctaataccaagatcatgaaaagacataataaaagaaaactacacaccaatgttcctgatgagcataaatgcaaaaatcttccataaaatactagctaaccaaacacagcaacatattaataagatagtacaccataatcaagaac

SEQ ID NO: 934308 - DNA, 614 bp, Homo sapiens
  misc_feature 61: n = A,T,C or G
tcttttttctttttttattgtaattttattattattatactttaagttttagggtacgtgntcacaatgtgcaggtttgttacatatgtatgacatgtgccgatgttggtgtgctgcacccgattaacgtcgtcttttagcatgtaggtgtatctcgccaatgctatcccgtccccacccgcctcaacgccgacaacgagtcgcctggtgtgtgatgatgtgaggtagggctctactgctatttttcctaagtaaataattgttccagccccatttgtgggtcagtcccatccagatggtttgcgccttcaggatcctccttagactttcagaaatgtttgcttaatgaaacttttgaagaggtagataggatttgttccctaatttacggccaatttccaggagtggatcrtcttgcagtatagcataagtacagtcatgaaaaccacaaggattttactacagataataactattttgaaactttactactcctcataatttggccctttatctttttcctcctgcttttattggaacatggaagtggcagattgcacggcttcaccaatgccagcatgatcctattcaagcctggcactgtcccggacccc

SEQ ID NO: 934309 - DNA, 662 bp, Homo sapiens
tgcaaagcctttcccttgtggtttagtgtgaaattggtccccactttaagtagattaaccggaaaggcttttccagttacaagtagcttttgcctccaggtttgctaacaataaagtggtgcagtatttgcatgtaacctgcacacatcctcctgaatactttaaatcatttctaggtgtaacctgcacacatcctcccgcatactttaaatcatttctaggttactcatcagtcctcctayaacgttataatttgtaatactgttacataacaatgttacaatgttataattgtaggagctctcatgagtaatctagaaattgtacaaggtcataacactctccaaacaaatacacagttgttacactgtatatctttaatttgtatttttaactttttttctgaacatttcaatccacagttggttgaatctaacgatgtgggacccttggacagtgagctcctggggctcagcccggctcctcagggcccagcagggctcactagggcctggaccaccccatatacccgggacggctcctctctttctcactggctttccccaaagctccaataaactcccaggatttgtgctcagaaaagagctggatgagaggcaggagccacagaagccagccagtgcttttccaggggcaagtgt

SEQ ID NO: 934310 - DNA, 608 bp, Homo sapiens
tttgctactgtgaatagtgctgtgaaaaaacatatgtgtgcatgtgtctctatagtagaatgatttgtgatcctttgggtatatacccagcaatgggatggctgggtcaaatggtatttctggttctagatccttgaggaatcaccatcctgtctttcacaatggttaaactaatttacactcctacaaacagtgtaaaagcattcctatttctccacaacctttccagcatctgttgttttctgactttttaatgattgccattctaactggcatgagatggtatctccttgtggttttgatttgcatttctctaatgaccagtgatgatgagctttttttcatatgtttcttggccgcataaatgtctttttttgagaagtgtctgttcatatccttcactcactttttgatggggttgtttgtttttttcttgtaaatttgtttaagttccytgcagattctggatattatcctttgtcagatggatagattgcgaaaattttctcccactctgtagattgcctgttcacttggaatagtcatgttttaaacattttccatgataagagaatttaagcaatgctgattaaatataaacaatgttg

SEQ ID NO: 934311 - DNA, 633 bp, Homo sapiens
actgtaggtcaattagacctcttttcttcataaatgatccagtcttaggaagttctttatagcagtgtgaaaacagactaatacagaaaattggtactgggagtggggcattgctataaagatacctgaaaatgtggaaacaactttggaactgggtaacaggcagaagttgraacaatatggagggctcagaagaagataggaagatatgggaaagttcggaacttcctagagacttgttgaatagttgtgaccaaaatgctgatagtgatatggacaatgaagtcaaggctgagatggtctcagatggagatgaggaaatttctgggaactggagcaaaggtcattcttgttatgctttagcaaggaaactggtggcattgttcccctgctctagggatctgtggaactttgaatttgaaagagatgatttagggcatttggtgaaagaaatttctaagcagcaaagctttcaagatgtggcctggctactcctaacagcatatagtcatatgtatttacaaagagatggtctaaaattggaacttatgttgaaaagggaagcagagcataaaatgtttggaaaatttgcagcctgaccatgtggtagaaaagaaaagcccattttctggg

SEQ ID NO: 934312 - DNA, 649 bp, Homo sapiens
actgggtaatttataaagaaaaggagatttaatggactcacagtaccatatggctggagaagcctcacaatcatggcagaagatgaaggaggagaagaggcacatcttacatggcagcaggcaagagagcatgtgcaggggarctgccctttataaaaccatcagatcttgtgagacttatacactatcatgagaacagcaggggaaaaaccagcccccatgattcaattacctcccatcgggtccctcccacaacatgtggggattatgggagctacaattcaagatgagatttgagtggggacacagtcgaaccatatcaaatagtctccaaaatgttcccattttatcgttttttcatgtttgttttctttatgacttgttaaatagaatttcttaaattgccctagcacagccacatgctttctcacatttcagtgtcaagcaaaacatcaagtacagggcatatttttcacactgatgcaactttgctggtaaattaagataagaatatttattaggtctcttttgtgtttatgtattaaaataaattctaaaataaactcagcacagtgagaataaatttgaggaccttccctgggagcaagaattgctaaagcaatcgaaatcgaatcccttttccctgctt

SEQ ID NO: 934313 - DNA, 649 bp, Homo sapiens
actgggtaatttataaagaaaaggagatttaatggactcacagtaccatatggctggagaagcctcacaatcatggcagaagatgaaggaggagaagaggcacatcttacatggcagcaggcaagagagcatgtgcaggggaactgccctttataaaaccatcagatcttgtgagacttatacactatcatgagaacagcaggggaaaaaccagcccccatgattcaattacctcccatcgggtccctcccacaacatgtggggattatgggagctacaattcaagatgagatttgagtggggacacagtcgaaccatatcaaatagtctccaaaatgttcccattttatcrttttttcatgtttgttttctttatgacttgttaaatagaatttcttaaattgccctagcacagccacatgctttctcacatttcagtgtcaagcaaaacatcaagtacagggcatatttttcacactgatgcaactttgctggtaaattaagataagaatatttattaggtctcttttgtgtttatgtattaaaataaattctaaaataaactcagcacagtgagaataaatttgaggaccttccctgggagcaagaattgctaaagcaatcgaaatcgaatcccttttccctgctt

SEQ ID NO: 934314 - DNA, 792 bp, Homo sapiens
acgtaatccataaatgtggtgtatgttctaactgttccaccaaaagccattgcccagtctctctctctctctctctctctctctctctctctctctctcacctcagaaagcttcccaattctctgagacacaacaatattgaaattaggccaattaataatcctgcaatgacctctaagtgttcaagtgaaaggaagagtcttgtgtctttcactttaaatctaaagccaggaatgattaggcttagtgaggaaggcatgttgaaacccaagacaggctgaaagctagtcatctcgcacaacttagcmaagttgtgaacgtaaaggaaaagttcttgaaggaaaagtgctactccactgaacacacaaatcacaagaaagtgaaacagccttattgctgatgtggagaaagtttcagatagaaggtcaaactagctacaactacctaatttgatgcctaatccagagcaagatcctaactctcttcacaactctatgaaagctgagagaggtaagggagctgcagaaaaacagtttgaagttggttcatgaagtttaaggaaagaagttgcctccagaccatcaaagtgcaaggtgaagcaggaagtgctgatggagaagctgccacaagttttccagaagactgatgaaggtggccacactaaacaacatgtcttccacgtaaataaagcagccttgcattggaagaagactttcataggactttcatagctagagagaagtcaatgcctggtttcaaagtttcaaaggacaggctgactcttagtaggga

SEQ ID NO: 934315 - DNA, 693 bp, Homo sapiens
tgtgcttagaataggaaaatatcgggaaagttaattttaaaaggagaaattgtagggcggacagcctcccttggtgggagcagggcttcttcggagatgctggaagggcaacaccctggctgggggccctgacccaggaggaggccagaactcagggactgggactgtgggggcctccctgggcraggcatctccggacaggaacagaactgactgaggttcatgaaggagtagtcaggcgtctgggatacccaggaaattaggcaccggaagacaccagggagggacaggcgctgtgcaggagacggggagggagggaggcgagcccaggagaggagcccacaccagccccgcactgctcacccacacacttgcctcccggtccaaggaagaaatgagactcacactgggctcccaggtgcaggagcctcaggcgggggctgctccctgcccccactgagtgcaaacactgggcctgcactgcctacacctgcacccccaatgtgtccagtcgctccccaattcttttattttttacactttaaaaactgggatatcattcacataccatataattgcaccaactgcacaagttactagtttctagtacattcctagagttatgcaacagtcatattttcatcaccccaccccccaaaaattgcgtgcattcctctctccattccccagccc

SEQ ID NO: 934316 - DNA, 797 bp, Homo sapiens
gggctgagaggggctctggaaagttccctggacccccttctctgcccacgagcttctctgccacatctggttagatctaagagggaaatgggacaggagccctagaggggctttcaggctgcaggacaaggccctgttgtcccaaatgtccacccctggcaactgtcagctctcctcccagccagggggcagccccagggaagagcccaggcaatgtcctctccttgggctttattattaactgaagaaaaaggggtggcctttaaagactttttaagatgaggaaaaaataagtcagaaggagccaaatcaggactgaaaggtggacgcctgatgatttcccagggatgctctcaagattgccctggtttggccaggcgtggtagctcacgcttgtaatcccagcactttgggaggctgaggtgggtggatcacgaggtcaggagtttgagaccagcctgaccaacatggtgaaacctcatctctactaaaaatacaaaaattaaccaggcatggtggtgggtgcctgtaatcccagctactcaggaggctgaggcaggagaatcacttgaacctgggaggcaaggttgtttgcagtaagccaagatcgcaccattgcactctagcctgggtgacaaagcaaagctccrtctcaacaacaacaacaaaaaaagactgccctggtttgatggtaagaaatagcagaagcattgttgtggtggagaaggactctctggtgaagctttcctaggcaactttctgctaaagctttggctaactttctcaaaacactctca

SEQ ID NO: 934317 - DNA, 814 bp, Homo sapiens
gtgagccatgtctcaataatgtggagggtggaatggatggggttggggagagaaagagaagggagtggacagagggggaagtcgcagcatcacccaggcgagtggacagtaagtctggagacaagtgggagccatgaagatggaaaccagggatggggagggggaagatgacggcagagctgttggtgatatggcagtcgggtgctgggcagggaagggcatggtccctttaaatgatatggaagtgggaaagtgctgggtagaggagggcatggtccctggccccatggaactaggtgaggacaggcatttcctgcccaaatgttgcatttcccaagaccaccctggcctgccatgcccccatcctatgcctataaaaacccaagaccctagcaaggcagacacacaagtggctggacgtcgagaggagcacatccgcggaggaacacacgggtggctggacgtcgagagggacgcactgacaggcaccagcaagccacaggccaccaaccggcagaatgatgtggagtttggctggggcagttggaggacagccsagaccccaagcggcccaactccaggggaaaatcatctcccttctggctcccccatctgctgagagctacttccactcaataaaaccttgcactcattctctaagaccgtatgtgatttgattcttctggtacaccaaggcaagaaccctgggatacagaaagccctctgtccttgcgataaggcaggggtctaactgagctgaccaccacaagccacctacagacacctaaactaaaagagcaccctgaaacacatg

SEQ ID NO: 934318 - DNA, 613 bp, Homo sapiens
tctgagtgacttgagccccaagaggagatacaacatggtatgtaaagaaactagagtcgggtagggccagacccagatcatgggaacctgtaggctactgcatctgtcaggaacgtttgtgtcagagcaacagtgtttgagtcgtagttggggaacattttcccagtgaagaagttgcccctgagtggccataccattgtatttgttcattcattcaacatgtattttctgatgtgctgggttgtgttattggtactgaagacagaagccacagcagcacagactcatcccctgccctcaagttcgcagtctagagaaggatacggaaraggaaaacctactctaaaaatggaattgcaaactataatagatgtcaggatggaaaattacagggagttttgagaacatataatgaggcttaaggagctaacatttgaaggacatgcaatcaaaggatatggcattccaggtagtgggaccaacaggagcaaaggcccaaagtaggacgcacaccctttaggtacaaaagttgttgtcatagcaagagctgacactggcagaaggctcactgtgtctacaattactttccactgctttaaattaatctccccat

SEQ ID NO: 934319 - DNA, 615 bp, Homo sapiens
acttaggagcaacccaccagcttcattatgttccttggttctccacatatggtcaaaggtattatgcataggttcatcgaacccctttcctctcacaagcgatgaatcaggagtgtcaaatgcatttattttgcataactctctaaataattcatgccaaggactgtcagtgttgtccatactattagaagtagagtcctyagcattttagagtccaaacatattaagcatgcaactccagaaacctccaaaccgataaaccaatgaaagaactccatccttaatatttggtttctctagaagcaccccacttctggtaccaaagtctgtattagtctgggttctctatagggaaagaactaatggaaaaaaaaaaaaatatatatatatatatatataaaggggagtttattaagtattaactcccctgatcacaagatcccacaataggccatctgcaggctgaggagcaaagagagccagtccaagttccaaaactgaagaacttggagtccgatattcaagggagggaagtatccagcataggagacagatgtaggctgggaggctaggccagtctctccttttcatagtgttcttcctgcttatattcta

SEQ ID NO: 934320 - DNA, 715 bp, Homo sapiens
tttgatctagggccacactaatccaggatgatctcttcttgagatccttgatttaagtatacctgcaaagcctttatttccaaataaggttccattgacaggttctggggttaggatgtggacatatctttttgggagactatggttcaatccatttgtatccagttccttctggaggctctaagggaggatccttcctgcctctcccagctcctgtgggctccaagcatccttgggcttgtagccacatcactccagtctctgcctccatctccatgtggccttctcctctatgtctcctcttctgtctctctctctctctcttttttttttttttttttttgagacggagtttcgctctggttgcccaggctgcagtgcagtggcgcaatttctgttcactacaacctccacctcccaggttcaggcgattctcctgcctcagcctcccagtcctctgtctcttataaggrcatgtgtccatagatttagggctcatctaatccaggatgatctcattttgagatacttaagtcaattatatcttatctaaataagttcacatttataagttccagaggttatgacatagacatgtctttgggggccaccattccacctgttacaccagactctgaccgacaaatcagaatctctgggtgagtacaaagtgcagcaagaatgtgatgaggaagtggcatctttagcgctggaa

SEQ ID NO: 934321 - DNA, 727 bp, Homo sapiens
ttctttgtaagcctgtttgacatgacccatagctactacctatggctccagatagaagccatcactgtatttgaaaacacttggttttacattctggttaagttgtatagtgttggtactattttatgtatatttgggattagatactgtagtcattatttatcactgcagagcaaattaccacaaacttaaagacttaaaacaaatacccattgaggatcttacaatgactgtgggccaggagtctaggcatagcttagcagggttstctgctcagagtctcacgagattgccatcaaggtgctgtccaggtgttggctgtgttctcacccagagcgtggggtcctctttcaagctcaatatcaagttgttgataaaaaatttatttatttatttatttatttagagacagagtcttgctctgtcgcccaggctggagtgcagtggcaggattgaggctcactgcaacctctgcctcccgggttccagcaactcttctgtctcagactcccaagtagctgggactacaggcgtgtgccaccacgcccagctaatttttgtatttttagtagagatgaggtttcgccatgttggtcaggctggtctcgaactcctgacctcaagtaatctgcctgcctcggccttccaaagtgctgggattacatgtgtgagccaccgcgcccagcccaagttgttgatagagttttgttccttcttgtaggatgga

SEQ ID NO: 934322 - DNA, 471 bp, Homo sapiens
tattgaggcagagacacccatttccaagatggcgcacacacgtggctgctggtgggtgtgttcatcagctcgggctgctgtcacaaaagaccacaggctgtgtggcttcaacaatagacatttattttctcacagttctggaggctgaaaactccaagatcaagggttagcaggtttggttttcccttctggggccacgaatgtgttctggagctagctckcgatgatctggaagtccccaagcacatggtggaggcacttaatgtcactgagctgtacactttcagatggttacgatggagaattttatatcatgtatattttcacacacacacacacacacacacacacacacacacacacacacaatctgcgtcaggggtttggggatcatgtctcagctctgccactaaatgagtttgtctttgagaaagtgactttctctccctggccttggtttctctcctccca

SEQ ID NO: 934323 - DNA, 620 bp, Homo sapiens
gtatttggactggttctggcaggtttttttgaatggccaggtcatttgaaaactgtgtagggagggtgacttttatggagtaggactgtcccaaaggccatgagccagtcatggggcagccaaaaacatccctggggtggggaccctgccatggagatcccccgccccgccctaacagcacagaaaaaaataacaggaacagtaaagataatatgctgttattgtgagatggaataataataaacagtaactatgtttgggggggaacagcattgccatcgagaccctctgttttcatatcaataataatgacaaaaagaaaagaatggcagaccaggcaccatgayggacccccactctgtcgccgtctggcttggacgactgcagtagcctcttcggggtccccagtccactctggtcacacctgtctggtctctgagttgcagccagagggatcccatcagaaggtccatgagactctggccccacactctccattctcttcccactgctctgagaataaattcagaggccacccgggagctcctcagccctcaccgaccgcatctgcctctgggccttcgcgtttgttgttccccccacctggaatgctgttccct

SEQ ID NO: 934324 - DNA, 674 bp, Homo sapiens
acgtgcggcgcagagccccgcgtgcctttcatcctccccacagcccgcggctgagcgctccgggcacatcctgtagctcccacacctccaccagcccccgcctgcccctcaccctgaggctgtaattccaccctccccaggtctgaaccaggccgctcaagacacagaaaatctatggaatgtgtctcggtgtggcctcatcctgccggagctggagaggaatgcaggggtggggaggccccatggaagcttccagggcctcccggaaaggcgcctctgcccggccaggtgggaagaggacacaggtgtggtggtttctggcatcactgcgttgctggcatgcacctccgctgggcagagtcattcagtgtgcacctactgtgtgccaggcaccagaaggggctctgggtccagcaggaggcaaggcggacagccagtcagagctcacggccygagctttccgctgtggatttggaaaccttaccaaagcccgcagtggccgggaacagggaatgtggcccacttggcttctgctgctgcctggcagagtgcagtgggggcggggggcacttgtgtgtttgctacctcctggcaggcatggcccagggacagacccctgcagccgtgcatggggagcccctccacctgcctgcgtgggatctgcagccctcctc

SEQ ID NO: 934325 - DNA, 648 bp, Homo sapiens
tcccacagcagcgggaaacagccggggcctggccagcatgtggtcctgagcaggggcctggggacggcctcggacccttgggaggtacaggggaaggccaccttgctgttgggtggcagccagggaagggttagtgacagctcatgtcctggaactttctgtggaagctggatctagagtagagagtttgtgagatgaccctggccgcacactggttaccagacaacttcattcccacacatcccgggagtggggtgtcatcctcccaaccaccctcatgctaacttcctgcccatgggaaatgggcctccgagtggctagctggctcccttcattgcctccatttagccttcaccatgatctttgaggtgttactgttcccattgtacagatggggaaactgaggcccagagaagtgaagtcacttgcccaarggcacacagctaggaaatggcaaggctgaggcctgcttggcttcttggccttagctgggaattctgatgcagtttggcttcctgtgctatcactattgaccttgaggttggctaggaatccacctagtcactgcgcagatgcagagccaggctctctgcagcccagggctctgacttggacgagggcaccagaaaaatgggattttccttctgc

SEQ ID NO: 934326 - DNA, 524 bp, Homo sapiens
ctgccttggtgcaggagtcttgggggagctggactcctagatccactgcagcccccaagaggacacagtcccatgactctgcagccctaagagggcagccatactgctgaggcaggactaatgcgggttgacgtgtcccttaggttttaatttgctcagtccagtgtgccagtccacatggtttcctttgttctgcagttcagtccaatcccggtcctcccttcttgtacacactcagcagcacttcttgcaatcagagcctagtgcatttgttaggttgaaccatttacaatttctgatattcaattttggggggcctataaagtctgtgacyttggtttttctctcctcaaaaccctttaagaaagctccaggctagggagaggagcagattgaggaaaggcagaagggaagagctaatagactaagtcccatgtgccaagcatgttacattcgttatcacagcgctaattcccacaacatgaagcacctaaaattatttcctacattttacagctgagcaa

SEQ ID NO: 934327 - DNA, 697 bp, Homo sapiens
ggcctcagcattttaggcctggttttggagggctgaagcctcacccgagagcctgtgacgcattatgtaactggcgatgagcgcgccggccgatttctcctttgttaaatgggtcgagagcgtccagccggtacgctggagggcaacggtttagttttggtctttgacctcccacgcccacggctggggctgccgaaagtgaagaaactagatttgcagacgccactgctagttggttatgaagctccgggcaacagcgtaaaataaactgccccgaccttacattgttttggatgttcacagaatttaatttttttggatgtttaaatatgtagtgcccatctaacacagcctcccttttcctgctccctgcccgcctctcatcaccttggctttctccttttctttgcactttgaaacgtacagttaatgcagatttcacttcagcaggctccaggtaacctcctgatcaccaaatccagaaacgctgtgattccggacagacaatgtaagggtgtcgttgagaggggactcagtgccagggttggaatcccagcctyatctgtttctcttaatagtgtgctgggatactagccccatggtgttgttgggactgaaataatatacagcctgggcaacatagcaagaccccaactctacaaaaaaaaattggccaggtgtgatggtgtgagcatgt

SEQ ID NO: 934328 - DNA, 594 bp, Homo sapiens
ccatggaatactatgcagccataaaaaaggatgagttcatgtcctttgcagggacatggatgaaagtggaaaccatcattctcagcaaaatatcacaaggacagaaaaccaaacactgcatgttctcactcataagtgggagttgaacaatgagaacacatggacacgaggaggggaacatcacacaccagggcctgttggagggtggggggctgggggaggaatagcattaggagaaatactaatgtaaacgaygagttgatgggtgcagcaaaccaacatggcacatgtatacctatgtaacaaacctgcacactgtgcacacgtaccctagaacttaaagtataattaaaaaaaaaaaaaaagaagaagaatgattccagctttgcccattcagtctgatgttggctgtggatttgtcatagatggctgttattattttgagggatgttcctttgatccctagtctgttgatgttttttatcatgaagggatttcagattttatcaaaagatttttctgtgtctattgagattatcatacggtttttggctttagttctatttatgtggtgaatcacattcattgatttgc

SEQ ID NO: 934329 - DNA, 594 bp, Homo sapiens
ccatggaatactatgcagccataaaaaaggatgagttcatgtcctttgcagggacatggatgaaagtggaaaccatcattctcagcaaaatatcacaaggacagaaaaccaaacactgcatgttctcactcataagtgggagttgaacaatgagaacacatggacacgaggaggggaacatcacacaccagggcctgttggagggtggggggctgggggaggaatagcattaggagaaatactaatgtaaacgatgagttgatgggtgcagcaaaccaacatggcacatgtatacctatgtaacaaacctgcacactgtgcacacgtaccctagaacttaaagtataattaaaaaaaaaaaaraagaagaagaatgattccagctttgcccattcagtctgatgttggctgtggatttgtcatagatggctgttattattttgagggatgttcctttgatccctagtctgttgatgttttttatcatgaagggatttcagattttatcaaaagatttttctgtgtctattgagattatcatacggtttttggctttagttctatttatgtggtgaatcacattcattgatttgc

SEQ ID NO: 934330 - DNA, 564 bp, Homo sapiens
tcaggaaatgttttacttgtggtgttttaattgtggcaacccatgcataccccaacttcacattcctctttacatatttctctgtacctttagaaagaaaggggtctgtggtctgcatgctcttcctgccttctcccctggaaagtctcccctccggatgtccagcttggtggccactgcctggactgtccaccacttggccrcattcccactggacaaggacactcacatttactctccagtccttgactttaaagttgattttttttcttagggttttaattttgctgtggccactgctactaactgttgagctctgcctcatgagtggcaggaattgcatggggacgggtggtttgggtttttctctgaggagaatgtcagtgccggaactctcagaggcacggtttgcaggacactctgagacaggcaccaggaggcagcatccccacttgcacctggaaatgtaatgtaaaatgcagcctctggatgggcagcggcctgcaaccattgtaggtggggatgtcaccacacagtctgcgagggcaatctctttctgctaac

SEQ ID NO: 934331 - DNA, 602 bp, Homo sapiens
gttgcccaggctggtttcgaattcctgagctcaagtgatcctcctgtctcagcctcccaagttgctgggattacaggtgtaagccaccatgcccagccttacagattttttaatattagaaaataaaaagaaggaagaggagccaaatcatgactgtgaggtggatgcctaatgatttcctatcaaaactcttgaaaaattgccctttgttgatgaaagcaatgagcaggaatattgtcatggtagagaaggattctctaggaaagaggaaagctttcttgggawtttttctgttaaactttcatctaactttctcaaagtacctttataataagaagaagttactgttctttgacccttcataaagtcaacaagccaaatgccttgagcagcccccaaaaatgttgccaagaaatttgttcttgacctgtatacttttgctttggctggaccacagccacctcttggtagccattgctttgattgtgctttgtcttcagaattgcattggtaaagccatgtttcatttcctgttacagttctttaatgaaatcctttagaatcttgatcccacttgtttaaaatttctgttgaaagctctg

SEQ ID NO: 934332 - DNA, 599 bp, Homo sapiens
ctccgaataaaagccaaaatctttacaatggatttctaagctatagctcattggctgatgtactctgtccctagaccctcttccttgtctctctgacctcacgtactttctgtttacttgctttactcaggccacactggctttccttctgatcaagtgcccatctatgggcgcttttgaagtgtatcctcaaaacttctgtagttgccattatatgggcatggaactatctcccctacacactgttgcatggcttgctcttttactatctgcggtagtctccattttggcctccaaaggyatccaggttctaatccccagaacctgtgaataatactttataaggcaaaggggatttttcagatgtgattaagttaagggttttaagatgaagaaagtagcctggattactcaggtgtgctctaattgcaatgattagcgtgctttttcaaggaaggcagagggagatatgctgtagaggaaggtgatgtgactactgaagcaccgtgccacattgctggccctggagatggaggagtgtcctgagccaaggagcgcagctctagaaactggaaaaggtaagaaaatggattctcccc

SEQ ID NO: 934333 - DNA, 705 bp, Homo sapiens
ttctaccagatgtacaaagacgagctggtaccattcctactgaaacaattccaaaaaaattgaggaggagagactccacactaattcattatatgaggccagcatcatcctgataccaaaacctggcagagatgcaacaacaaaaaagaaaacttcaggccaatattctcaatgaacattgatgtaaaaatccttaacaaaatactggcaaaccaaattcagcagcacatcatgaagcttatccattacaatcaagtaggctttatccctgggatacaaggatggttcaacatatgcaaatcaataaatgtgattcatcatataaacaggactaaagacaaaaaccacatgatgatctcaatacatgcataaaagtcttgataaaattcaacaccccttcatgtcaaaaactctcaataaactaggtattgaaggaacacactcaaaataataacagccaygtaggacaaacccacagccaatatcgtactgaatgggctagaagcattccctttaaaaatcagcacaagacaaggatgccgtctctcaccactcctattcagcatagtattggaagtcctggccagggaaattagccaacagaaagaaataaatggtatccaaatagggagagaggaagtcaaactatccctgtttgcagacgacattatcctatatctagaaaaccccatagtctcagcccaa

SEQ ID NO: 934334 - DNA, 575 bp, Homo sapiens
acctcctctctgtataaattaaccaatctcaggtagtatctttatagcagtgtgagaatggactaataatatatactttatttatttacaaaataaatatttattgaacaattaaaacattttaatctggctcttaatttacacctagttcattattttgtaatastttggggttttttgggtcataaagttgacattttaaatgccagactttcctccattttcttgaattatgttgacatcatagctgctgttaccttatattttatttatactttattttgtccaagttttaaaaaatgcttctatttttaaaggcaattttatatgtaatactatctggaatttacttcaaaataatatgagaagaggatgagaagtcagtaaaagtatagaaaaagaaagatgaaacaagattggccatgagtcaataattcttgaagctggtgattatacctaggggctcaatattctctactgggtcaagtttcgtatatgttcaacatttctcataatatagttctgaaataaacattttactttaatagatttaagccaattttttaaaacaatga

SEQ ID NO: 934335 - DNA, 707 bp, Homo sapiens
aaataacatttaatgaaaacctactgggtgttaggattttctctcatttgcttctcacagcaaccctgggaagcaaatagcagtttttttatttgacaaataaattataactcaaagagttaatgaaatctgcacaaggccatagtgctartagacgatgagatcagattccaaggataaagtgttatagctatgccaccagcctctttcctctgggcccagctgctgctcattctaggaagtctaggagcagaggcagccctagacaaagggagaagagagagagatgttttaccttcagtatcccccaaagtacctttgtgcatgtgtctagctggacaatctgaggcatctgaaaagtcagggtaatgctcgccaactgctttagcaagcattccccaacttcggtgctgtaatgtggtaaatggtttaattgcccccaattgtttaaagttatagatcaggtcctattacgtaaggagattgtcatccgcatccactgccccgtaacttgccatgcctttctatgaggagtgtattagtcaacttgggctgtcgtaacaaagtaccacagactgcatggcttaaacaacagaaattaattttctcacagtcctggaggctggaagtccattatcaaggtgccagcaggtacgatttcttccaaggcctctttccttgactttcaggtggccgccttcttgcta

SEQ ID NO: 934336 - DNA, 707 bp, Homo sapiens
aaataacatttaatgaaaacctactgggtgttaggattttctctcatttgcttctcacagcaaccctgggaagcaaatagcagtttttttatttgacaaataaattataactcaaagagttaatgaaatctgcacaaggccatagtgctaatagacgatgagatcagattccaaggataaagtgttatagctatgccaccagcctctttcctctgggcccagctgctgctcattctaggaagtctaggagcagaggcagccctagacaaakggagaagagagagagatgttttaccttcagtatcccccaaagtacctttgtgcatgtgtctagctggacaatctgaggcatctgaaaagtcagggtaatgctcgccaactgctttagcaagcattccccaacttcggtgctgtaatgtggtaaatggtttaattgcccccaattgtttaaagttatagatcaggtcctattacgtaaggagattgtcatccgcatccactgccccgtaacttgccatgcctttctatgaggagtgtattagtcaacttgggctgtcgtaacaaagtaccacagactgcatggcttaaacaacagaaattaattttctcacagtcctggaggctggaagtccattatcaaggtgccagcaggtacgatttcttccaaggcctctttccttgactttcaggtggccgccttcttgcta

SEQ ID NO: 934337 - DNA, 707 bp, Homo sapiens
aaataacatttaatgaaaacctactgggtgttaggattttctctcatttgcttctcacagcaaccctgggaagcaaatagcagtttttttatttgacaaataaattataactcaaagagttaatgaaatctgcacaaggccatagtgctaatagacgatgagatcagattccaaggataaagtgttatagctatgccaccagcctctttcctctgggcccagctgctgctcattctaggaagtctaggagcagaggcagccctagacaaagggagaagagagagagatgttttaccttcastatcccccaaagtacctttgtgcatgtgtctagctggacaatctgaggcatctgaaaagtcagggtaatgctcgccaactgctttagcaagcattccccaacttcggtgctgtaatgtggtaaatggtttaattgcccccaattgtttaaagttatagatcaggtcctattacgtaaggagattgtcatccgcatccactgccccgtaacttgccatgcctttctatgaggagtgtattagtcaacttgggctgtcgtaacaaagtaccacagactgcatggcttaaacaacagaaattaattttctcacagtcctggaggctggaagtccattatcaaggtgccagcaggtacgatttcttccaaggcctctttccttgactttcaggtggccgccttcttgcta

SEQ ID NO: 934338 - DNA, 783 bp, Homo sapiens
gaggcagccctagacaaagggagaagagagagagatgttttaccttcagtatcccccaaagtacctttgtgcatgtgtctagctggacaatctgaggcatctgaaaagtcagggtaatgctcgccaactgctttagcaagcattccccaacttcggtgctgtaatgtggtaaatggtttaattgcccccaattgtttaaagttatagatcaggtcctattacgtaaggagattgtcatccgcatccactgccccgtaacttgccatgcctttctatgaggagtgtattagtcaacttgggctgtcgtaacaaagtaccacagactgcatggcttaaacaacagaaattaattttctcacagtcctggaggctggaagtccattatcaaggtgccagcaggtacgatttcttccaaggcctctttccttgactttcaggtggccgccttcttgctataccttcacatggcctttttctgtgtacatgtgcattcctggtgtctcttcctcttcttataaggacaccagtcctattggattagggtcccacccttatgtcttcatttaayattaattacccatttaaaggccttatctccaaatacaatcacattgggggttagggtttcaatttatgcatttgtggggggacatgattcagtccataacagggggaaagtagagtttccttcccattgactaggacttggccagtggaatttgagcaaatgtaatagatgctgtatcttagcggaagcttaaaagctttgcatagcagctctgt

SEQ ID NO: 934339 - DNA, 783 bp, Homo sapiens
gaggcagccctagacaaagggagaagagagagagatgttttaccttcagtatcccccaaagtacctttgtgcatgtgtctagctggacaatctgaggcatctgaaaagtcagggtaatgctcgccaactgctttagcaagcattccccaacttcggtgctgtaatgtggtaaatggtttaattgcccccaattgtttaaagttatagatcaggtcctattacgtaaggagattgtcatccgcatccactgccccgtaacttgccatgcctttctatgaggagtgtattagtcaacttgggctgtcgtaacaaagtaccacagactgcatggcttaaacaacagaaattaattttctcacagtcctggaggctggaagtccattatcaaggtgccagcaggtacgatttcttccaaggcctctttccttgactttcaggtggccgccttcttgctataccttcacatggcctttttctgtgtacatgtgcattcctggtgtctcttcctcttcttataaggacaccagtcctattggattagggtcccacccttatgtcttcatttaacattaattacccatttaaaggccttatctccaaatacaatcacattgggggttagggtttcaatttatgcatttgkggggggacatgattcagtccataacagggggaaagtagagtttccttcccattgactaggacttggccagtggaatttgagcaaatgtaatagatgctgtatcttagcggaagcttaaaagctttgcatagcagctctgt

SEQ ID NO: 934340 - DNA, 568 bp, Homo sapiens
atctaggaagtaactaacttgcttttgattttacaggctcacaggcagaaggggcttgccttgtctcagataggactttgaactgtggacttttgagttaatgctgaaatgagttaagactttgggggattgttggggaggcatgactggttttgaaatgtgaggacacgagatttgggaagggccagggrtggaatgatatggtttggctgtgtccctgcccaaatctcatcttaaattgtagctcccatattttccacatgtggaagggacccggtgggaggtaaatgaatcatgggggtgggtctttctcatgctattcttgtgatagtgaagaagtctcatgagaactgatggttttataaaagggagttcccctacacaagctctcttacttgccaccatgtaagatgtgactttgctccttattcgccttcagccatgattgtgaggccttcccagccatgtggaactgtgagtcaatgaaacctctttcctccataaattatccggtcttgggtatgtcttaattagcagtgtgagaacagactaatacagtacccttcac

SEQ ID NO: 934341 - DNA, 568 bp, Homo sapiens
atctaggaagtaactaacttgcttttgattttacaggctcacaggcagaaggggcttgccttgtctcagataggactttgaactgtggacttttgagttaatgctgaaatgagttaagactttgggggattgttggggaggcatgactggttttgaaatgtgaggacacgagatttgggaagggccaggggtggaatgatatggtttggctgtgtcccygcccaaatctcatcttaaattgtagctcccatattttccacatgtggaagggacccggtgggaggtaaatgaatcatgggggtgggtctttctcatgctattcttgtgatagtgaagaagtctcatgagaactgatggttttataaaagggagttcccctacacaagctctcttacttgccaccatgtaagatgtgactttgctccttattcgccttcagccatgattgtgaggccttcccagccatgtggaactgtgagtcaatgaaacctctttcctccataaattatccggtcttgggtatgtcttaattagcagtgtgagaacagactaatacagtacccttcac

SEQ ID NO: 934342 - DNA, 706 bp, Homo sapiens
gctgcagtgagttatgattgtgccactgcagttcagcctgggcaacagaacaagaccctgtggaaaaaggaaagggaagagggaagggaaggggaggggaggggagggaggggaggggagaaagaagggagagagaaaagagaagagaaatgaaaagaaaaaagtaaagaaggaaggcaggaaggcaggaaagcagtcagagaggaagagagaaagagaaaaagaaggcaggaaggcgagagagagaggaaagaaaatgacagaaagacggaagaaaggaaggaaaggaaaggaaaggaaaggaaaggaaaggaaaggaaaaagaaagaaggaaggaaggaaggaaggaaagaaggaaggaaggaaaggtgagctsaatcttggaattagtttaaaaaaaaacacattgctattttttctctactatcaggataaggaaacttggatctctatttcttgaagctaacaaaaagaagaaaaaaaaaacttgactgaatcccctggctttgctaaggcaaagaaatcttttagggaacttaaagaaaaaaaactccttcaacaggaagtttttggataaaccccatattgtgtgtctgtgtctttttagtcaactgtgggacccttgagagctggaaagacctctaagccatcttggcatctctcaaagaatgtggggcagtgctatcctcccagattacttgtggaa

SEQ ID NO: 934343 - DNA, 769 bp, Homo sapiens
tgcccaggtattcatagccaaactgagcagcaggacacccatcaggttcatcaggaggcctgtccgcacctgaaatagagcccagacagagggaggggtcagcacctgacccaccatacagatggaaacattcagactcagagacaggaagtcactcacccaagatcgcacagccaggaagtgatggagccaggacacagacccaggtcggtaaatgcctgggacccttcaatctttacactaccctaggctgtcactcaaagagctgcaagtgtccccattcattgatggcctctaggttccaggcactgtgtgctacgcagttgtcacagggttatgctgtttaacctcagaaagcaaccttacaaaggtcattcttattaatccccattttatagaagagaaaaatgagacctagagaagttgacttgtccaaggtcacctaacttgaaaataatcttgtctgatcactaaacacccccatcccacacacacatacacacacgcatgcacacacacacgcatgcatgtaggaacayacatatgtacacataggtacacacacacacttcaggtccagtccagtcaggtagtcctagtcaagactacccttgtccattgggaagcatttttcttctgtcggtggagaatgtgcccatctgctccctaccctggctggcctcttggaccattcagtccaccttgggctgaaaatccttgttttcccacctgggtcttctggctgccccgccttcacatagcccaggct

SEQ ID NO: 934344 - DNA, 637 bp, Homo sapiens
caggagtcaaaactggaacagtccagcaacacatccaggtacattatactattgggttttagctcatcaaataaaataaatatccattaatccatactgatataaataactgattgcataagtaaatggggaagaagggaccatttttccttcragaggagttccctttaatgaaagtggaaggaaccagggaaacagcaaatcaccatctgaacaccacaggaacaactgctgcaggcaagacccaccgatggatgctcggactcgtaggagaaagtttaaggagaaacaagagttgcacagatgcaaagcatttcccccaatacctatcaattacaaaggggaaaataataactttataatggagaaagctggcaaacaccactgtaaccaataggtcaaggtcagtgttaccagtaataagccacactgacatcatgtacttcctgatatgatgcactgagaatgacacatcatcactcctggggtagtttttccaataatgcataacctcaatctaattatgagaaaatatcagacccaaattgagcaacatattgcacaatacctgaccaggactgttcacagatatcaaggtcatgaaagacaaagaaaggccgaggaactgacgactaaa

SEQ ID NO: 934345 - DNA, 727 bp, Homo sapiens
gaagttaatctttgctttcagtccactgtggtgtaagaggatactttatattattttgatttttaaaaatttattgagacttgttttgtggcctatcatatggtctatgttgaagaatgttccacgtgctgatgaaaacaatgtatattctgcagttgttgagtagaatgttctgtaaatatctgttaaatccatttgctctcaggtataggtaaaagccatcatttctttgttgactttctgtcttgatgacctgtctagtcctgtcagtggagtattgaagtcacccaacattattgtgttgccatctatctcatttcttaggcatagtagtatggttttatgaatttgggagctccagtggtaggtgcatatatatttaagattgtgatattttcctgttaagttaatgcttttattattatcatataatgtccttctttgkttttttttaccctgttgttgttttacaatctgttttgtctgatacaaaaagagcaaatcctgctggcttttagttttcattttcatggaatatctttttccacccttttaccttaagtttatgtgagtccttatgtgtcaggtgagtctcttggagactcttggagacagcagatacttggttggtaaatttttatccattctgccattcagtatcttttaagtggagcatttaacccatttaaattcaatgttagtgttgagatgtgaggtactgttctat

SEQ ID NO: 934346 - DNA, 587 bp, Homo sapiens
gaatttaattttggtttaaagttccttctatacccaatttgttgaaattttttattatgaaggcaggttgaaatttattgaatgacatttttatgctttattgaaatgataatatggtttttgaccttgattctgttgctgtgatgtataaaatgtattaatctgtgcatgcataaccattattgcatccctgtgatgaatgccacttgatcatagtgaatgatccttttactgtgttcttgaatttggyttgctagttcttttttttttagagaaattttgcatctatgttcatcagggatattggtcaatagttttcttagctgtatctttgtctagttgtggtaaaaggtaatgttcgccttatagaatgatttagaacaattattttaagctgtctttttatatttgaaaatatttgaacttctataattatttcttaaaatattttagtgaataaaatatgatattaaacttcaaaaacagaacacacacccaaaatcaaatgaaaagtttaatttttggtatagagactttcagaaatacattgtagcgaccaaaggaaaacttccctttcatcctctgaa

SEQ ID NO: 934347 - DNA, 767 bp, Homo sapiens
cgcaatattcgggtgggagtgacccgattttccaggtgcgtctgtcacccctttctttgactcggaaaaggaactccctgaccccttgcgcttcccaagtgaggcaatgccttgccctgcttccgctcacgcacggtgcgcgcacccactgacctgcgcccactgtctggcgctccctagtgagatgaacccggtacctcagatggaaatgcagaaatcacccgtcttctgcgtcgctcacgctgggagctgtagaccggagctgttcctactcggccatcttggctcctccccagcatttggtttttcaacctcgttttctctgagtgtttactacatctgtgtttataaaggaggattcatcgatcttaagtatggcttgaagcataactagagattaacaaaagttaataaagattattgcaatattgtaatcatatgggttttgagcttctttaatgttttttccctccagagaaagttgaagggaatgatattctaaawactgtcttttatattttgcaggttcattttcttgattttaaattagtacctcccagtcagaaaatggaaaacctaatgcagattagagaatttgcaaaggaagtaaaagaaagaaatattttgttatatgggcttctcatatcttacccacaggtaggtaaaatgtttatcttccgaatgtatgttctgtagactagttttaatggtaggtatctgatttgttaaaagcaggaggatattattgataagtgaaattacagctg

SEQ ID NO: 934348 - DNA, 611 bp, Homo sapiens
gaattagaatccagaacatttgaaggggtatattaacaagatgggggaacaggaggtcctcacgctgaattcgtctacagaaacaaatatttgacaggtatctacagaccaaagtgcctatgtaaagctttggaattcaggtagagggaaggaaattctagtggagccaaagacccaggaggactgctttaagaagacaggcttatacattgatgacaagcccacagaccttgataccagcttcagaatagaaacaatgttgytcctgtatggagcaggctccagccccactcctccccagtcctgccaagagcccctttcaccaaaaatccagggatgcgccatgcccattcatgcctgcagtaacagggcctgcaaaccttaggcccaactgaagttcctgaagcagtactgtgacctgacttccagctccattctacttcagtccaaggcagtcctacctgtctagagacatgcccaagggagctgggagaagtcatatgcaggagttcagtcagggtggtgggaaaagttgtaagaaaaagttttagggaaagatgcaagccttcttggaaggccagaaggttttgcaaagcttcagggaaggatga

SEQ ID NO: 934349 - DNA, 754 bp, Homo sapiens
taccaatgccaccactgccatcctggcccaggtagccatcgacatttaactagtccactgcaataggttactaagtgttcacatgtttccactctgccctctactatctatagttcaggcaacaaccaggtaaatctcaggaatatacaaggcaaatcatgcaacactgttcaatcttactccaagtaaaattcaaatcctttactatgacccccaaagttttacataatctagcctcagcttcctctctaacctcatcgtactcccgctagctcactgtgctctatgcatgcttgcatgcgtgctgtccttcaaacacaacaagcctgtctcagccttttggccttaggatctgcattcccatgtgctggcatgatctctccctcttcactcaggactctttcaaatacacctgctcatggaggcctcccctaggacctttgccaaaagactcctcactccccagccccttcctgaccccattccttgccttactatgtttcatagcacttatcatcaaccgacttggtattatatatttttaaaaaatggtttagattcacagaaaaattatgaagatgttatagastccatattgcatacactcagtttcccctgttattaacaacttacattaggggtacatatgtcagagtgaataaaacaatatcaatgcattatgattaactaacgtccatactttattcatatttccttagtttttacttagtgtcctttttcccttccaggatcc

SEQ ID NO: 934350 - DNA, 608 bp, Homo sapiens
aacagtaagatcaagttgtttggacagaaaggctgcagaacacggtcccgtctcttgtgtgagaactccaaccatacagccctgcactttggctgtgtgtaatgaaaagggagtgataagttagggagagctagtgtgggagctgttttttaaggaatggaaaggagagtggggaaaggatttaggatctatggggtcaactaggtttatctagaatagaataatgggttgtggagggaggtattgaggataggagagtatataggtttggcacygtggggtggataggcaaaacaatttggttgataagtcgcagatcctgagctaacctgtaaggcttgtctggtttttggacaggtaaaataggggaattgtaaggagagtttacaggctttaaaaggccatgctgtaataggcaagtgataacaggctttaatccttttaaagtgtgctgtgggatggaatattggcattgagcagtgtaagggtgattaggttttaatgggatggtaaggggtgcatgattggtcgccaaggggggagtagagatgtcctatacttgtggattaaggtggggagatacaaggggagatgcgaaggaggctttg

SEQ ID NO: 934351 - DNA, 751 bp, Homo sapiens
agaatagaataatgggttgtggagggaggtattgaggataggagagtatataggtttggcactgtggggtggataggcaaaacaatttggttgataagtcgcagatcctgagctaacctgtaaggcttgtctggtttttggacaggtaaaataggggaattgtaaggagagtttacaggctttaaaaggccatgctgtaataggcaagtgataacaggctttaatccttttaaagtgtgctgtgggatggaatattggcattgagcagtgtaagggtgattaggttttaatgggatggtaaggggtgcatgattggtcgccaaggggggagtagagatgtcctatacttgtggattaaggtggggagatacaaggggagatgcgaaggaggctttgaactagggaaaagggcagaatgagagtgtggctgtaacctaggaatagtcaggcaagcagataatttagttaaaatgtcttgacctartaagggaactgggcaggtggggataactaaaaaggagtgcataaaagaatgttgtccaagttggcaccagagttgggggagttttaaggggttttgaagcctggccttcaatacccacaacagttatggaggcaagggaaacaggcccttgaaaagaaggtaatgtggagtgggtatcctctgtattgattaagaagggggcagacttaccttccactgtaagagttgccaaaagcatctgtgatggtccaggaggcttctgaggtg

SEQ ID NO: 934352 - DNA, 429 bp, Homo sapiens
agctaaaaaaattaaaacctcaaaaaaataatgttttaagaaggtttacagatttgtcttgggccacattcaagccatcctgggctgtgggttggacaagcttgctctagaggctggagggaggacgcaaggaacaaattcttccctggagcctccagaaggcactagtcctgcccacactttggtttarccccttcaagactcatttcgaacttccaactttacagaactttaagagaatatttgtggtgtttgaagttctaagtttgccataatttgttacagcaacaataaactaatacaggatatgctaactagcctgatttgatcattccacaatgtatataggtatcaaaacaccacattgtactccataaacatatacaattactatttgtcagttaaaaacaaaataaggtagggtattat

SEQ ID NO: 934353 - DNA, 735 bp, Homo sapiens; identical to SEQ ID NO: 923819

SEQ ID NO: 934354 - DNA, 604 bp, Homo sapiens
actagcatcacaaagctttttatgggaatactcacatttgaactcaccacaagaacaggaggttgctacaaaattactacagtactacagtgagtactaaagttaattgtatgcagctatgatttaatattgcatcttcacatttgttttcattttgcttgactgcaaatagcactttgtacagtctgtgtgtgcatamgttttgatgcatttaactttttacaataggtccgtgtatattttatgatagtaaataataaaatagtctggtatctacatatgttttatgcattcatgacatacctaagttttctttttttttaatatttctaggctatagagtttttttaaattttttcaaattgttgcgaatctccaaaagtttttccaatatatttactgaaataaatctgcacataagtggaccaatgcccttcaaacttgtgttgttcaggggtcaattgcattcgtttgttagggcttctgcaacaaattagtataaatttgttaacttaaaaccatatgattttatttttgccagttctggagactaggaggctgaaactgagcatcaccagagccatgcttcctctcaaggctgggg

SEQ ID NO: 934355 - DNA, 596 bp, Homo sapiens
gagtctagtggggacttggagaacttttatgtctagctggaggattgtatatgcaccaatcagcactctgtgtctagctaatctggtagggacttggagaactttcatgtctagctgtagtattgtaatgcaccaatccacactttgtgtctaactcaaagtttgtaaatgcaccaatcagcactctgtttctagctaaaggattgtaaatgcaccaatcagcactctgtgtctagcttaaggtttgtaaacacaccaatcagcaccgtgtcaaaayggaccaatcagctctctgtaaaatggaccaatcagctcttcataaaatggaccaatcagctctctgtaaaatggactaatcagcaggatgtgggtggagtcagataaaggaataaaagcaggctgccccagccagcagcgcaggttgccttcccactgtgggagctttgttctttcgcttcttgcaataaatcttgctgctgctcactctttaggtccacgcagcgtttaagagctgtaacactcaccacgaaagtctgcaacttcactcctgaaactggtgagaccacggacccactggaagggatgagcaactccag

SEQ ID NO: 934356 - DNA, 551 bp, Homo sapiens
tgactacaaatttgggacttgtcatgactacccttgataattcagtataataattcacagaactcaagataatactatacctatgattacaacttatttgtttatttttattttttttgagacagagtcttgctcctgttgccccggctggagtgcagtggcacgactctcggctcactgcaacctccgcctcctgggttcaagcgattctcctgcctcagcctcgtgagtagctgggattacaggcacccrccaccatgcccagctaaatttttgtacttttagtagagacgaggtttcaccatgttggtcttgaactcctgaccacaagtgatctgcccacctcagcctcccaaagtgctgggattacaggcatgagcaccgcacctggcctatgattacaaccttattatagtgaaaggatacaaattacaactagccagaggaagagacacatagaatgaagtctgagaggggtccaaagatgagtcttctggtcatcctatccctatggagtcctggatggcattacctccttccagctacaatgt

SEQ ID NO: 934357 - DNA, 560 bp, Homo sapiens
aatattttttctttatatccttattctataagctatcttcttaaaaatttttttttaactttttaaactttcttgttaaaaattaagacacaaacacccattagcctaggcctacacagtgtccaggatcattggtgctggctttcacctccacatctggccccactggaagatcttcagggacaataacacacacagagctatcacattctatgataacaatgccttcttytggaatacctcctgaaggacctgaggctgttttacagttaactttttttaaataaataggcatatgctccaaagtaatgataaaaagtatagtatagtagacacatgaaccagtaacatatttattatcattaccaagtattatgtactgtacataattttatgttatacttttatatgaccggcagcagagtaggtttgtttacggcagcatcactgcaaacacatgagtaatggtattgtgctacagtgttatattggctagaaagtcactaggtgacaggaatttttcagctccattataatcttacagcaggggtcctcaaccc

SEQ ID NO: 934358 - DNA, 560 bp, Homo sapiens
aatattttttctttatatccttattctataagctatcttcttaaaaatttttttttaactttttaaactttcttgttaaaaattaagacacaaacacccattagcctaggcctacacagtgtccaggatcattggtgctggctttcacctccacatctggccccactggaagatcttcagggacaataacacacacagagctatcacattctatgataacaatgccttcttttggaatacctcctgaaggacctgaggctgttttacagttaactttttttaaataaataggcatatgctccaaagtaatgataaaaagtatagtatagtagrcacatgaaccagtaacatatttattatcattaccaagtattatgtactgtacataattttatgttatacttttatatgaccggcagcagagtaggtttgtttacggcagcatcactgcaaacacatgagtaatggtattgtgctacagtgttatattggctagaaagtcactaggtgacaggaatttttcagctccattataatcttacagcaggggtcctcaaccc

SEQ ID NO: 934359 - DNA, 560 bp, Homo sapiens
aatattttttctttatatccttattctataagctatcttcttaaaaatttttttttaactttttaaactttcttgttaaaaattaagacacaaacacccattagcctaggcctacacagtgtccaggatcattggtgctggctttcacctccacatctggccccactggaagatcttcagggacaataacacacacagagctatcacattctatgataacaatgccttcttttggaatacctcctgaaggacctgaggctgttttacagttaactttttttaaataaataggcatatgctccaaagtaatgataaaaagtatagtatagtagacacatgaaccagtaacatatttattatcattaccaagtattatgtactgtacataattttatgttatacttttatatgacyggcagcagagtaggtttgtttacggcagcatcactgcaaacacatgagtaatggtattgtgctacagtgttatattggctagaaagtcactaggtgacaggaatttttcagctccattataatcttacagcaggggtcctcaaccc

SEQ ID NO: 934360 - DNA, 560 bp, Homo sapiens
aatattttttctttatatccttattctataagctatcttcttaaaaatttttttttaactttttaaactttcttgttaaaaattaagacacaaacacccattagcctaggcctacacagtgtccaggatcattggtgctggctttcacctccacatctggccccactggaagatcttcagggacaataacacacacagagctatcacattctatgataacaatgccttcttttggaatacctcctgaaggacctgaggctgttttacagttaactttttttaaataaataggcatatgctccaaagtaatgataaaaagtatagtatagtagacacatgaaccagtaacatatttattatcattaccaagtattatgtactgtacataattttatgttatacttttatatgaccggcagcagagtaggtttgtttacrgcagcatcactgcaaacacatgagtaatggtattgtgctacagtgttatattggctagaaagtcactaggtgacaggaatttttcagctccattataatcttacagcaggggtcctcaaccc

SEQ ID NO: 934361 - DNA, 580 bp, Homo sapiens
ccaaactattttttttttttttttgagacggactttcgctcttgtcgcccaggctggagtgcaatagcacaacctcggctcactgcaacctccatctcccgggttcaagcgattctcctgcttcagcctcccgagtagctgggattataggcacctgccgcgacgactgactaatttttatatttttagtagagacagggtttcaccatgttagtgaggctggtcttgaactcatgacctcgggctcaggtgatccgcctgtctcggcctcccaaagtgctgggattacaggcgtgagccactgcacctgacctaccaaactgttttctagagcggctgtgccattttatattcccaccagcaatgtgtgagtgatccagtttctctgcatcctcaccagcaattggtgttgtcactagtattagccattcatctggacatrtagtgacatctcattgtggttttaaaaatttggatttccccagtggctaatgatgttgaacatcttttaatggacgtatttaccatttatacatcctctttaatggaatatctatccatgtcttttatttcctaatcc

SEQ ID NO: 934362 - DNA, 709 bp, Homo sapiens
gaggctgacatgggaagattgctggagctcaggagttccagaccagcctggacaacatggcaaaaccctgtgtctacaaaaaatccaaaaactggccaggtgcagtgggtcatgcctgtaatcccagcactttgggaggccgaggtgggcagatcatgaggtcaggagattgagaccatcctgaccaacacagcaaaaccctgtctctactaaaatacaaaaaattagctgggcatggtggtgcacgcctgtagtcccagctacttaggaggctgaggcaggggaatcacttgaacccaggaggtggaggttgcagtgagctgagatcgcaccactgcactccagcctggtgaccgagcaagactccgtctcaaaaaacaaacaaattaacaaacaaaaaaacaacaaaaacttagctgggggtggtggtgtgtgcctgtagtccccactactagggaggctgaggtaggaggattgctggagcccaggaggtcgaagccaagtcagttgagattgcatcactgtactccagcctgggcrcacagtaagaccctatctcaaaaaaaaaaaaaaaaaaaaaaaaggtgaattttatggtatgtggattataccttgattttttaaaaaaactaggtgctgtggagcacacctgcagtcccagctactcaggaggccgaggcaggagaaccgcttaagcccaaaagcttga

SEQ ID NO: 934363 - DNA, 647 bp, Homo sapiens
ttttaggtaacaaaacaagccttaaaacattcaaaaaattgaaataatattaaacatcttctctgaccacaatggaattaaatagaagtcagtaacaagaggaagtttggaaactgcacaaatacgtggaaattaaacaatatgctcctggatgaccaatcagtcaataaagaaattaagaaaggaattgaaaaacttcttttaacaaatgataatgaaaacacaacatactgaaacctgtaggatattaagacggaagtttatacctataagtgcctgcatcaaaaaaaamcaagaaaaaataaaaacttcaaaccaaaaacctgatgacaaatcttaaagaactaaaaaagcaagcacaaattaaacccaaaattagtagaacaaaagaaataataaagatcaaagcagaaataaattgaaatgaagaaaacaatacaaaacatcaatgcaacaaaagtcggctttttgaaaagataaacaaaatcaataaacctttagccagaccaaaaaaaaaaaagagaaagagatgacccaaattaataaaatcagagatgaaataggagacattacaatggatggcacagaaattcaaagaatcattagtgactgctatgagcaactatatgccaataaattggaaaatc

SEQ ID NO: 934364 - DNA, 432 bp, Homo sapiens
cagatgactggcacactacttacagatcttcagagggaaagcactgagagtggacagaggaaagacacagaaggtgttctaaaggggaaggaagctgggaaccctgcacagggcaaccatgcattgagactgacttctggccccacacaactccaggggatctggtgagttgaactggaaaggagcaacctgttctcacgatgggactctgaaatcycagcagcagatatgttgaccaccatggacacctgagttgacagggaatgctacttagagaagtggtaggggcagcacaccagccgaaggtgagcccagaagggttggtgtgggagcgtctatagtggagcatgtccagggaagcacaaatctccaagttcgacttgctaccataagagaatttagccctaggggaaaggtcagacctaaattctg

SEQ ID NO: 934365 - DNA, 768 bp, Homo sapiens
ttgctgaagtgatttcactttgtacctacacttatacaacgtatctgattaggtcaggaatcaatctgtatttatcactagagaaaaccttgtcattgatgctccccatgatgaccagaaagccagcataatgcacatctttggattcagaatgctgctgacccttccaaaaagttgggccctacaaaattgcatgaagaacctaccttccataaagttagctcaaaacacaaattcctgtgtgtgtgtaaagttataaaatctaaccagagtattaactctctcaggaaggtcccataatggaatgccaaagccattaaggatatgggacagcactgtgtcattatcaaagtacctgcaaatggctagtttaactggagcctgtaagatgcagacagaaaaaagctaaagctctgatgggtcagcccaagcatcaggggcatctgatttgaaagatctcagtcctaccacagcgtacttagacaatctaattccaacgaaggctttctagacttcactgatggctgaggctaattctagtttttaaaatttctcaatcagaacastttagaaaacacaaatctcttcagtttgggttatgtaccttccttcacatattttcttttgactatatttgacaatagctctccaataagctaggtcggttcccaatttcaaatattccaccctgattgccaggcaccatactgtagcatccaacaatccacatcacccaaatggtggtgtatacccaaaaggggtatgtaa

SEQ ID NO: 934366 - DNA, 576 bp, Homo sapiens
gttctgggcttttttggttggtaattttttaattaccatttcaatcttggtgcttgttattggtctgttcagagtttctatatctttctggtttaaccttggaggatggtatacatccaggaatttattcatctcctctaggttttctaggttatgcatgtaaaggtgttcacaatagccttgaataatcttttgtatttctgtggtatcaattgtaatatctcccgttttgtttccmattgagcttatttggatattctctcttcctgtttaacctcaagaatggtctatcaattttatttaccttttgaaagaaccagctttttgtttcatttatcttttgtattttttttgtttgtttcaatttcatttaattctgctctgatcttcgttcttttcttctgctggctttgggtttggattgttcttgaatagaatgtatattctgcagttgttgggtagaatgttcattaaatatttgttaagtccatttgttgtatagtttaagtccactgtttctttgttgactttctgtctggatgacatgtctactgctgtcaatagagtattaaagcc

SEQ ID NO: 934367 - DNA, 569 bp, Homo sapiens
catatttttctcaatatcacatgataaataattgagatagatcacattgatgccataaaacatataaaatatatttttttaaaattacacaatatccatttttagagcagagtgttattaaacaacaacaaaaattcaatgagaatagctcaaaatttccaaatatttggaagttaagtaacacacttctaaatattattcataaaagaaatgtcaagagaaattaaaatayttcaaactaaatcagaatagaactataacttatcaaaatttgttggatgcaatgaaagatgtgtttagtgagaaattaacattaaatgcatatgttagaaaagaaaaaaaatctaaacataatagcctaagcttccatcatataagttccagagaaagaagagtaattatagctgaaatcaagcagaagaaataataaaaatcagggaagaattgaagaaaactgcaaacaggaaaactatagagtaaatcaataaatacaatttattgattatttgaaaagaacaataaaattaaggaatctctagccaagctaattgagaatgaaaagagagaat

SEQ ID NO: 934368 - DNA, 605 bp, Homo sapiens
aactggagatcattaagttaagtgaaataagccatcacagaaacacaaagagcacatgttctcacttatctgtgggatctaaaaatcaaaacaactagactcatggagatagagagtagaatgacggttaccagaggctgggaagggtagtggagggctacaggggatgtggggatagttaataggtacaaaataaatagaaagaatggataagactactacttgatagcacaacagggtgactatagttgataataacttaattgtacatttaaagataactaaaaargtgtaattggattgtttgtaacacaaaggatacatgcttgcagtgataaatgtcccattctccataatgtatttatttcatattgaatgcctgtattaaaacatttagtgtaccccataattatatatactcattgaccccccaaaattaaaaagataaaaagttataaaataactcaaaacaaaaatagaaaataccttgaaacaaaaaaaatttaaaacaaagcataccacatattatgggatgcagcaaaagcagttctatgagggaagtttatagtgataagcagctacaataagaaaaaacaaagatctaa

SEQ ID NO: 934369 - DNA, 554 bp, Homo sapiens
atttttagtagagatgtggttttaccatattggccaggatggtcttgatctcctgacctcgtgatccacccacctcagcctcctaaagtgctgggattacaggtgtgagccaccatgctcagcccagtaatgtttaaagaagattgtatatcataaccagttttkttttatcccaggaattcaaagtggcttagcattggaaaatctataaacgtgactcaacatattaaaagattaatggagaaaatccatataactgaaaacatgcagaatacacttttaataacaggcaatatttattcaaataacaaagcaatctcttagtaaaataacaatagaatgccaacattgttgtctgtggtgaagcattagaaacattctatctaaaaactgtgaaaaagactatactcaataataccatttctattcaccagtgtattcaaggtattagtcaacacaatcagacaataaaaagacagaagagattgtagaagatgaaacaaaacaattcatataaaagctaatatgattgcttccatagaaaacccaaatat

SEQ ID NO: 934370 - DNA, 767 bp, Homo sapiens
agtttccaaataattggagattaaataacacatgggtcagagaaaataccttaagagaaatttgaaaatacattgaactaaatgcaaactaaaagtacaatttatcagagtttctgggatacaacaaaaccagtgcttagaaaaatattcacaacattgaatacatatattagaaaagaagaaagatctaacataaattatctaaacttccaccatagagaaccagaaacagaagagcaaataaattaaagtaagcayaataaaaaataataaaaattagggaagaaataaaattaaaaatagaaaatcaatagagaaaatcaacaaaaccaaaagctgattctttgaaaagatcaataaaattaataagcctttagccaagttaagaaaatatacagaacacaaattactaatataaatgaaagaggaggcatcactataaatcccgtggacattaaaagaataatgaaacaatactatggaaaaactctatatctacaaacttgacaacctagaggaaatgagacaattccttgaaagacacagtctgcaaatcttatacaagaaaaaatattatattagtatctgaatatgtccatattcattaaagaaattaaattaataataaacttcccaaacagaaaacatcaggcaggcccagatgagttcactggtaaattctgtcaaacatttaaggaagaaactataccaattctctataatttcttccagaaaataaaagcagaagcaatactttttaattcatc

SEQ ID NO: 934371 - DNA, 827 bp, Homo sapiens; identical to SEQ ID NO: 931760

SEQ ID NO: 934372 - DNA, 564 bp, Homo sapiens
tagatggtgcccacccagattaaggatgggtctccctttcccagcccactgactcaaatgttaatctcctttggcagcaccctcacagacacacccaggatcaatactttgcatccttcaatccaatcaagctgacactcagtattaaccatcacaccctcccctctcccctcagagctgagatccttggccagtggaggacagcttctctttcccaaggatgtccaagtgttgcttggcattaggctctgtctcttgccagaaccccccttacctcccgatgccaatcccgtgactggattacctaccayctgtttgcagtgaattgccttcggcttcttgggatccacctgctaggctgggcttctatctgtggctggccgctgagctgttcctcctttctctgtctgtgtccagccactgggcctagagcctggccctcttggctggcacctgacctggcttttggagaataggatgccacctgtctcactcctgagcccttaaccagggtctgatcatgacgatgatgataatgatgacaatgatagctaccacttgaca

SEQ ID NO: 934373 - DNA, 597 bp, Homo sapiens
agttgtccaaaaaattagaagatcaaattcaacaacgtataaaatgaattacataccatgatgaagtgaaatttatttcagacatacaaggtggttgaacattcaaaaatcagttaatctaaactattacaggaacacaccaaaaaacaggaaaaactgataattcttatctatagatgcagaaaaatatctgaaagatttcaacattcgttaataataagaacacctagcaaactagaaatagatatatactaatacaatgttcttcaacttgtatttgtccattctcacatcactatgmagaactacccaagacagggcaatttataaaggaaagagttttaattgattcacagttctgcaggctgtacaggaagtgtggctggggaggcctcaggaaacttacaatcatatcagaaggtgaagtgaaaaaaggcacatcttatgtggctggagaaggaggaagcaagtgaagggggaagtgctacacacttttaaacaacaagatcttgtgagaactcactcactatcatgacagcagcaaatggaatatctgcccccatgatccaatcacctcacactggatgtctcctccaa

SEQ ID NO: 934374 - DNA, 563 bp, Homo sapiens
agcatttaaaataatctgacttcaggctgggcgcagtggctcacgcctgtaatcccagcactttgggaggccgaggagcgcggatcacgaggtcaggaggtcgagaccacggtgaaaccccgtctctactaaaaatacaaaaaattagccgggcgcagtggcgggcgcctgtagtcccagctactcgggaggctgaggcaggagaatgatgttaacccgggaggcggagcttgcagtgagccgagattgcgccactgcactctagcctgggcgacagagcaagactctgtctcaaaaaaataaaaataaaaataaaaaataataaaataatctgacttcatatagataaatakttttaaaaggaaggtgttttttaaatttcattcaaataactgttgattttctttttttttttttttttttgccactgttccgaaattagatgagtgatggtttcttataggttagttgctatgtagagtctaaattttatcaataaactttttgtacttttacattgaaatccattggtctatcttgcattttgaatagatcatttattc

SEQ ID NO: 934375 - DNA, 669 bp, Homo sapiens
ctgggctggaagctggactacaatgtcacgtcctcagggtctaaatcactcaatacaaacagattgcaggtttacttcaagcagatcagtttgatttagtcacattcctataattccaggcttctcatcaccttgcctaataaaaagagtgaaaaaaattcaattttttcatttttatttcatacatatccatatatatgaaataaaattttatacatatccatatatgcaataaaagttcacatatatcatacatatccatatatgtccatatatakgaaataaaaaattacccaaatgtaaaattatccatatataaaaattacttccactggtttccctattactttttctgcttcataaacccccacagcagaacaagctgggacagcctaaggacctctagagcattcataaaaaaatcaggacgaattcatttcacaattccgagggcaccaatcacaccatattctgtagtgcagtcccatgtcaactccttccagttgaaagcaaaacaaatgacgcttgttaaagagcaagctgaatcccttatgcttcttctaggtgaagatatcaccttcatagccaaagtcaaggctgaagatcttctgagaaaacccactatcaaatggttcaaaggaaaatggatggacctggccagcaaagccg

SEQ ID NO: 934376 - DNA, 741 bp, Homo sapiens
atttctccctcagaaaatgatattttcttttctattgcattgtcagcctacaaatttgccaaacttttatgctgtgtttcatatgccctttaacagcagccaagtcacctctagaatgctttgctgcttagaaatttcttccgccaggtacccttaatcatctctctcaagttcaaagttccacaaatctctagggcagggacaaaatgctgccagtctctttgctaaaacataacaagagtcaccattgctccacttcccaacaagttcctcatctccatctgagaccacctcagcctggatttcattgtccatatcattatcagcattttggtcagagccactcaacaagcctttagggagttccaaactttcccacattttcctatcttcttctgasccctccaaattgttccaaaatctgcctgttacccagttccaaagttgcttccacatattcgggtgtcttttcagcaatgccccactctactggtaccaatttactgtattggtccgttttcacactgctgataaagacatacccaagactgggtgatttacaaaagaaagagaggtttaagggacttacagttccatgcggctggggaggcctcacagtcatggtggaagacaaggaggaggaagtcacatcttacatggatggcagcaggcaaagagagagagcttgtacagggaaactcccattttgaaaactatcagatctcgtgagacttattcact

SEQ ID NO: 934377 - DNA, 741 bp, Homo sapiens
atttctccctcagaaaatgatattttcttttctattgcattgtcagcctacaaatttgccaaacttttatgctgtgtttcatatgccctttaacagcagccaagtcacctctagaatgctttgctgcttagaaatttcttccgccaggtacccttaatcatctctctcaagttcaaagttccacaaatctctagggcagggacaaaatgctgccagtctctttgctaaaacataacaagagtcaccattgctccacttcccaacaagttcctcatctccatctgagaccacctcagcctggatttcattgtccatatcattatcagcattttggtcagagccactcaacaagcctttagggagttccaaactttcccacattttcctatcttcttctgagccctccaaattgttccaaamtctgcctgttacccagttccaaagttgcttccacatattcgggtgtcttttcagcaatgccccactctactggtaccaatttactgtattggtccgttttcacactgctgataaagacatacccaagactgggtgatttacaaaagaaagagaggtttaagggacttacagttccatgcggctggggaggcctcacagtcatggtggaagacaaggaggaggaagtcacatcttacatggatggcagcaggcaaagagagagagcttgtacagggaaactcccattttgaaaactatcagatctcgtgagacttattcact

SEQ ID NO: 934378 - DNA, 589 bp, Homo sapiens
actttttaacagcctcccccatctagggaactaatccattcccctgagagggaaacccacccactggccccctcctccatggcattagtctgtgagtggttcatccccatgacccagacacctcccactaggtcccacctccgatcacagccacattggggatcacatttcaacctgagttttgtcagggataaaacacatccaaactgtagcaaggggtatattatctgtactgttcaccttgcttttttctttttctttttttgagacrgagtctcaccctggagtgccatggcacagtgacagctcactgcagtctccacctcccaggctcaagccatcctcctacctcagcctcctgaatagactataagcaaagtgccattgtgtctggctaattttgtttgtttgtttgttttgttttgagacagggtctcactctacctcaaaacaaagagctaaagtgcagtgatgtgatctcagctcactgcaacctctgatgcctggctaatttaaaaaacttttctagagacagggcctccctatgttgcccaggctgatcttgaactcctggcctcaagtggtcctc

SEQ ID NO: 934379 - DNA, 555 bp, Homo sapiens
ggattctttatgctgactatgtattttaagaaatacaattgtggggtgggcacggtggctcatacctgtaatcccagcactttgggagctgaggcgggtggatcatctgaggtcggcagttcgagaccagcctgaccaacatggagaaaccccgtctctcctaaaaatacaaaattagcagagtgtggtgatgcatgcctgtaatcccagctactygagaggctgaggcaggagaatcgcttgaacccaggaggcggcggaggttgcggtgagccaagattgcgccattccactccagcctgggcaagaagagtgaaactctgtctgaaaaaaaaaacaaaaaaccccaaaaaaacccaaatgttcatgtcagtgtgtatctttaaatgctctgctatctgaaaaatagtagaactttttataaagcacatatatctgggagtttgaagaaacaggttttatctgattctagcactggtagtctccttgttgtaaccattaatctccaaattcatccttcacagaaatgacataatgtatgtagactattatgag

SEQ ID NO: 934380 - DNA, 592 bp, Homo sapiens
tctgtgctcttcattccgagcaccgccacccccacctttggtctgaacaccgctgcgcctggagtaggcacatcagcagcagcctctcctttggggcatcctcagcacgcccccaaggctttgttggtgttgcactttcggtaagcagcaagccaccctgtggccctgctcgtctgtctgaggagaggttgggyggggtggcaggctcctggccctctgaggccccgtgaagatcaggttcagcacaggaaagacatttcgggttaggagtacagcacagcccagggatgggagttggatggcagagatcagagaggagctgtccggggtggaagtttgcctcccatgggaagccaggtaaaaatggattcttgggcctcgctctgagactctctgggagtttgcatttcgggaggcttctcccgtacagtgtttctgatgcagcggggaaagccctattgaggcaccctgtgttttattactggcctggccttccagagatttgggcacccagagccagagtctcaggtagcagctgccctgatgaggtcttgttgaatctttccaggatcggcggccccttcattttcca

SEQ ID NO: 934381 - DNA, 570 bp, Homo sapiens
ctgaggcacaagaaccaattgaacccaggaggcagaggttgcagtgcagtctgcagtacaagattgtgctattgcattgcagcctgtggggacagagtgaaaccgtgtttcaaaaaaaaaaaaaaattagtggggcatagtggcacttgcctgtcatcccagctacttgggaggctgaggcaggtggatggcttaagctggaggctgcagtgagctatgactgcacaactgcactctagcctgtgtgacaaaaaaatatgaacaaatacataagtcaggtgactaaggggtcatctttatgccctgtaccttctctcagcaacctccatcctataagaaaggggcaattggccaaagtatgcctctgctgtagttgtagattaccatgtttgcacgattatcattgtyaatgcttcacatttacactagggcactatgattttcaatgcagtttccatttttattttggaggcccctcccacgaaccttctcccattttactgaggcccagggagaatgcacagggagctgagcccctcctttgatcttagtttggtggcagagacaggc

SEQ ID NO: 934382 - DNA, 586 bp, Homo sapiens
gataaccacctgatatagtttggatatttgtcccacccaaatctcatcctgaaaagtaatccccgatattggaggtggggccttgtgtgaggtgtctggatcatgggggcagatctctcatgaatggcttagccatcctcttggtgataagtaagctctctctgagttttcccgagatctggtcatttaaaagtgtgtggcacctccttcagatgctctccctctttcttgctcctgctctggccatgtgatgtgcctgctcccccttcaccttrtgccatagttcctgcggcctccccagaacctgagcagatgacagtgatatggacaggaggcagcaaaatactggggtgaagacgatgggatccttggcaagttctccaacctcaagcctggacctgcgactctaaatgagaaaaatccatttctgttttcccgcccaaatgttaccttttccaaaaccatcctggcctgccatgccccccatccagtacccataaacagcccaacctccactggcagaggagctgagtggggtggcaaagaaggagagaagagaagaagtatctgaacaatgagaggagaa

SEQ ID NO: 934383 - DNA, 571 bp, Homo sapiens
tccttaaagccttaacagaaatgactgcattttggtttggttttgtttgtcgggacatagtgcatgagcttagtccaaaacaatggcctcccagaatcttgtttaaaaaattccccctttttggtcaggttctcacttaggtgagagtgtaaccaaaacttagggccttagcgacactcttagttatgatcattttggatttctggtcttagcacatyatttatagggttacggtgtcctccttgttgcacatttctttcaattcttatcattccagttgaagagagaccatatgacattctagagatggctacaagaaagcatgtaaaatctttgagagaatacagcatgccagggagactattattataattttgggaggataataccaagagttcagagtatgctccttactcagggtccccataaaccaagccacctaaaattaaatagattcaagaatgagctagatgaagagtctactcacttgactaagtggtcttttcattaatcccctaaaactgaatttttaaaatctgcatttaatctatttctccataggccacaagtg

SEQ ID NO: 934384 - DNA, 636 bp, Homo sapiens
  misc_feature 110, 139, 144, 146, 148, 158: n = A,T,C or G
ataaattcacatgtcctattgtttcttgccacctctcagggttctgaaggaataggcaccaggttctgataagaacagaaacatctggagtgtgggagtgtcatctaaanaaaaaagtgaaatagcatacattaaactntttantntnctagttaatnattatagttttcacatacatttactcatttaagcttcgcaatagacaaacaacaaagtacatcatatgccccccttttattttctaccaaagaaggaaatagggtaagaggtagagaygtacctttatggatctatagagagatttatggcttttgtaatggtcagagcacctaaatcactaattaacttcctagcaaatttataggctgacataacaagtgaataaatggtttcactagatactgaggaattttattgttcataactttgtgccaaaaaaaagaaatgggaaaccattagatcagagagagtggccatctaccttctattcacccagggaagattttgtagaaaaaatgggaactggctacagttgatactatataaagaaatactgacttttaaatttcttcactctctttcttaacagattctctttttttttttctgtccttaaggtctcaaagttttctccag

SEQ ID NO: 934385 - DNA, 557 bp, Homo sapiens
tgatggcttggggaaacagtgtaaaccggcagtgtaaacaagagcagggcatttatgagtagttgagaatggtgaataggagtatgactagacagaagatagtagggatgaccagttttttgggtggcagtccaagttggtctggtgtctggaatgagactggggcctaataaaaaggagcgtctatacaggrgcttaaatgggctgtaccctttagcattccaagaacaggcctgaattctgagaaggccaagtggtaaaagtattgtccagtcctttttaggttggtggctgagcttggtaaggtgtgtttttaaaagaccattagtccgttctacctttcctgaagattgaggaccgtaaggggcatgaaggtttcactgaataccaagagcctgagaaactgcttgggtgatttgactagtaaaggccggtccgttatcggactgtatagaggtgggaaggccaaaccaaggaattatgtctcacagaagggaagaaatggctgcagtggccttctcagactctgtgggaaaggcctctgcccatccagtgaa

SEQ ID NO: 934386 - DNA, 821 bp, Homo sapiens
tggctcatgcctgtaatcctagcactttgggaggctgagaggggaggatcgcttgagcccaggagttcgagaccagcctggccaacatagtgagaccctgtctctaagaagaaaaaaaaatcaaaccatcaatgccattaaagttcccagagtctccctgccaactccaaagcccttctatcagagagctacacttctgaattttatgtttattgtttccaaactttcactctgtatgtatctccaagcaatacaaaatatagtttttcctgtttcttttcttttcttttttgacagggtttcgctctgtcatccaggctggagtgtagtggtgggatcaagctcagtgcagcctcgacgtctttggctcaagcaatcctcctgcctcagcctcccaagcgttgagattacaggtgtgagccactagaccgggcagtttgrctggctttctccttccttccttccttccttccttctttccttctttccttccttccttccatccttccttccttccctccttccctccctccttccttcctttcctttctttctctctctctttctcctcccctcccctccctccgtcccttcctccctccctctccctctctctctttctttcttagatggagtctcacactctgtcacccaggctggaatgcagtggtgtaatctcggctcactgcaacctccacataccgggttcaagcgattctcctgcctcagcctcccgagcagggactacaggcgcctgccaccacgcctggctaatgtttttttatttttagtagaaacggggtttcaccttgttggtcagg

SEQ ID NO: 934387 - DNA, 584 bp, Homo sapiens
cttgagattacaggcacccacaaccacgcctggctaatttttttgtatttttagtagagaaggggtttcaccatgttgtccaggctggtttcgaactcctgacctcaagtgatctgcctgcctcagcctcccaaagtgctgggattacaggtgtgagccactgcacccagccaggaactactctatctttgggaaagagatttgagttatggcccccctctcctcctttccctgcatccccaatcctgaactctggctctaggcctgaggttctattttctcttttttcgtttttgtaaagacggggtctcctcatgttgcccaggctggtctcaaagtcctagcctcaagcgatcctcctggcttgggcttccaaagcactgggattacrcttggccaatgtaggttctattttctatctagaagcctggggcctggcttcctctaggactcatgggaaaacctgtggaggagtgggagtggggaggccagtcaacagcagatgttcttttgaaggtccctgccagcatcttgttgcaacagtggtctcgcacacacccccataagcccgctgtgccctccac

SEQ ID NO: 934388 - DNA, 620 bp, Homo sapiens
caatggtgggcgcccctcccccagcctggctgccgccttgcagtttgatctcagactgctgtgctagcaatcagcaagattccgtgggcgtaggaccctccgagccaggtgtgggatatagtctcgtggtgcgccattttttaagccggtctgaaaagcgcaatattcgggtgggagtgacccgattttccaggtgtgtccgtcacccctttctttgactcggaaagggaactccctgaccccttgcacatcccaggaactgctgccctgcttcggctcgcgcayggtgtgcgcaccactggcctgcgcccactgtctggcactccctagtgagatgcacccggtacctcagatggaagtgcagaaatcacccatcttctgcgtcgttcacgctgggagctgtagaccggagctgttcctattcggccatcttggctcctccaccagataacattctttgatagaatctgtcaccctcatctgttcagcagtcccgttttttttgcctatagtttcagcggtatgaggaattcaaagtggtcaggttctgggctcagcttcctgtttagtggtattatatttgtgatctcttgtggagacattgtcccttgagaactgag

SEQ ID NO: 934389 - DNA, 830 bp, Homo sapiens
caaagtggttttatcattttacattcccaccaacagtgtatgagagttctagttcctctgcactcttattaacacatggttttaatcagacatctaataggtatgcagtagtttctgattgtgattttaatttatatttccttaatgtgaataatgttgaacatcttttcatgtgcttatttgccatccatttttttggtgaaataactgtttagatctgttgcctactttttgaaaaaaagttgaattctttgctcttatttgatttccaaagttctttatatattctggatacacatcctttatcagatatgggctttgcaaatattttctcccagtcagtggctggtcttttcattcttctcatggcatcttttcaggaaaagaagtttttaattttgatgaagtccaatttatcaaatttatttcctattgactgtgcttttagtgtaatatctaagacatattatctaattaaaggtcacaaagattttacttctatgttttctagaagttttatagttttagattttacacttaggtgcataatcgattttgacttaatttttatacgtggtatraggtatgaattgaagttctttttttctttttttgcatatagctatccaactgttctagcccaactcactgaaactattcattagaaattatcctttctcattgcctttgggtctttttaaaaatcaattgtatatgtgtgtgtatgtgtgtctgaactttctattctgttccatttgatctgttctatttgagctgtctatcatgatgttaatagcacctcatcttgatgactattattttttatgaag

SEQ ID NO: 934390 - DNA, 756 bp, Homo sapiens
cacaaatattagaatgctgttttcccacaggtacctgaggctctgttcatttttttcagtctattttctctctgtttttcagattgggtaatttccattgttctattatctagttcactggttcttccctctgtcccctccattctgttgttgagcctatccactgggatttttagaaaattttaattattgaattttttaaattctaaatttccatgtggttcttcttgatatattctatttccgtattgagacttcatatttttaatttgtttctagtgtttgtaattgctaattggagcatttttatgttggctgctttaaaatttgtgtcaataattccagcatctgtgtcatcttgatgttggtgtctgttgattatcttttctctttaaagttaagattttcctggttcttggtgtgacctgattttccatcattttcttggaattttgggtactatgttatgagattgggttttgcttaaatctttcttagcaggcctcctctgatgctgctcatttkggaagaaggacgtactgctttgctacgtgacagggtgaaggtctaggctcccctccaggcctttggggacacctcccatgctcagaggggtagaggtgcttttttactgatcctcatgtggcttctactaggaggtaggtgaaaggccttgttatctctgggtgatggtgaaagtttgactgttcactcagtcttctcaggcatcacttgggtgggacagggaggggtgcc

SEQ ID NO: 934391 - DNA, 585 bp, Homo sapiens
gaggttgtgcctgccctttatctgcaaccaccttccttctggcattcggttgactgaatacctacttatatcacggctgagtgatgagagatgtgaagggtacaatgcacagaacttaacaaatcatcttccaatgcacattttgcaagtagaggtggctatctaagtgtatagggatttgtttagaacttggggttatggggattagggagagaggggtcatatgtacatggtacaagccatgggtacaaggggacatggtacaagccacacaaatgcagaagtataagaagtctcagtgcattaagacagtcaagctggggcatgaagaaactctaatatcatggwctgactgcagtatttgctatggctagagggactgcagtatttgctatggctagatggaccaaaaacatttttttccctggttgggtttttttttttattttgttaagtaaccacaaggaagataaatatctatctttatattctaattaaaatatcttcatttatttcagacaacaatttgcttgataattttatctttatagactttgaagtgatagcatacttgagtgagtctgg

SEQ ID NO: 934392 - DNA, 619 bp, Homo sapiens
ataaacaacttcagcaaagtttcaagaaataaaatcaatgtacaaaactcactagaattcccatacaccaacaacagtcaagccgagagccaaatcaggaaggcaatcccactcacagtgccacaaaaagaataaaatacctaggaatacagataaccagggagattaaaggtctmtacagtgacaactacaaaacactgtacaaacaaacagagataatgcaaacaaatggaaaaacattccatgatcatgaatagtaagaataaatattattaaaatgccatactgcccccggagcaatttacagattcaatactatcctatcaaactaccagtgacattcttcacataactagaaaattctatttcaaaatttatatggaaccaaaaaagagccaaaatagccaaggcaaacctaagcaaaaagaaaaaagcaacctaacaaaaagaacaatttgctaccaaatttcaaactatactacggggctacagtcaccaaaatagcatgatattgtacaaaacctgacatatataccaatgaaagagaatagatagtaaacagacaacctacagaataggagaacatttttgcaaactatatctgacaaagatctaatat

SEQ ID NO: 934393 - DNA, 619 bp, Homo sapiens
ataaacaacttcagcaaagtttcaagaaataaaatcaatgtacaaaactcactagaattcccatacaccaacaacagtcaagccgagagccaaatcaggaaggcaatcccactcacagtgccacaaaaagaataaaatacctaggaatacagataaccagggagattaaaggtctctacagtgacaactacaaaacactgtacaaacaaacagagataatgcaaacaaatggaaaaacattccatgatcatgaatagtaagaataaatattattaaaatgccatactgcccccggagcaatttacagattcaatactatcctatcaaactaccagtgacattcttcacataactagaaaattctatttcaaaatttatatggaaccaaaaaagagccaaaatagccaaggcaaacckaagcaaaaagaaaaaagcaacctaacaaaaagaacaatttgctaccaaatttcaaactatactacggggctacagtcaccaaaatagcatgatattgtacaaaacctgacatatataccaatgaaagagaatagatagtaaacagacaacctacagaataggagaacatttttgcaaactatatctgacaaagatctaatat

SEQ ID NO: 934394 - DNA, 791 bp, Homo sapiens
tagaatacaactacatgaattacattattataattttagtgcatagtttcaaaaatccagataaatggttaaacacattaaataaatggagaatttttttttaaatgggagcttccctgcacaagctctcttctcttgtctactgccatgtgagacatgcctttcaccttccgccatgattgtaaagcctcccaagccactgggaactgtaagtccattaaacctcttttttttgtaaattgcccagttttgggtatgtctttatcagcagtgtgaaaacgaactaatacagtgaattagtacaagtagagtggggtgctgctgaaaagatacctgaaaatgtggaagcaactttggaactgggtaacaggtagagtttggaacagtttggagggctcagaagaagaaggaaaatgaggggaagtttggaactctctagagacttgttgaatggctttgataaaaatgctgataatgaaatggacaatgaarttcaggctgaagtggtctcagatggagatgaggaacttgttgggaactagagcaaaggtgactcttgttgtattttagcaaagagactggcagcattttgccctgctctggagatttgtggaactttgaacttgagagagatgatttagggtttctggtggaaggcttgggtgctgttaaacgcattcagttttaaaagggaaacagagcatgaaagttcagaaaatttgcaatctgacaatgcaatagaaaagaaaatatcattttctgaggagaaatacaagccagctgcagaaatt

SEQ ID NO: 934395 - DNA, 605 bp, Homo sapiens
tgaatgtcttcctttgagaagtgtctgtttaggtcctttgcccactttttaatggagttgttttgttcctgtaaatttaagtttcttgtagtcgctgaatatcagacctttgtcagatcgatatattgcaaaatttttctcccattctttaggttgtctattcactctgatgatagtttcctttgctgtgcagaagctctgtagtttaattagatcccacttgtcaatttttgattttgtctcaattgcttttggcattttcatcatgaaatctttgcctgtgcctatgtcctgaatggtattgcctagattttctaggatttttatagttttgggttttcatgtaaatctttaatccatcttgagttaatttttgtataaggtgtaaggaaggggcccagtttcaattttctgcgtatggctagccagttctcccagcaccatttattaaatagggaawcatttcccccattgcttgtttttgtcagttttgctgaagatcagttagttgtaggtatgcagtcttatttctgacttctctgttacgtttcatttgtctatgagtctgtttttgtaccagtaccatgctgttttggttattgtag

SEQ ID NO: 934396 - DNA, 580 bp, Homo sapiens
tgcagtggctcacgactgtaatcccagcactttgggaggccaaggtgggcagattgcttgaggtcaggagtttgaaaccagcctggccaatatggtgaaaacctcgtctctactaaaaatacaaaaattagttcagcatggtggcaygtgcctgtaatcccagatactcaggaggctgaggcacgagaatcactggaacctgggaggcagaggttgcagtgagccgagattgcaccactgcactccagcctgggcgacagagcaagactctgtctcaaaaacaaaaaaaaaaaaaaaaaaaaaaaaagaaagaaaaagaagatatgacttgggaaggttggtaaatttggtgtgtgataggcctaatagcttcactccatttcttggctctttaagttcagcagatgcacccttacaatagatggtacataaaaatgagttataggtagtaagtccttgaaattgtcttggaatgctctttgcttatattgaacccattcctctttctcttgtttctcaagatttcagatttccaggttgttttgacccttaatgcttaatggtgtttttgtctgaactt

SEQ ID NO: 934397 - DNA, 742 bp, Homo sapiens
ctcatctctcagttctgagtgtggagtcctctcccctgctccagacccaacactccaatctccagcctgagactctaatgccagtggcagttgctgctgctaggttgctaaattcttcccagcttgatatgaggctggattgagaatgatttcctcctatcagtttccagatctgagaacatgcatagggaacctcctagtgccttcacttctcacagtctctcacagcctttacttctcacagcctctcctcatgttagctttaggtattgggagagacaatgtgctttcctgtggcctgggttgcactgttccccagtggaagggtgaatcacagagggacactctcttcctctttcctctttggaactttactcacagttctcagccatatcctgttgtgcrggctgtctgaccaacttctcttccccgtgatgtaaagtgtcctttactttttggttgaattcccatgatccttcatgaataaagtttcacagtgtgaatcactacactaccaggtgggtgaagcatgctggagaaccttctaatctgccatcttggaagaaaaacaatattgagtaaggaaattgaataattgattaaaaacctctcaacaaagaaaagcacaggacctgatggtttaattggtgaatgatagtaaacatttaaagagttaacaccaatccttcttaaactctttcaaaaaatggaaaaagagggaaccattttcaactcattttgt

SEQ ID NO: 934398 - DNA, 742 bp, Homo sapiens
ggtgaatgatagtaaacatttaaagagttaacaccaatccttcttaaactctttcaaaaaatggaaaaagagggaaccattttcaactcattttgttagcccagaattatcctgatagcaaagccagacaaggacactataaaaaagaatattacaggctaacatttctgatgaacagagatataaaacttctcaacaatatactatcaagtcaaattaaataacacaccaaatgaattattcacaatgaacaagtgggatttattttggatgcaaggatggttcaacatattcaaattaataaataggatatatcacattacaagaataaaggaaaaaagccacagtatctcaatagatgcataaaaagtgttkgacaaaattcagcaaaagtctcagcaaattaagtgtagaaggaatgtacttcaacataagaaaggctatatatgacaaactcacagctaacattatagtcaatagtgaaaagctgaaaacgttttttcaagatccagaactagacaaggatattcattatcatgacttctatttaatgtagtactggaagtcctattcagagctgtttgttctttagagcatgtgatgattaatactaagtgtcaacttgattggattgaaggatgcaaagtattgttcctaggtgtgtctgtgagggtgttgccaaaggagattaacatttgagtcactggactaggagaggcagacccacccctaatctgggtgg

SEQ ID NO: 934399 - DNA, 610 bp, Homo sapiens
aatgcttttcctttcctcaaaacccagtgccataatgttggtttctagcacattgggcagtgagccttttttgcttggtaacacctagagtagtcacgctcttagggacagaaagtagaagggtagttgccagggggtgggaagaatgaagaatagcaagttgttaaatgggtatagcacttcagttttgcaagatgaaaagagttctggagatggatagtggtggtagcacaacaatgttaatgcacttaatactactgaatttttttacttaaaatatttaagatggtattacggactgaattgtgtcccccctcccaagttcatatattgaaattctaacccctattaccttagaatgtgactgtatttggagttaagaactttgaagaggtaattaagtttaaataagatcataaaggtggaacttwtaagaaggaggaagagacagcagggatgtgcacatagataaaaggctatgtggggaaataacaaaaagatgtctgctttcaacaacgcagggaggcctcaggagaaactagacccactgtcaccttaagctttcacttccagccttcagaacttgagaaaataaattgctgctattgaa

SEQ ID NO: 934400 - DNA, 635 bp, Homo sapiens
tagcacgcgctcatagtcctagctactcaggaggatcacttgagcccaggaattttaggctacagtgagctatgattgcaccacggcacaccagcttgggcaacaaagcaagacccccacctttaagaaaaaaaaattgtggctgggcgmggtggctcacacctgtaatcccagcactttgggaggcagaggcgggcagatcacaaggtcaggagatcgagaccatcctggctaacacagtgtaaccccgtctctactaaaaatacaaaaaattagcctggcgtggtggcgggtgcctgtagtcccagctactcaggagactgaggcagaagaatggcgtgaacccgggaggcggagcttgcagtgagccgagattgcgccactgcactccagcctgggtgacagagcgagactccgtctcaaaaaacgaaaaaaaattgttcaaattacatgaacatgtatgacaaacttccactattgatacagtcctgtctgctaaaaatatcttttctattttctggcaaagcttccgaccttaagagtttagtagtcttataacattacagatgggaagaaagtcagtgtcattagaatatagtgtgctttgtttatttcaattttctacaggcaatgaa

SEQ ID NO: 934401 - DNA, 587 bp, Homo sapiens
tcccagcccagttcagactgcccccgatggactggcttctctaatacatatatcattccctgtttgagtaaattaggcttctctctttctctcctcaacctacagcagcggggaatcaccaaaatgggggcctacaaagaaactcccaatatcccaattgaccatactggtctttgtccagtattctccatttcaggagatggtccccaaatctaccctcttgttaagccagtcacttggattcctctttgattctttccyttccctcatccctcccatctgattcccttcctccgcagtcaataagttctgtctctctctctctgaagcataactaacattcacccgcttctcaccacccccacggccacctgcctgatccaagctattaacgccttccaccttggtactgcagttgtctgccgaatgtatcagcctctctctctctctcctgctcttgccccattccacacccagcagccaatctttctatatggtggttcatagaccactttgctgctggaaaccttacaatagctgcttatttatgagatggagtctcactctgttgcccagtctggagtgca

SEQ ID NO: 934402 - DNA, 598 bp, Homo sapiens
gccttaagaattaatgaaatagggaataatcaccatcctgccttcactgagccggagcaggggcagcaaacttcttaaagtgtcacacaggaacgaggtcaggcctcatggttcacgccctgtgtcacaaacactcaactctgccatggcagtgcaaaagcagccacagacaatatgcaaacaaatgggcatgcatgaataaaactttatttccaaaagcaagcaacgggccagatttgactcgagggccatagtttgccgactcttgatccagagcagtctatcacacagaaacataatatgggccacatctatcattttaaattttctagcagcaagcacatttttaagaagtagaataaaaaaggtgaaactaattttmataatgtatttttacttagctcaaaaacctaaaatattgtcatttcaacacagaatccatatgaaattactaattagatatttcccttttctttgcacaaagttttagaaatccagtgtgcatcttacactcacagcacatctctagttggacgagccacacgtagctaatcactgcctcacggtacagtacaggaaatgaccccttgccattttc

SEQ ID NO: 934403 - DNA, 733 bp, Homo sapiens
  misc_feature 623: n = A,T,C or G
ccagctaatttttgtatttttagtagagacagggttttaccatcttggccaggctcgtcttcaacttctgacctcaagtgatccaccttccttggcctcccaaagtgctgggattacaggtgtgagccaccatgcccggcctgaaacctccagtttttaaatggtgataacaaatttgggggaaaaaatttaactgtattaaccaaacgcaattcatttgtatacctatgggytgtctttgatagaatctgaccagagcctgattgaagaatgtgatatcctggatctgaagcattttttgtgcagaacaggtgatagtttgagttgaagttgaaatttcctttaaaatggccatttgtgtaggtcacaaaaagtcacacggggctttagaagcaaaccgtaccagtgtttctcaaactccagtgtgcacataaatccactgggggatcttcctaaaatgcagagcctgagtcataggtctgggctgggccttgggattctgcattgctgacatgctcccaggtgatgctgctggtgctggtgcatggaccacgctttgggtagcaaagcattagaccatgttcatcactggtggttttgcaaactccattaagacccacccncacattgtcgttcctttttctgaatccaagttttgtttttgtttttgttttctgagacagagtctcgctctgtggtccaggctggagtgcagtggtgtgatcgtggctca

SEQ ID NO: 934404 - DNA, 598 bp, Homo sapiens
tattgagtctaaaccaccatcaaatctaagatatgccactaaaaagaaaaactaaacaatgaaaagaattttatttaaaaaatttaacataacaaaataaaaacactgtcaattaaaataagatggttctttcttatcacttagaatttttattttgtaaaaatattttaggccaggtgcagtggctcatgcttgkaatcccagcattttgggaggctgaggcaagaggatcacttgaggccaggaatgtgagaccagcttgggcaacacagtgagacccccatctctacaaaaattaaaatttttttaaaaattaaaaaatatatatattatttcctaatttttaagaaaagctccttttttacctacttaaataattttttaatattccatttatatctatatattctgttcaaaccaaaaggaaaacacaggtaaaatacattggttaaggtattcctcaaacttcttcacattcaaagcccaactcttcagaatcactcttccactcagagtcaacaatgtcctgtggaacatttcttaagaggatgctcctctgttgtctccaagatttcttcccagctgcagacccaagtct

SEQ ID NO: 934405 - DNA, 589 bp, Homo sapiens
agaccaggaagggtgggagggtgggaggagggctagggatgagaaattactgggtacaatgtgcattattcagtgatggctacattaaaagcacagacttcattgatatatatgcaatacacccatgtaacaaaatgatacttctaccccctaaatccattaaaattttttaaaaatttttaaaataaaggatgagtagaagtttgccaggtggagaagagcagagcattctaggcaggacaagcaaaggtactgagatgaagaagygcatggctgtgcagcagaatatctggtattgctagagcatcaagaggttaaagacatgagaggccgggcgcagtggctcacgcctgtaatcccagcactttgggaggccgaggtgggcggatcacaaggtcaagagatggagaccatcttgggcaacatggtgaaaccccacctctactaaaaatacaaaaattagctaggctttggtggtgcgtgcctgtagtcccagctacttgggaggctgaagcaggagaatcacttgaacccaggaggcggaggttgcggtgagctgagttcacgcgactgcactccagcctggcga

SEQ ID NO: 934406 - DNA, 548 bp, Homo sapiens
ctgcgtctgttgctggttttgatgattcaatataactggaaattttattggtcttttgtattttttttagtctccatttctgttttgattttgttttgttttgttttgagacggattcttgctttgtcacccagactggagtgcaatggcacgatctcagcccactgtaacctctgcctcccccggttcaagcgattctcctgcctcagcctcccaagtagctgggattacaggcaccagccaccatgcctggctaatttttgtatttatagtagagactcggttttgccatgttggctaggctggtctcaaactcttgacctcccaaagtgctgggattacaggcgtgagccaccaccctggcytctgctctgatctttgttatttcttttcttctactaattttgggtttgctttgctcttactttgctatttctttaagatgcaacattaggttgtttattggaagtttttctactttttatgtaggtgtttattgctataaacttcccacttagtactgcttttgttgtatcccatagatttgg

SEQ ID NO: 934407 - DNA, 526 bp, Homo sapiens
acaaaagccaaaattgacaaatgggatctaattaaactaaagagcttctgcacagcaaaagaaactaccrtaagagtgaacaggcagcctacagaatgggagaacatttttgcaatctactcatctgacaaagggctaatatccagaatctacaatgaactcaaacaaatttacaagaaaaaaacaaacaaccccatcaaaaagtgggcaaaggatatgaacagacacttctcaaaagaagacatttatgcagccaaaagacacatgaaaaaatgctcatcatcactggtcatcagagaaatgcaaatcaaaaccacaatgagataccatcacacagcagttagaatggcgatcattaaaaagtcaggaaacaataggtgctggagaggatgtaaagaatgattttctaaatggagagttctgataacctcaaatggtcccttccttggagggttattttgaagaataagtaaggaagtatacacagcatattgcctgactggtattaagcattacatattctttc

SEQ ID NO: 934408 - DNA, 485 bp, Homo sapiens
ccatgttcccacatggagtccctggtcacagtcacctgcttgcttcttaaggatgtgtccccaaagccgcacatttcccactgggctgagactcacagcacctcagctcaccccacctgggtctcgctggtcaccttcccaccatggggtttgccagatgctttctggacactgtcctccctccctggcacaagccctcaggttcctcctctcctctgcagtggctcctgcggaatgaggtgcccccgtgtgctgtggccgccatccagcccaccagcgctaaggggccaacacattttctcatcttgtgctcaaattcctgttcaatcatgtgtgctccttcccaggtgaacrggacagatcactggctgtgagcacagcccgtctcccccggctctcacagattcctctgtcatccctgaagttccctacaggtctgaactctgcttcactgacctcaaatccatccacacacttgtcatttc

SEQ ID NO: 934409 - DNA, 684 bp, Homo sapiens
catggctggggagtcctcaggaaacttacaattatgatagaaggcgaaggggaagctggagcaggaggaagagaaaaaggcgggaggtgctacacacttttaaacaaccagatctcatgagaactcactcactatcaccagaaggggaaaatctgccccatgatccaatcacctcccatcaggtccctctccaaaaattgagaattacgatttgacacgagatttgggtggagacacagagacaaaccatatcattccacccctggcacctcccaaatctcatgtccttctcacatttccaaacacaatcatgacttcctaacagccycccaaagtcttaactcattccagcattaactcaaaagtccaagtccaaagcctcatctgagacagacaagtcccttccacctatgagcacgtgaaataaaaaacaagttagttacttcctagaaacaatgggggtaaaggcattgggtaactgcttccattccaaatgggagaaattggtcaaaacaaagaggctatgggccccatgcaagttcaaaaaccaacagggcagtcattaaatcttaaaacttcaaaatactctcctttgactccatttcttgcttccaggctgcagtggtgcaaggggcgggggtgccaaaggacttgtgcaactccatccctgaggctttggagggt

SEQ ID NO: 934410 - DNA, 589 bp, Homo sapiens
acaagaacttactatcatgagaacaacaccaaggggagcaatctgcccctgtgatccaatcacctccaacattggaggattacaacattgagagacctcactccaacattggggattacaatttaacatgagctttgggtgggacacagatccaaaccacataattcctcccctgacctttccaaattttatatcctcacattgcaaaatacaatcatgccttcccaacagtcccccaaagtcttaactaattccagcattaactcaaaagtccaaagtatcatctgagacaaggctagtcccttccacctatgagcctgtaaaataaaaaaaacaagttagttgcttccaagatacaatgcaagtatgggcattgggtaaatactcctgttccaaaaggaaggaatccaccaaaagaaaggggcwacaggccccacttgaagtctgaaacccaggaaggaagttattaaaccttaaagctccaaaataatcttgtttgactccatgtcccaatttcaagacacaccagtgtgagaggtgggctcccaagtccttggacagctctgctcctttgactttgcagggatca

SEQ ID NO: 934411 - DNA, 733 bp, Homo sapiens
atccctcagagcagaggaaatgccttcctgtctgttgctcaggccaaagacactggacccctccccggtgtttccttttctctcaacccaacgtttaaccaagcagcaacgcctgtgccccacctcccaccatcccaggacacaaccgccactcagcacctctgctcccacctggacagctcctcctgccctggcccttgaccctacagtcttgtcccaaagagaagccagtttatcaaaaaagcagaaaataagcatcggtgaggatgtggagatacccaggcccttatgcacggccggcaggaatgtaaaacggtgcaacactgtggaaaagggtgtgacaatccttcaaaatatcccacggagtcaccacaggacccagcacttccacttctgggtgtgcatccaaggaagggaaarccgggactcaaacacatgtctgtgacaacgttattgtcaacagacaaaaggtggacgccacctaagtgtccatcaacaaatgaagggataaaccagacatggtccatctagacaggggaatattcctcagccttagagaggtaggaaatcctggcacacaccacagtgggtatgaaccctgaggacacaacactcagtgaaggaagtcagtcaccaaatgacacacactgtctgatccgctcgtatgcggtccctggagtcctcaaattcagagacacagaaagtggaaaggtaggtgccaggggctggcagg

SEQ ID NO: 934412 - DNA, 598 bp, Homo sapiens
gctgggagaaccactactctcttcaaagctgtcagacagggacgtttaagtctgcagaggttactgctgtctttttgtttgtctgtaccctgcccccagaggtggagcctacaggagcaggcaggcctccttgagctgtggtgggctccacccagttccagcttcctggctgctttgtttacctaagcaagcctgggcaatggcaggcgcccctcccccagcctggctgccaccttgcagtttgatctcagactgctgtgctagcgatcaggagacttcgtgggcataggaccctcccagccatgtgcgggatataatctcctggtgtgccgttttttaagcccgttggaaaagygcagtattagggtggaagtgacccaattttccaggtgctgtctgtcacccctttctttgactaggaaagggaactccctgaccctgcttcctgagtgaggcaatgccttgccctgcttcggctcacacattgctctgcacccactgtcctgcacccactgtctggcactccctagtgagatgaacccagtacctcagatggaaatgcagaaatcacctgtcttttgtgtcgctcatgctggga

SEQ ID NO: 934413 - DNA, 598 bp, Homo sapiens
gctgggagaaccactactctcttcaaagctgtcagacagggacgtttaagtctgcagaggttactgctgtctttttgtttgtctgtaccctgcccccagaggtggagcctacaggagcaggcaggcctccttgagctgtggtgggctccacccagttccagcttcctggctgctttgtttacctaagcaagcctgggcaatggcaggcgcccctcccccagcctggctgccaccttgcagtttgatctcagactgctgtgctagcgatcaggagacttcgtgggcataggaccctcccagccatgtgcgggatataatctcctggtgtgccgttttttaagcccgttggaaaagcgcagtattagggtggaagtgacccaattttccaggtgctgtctgtcacccctttctttgactaggaaagggaactccctgacccygcttcctgagtgaggcaatgccttgccctgcttcggctcacacattgctctgcacccactgtcctgcacccactgtctggcactccctagtgagatgaacccagtacctcagatggaaatgcagaaatcacctgtcttttgtgtcgctcatgctggga

SEQ ID NO: 934414 - DNA, 594 bp, Homo sapiens
tggaccggtggttgtggtggacatggaagcagactcctctgccagggaaaggaaagagaaaagaaaagtgggaatgactttgtcttatggtttcagtattagctcagtcgcagtagaatagagcatcaggtagatttctgagattccaacttcaaaccatggcttctggatggcatctctggacctgcctggggcccaaggaaacttgttgcccraagggaagaaaagaagtctggttggcttcataacctgctgattatggagccttagggctctgagcaaacataggtggtagtcaagtggtggttacagtgcaccttgggtgagactcagtgctgtgctggctttaggtctgatccagcacaatcccaatggtggtggccacagggttgcttcttacacgacttccccagctccagacagctcagcagagagaggagactctgtttcctctctgtttggaagaacgtaagggaagataacaagagtttctgtctggtaatccagagaattcttctggatcttatccaagatcaccaagacagtacctcaaccagtctgtaagaatcacagctttacagggcctggggtgcc

SEQ ID NO: 934415 - DNA, 590 bp, Homo sapiens
tgtggtggacatggaagcagactcctctgccagggaaaggaaagagaaaagaaaagtgggaatgactttgtcttatggtttcagtattagctcagtcgcagtagaatagagcatcaggtagatttctgagattccaacttcaaaccatggcttctggatggcatctctggacctgcctggggcccaaggaaacttgttgcccgaagggaagaaaagaagtctggttggcttcataacctgctgattatggagccttagggctctgagcaaacataggtggtagtcaagtggtggttacagtgcaccttgggtgagactcagtgctgtgctggctttaggtctgatccagcacaatcccaatggtggtggccacagggttgcttcttacacracttccccagctccagacagctcagcagagagaggagactctgtttcctctctgtttggaagaacgtaagggaagataacaagagtttctgtctggtaatccagagaattcttctggatcttatccaagatcaccaagacagtacctcaaccagtctgtaagaatcacagctttacagggcctggggtgccacctaatg

SEQ ID NO: 934416 - DNA, 638 bp, Homo sapiens
tgaatatgacatggacactaatattcagaccatagcaccactataatcacttctttgcatataccctaaacgttttttcctctttatcaattgatgaacaaaatgtcaactctagttatataatgcaattctcctacttcaggcctgcacccctacaggtgaacatacttaatatgtttgttcagacttccatactggcttgttttattttaaattcattagcatcagcctccagtgagttcttaatgctacaaaataatcatattatgtttccctgacttataccttctctcaacccactggatgattctttcatactttcccttaaggtttaatagctttctctcatctgtattctcaggagataactctgactataaaagtagaagcgatcaacatgaactttcaaaaactccctctgtgatatctccctagctgcctggatctgtagtcataygctctgccatcactcctttacctctggataaacatctgttctctttgcagtggccttcccttccacttatacctttgctctgtcctctttttagtcccattccatcctgtaacagttccttccattctctcctgatacatcatttttcattctctactgggtatttctcatcaatatgaaa

SEQ ID NO: 934417 - DNA, 783 bp, Homo sapiens
cggaacttagttcccacaagccttgccacctcaggctaaagtgctttggcgctctaaataaaattgacagatggactaggtccataaagactgaaatttttaggcaagtcctagtactgaactgggcccacagctagtagactgtagggatggcacacaacctactgagacaccagcagaggtggcaaaaggaatgctggcgtcacccctctcctaaccacaggctgcacagctcacagctccaaaagataccatttccttctgcctgaggagaggagagggaagagtggggaggactttgccttgcatcttggataccagctcagccaacagcagaatagagcactggtcagagtcgtgaggccccctttcraagccctagctcccagatgacatttctacacaccccttggaccagaagggaaaccactgccttgaagggaagaacccaattctggcagcattcatcacctactaactgaagagtcgttgggcccgaataaccagcagtgatacccaagtactacgttgagggcctttggtaaaaccttgagttgtgctagcttcaagtgagacttagcacattttcaactgttgtggcttcagggtgagacttcttttgcttgagaaaagcagagggaaaagtaaagggcactttgacttgcatcttaggtaccagcccaaccataccagggtagcgtaccaagtagggacttgggtaccctgattccaggacttggttttggacagcatttctggacctgccctgggccagagggaagc

SEQ ID NO: 934418 - DNA, 603 bp, Homo sapiens
gccaggctggtcttgaactcctgaccttgtgatctgcccaccatggcctcccaaagtgttgggattacaggcatgagccaccgcgcctggcccatatcccactttagtcagaaaacctttcgaatcaacttggtaggctaggaaatcttatagcttaataattgttattttcagtacaatcttttaggatttgagtatttaaaaagataactatgtttctttacacatttttaatatygtaaaaagacaatgcagtcatcaaaagttaaaataacaattaaaatgtgactttaaaatctggcatttttttatagtattcaattataacctataatttcaaagacaatatatattctttcatatcacctaaaaatctaaactccttaggagtgtatgtgtatatggagagcttgcttatgaggcaaatatatctcaataacaattacaaagatgcttttcaccatctgaatgtcttcagttacttctcccttgaaatgatgaatttgttatcaatcatctttatttctgagctactagtagtcccactgttatcacactaaaatagcaattacttagcatttattttgtgtcagccactgttct

SEQ ID NO: 934419 - DNA, 564 bp, Homo sapiens
agaatgagattatgtcctttgcagggacatggatggagctggaggccatgatccttagcatactaacacaggaacagaaaactgaataccgcatattagtgggagctgaatgatgagaacacatggacacagaggggaacagcacacactgaggcctactgaaggatggagggtgggagaggatcaggaaaaacaacttatgggtactaggcttaatacctgggtgatgaaataatctgtacaacaaacctccatgacacaagtttacctatgtaacaaacctacacttgtaagcttgaacttaaaattaaagttgaaaaaaagaaagataatcctttgtcataagccttgcarttccaaaatggtatatttacacagacttaccagaaacttaaaataagctccagatatcatatgtacatacattgcctactttgaccaaactgttgacctgataagacagatgatcacgtttagtttttgcatactagaggtttttaaagttgctctgctttgaaagtgggatgtgtttgcatttcctctataattttatgagaattaatg

SEQ ID NO: 934420 - DNA, 609 bp, Homo sapiens
agaacctgtagtagaggtgctgttgagagttttagaaggggtggacggagaaggtcttttgagcttagtgtgaaaatcagttcaaaaagaaaaatttgaacatactgaaacacagcagatcctgggcaaatgtatcaatggagcagacaacccagaaagctaaagagcttgtgcagaggatggaagtgtggagagtggagccctcaggaagagctagtggaatatgctgcccaagtcagtgtgagaagacaaccatggaaagaatctgtgactatgggggaataggacatytaaaggtgggcagaggaagatgctgcaaagaggcatcaaggagggtggctcaaaggagcctgcagaggaggaggaagaggaaaatgaggctggaaatgtgaagggagaaagaccacagtctcaacagctgtgaagaccaaggaattagcctagaacagaagaagaggtgtctttcctgtgaagaagaaaggatgggtgaatgttagaatagatttcatctgggaagcagtaatgtagaggacagaatgtacttcatgaagtaggaagtaaagtaggtcacacctgaaggggatgaaaataaggatgaggtggaggttt

SEQ ID NO: 934421 - DNA, 651 bp, Homo sapiens
ccgtctggtcctggactttttttggttggtaggctcttaattattgcctcaatttcagagcctgttattggtatattcagagattcaacttcttcctggtttagtcttaggagagtgtatgtgtctgggaatttatccatttcttctagattttctagtttatttgcgtagatgtgtttatagtattctgtgatggtagtttgtatttctgtgggatcagtggtgatatcccctttatcatttctaattgcatctatttgattcttctctcttttatttgttattagtcttgctatcagtctatcaattttgttgatcttttcaaacaaccagctcctggattcacggattttttgaagggttttttgtgtctctatctccttcagttccactctgatcttagtgatttcttgtcttctgctagcttttgaatgtgtttgctcttgcttctctagttcttttaattgtgatgttagrgtgtcaattttctatctttcctgctttctcttgtgggcatttagtgctataaatttccttctacacactgcaaatgtgtcccagagattctggtatgtagtgtctttgttctcattggtttcaaagaacatcattatttctgccttcacttccttacgtacccagtagtcattc

SEQ ID NO: 934422 - DNA, 586 bp, Homo sapiens
caccactaaagaattttttaatgtaaccaaacaccacctgttccccaaaaacctattataacaacaacaaaaaaattttaactgccacaaagattatatttgcttcaatataaattaggaagtttttccgtatttttttattttcagaaattacttttataaaagagacttaatgatgtagataagatagaaagtwccgttcctggaagtttgttattattcagcttttaattcagcatattaaaggtaatgacagaaaccacaattacttttgcactaaccttatataaaccatctgtgcattagtggaggaatattttaagtacctttcataataattattactctgttcaagttttcaatttcagggggacgattttggtattttgcatttttcaagaaatgtagatatttcctttaggctattatacttattaacttatatttttataaaataatttttaagtattgaagtattttatatttataagtagttatcccttttatattctttcttctctttatttgaatatttttacttttttaggtttttttgtagaattttatctgtcattctagcttttta

SEQ ID NO: 934423 - DNA, 586 bp, Homo sapiens
caccactaaagaattttttaatgtaaccaaacaccacctgttccccaaaaacctattataacaacaacaaaaaaattttaactgccacaaagattatatttgcttcaatataaattaggaagtttttccgtatttttttattttcagaaattacttttataaaagagacttaatgatgtagataagatagaaagttccgttcctggaagtttgttattattcagcttttaattcagcatattaaaggtaatgacagaaaccacaattacttttgcactaaccttatataaaccatctgtgcattagtggaggaatattttaagtacctttcataataattattactctgttcaagttttcaatttcagggggacgattttggtattttgcatttttcaagaaatktagatatttcctttaggctattatacttattaacttatatttttataaaataatttttaagtattgaagtattttatatttataagtagttatcccttttatattctttcttctctttatttgaatatttttacttttttaggtttttttgtagaattttatctgtcattctagcttttta

SEQ ID NO: 934424 - DNA, 630 bp, Homo sapiens
ggaaccttgactaatacactcagcaatagccaaactgttgccatgcagtaattaaggtccgttttcatgtattttcaggtaagccagggaactaactggatgtttacacttaattcctggtttttaaaatgcagacaagaaaaaaaatgtggccctcaaaaaaccatatctgtgtmccatactcatgtgttctgaacttaacctcctgtctctaaatgtataagattttgtaagttcagtttccttcacttaattgaggagaaatgtgattgtatcaataataacagtgtagtatcatgttaagccaaccatatgaaatagccaatatctgatcattctgactgtaaaaaatagcaatagcgtgtgattcaacttagtatgaaaagcactacactgaggtgggagacctgggtcatgtcttggatcttccactcacatttgtttctcatctgtagaatgaaatgggtgggactagattatctctaaattccccttcagctctagctttctattattaagcctttatgataatatataatgacttgaagaaaggatatctacatcacaaatgtggcagacggtgaaggccactgcgtggatataaaagggtctgtgggaacgttcaaaatg

SEQ ID NO: 934425 - DNA, 486 bp, Homo sapiens
ccatttttatatgttcttttgagaaatgtctgtttatgttatttgcccacttttcgatagtattgtttgtttttttcttgctgagttgtttgagttccttgtagattctgaatacaagttctttgtcagatgcctagtttgcaaacattttctccctttccatgggttgtttgttwactctgataattatcttttactgtacaggagctttttaaatttaaccaggtttcatttatttattttcatttttgttccatttgcttttggagtcttagtcatgaattccttgcctcggccaatgtccaaaagagtttttccaaggttatcttccagaattttttatggttttaggtcttaggtttaagtcttggatcattttgagttaatttttgcttaagggatccagtttcattcttctacatgtggctagccagttttgctagcatcatttattaaatggggtgtccttccccagtttacattttt

SEQ ID NO: 934426 - DNA, 486 bp, Homo sapiens
ccatttttatatgttcttttgagaaatgtctgtttatgttatttgcccacttttcgatagtattgtttgtttttttcttgctgagttgtttgagttccttgtagattctgaatacaagttctttgtcagatgcctagtttgcaaacattttctccctttccatgggttgtttgtttactctgataattatcttttactgtacaggagctttttaaatttaaccaggtttcatttatttattttcatttttgttccatttgcttttggagtcttagtcatgaattccttgcctcggccaatgtccaraagagtttttccaaggttatcttccagaattttttatggttttaggtcttaggtttaagtcttggatcattttgagttaatttttgcttaagggatccagtttcattcttctacatgtggctagccagttttgctagcatcatttattaaatggggtgtccttccccagtttacattttt

SEQ ID NO: 934427 - DNA, 668 bp, Homo sapiens
gatataaaggtttcactgaatactaagagcctgaaaaactgcttggctgatttgactaataaaggctggtctgttatcagactgtatagaggtgagaaggctaaactgaggaattatgtctgacagaagggaagaaatgactgcagtggccttctcagaccctttaggaaaggactctacttatccagtgaaagtgtctacctagactaagaggtattttagttatctgactcggggcatgttgagtaaagctaatttgccagttctgggtggggcaaatcctcgagcttgaygtgtagggaagggagggggcctgaataatctttgaggagtagtagaatagcagatggaacactgagaagttatttccttgaggatagatttccacaatggaaagtaaatgagaggttttgagaggcaggctagtgacttgtactatagcatagcctgcctttgctggtgtgtggcgattaggcctggtggaaccgccattaataaatcaagcgtgatcagggtgaggaacaggaaagaaggaaatatggggaaattgggtgaatgtcaggtggatcagagagatacagtcatgagggtcaggtgtggtatccagaataatgtgggaggccagattgaagtccgggccaggaacaatagtacttgtgggacttaac

SEQ ID NO: 934428 - DNA, 668 bp, Homo sapiens
gatataaaggtttcactgaatactaagagcctgaaaaactgcttggctgatttgactaataaaggctggtctgttatcagactgtatagaggtgagaaggctaaactgaggaattatgtctgacagaagggaagaaatgactgcagtggccttctcagaccctttaggaaaggactctacttatccagtgaaagtgtctacctagactaagaggtattttagttatctgactcggggcatgttgagtaaagctaatttgccagttctgggtggggcaaatcctcgagcttgacgtgtagggaagggagggggcctgaataatctttgaggagtagtagaatagcagatggaacactgagaagttatttccttgaggatagatttccacaatggaaagtaaatgagaggttttragaggcaggctagtgacttgtactatagcatagcctgcctttgctggtgtgtggcgattaggcctggtggaaccgccattaataaatcaagcgtgatcagggtgaggaacaggaaagaaggaaatatggggaaattgggtgaatgtcaggtggatcagagagatacagtcatgagggtcaggtgtggtatccagaataatgtgggaggccagattgaagtccgggccaggaacaatagtacttgtgggacttaac

SEQ ID NO: 934429 - DNA, 747 bp, Homo sapiens
cagctgaaggagccagggagcggaatgtatatgcatcaggtatgaggaagaaaatagattttggaagttatgagaactgtagaaagtaagttgagcatagtttgtgattttgagggcctctaaaagggcggcagcagccgctgcacggagacatgagggctaggctaaaacagtaaggtcaagttgtttggacagaaaggctacagggtgtggtcctggctcttgtgtaagaattctgaccrcactaaccatgcctaggaaggaaaggagttgttgttttgtaagggattgaggtttgggagattaatcggacacgatcagcagggaaagcatgtgtgtttttatgagaattatgctgagataggtaacagatgaggatgaaatttgggcttgactgaagtaatgggggctgtctgtgaagccttgcggcagtacaacccaggtaatttgctgagcctaatgggtgtcagggtcagtccaagtgaaagcaaagagaggctgggacgaggggtgcaggggaatagtgaaaaaagcatctttaagatcaagaacggaatagtgagttgtggaggaaggtattgaggacaaaagagtgtatgagttgggcaccacaggatggataggcaaaacaatttggttgataaggcacagatcctgaactaatctgtaagacttgtccagtttttggacaggtaaaatgggggaattgtaaggagagtttataggttttagaagcccatgctgtag

SEQ ID NO: 934430 - DNA, 768 bp, Homo sapiens
tcaagaacggaatagtgagttgtggaggaaggtattgaggacaaaagagtgtatgagttgggcaccacaggatggataggcaaaacaatttggttgataaggcacagatcctgaactaatctgtaagacttgtccagtttttggacaggtaaaatgggggaattgtaaggagagtttataggttttagaagcccatgctgtagcaggtgagtgataacaggctttaatccttttaaagtgtgctgtgggatgggatattggcattgagtggggtaagcatgattaggttttaatgggatggtaatgggcatgtgatcggttgccagggaaggagtaagatgtcccatacttgtgggttaagttggggggatacgagaggaagatgagaaggaggctttgggttggggagaagggtggcaatgagatgcggctgtagtccaggaatagtcagggaagcagataatttggttaaaatatctcagcctaataagggaactgggcaggtggggataaagaaaaaagagtgcataaaagagtgttgtccaagttggcaccagagtkggggagttttcaggggtttagaagcctggccgtcaatacctacaacaattatggaggtaagggaaacaggcccttgaaaagaaggtaatgtggagtgggtagtctctgtattgactaaggggacggacttaccttccactgtgagagttacctgaagctcggcatccgtgatggtctacggggcttccgaggtgatcgggtagcgtc

SEQ ID NO: 934431 - DNA, 596 bp, Homo sapiens
tgggggagcagagtcacttgtggccaagaagaattgttctggggtttggtttgcaagacagcaaaagggcagaagaaaacagcatatgggggttgaatgcccccagcagaacaaggcaaggcataggggtgtcttactactggggatcatacctgagtcacacagcaccaaagtatgttagcagtggaacttrtctgagacatgtgggccaagcgggcaacttgagataccaagtgtactgttttacttttgacttggggttttacacattggcatacctccaggattttcatcccttctcctctgattcttcccttggggtgggctgtctgcatttgcaatggcctgctaggacttgggaggggaacatgtacaatgtgtttactggcgttgtgcacgtgctcacttgaggcattctttccttaccagcctaatgttcttagaaggtcatatactagttaaactctgccattattcctcttaaggtgcaggcttgagtccacttgcccaactcctgagctcttagtgggaagttgctgatcaccagttttaggtttttttatctgttgggagattgccttcccctggtaccagct

SEQ ID NO: 934432 - DNA, 596 bp, Homo sapiens
tgggggagcagagtcacttgtggccaagaagaattgttctggggtttggtttgcaagacagcaaaagggcagaagaaaacagcatatgggggttgaatgcccccagcagaacaaggcaaggcataggggtgtcttactactggggatcatacctgagtcacacagcaccaaagtatgttagcagtggaacttgtctgagacatgtgggccaagcgggcaacttgagataccaagtgtactgttttacttttgacttggggttttacasattggcatacctccaggattttcatcccttctcctctgattcttcccttggggtgggctgtctgcatttgcaatggcctgctaggacttgggaggggaacatgtacaatgtgtttactggcgttgtgcacgtgctcacttgaggcattctttccttaccagcctaatgttcttagaaggtcatatactagttaaactctgccattattcctcttaaggtgcaggcttgagtccacttgcccaactcctgagctcttagtgggaagttgctgatcaccagttttaggtttttttatctgttgggagattgccttcccctggtaccagct

SEQ ID NO: 934433 - DNA, 584 bp, Homo sapiens
cctccctgggacagagcttccagagggagggttaggctgccatctttgctgtttcatagccttcactggtgataactccaggtactggaaagtctgaggcaactacgaactggaatggaaccccagaatactacatcagccctgtggaaaagtggccagactgttacatgtgcccattcccatatatcctcacctggcagttctaggcctctagacacccctaaccagagctattggggcagtagcaactcagtgactccctggacagagcctcaaggggcaactgaaagtctctctgctactgccttttcagtgaaactgtccttgctgccctcaaactaataaaggagtaaagaccctaagtgccttatgaacaccttcaacaagttgctgctsacccaaggagaggaggccagtctgtctcccatgcaaccacgcaagcccaactgcttgtagccaaacagggaatccctggcttgagtccacagcacagaccctccatcctggcctgagtgcactgagcaattgctgacctgcatctctctggggtagagcccccaggagacaagcaaagtggtggggca

SEQ ID NO: 934434 - DNA, 722 bp, Homo sapiens
ttggcagaaagggcagaaagggctacgcctcccaccgggcaccacagagctttgtaagtggagaagagtttggacctcagacagataatgtggtttttagaggcacctactatactgtgtttgctaaggacttttgaatgtgtgaacattttccccagcagtagaagaagcctggagggttactggaaggcagggagaggtgcmcatgactgtgtgaaggagagctgtgactacttccatgacattttggataccaagtagcttgatggcgtagaactaacactggattctagtactagctgtagaaggttcggggagtccagggccactgaggcaggtgactttggacaagtcaccttcttaggcctttgtttcttaatatttatctcatgaggctgggtgtggtggctcacacctgtaatctcagcactttgggaaactgagacgggaggatcacttgaggccaggagtttgagaccagcctggccaacatggcaaaaccctgtctctactaaaaatacaaaaagtagccaggtgtgttggtgtgcacctctaatcccagctactcgggaggctgaggcacgtgaatctctttaacagggaggtggaggttgcagtgagacaaagcaagactccatatatttttttatacacacacacacacacacacacacacacacacacacacaccttatgaatggaaatctaaggaacggcacagg

SEQ ID NO: 934435 - DNA, 650 bp, Homo sapiens
gctgggagaaccactgctctcttcaaagctgtcagacagggacacttaagtctgcagaggttactgctgtctttttgtttgtctgtgccctgcccccagaggtggagcctacagaggcaggcaggcctccttgagctgtggtgggctccacccagttggagcttcccggctgctttgtttacctaagcaagcctgggcaatggcgggcgcccctcccccagccttgctgccgccttgcagtttgatctcagactgctgtgctagcaatcagcgagactccgtgrgcctaggaccctcccagccaggtgtgggatataatctcgtggtgcgccgttttttaagctggtctgaaaagcgcaatattcgggtgggagtgacccaattttccaggtgcgtccgtcacccctttctttgactcggaaagggaactccctgaccccttgcacttcccaagtgaggcaatgctcgccctgcttcggctcacgcacggtgcacgcacccactggcctgcgcccactgtctggcactccctagtgagatgaacccggtacctcagatggaaatgcagaaatcacccttcttctgcgtcgctcacgctgggagctgtagaccggagctgtttctattcggccatcttggctcctcgaatc

SEQ ID NO: 934436 - DNA, 731 bp, Homo sapiens
gctgcttgggaggttgagatggaagaatcacttgaatcctggaggtggaggttgcattgagccaagatcatgccattgcactgcagcctgggtgacagagtaagactccatctcaaaaacaaccaacaacaataacaaaaaatactataaaaaaccctcatattcattatagcaatagaaataagctacttagaaatatatcttataaaatgttaaatttaaaatgagaactgtctgggaataaatcttccaaaaaccacatataaactgaaaaattatgaatacaataatgttttacagtttgtaaaagaaaaactaaaaaatgggccgggcatggtggctcaygcctgtaatcccagcactttgggaggccgaagcaggtagatcacgaggtcatgagatcgagaccatcctggctaacattgggaggctgaagcaggtggatcacgaggtcatgagatcgagaccatcctggctaacatggtgaaaccccatctcttttttttaatacaaaaaattagctggcagtggtggcgggcgcctatagtcccagctacttgggaggctgaggcaggagaatggcgtgaacccgggaggcagagcttgcagtgagccgagattgcgccactgtactccagcgtgggtgacagagcgagactccatctcaaaaaaaaaaagaaaaaagaaaaaatggaaagatatatttgttactgagcaataggcttacttta

SEQ ID NO: 934437 - DNA, 626 bp, Homo sapiens
aacccatgtgcaggcttcctaagctccctccctcctgtaagggtcaaagtttactatccctctgcagcaaaaatatagtaacacatgtgtttgatgtttctgcccaggaaggaccattggagataagtgcccaaggtctttactgggagctggtcatgtaggtattctctgcctaacatgtggtgatcatattgtttgtatacagtctcggcatagtaattatcagttaggaaatagtagggacgttcctgaaacccatgttctcagatgccagccaggggccagtcttgcaagcagggctttctatggatggtagttttggtcctgatgctcttttctatctagactacttcagataaaatagaatatttattgacttcttttaagttactgtgctaggtactatgggtatattagagcattagmgatatatatttcctgccaacacagtgtttacttgctggaggacaaaaaaagaacagggtagtaagtaagcaggaaaaaattcagatcctgctaagtgttattacagaaaaattagatgagagaatgggttagtctgctcagtctgccataacaaaataccatattctggggagcttaaacaacagaaatttatttctcag

SEQ ID NO: 934438 - DNA, 660 bp, Homo sapiens
  misc_feature 641: n = A,T,C or G
ataatttctttctttatatcctcatctatttgcttttccctatttgatttttttgtttgtttgctttttaaactttgctgttaaaagctaagacataaacacacacgttcacctaggcctccccggggccagcatcatcacatcaccgccttccacctgcacgtcctgtcccrctgggaggtctccaggggaataacacaaggtgtgccgtcgcctcccacgatggccatgcctgctgtcggatccctcctgaaggacctgccggaggctgttccacagctcacttttgtttaataagtagaaacaatacactctaaaatcatgataaaagttacagtaaatccataagccagtaacatagtcatttattatcatcgagcatcatgtccatgcatgactgtatgtgctggacgttcacactccaggcagcacagtgggttcacccacaccatcgtcactaaacacgtgagactaaagcttcaagctgagcagctacgacagccacactgggatggggatctttcaggtctgttctaatcgcacagccaccgcagtacgcatggtcttcactgatggaaatgtccttcttatgcagggcgtcatctgggagattttcttcaaggaaagatggatccacacanggagcgtggcccagtggtg

SEQ ID NO: 934439 - DNA, 660 bp, Homo sapiens
  misc_feature 641: n = A,T,C or G
ataatttctttctttatatcctcatctatttgcttttccctatttgatttttttgtttgtttgctttttaaactttgctgttaaaagctaagacataaacacacacgttcacctaggcctccccggggccagcatcatcacatcaccgccttccacctgcacgtcctgtcccgctgggaggtctccaggggaataacacaaggtgtgccgtcgcctcccacgatggccatgcctgctgtcggatccctcctgaaggacctgccggaggctgttccacagctcacttttgtttaataagtagaaacaatacactctaaaatcatgataaaagttacagtaaatccataagccagtaacatagtcatttattatcatcgagcatcatgtccatgcatgacygtatgtgctggacgttcacactccaggcagcacagtgggttcacccacaccatcgtcactaaacacgtgagactaaagcttcaagctgagcagctacgacagccacactgggatggggatctttcaggtctgttctaatcgcacagccaccgcagtacgcatggtcttcactgatggaaatgtccttcttatgcagggcgtcatctgggagattttcttcaaggaaagatggatccacacanggagcgtggcccagtggtg

SEQ ID NO: 934440 - DNA, 727 bp, Homo sapiens
gctctcccttttttatgatgactggaaataccccacaaatttcagaataccccttggggtggtagaaagattcccctgagaatctccctttagaaacatgttcacagaggagaatcacgaaatgacccctttgtgtctagtttctctttttttctagtttcatccattatcagaataatttttctttgttttttctttttctttccttttttaaatagagatggcatgttgctagttgcccaggttggccttaaagtcctaggcttaagtgatcctcctgcctcagcctctgaagtagctgggactacaggtgcacgccactgtgccktgcttaaaaataatctttttaggctggatgcagtggctcacgcctgtaatcccagcactttgggaggctgaggtgggcggatctcgaggtcaggagctcaagaccagcctggccaatatggcgaaaccccatctctactaaaaatacaaaaattagctgggtgtggtggcggaggcctgtaatcccagctacttgggaggctgaggcaggagaatcgcttgaacccaggaggcggaagttgcaacgagtcgagattgtgccactgcactccagcctgggtgacaagagcaagactctgtctcaaaaaaaaaaaaaaaaaaaaaaaaaagtctttctaatgcatctttgctgatgcctttctttgctgagaaaccttcagtgctgactggtgccctcagt

SEQ ID NO: 934441 - DNA, 778 bp, Homo sapiens
ttattttacataatcccagattataaaatttcacagccacataaatgcacgggaggatttaaagtaatccacgtgtcaccgatttatgaaatcatacctgagtctaggtacatttgtatttttcagaagtgtccccttttctttgtggaattttattattttataaaggttttaaattaaacacaagtctaaatataattttatattttatcattctcagtatctccaggtgtgtaaatttatattgaagaaaatattatctttcttgtctcacgttttggtgtggtcagckcattcattctagcatttttgtgcctgcttctcacacatgaaaccaggtgtcaggccagttctcctgcaacctggaatctggaaaaagctgatttgaaacattatcttggtagaaatcttaaaccatcctaaattgtctgcaaattcccgaggcttatgttctagtggttgctgctgctcctggggtcttgctctgaagtttcctgtctctggtttggaccgcataaatcaaagcatgaagctcagcctttcccttaattttcccaaatgaatgatcacagaaagaatatgtgagtacagcagatcccactggagatgggaggtgtttggaagagaaaagaggattgcaacccgagccagctcaacagttgcatgaggcaggcctgtccttgaagctatttaagtagtttttctgctgttcagttataaggaggcttcctcaggcccctgacctccactgtctgttaatattccactctctacacca

SEQ ID NO: 934442 - DNA, 617 bp, Homo sapiens
ctttaggtctgattattttgctagagtggctgtaattgtctgaagggttcgtcttgcctgctgcacagataaaaccaattcactgagacagcattattgcagtaaagaaagagtttaattactgcaaggccagccaagtggaaggataggagtttactattactcaaatcagcctccctkctaagtcaggctagggtttttatggataatttggtgggcaggagattaaggaatgggtgttgctgactggttggagatgaaatcattggagtgtggaaaacggtcttcatgtactgagtctgccataggatgggagccacagaacccgttgcattatgagtcatgagtctgaatggggtcagtggattaccagaatgcacaagtctaaaaaacatcttaaaagatcaattttaagttctgcaaaagtgatgttatctataggagcaactggggaagtcacaaatcttgtgacctctggccacatgactcctgagaagtaagggaatatagaaactgtatctacattttagctgaattcaggtctctcccatgatcctaatctcatttctggcctttgattagttttacaaaggtagctttgttccctaggcaaagag

SEQ ID NO: 934443 - DNA, 780 bp, Homo sapiens
ggtatgcagacaagtggagggtgagcaaggcaaggaggtgctttattgagtgacagtacagctctcaggagactgcaagtgggtagctcctaaccgcaggcaggtcatcccattgagtttgcagccctcagcagagaagagacctggagtggatagctcctatccacgggcaggttgttccaacatctccatgagtctggctaagtctggggtttttatgggcttcagaagggaggaagtgcatgctgattagtccatggtcggccataggtgggtccagaaaaagcaccataagttctcactccaggccatggactccaccaggaactgacagcccagcccccatgtttcaggccatccctggctggaacgtgyggtttcactggggaccagcccctttctgcccaggagcctatctgcctcctgccaccatctatgtgtcatccatggtgcccagactgtttgtgccaaggggtgccttcaggcccacaatgagccaatgagccaccctcagcacccccttggcctcccttctatgcttgttggcacccaaagtccagattgggccgaggtggcagggggctggcatgtcagcaccaccctgagtgcgcatacatccggctgggttgtgacagcaccgggcctccgccacaactttgttctgaaatcggagcaggtgctgggaacagggagaggccaggcagcaggagctggcacttccaaacctgtgggagtcaagggggcttcctgggtccccgaagcgcaaggatgcccaggtcc

SEQ ID NO: 934444 - DNA, 786 bp, Homo sapiens
ggacctgggcatccttgcgcttcggggacccaggaagcccccttgactcccacaggtttggaagtgccagctcctgctgcctggcctctccctgttcccagcacctgctccgatttcagaacaaagttgtggcggaggcccggtgctgtcacaacccagccggatgtatgcgcactcagggtggtgctgacatgccagccccctgccacctcggcccaatctggactttgggtgccaacaagcatagaagggaggccaagggggtgctgagggtggctcattggctcattgtgggcctgaaggcaccccttggcacaaacagtctgggcaccatggatgacacatagatggtggcaggaggcagataggctcctgggcagaaaggggctggtccccagtgaaaccrcacgttccagccagggatggcctgaaacatgggggctgggctgtcagttcctggtggagtccatggcctggagtgagaacttatggtgctttttctggacccacctatggccgaccatggactaatcagcatgcacttcctcccttctgaagcccataaaaaccccagacttagccagactcatggagatgttggaacaacctgcccgtggataggagctatccactccaggtctcttctctgctgagggctgcaaactcaatgggatgacctgcctgcggttaggagctacccacttgcagtctcctgagagctgtactgtcactcaataaagcacctccttgccttgctcaccctccacttgtctgcatacctcattc

SEQ ID NO: 934445 - DNA, 575 bp, Homo sapiens
tagttacacatatgccctttgtatttataacaacatccttacaattcatcatcataaagctattggatacttaattcttatctgttcctgtgacctgagtttaattttctcttggccttttttaacttgctaaaaaataattgtaatctactagcaaatcttgaccaaaaagtgaaaactgaaaatatataattttaatctattgataacgacttacatatatttttaatgtctatacatacacacaggttttgacagaagctgctattttcccactcagtaccaatttcctgctgctcccatattggagagtgcytatattgctagaaatagcaatatatctggctaaaaattatatttccaaccctcctctccagacagaggtagccagtgatgtgtaaataatagctactgtgtagagcttcctgaaatgggctcttttttgttttttaaatttttttgagatggagctttgctgtcacccaggctggaatgcagtggcatgatctcggctcattgcaacttacgcctcccaggttcaggtgattctcctgcctcagcctcccgagtagctg

SEQ ID NO: 934446 - DNA, 625 bp, Homo sapiens
aagcagacagaaaaatgtgcaaaggcgagactggcctagcctcccagcctacatctttctcccgtgctggatgcttcctgccctcgaacatcacactccaagttcttcaagctttgggactcagactggcttccttgcttctcagcctgcagatggcctgttgtgggaccttgtgatcgtgtgagttaatactccttaataaactcccctttatgtaatatatatatatwttttttctattagttctgtccctctagagaaccctgactaatgtagttgccaactttttgcctgctgccatccatgtaagatgtgacttgctcctctttgccctccgccatgattgtgagccctccacagccacatggaactgtgagtacaattaaacctctttcttttttaaattgaccagtcttgggtatgtctttatcagcagcatgaaaacggactaatacacaccccctccccaatacaccccgggtttccatccctgactccaggcccagagtcctggacatctgtcaggacagtcctcacctgttcaaggatcccattcccatcccagccatcacccattctccaaaattcagagtcccttacagccttcaagatgcggttcaaatgc

SEQ ID NO: 934447 - DNA, 745 bp, Homo sapiens
attaacaaaacagacacaaagctcggtccttatagaactggtaatctaagctcattgccattgtgttgatgagtaattattcagcaattggtttgttaacttgtcttctccactagactggaagctccatgaggacagggccatatctgtctcgttcacagtaccatgaatccccagtgcatagtaggcactcagtaggttcctggggaatgaaagacattctgggattgatggctgccatttggccatctaggctctctgaggtagctgcatcttccttgggaatccagaggtcgtcatgtggaattacctcctcaagactgaattacacagcctgttagagggaatataagaggagccgagctggctccaccacagggctgccgggcctggagctggtccctgaagaaytccagggcccgcaggatgctcacggtttgtcctttgccacgtgcccgacacgtctcgcaccatttccaaaccgctcctcgagggtctctcccctcttcaacttctgtgtatttttgcacttacaacttcttggggtcattttactttatgtcaaatatatactggctgggtgatcatgtcagggccctttacttgccctgaggcacctcttctaggtgtcaagaggggtcttccctgtttggggttagctgagcaacttctgtttcaccattgcttttaacccagggctagtggcttcctactgatgtcttcagaccaggcattaacctcttaa

SEQ ID NO: 934448 - DNA, 637 bp, Homo sapiens
tcctggcctctcccttctttgaaccagttggcttcattggttctcttcccagactgaccagaatattctacttctattttggcctaatcacttgagcccttcaggccttagtttcctcatctgcaaaatggggacaacaataaagtctacttctcagggtcattttgaggattagakgagagcccacaaggaaagcacatagcatggtacctggcacatagtaggcactcaggaagtagctactgtaaaccttacagagggtggtttcccaagtgccgggggcaggatagcaggaatgttgctttgcctttcacctgacagcatttctcaatgttcagtgtatgtaagaatcacagcgggaatctgatgcaatgcgggttcccagacaccaccctgagtaattctggttcagtgggtcgggctgtcctgggaacctgctcttgatcgctgccccgtgatgattctatcaggccaattctgaggctggtggtctctgtttcactttgagaactgatgattgagcgtcgcttttacatgagcgggttctgcagtgaacgccaaacacatttgtcatctgtgcaaaatgcctggctcatggcgacttaatatctcactgacacagaagaccgatagaggc

SEQ ID NO: 934449 - DNA, 637 bp, Homo sapiens
tcctggcctctcccttctttgaaccagttggcttcattggttctcttcccagactgaccagaatattctacttctattttggcctaatcacttgagcccttcaggccttagtttcctcatctgcaaaatggggacaacaataaagtctacttctcagggtcattttgaggattagatgagagcccacaaggaaagcacatagcatggtacctggcacatagtaggcactcaggaagtagctactgtaaaccttacagagggtggtttcccaagtgccgggggcaggatagcaggaatgttgctttgcctttcacctgacagcatttctcaatgttcagtgtatgtaagaatcacagcgggaatctgatgcaatgckggttcccagacaccaccctgagtaattctggttcagtgggtcgggctgtcctgggaacctgctcttgatcgctgccccgtgatgattctatcaggccaattctgaggctggtggtctctgtttcactttgagaactgatgattgagcgtcgcttttacatgagcgggttctgcagtgaacgccaaacacatttgtcatctgtgcaaaatgcctggctcatggcgacttaatatctcactgacacagaagaccgatagaggc

SEQ ID NO: 934450 - DNA, 579 bp, Homo sapiens
acagctcactgcaacctcaaacttctgcactcaagcaatcctcctgcctcagcctccccagtagctgggactacatgcatgttccaccatgcctaattttaaatttctttttttttttattttttgagacagagtatcgctctgtctcccaggcagtggtgcgatcttggctcactgcaacctctgcctcccaggctcaggcaattctctgcctcagcctcctgagtagctgggattacaagcgcataccactatgaccggctaatttttgtattttttgtagagaaggagtttcgccrtgttggccaggctgttctcaaactcctggccccaaacaatcctcctgccttggcctcctaagatattgggatcacaggtgtgagccaccgcgcctggccctgcccacgttatttaacctgcagcccttaccttccggacttgctatatattaatatttcgcttgcttatctgtttattacccggctccccatctagagtgtgagcaccacaagggcagagatttttattttatttcccatctaaggcacagttggtgctccaaaaaatagctgttgccca

SEQ ID NO: 934451 - DNA, 614 bp, Homo sapiens
caccacagcttgccacagtgggcaggactgttcctagttttgagtggaaccaagagatttggggaaggattgcaaaagaagataaaattatcgagggctcccaggaggtgctggcctcatcactctcaagctggaggcagcatcatttcccgcccctgctgatgaagctatagtgactatagtcactgcaagtggaggcccaagatccttccccaaatcactgagatccaacygcaggtgaacaaaagggctccagttactctgcttatattacagatataagagaagtgaaacagcctgtctaggtcccatagtaggtaagtggaaaccacgtgttatgcgtcaacctcattcactcatttgtccactcaaaagacattcaatgaacaccaactatccgaaagccaccaggagggaagcaccatgtcctcagtgaccctacaattgagaccagtgctgtcccatagagggagatatcatgcaggccacacttacaatctaaaatgttctagcagccaccttcgaaagcaaaaagaggcaggtggaataaattctaatcatttatttcactcaatatatccaaaatatcattttaacatgtaattaatatttaa

SEQ ID NO: 934452 - DNA, 690 bp, Homo sapiens
cagtctgctctttttggatggagagttctaagtctctatagtctcttaggtctagttatcttgttgtattgttccaatctcctatatttttgttaatcttctagcatagttattctattaaatattgaatatagtgtattgaacttgttctattgttgaattgtctatttctccctttaatgctgtcagcatttgctttgtgtgttgtgtggctctgttcttaatttcatgtttttatgattagtctgtcttcctaaggaattgacccttctattgttataagatgtttttctttgtttttagtaacaatattttcttcaagtctattttgttatatattagtagagtcacctcagctctcttttggatactgatttcattgtatatctttttgcatcctcyttttttttttttttttttttttgagatggagtctcactctgtcgcccaggctggagtgcagtggcgcaatcttggctcactgcaagctctgcctcccaggtttacaccattctcctgcctcagcctcccaagtagctgggactacaggcgcctgccaccacgcctggccaattttttgttttttagtagagacggggtttcaccatgttagccagggtggtcttgatctcctcacctcgtgatccacccgcctcggcctcccaaagtgctggtattacaggtgtgagc

SEQ ID NO: 934453 - DNA, 532 bp, Homo sapiens
acaatgatgaggggatgtaaaagggatataagagccaactcaatgaaccccaatggccaaagctaaaataatttaagctgtaaaataaatagcatagcattggtttataacccaaagtataaaataaatatctttargtccatattggtgtaaataattgaataaataagtaaatgggggggtttgacaaatatcaagcattaaagaattccaaataatttgtgtagacactctaccctcaaggagatggagcagaaattcatacaagttaactgacgtccctcctgagaatgaagtatggaaaagaagaagaaaagggaaactttacaatgtataaacctgacaaacgctgttttaaccagggaatcagggttgacatgctaagtcttgttgatggcatgcacacttgatatgatatgatggtgagcatagaatgttagctctgtagtcctcctcacaaatccccaaattctcagtctcgtcatgagaaaaatactttaaaattaaggaaattctattaaattcctgacca

SEQ ID NO: 934454 - DNA, 564 bp, Homo sapiens
gtgtgcagcaaggtgcgtctgacctctgacctcccatcccctcacagcctagaactcagttttcaaagttacttggggagtccccttgacgaaaacaatgtgaacccagaaaatctgagacaggtctcagttaatttagaaagtttattttttcaaggttggggaatgcgcccgtgacacagcttcatgaaatcctgatgacacatgcccagggtagttggggcacagcttggttttatacgatttagggagacawgagtgagacatcaatcaatatacgtaagaagtacattggtttggtctggaaaggcaggacagcttgaaacaaaagcaggaagactcaagtggggagggagggagcttccaggtcacaggtaggtgataacaaactgtatcattcttttgagtttctggttagcctttccaaaggcggcaatcagatatgcatctagctcctcgagcagaggaataactttgaagagaatgggaggcaggtttgtcctaagaagtttccagcttgaattttccttagtgattttggaggctcaagatattttcctttca

SEQ ID NO: 934455 - DNA, 541 bp, Homo sapiens
gagctgtcagtcggcccctactgggagatatctcccagttaggctattcagggttcaaggacccacttaaggaagcagtctgtctgctgtcagatctcaaaactccatgctgggagaaccactactctcttcaaagctgtcagacagggacgtttaagtctgcagaagtttctgctgccttttgttcagctatgccctgcccccagaggtggagtctacagaggcaggtaggcctccttgagctgtggtgggctccacccagtttgagctttctggccactttgtttacctactcaagcctcagcaatrgtgggcacccctcccccagccttgctgctgccttgcagttcgatctcagactgctgtgctagcagtgagtgaggatctgtgggcgtgggaccctctgagccatgtgcaggatataatctcctggtgtgccgttttctaagaccgttggaaaagcacagtattagggtgggagtgtcccgattttccaggtactgcctgtcacggcttcccttggctaggaaagggaattacc

SEQ ID NO: 934456 - DNA, 541 bp, Homo sapiens
gagctgtcagtcggcccctactgggagatatctcccagttaggctattcagggttcaaggacccacttaaggaagcagtctgtctgctgtcagatctcaaaactccatgctgggagaaccactactctcttcaaagctgtcagacagggacgtttaagtctgcagaagtttctgctgccttttgttcagctatgccctgcccccagaggtggagtctacagaggcaggtaggcctccttgagctgtggtgggctccacccagtttgagctttctggccactttgtttacctactcaagcctcagcaatggtgggcrcccctcccccagccttgctgctgccttgcagttcgatctcagactgctgtgctagcagtgagtgaggatctgtgggcgtgggaccctctgagccatgtgcaggatataatctcctggtgtgccgttttctaagaccgttggaaaagcacagtattagggtgggagtgtcccgattttccaggtactgcctgtcacggcttcccttggctaggaaagggaattacc

SEQ ID NO: 934457 - DNA, 543 bp, Homo sapiens
agcctccctgccctgccgcacagtcttgtccccactgcaatctgccgggggcgtgctgccccaggcctgactgccaagccctcaacattgcatagtcactggctggggtcacacacgtgaggtccagatcaacatgtccttcagcagggacttggagtggccatgataggacccyatacctacctgctccgctcccaggcacagccaacgtcccccaacaccacggtgccaagtggcccaaaccctgttctttgcagccctgttctccgccaggtgcttcctttgtgcgaggtcagccagttcacatctgcctgtaattggctcccctggaaaggagcccccacatccccccacctgagctctttaggccgggaggaaaatcctgccctcacatggagaacgtcagaggagcccaacagcaggctcaggctcagggagggatgaagagctcctggggcctccccaggtgccagcctggacccctgtgccggggaggctgagcagcaggacctcggggtccaacagatgagatgttagctcctt

SEQ ID NO: 934458 - DNA, 623 bp, Homo sapiens
tggtttattttcagtggcaacctgactgagttaaaagatatccagatagctggtaaaggactatttctcaatatgtctatgggggtgtttctggaagagattggcatttgaatcaatggactggaaaggaagatccaccctcatcaatgggaatgggcgtcatttaatccattcagggcgtgtatagaacaaaaaggaagaagaaagaggaatttgctctttcttctggagcttgggcactcgtcttctgtctcagacactagaactccaattcttggacctttaaactccagagacatataccattggcttccctgcttctcaggccccaatcctattgaataacaacactcaccttcctggttcttcagcttgcagacatcataatatgaaacatcttagcctctataatcakgtgaaccaattaccatgataaattattttttatataactcactatatatcctgttggttctgtttctcttcagaattctgactgatacaccagtttttaattctttgggttatatgggttatatatccaggagaggaaatgctgggtcgcatattgatttgatgtttaacttcttatggaaccatgggactattttctacagcacctt

SEQ ID NO: 934459 - DNA, 458 bp, Homo sapiens
tgtctggtttcctccatgggcaccgtgtgtccaaggatcgcctgggttgtagcgtgtgtcagaattgtgttgctcttttttttttttttttgagatggagtctcgctctgtcagccacgctggagtgctgtggcacgatctctgctcactgcaacctctgcctcccgggttcaagcgattctcctgcctcagcctccygagtagctgggattacggcgtgcaccaccacgcccggctaatttttgtattttcagtagagacggggtctcaccgtgttgcccaggctggtcttgaactcctgacctcgtgatctgcccacctctgcctcctgaagtgctgggatgacaggcgtgagcccccgcgcccggccggcattcctctttatggccgaggaaccctccatggtgtggctcgatcacatttagtttatctgtggttccgttcacggagctggggct

SEQ ID NO: 934460 - DNA, 768 bp, Homo sapiens
cgtggtctctgggtccagccgtgatgcaggtatcacacctgagatgcaggcttcggtaaacgcacatcaaataccatgaggaccaaaaagaggggatctttacattttgaagctaaatgaaatacacgagttccaaacatcagaggggtgaacttttgtggttttggggcactgtaaagggcgtcacaggaaggtgcctggactgtcagggcttgggggrcagacatggagccccccgcaattctggggaagccatgcctgcctcccacctccactcttgagcagatgcatctgttactgatgagggcgtgggggagatggggatcccccatttcctggagagcacaggggctggtttgaggccacatgaccagctaacgtcggatgggtcctgattcaggcccttgcatctgattccttttgcaaggtgggagggccgagaagctgagaggggacagcactggggcccccgtcctcctgctgcacgcccatcactccaggctccaccccaccccaaggatgggaggcagctcctcacctgcaggccaggggaccccaagaggaccatgacctcatcgatgagacccagcagggacacaaacacggggtcccggtagtcaaatcggcggccgaagaggagcgcgaaggtgatattggagggagcccagcccagtagggccagcgggaagggccggcctgcgagggagacgggcctcaggcacgtccaggcccggggaggggcgtccccggccccctgctcacctctgt

SEQ ID NO: 934461 - DNA, 587 bp, Homo sapiens
gtaaaactactggaagagaatatagggacaaaactcaataacatttgtttgggtgataattttttggatatgaactcaaaagcataggaaacaaaatcaaaaagagatacatgggattttgttaaattaaaaagcttctgcacagccaaggaaaacatcaatataagcagacaacctacagaatgggaaaaaaatatctgtaaatcatgtatgtgctaaaggggattaatatccaaaatatacaagaaactcaaataattcaacagtaagacaacaacccaattaaacattggtcaaaaaatctgaatagatatttcttaaaatttacaaatggtcaacagcaatctgaaaaaaaaatgctcaatrtaactaataatcagagaaatgcaaatcaaatccacaatgagttagcactatactaatgttagaatggttattatcaaaaagacaaaagataacaagtgttagtgagacatggagaaaagggaacactgaacccagttggtgagagtgtaaattagtatagccattatgaaaaacagaattgaggttcctccaaaaatcaaaaacagaactaccacatgatc

SEQ ID NO: 934462 - DNA, 581 bp, Homo sapiens
ggcatatagaaatgctactaatttttgtaacattggtttgaatggtttgaatataccatcccattttctcctggcctataaggttctgctgagaagtctgcttagtcttatggtattttttttttttttcttgagacrgagtctcgctctgtcgcccaggctggagtgtagtggcgcgctcttggcttactgcaagctccgcctgccaggttcacaccattctcccgcctcagcctcctgagtggctgggactacaggcacctgccaccacacctggctagttttgtttttgtatttttagtagagacagggtttcaccatgttagccaggatggtcttgatctcctgacctcatgatccacccgcctcagcctcccaaagtgctgggattacaagcataagccaccatgccaggccttatgggggttcttttataagtgataaaacattcttttcttgctgtttttagaattctctctttgtctttgacttttgacagtttgactataatgtgctgtggagaagatttttttagattatatggatttgcgtgtcgagttttctggatgtctaaatctctt

SEQ ID NO: 934463 - DNA, 634 bp, Homo sapiens
ttactctaaaattgaccacacaactggaagtaatacactcctcagcaaatgcaaaagaatggaaatcataacaaacagtctctcggaccacactgcaatcaaattagaattcaggattaagaaggtcactcaaaactgcacaactacatggaaactgaacaacctgctcttgaatgactacygggtaaataacaaaattaaggcataaataaataagttatttgaaccaataggaacaaagacacaatgtaccagaatctctgggacacagccaaagcagtgtttagagagaaatttgtagcactaaatgcccaccagagaaagcgggaaagatctaaaatcaacaccctaacatcacaattaaaagaactagagaaccaagagcaaacaaattcgaaagatagcagaagacaagaaataacaaagatcagagcagaactgaaggagatagagacatgaacaacccttcaaaaaatcaatgaatccaggagctggttttttgaagagatcaacaaaatagatggaccactagccagacaaataaagaagaaaagagagaagaatcaaatagatacaataaaaaatgagaaaggggatatcaccactgatcccacagaaatacaaactaccatca

SEQ ID NO: 934464 - DNA, 579 bp, Homo sapiens
aagccctgtctccattaagcagcggctactcatcctcccttttcctagctcctagcaaccattaatctgttttctgtccctatggatttatctattacagatattcaagacagctgacataataaatatgttatcttttgtatctgtcttcgttcacttcgcataatatttttaaggttcatccagattatagcatgcatcmgtattttattcttttttatggttgaataatattccattgtatggtttattaaattttgtttctttgtttatctattgtcaacttttggctactgtgaatggtgttgctataaatattcatatacaagtatttgtttgtttgaatacatgttttcagttcttttgagtttatatgcctaagaatgtaatgactgggccatatggtaaatattaactttactttttaagaaactgccaaacttttttctaaagtggctacaatatattacatctctcccagccaagtatgaaggttccagtttttctataatatcaccaacacatatattcaccaccttttttcatgataaccattctagtagctctgagctactatcc

SEQ ID NO: 934465 - DNA, 494 bp, Homo sapiens
aagatttaatgtaggccaggcacagtggctcatgcctgtaatcccagaattttgagaggccaaggcgggtggatcacctgaggccaggtggatcagcctggcaaacatggtgaaaccctgtctctactaaaaatacaaaaattagctgagcgtggtggtgggtgcttgtaatcccagttactcatgaggctgaggcaggagaaaccttgaacccgggagcggaggtgcagtgagaggagatcccgccattgcactccagccttggaacaagggtgaaactccatctcaaactaaacaacaacgacaagatttaatgtaaatawgtttgtaaacatgtttctcagactttttttctgaaaataagttttatttgggagaaaaaggagagaatgtgaaaggactaagattatgaatgtaactgataattaaagagaggcaggtcttcaagagaaactgaagccctgggtaatttggcattttcccccctatgaagc

SEQ ID NO: 934466 - DNA, 642 bp, Homo sapiens
tataccaaaaatgtagatcccatgggcccaatagtaccaattctataaaaatctctttcagttaatagaactgaaaagaatacttcccaattaatgttatagggcctacattaccttgatcccaaaactagaaatagactgtatgaatgagaaaacttcagaccaatatccctcaaaaatatagatacctaaattataaaaatatattagtaaaacaactctaacagtatatttaaaaatcatttatcacaaccaataattgtttttcttgggaattcaaagctggattactatttgaaaatcaagcgagtcatttacaatatagaaacataaaggagaaagtcactttatcatattatttgatacaaaaaaaattgaaaaaattcagcacacattcttgagaaaaactccttgcaaactaacattgaaaaagmatttccccaattggatagcaggcatctaaaataaactataggtaacatcatatttaatgacaaaaaatttaatgttttccactataatggaaaaaaaatgctggatgttcagtctcgctactcctatccaatgccattctgaaagacctattcagtacaataaggcaagaaaaaaaagacacatatattgtaaagaaagaacttaaaa

SEQ ID NO: 934467 - DNA, 614 bp, Homo sapiens
aaatggtccgctgacagccaactcagatccattttggaaagacatagaaaattatgtaggtggatggatggatggatggatggatggatggatggatggatggggagacagtttcctttcatagagttaaggaaaatgtcatggaaacaatgatactttcaggcttggtcgaagaggatgcatggctgtttattggaagggaaggagggcagcttctacctggggcaggtagtggggagggatggggaagctggattgcactaacctttggtgaacagagctaattaagtaagttacttaataatcmcatcatctggttaatgcaattcagaatgagtcccagatactctggtcattatgctgatggaaagctttttgaaaaaaaaaaaaaaaaaaaaaaaaaaaaagggccatctccctctgctcatcctgtaattatccatttcttgcctacctcttgctgtttttgataagagccattaggataataattacaggctcaactaatgtattaataactctatggatgtacatttcttgatgcctctgtgaaagactgaaatatgttaaccttttaaatgtcttcagtcacaggctgtgtcagacttttatta

SEQ ID NO: 934468 - DNA, 593 bp, Homo sapiens
aacataacgcatttattctatcccattagcccccagagtcttagcttgttccagaatcacctcaaagatccaaagtctagagtctcatctaaattagatatgggtgaggctcaagggatgattcaccttgaggcaaatttatctcctggtacaagcctgtgaactcaaaacaaattatagacttccaaaatacagtggtgagacaggcatgggactgccattcccgtaccaaaagggagaaatagggaagaagaaaggagtaacaggccttaagtacagattcaaaactcaacagrgaaaacatcatttaaattttaaagcttcagaattatctttgtttccatgtcctgcatcctgtgcatactgggcctaggaatgggctccaagcgttgggcagtcctgtccctgtggttttcctgggctcagtccaccaagcagctttcatgggttggagtcttatgcctgcagctctcttaggctggagttgaatgctggtaactttatgttctggggtctctgtggcggtcctgctcccttggctccattaagcactgccttagtgggggctgtctgtggcagtttcagctgtgacc

SEQ ID NO: 934469 - DNA, 607 bp, Homo sapiens
gaaaaagagaagctgagagtatccacctagacaacagcaaagctggattatctttgtatcattcttaagaataataaaaagaactacaacccataaaaaaagataaagggggttgtggaagccaaggttcttgtcatgtttatgtcacctccagataacaggcttcagagagaatagatggcgaaggtctcttatcagatcttaaaaagggatggmgattctctatagaatgcaagaatttcccccacaagagacagctttgcagggccatttcaaaatatgtcagagaaatatatttaggggcaaaatactttgatctttttttcagggcctgctatctgctgtgacagactgccacaattactacttgagaccctcattacagcagttactactgttactacttgagaccgacattacgagactgaacgaagggggacgaatgaatgcagaaattaagacttaaaagaaactgttttaaagaaaggggccaggggacgaagaagagggctccttgcttctagtgagcaaaggcagcagccatgagcttctacagcccttcgtatttattgggtagcaagagcagggagaaggaggtaactattgg

SEQ ID NO: 934470 - DNA, 644 bp, Homo sapiens; identical to SEQ ID NO: 923565

SEQ ID NO: 934471 - DNA, 591 bp, Homo sapiens
acccctttacacttgtaaaaattattgaggaccctcaaatagcttttgcttttgtgagtgatagttatccgtatttacctaactagaaaaattttccattaattcatttattaagttgtttaaaaataataataaagccattatatgttaacaaaaatagcatgtttttgtaacattagcataagatgctgggcacagtgratcatgtctataatcccagcagtttgggaggctgaggcaggaggatcacttgagcccaggagtttgagaccagcctgggtaacatagggagaccctgtctctacaaaaaattaaaaataaaaaaaattagccaggcttggtgatgcaggcctgtagttccaactaatcaggaggcagtggtgggaggatcacttgaactcaggaggttgaggctgcaatgagctgtgttcgtgcctctgcttcccagcctgggtgacagagtgagcccctatctcaaagaaaaaacaaacaaacaaacaaacaaacaaacaactctgttttctaaaacaaacaaaatcctggaaaagctgcagttttatattttttgaaatctcttaaatgtctagttta

SEQ ID NO: 934472 - DNA, 591 bp, Homo sapiens
acccctttacacttgtaaaaattattgaggaccctcaaatagcttttgcttttgtgagtgatagttatccgtatttacctaactagaaaaattttccattaattcatttattaagttgtttaaaaataataataaagccattatatgttaacaaaaatagcatgtttttgtaacattagcataagatgctgggcacagtgaatcatgtctataatcccagcagtttgggaggctgaggcaggaggatcacttgagcccaggagtttgagaccagcctgggtaacatagggagaccctgtctctacaaaaaattaaaaataaaaaaaattagccaggcttggtgatgcaggcctgtagttccaactaatcaggaggcagtggtgggaggatcacttgaactcaggaggttgaggctgcaatgagctgtgttcgtgcctctgcttcccarcctgggtgacagagtgagcccctatctcaaagaaaaaacaaacaaacaaacaaacaaacaaacaactctgttttctaaaacaaacaaaatcctggaaaagctgcagttttatattttttgaaatctcttaaatgtctagttta

SEQ ID NO: 934473 - DNA, 585 bp, Homo sapiens
aaacttaaagtataataataataaaataaaataaaataaagttctttaaaattgatacttgattccagcagacctactgcagctaatgctataggttctggatatttctaatccacaaggctgaagtctaagttatctgtccagattgatagtaaactgtagatttcaaactggtacgtggttagttttgattctccctgtccccctccccctctgctagtccaaggagtttgattaaattagtgttgcaaaaactttagtctggaaacagagaccatctccctgcagtttttaggaacaaggaggataccttgttattaatctagacctactgtatttctgcaagtgtatgggggaaaaatagaacaagcccaagcccaaatggatatggatgatgactttaaatcaactgataaaaccactgtaatkgttatttgagatttttttttcatactctgcttctttccaagagaactttgaaagtttgttttcttgtttaacctaccaaaaaagattaatacaaatgtaattgaaaggaagaaagaaatcaaagagaagggcagaaacaaatttgcttactgtgag

SEQ ID NO: 934474 - DNA, 837 bp, Homo sapiens
atggtgattatcaggtactgaggaaaggggactatggggttatagttgttttaagaagtttcagttctgagggacaaaaaagttctagagatttatattgcaacagtataaacgtaaacactactgaactgtacatgtaaaaatggttaagatggtaactgttatgatatgtgctttttacacaacacaaaaattaaaaatataaaatcactaacacattttactttttgaatatttggtatcactacaagcactttacatgaattgattcatttaaatgttacaaatctatgagaacattatgctattatcagttttacagaagagaaaacggaatttcagaaagcttaagtaatttctcttgtaactggcaaaggtggagtattagtgtattctcacatcgttataaagaactgcctgagactgggtgatttataaagaaaagaggtttaattgactcacagttctgcatagctgggaasacctcaggaaacttacaatcatggtaaaaggggaagcaagcacattttcacaaggcagcaggagagagagaagggaacaagagcagggaaaactgcattataaaaccaccagattttgtaagaactcactcactaacatgagaacaacatgcaggaaactgcccccatgatccaatcacctcctacctttgacacatggggattacaattcaagatgagatttgggtggggacaacaaagtctaaccatatcaggcagaatgtgaatgggctcgtttatttcttgaatccatgtctcaaaatgctaacctatactaccttctctttgcctatttggaaccagtttcaagactagt

SEQ ID NO: 934475 - DNA, 606 bp, Homo sapiens
gaaaacacttaagtctttaaactctacttcctgagatttctttattttcatattttcactatggcttaatttctccttaacttatttactttaggctgcctcatttctccttattgatttgatatggagataaaagcctatagagctaacacttagtggaggcaaaaaaaaaattgaaaaaataagaaagtatataaggtttttgtttttttrtttttactcagatttgaagacttgaataaaagaatgatacgaaaggcaaataaatttccataaatcttcccaggttggtgatccaagaaatcagtaggaatttatactctttcactagcacactgataagtgtttataccaaaatttattgtgaatattgtccagcaagaataacagaaagaaagcactaaaggagttgggaaatattataagacccatgtactgttatgtcttttaattttccacctcattaacatcttagatggggatatgctgaatatgcagaagttgtactcctttattattaaatacttcactgcaagctatgtttttacattggcctcagggtgtgtgtgtgtgtgtgtgtgtgtgtgtgtgtgtaaatgttttaca

SEQ ID NO: 934476 - DNA, 511 bp, Homo sapiens
atcctgatgagggggattctcccagcccagggcagtagctctgctaagggacagactgcctcctcaaatgggtccctgactgccatgcctcctgacagggaaagacatcccaacagggtcgaccgacccctcatacaggagaggtctggcatcagaccagtgcccctctgggatgaccttccagaggaaggagcaggcagcaatcttttctgattctgaagcmtccactgatgatacccaggcaagaaggatctggagtggacctccagtaaactgcagcagacctgcagaagaggggcctgactgttagaagaaaaactaacaaacagaaggcaacaacaccacaacatcaataaaaaaagaccccacacaaaaaccccatccaaacatcatcagcttcaaaaatcaaaggtagataaatccatgaagatgaggaaaaaccagtgcaaaacctctgaaaattccaaaaaccagaatgcctcttatcccccaaatgatcgcaacatctctc

SEQ ID NO: 934477 - DNA, 654 bp, Homo sapiens
gaattgcaatggagaaagagtaattcacacagagctggctgtgcaggagactggagttttattattattcaaatcagtctccccaagcactcagggagcagagttttttaggatagcttggtgggtgggcggaagccagtgagccagggagtgctgattggtctgagatgaaatcatagggagtagaaactgtcttcttgtgctgagtcagttactgggtggtaggccacaagatcagatgaaccagtttattgatctgagtsgtgccaactgatccatcaagtgcagggccttgatgcacttgatatctcaagcactgatcttaggaggagtttagggagggtcagaatcttatagcctccaactgcatgactcctaaatcacaatgatttaatcttgtggctaacgttagccctacaaaggcaatgcagtccccagacaagaaggaggtctactttgggaaaaggttattaccatctttgcttaaactataaactataaattaagttgctcccaacattagttcaatctatgcctaggaatcaacaagaacagcttggaagttagaagcaagatgggagtcagttaatttagatctctttcactgtctcagtcataattttgcaaaggtggtttcaattcctcccttttggt

SEQ ID NO: 934478 - DNA, 654 bp, Homo sapiens
gaattgcaatggagaaagagtaattcacacagagctggctgtgcaggagactggagttttattattattcaaatcagtctccccaagcactcagggagcagagttttttaggatagcttggtgggtgggcggaagccagtgagccagggagtgctgattggtctgagatgaaatcatagggagtagaaactgtcttcttgtgctgagtcagttactgggtggtaggccacaagatcagatgaaccagtttattgatctgagtggtgccaactgatccatcaagtgcagggccttgatgcacttgatatctcaagcactgatcttaggaggagtttagggagggtcagaatcttatagcctccaactgcatgactcctaaatcacaatgatttaatcttgtggctaacgttagccctacwaaggcaatgcagtccccagacaagaaggaggtctactttgggaaaaggttattaccatctttgcttaaactataaactataaattaagttgctcccaacattagttcaatctatgcctaggaatcaacaagaacagcttggaagttagaagcaagatgggagtcagttaatttagatctctttcactgtctcagtcataattttgcaaaggtggtttcaattcctcccttttggt

SEQ ID NO: 934479 - DNA, 605 bp, Homo sapiens
tgcttggagccagtccagtggcttcacttttaccactcagagaactttagtacacagtcttaaacaaccctggaatgttgagctaaaagggactctgaccctccctccgcaccccaccctttaaaggtgaaagcagcaggtggggtggactcctggggctggggaggccgttccctgggggcaggtgcaggagggagcctggctyttcaggttaaattgtgtttcaaaggcagagctcacattggagcacttgatattatgcatttgaaacattgagacacagcttctagtttaaaataaaggtgatagccaaggaggaaagcatggtttattcctagcttccggtagaggaggctggccaactcagacacctaagcagccacatcagacccagagtccgaggtagaatggatattgctaaagctgagagctacagcagagcgtctgcttgaggagctctgacgggctgggcagccagtgctcctggccctgaatgtgtttgaaggagctctttggaaagaggtgcaggcttccggctattggtagacacctgtctgcttggggcaggtatactgactttttgttgcttttacggttatcttcgg

SEQ ID NO: 934480 - DNA, 736 bp, Homo sapiens
agtctcactctgttgcccaggctggagtgccgtggcgtgatctcagctcactgcaaccttcacttcctgggttcaagtgattctcctgcctcagcctcccgagtagctgacatttcagacatgcactgccatgcccagccaattttttgtatttttagtagagacggagtttcaccatgttggccaggctggtctcaaactcctgacttcaggtgatccacccaccttggactcccaaagtgcagggattacaggcatgagccactgcacctggcctgtaaataaagtcttattggaacacagccatgaccatttgcttatgtattgtttatggctgctttcctgcaactgggtcagagaatgaatggcatgcaaagctgaaaatacttactctggccctttatagaaaagtctgtgragccctgatctacagcatgttggaagaaccccttgaaaatggacagcttgctgacccctagcacctcctacatattagagatggcatatggttattacacttctgggtaaactgcaaagctatcagttacaagtaaaatctagagtaggagaaatctttctaagtgggacaggctacagtagtatggctcaactgcctgtgatcctggggcattaggatgctgcatatagcttgaggtatgtctcaatataatcagagcatgccccaaattctggagcaaggccagcctcctttatgcaggtatcattctttcagtag

SEQ ID NO: 934481 - DNA, 639 bp, Homo sapiens
cagttgacctttgaacagaactgcaagggtccacttgtacagggatgtataagttgttctatgtatgtatatatgtatacctatgtgtccggaattggtgggttcttggtctcactgacttcaagaatgaagccacggaccctcgcggtgagtgttacagttcttaaagacatcgtgtccggagtttgttccttctgatgttcagatgtgttcggagtttattccttctggtggggtccgtggtctcgctggctcaggagtgaagctgyggaccttcgcggtgagtgttacggctcttaaggcggcacgtctggagttgtttgttcctcccagtgggttcgtggtctcgctggcttcaggagtgaggctgaagaccttcgcggtgagtgttacagctcataaaggcaatgtggacccaaagagtgagcaacagcaagatttattgcaaacagcaaaagaaggaagcttccacagtgtggaagaggagctgagcgggcttgccactgctggctggggcagcctgcttttattctcttatctggccccacccacatcgtgctgattggttcattttacagagagccaagtggtctgttttgacagggtgctgataggtgcgtttacaatccctgagctaga

SEQ ID NO: 934482 - DNA, 639 bp, Homo sapiens
cagttgacctttgaacagaactgcaagggtccacttgtacagggatgtataagttgttctatgtatgtatatatgtatacctatgtgtccggaattggtgggttcttggtctcactgacttcaagaatgaagccacggaccctcgcggtgagtgttacagttcttaaagacatcgtgtccggagtttgttccttctgatgttcagatgtgttcggagtttattccttctggtggggtccgtggtctcgctggctcaggagtgaagctgcggaccttcgcggtgagtgttacggctcttaaggcggcmcgtctggagttgtttgttcctcccagtgggttcgtggtctcgctggcttcaggagtgaggctgaagaccttcgcggtgagtgttacagctcataaaggcaatgtggacccaaagagtgagcaacagcaagatttattgcaaacagcaaaagaaggaagcttccacagtgtggaagaggagctgagcgggcttgccactgctggctggggcagcctgcttttattctcttatctggccccacccacatcgtgctgattggttcattttacagagagccaagtggtctgttttgacagggtgctgataggtgcgtttacaatccctgagctaga

SEQ ID NO: 934483 - DNA, 625 bp, Homo sapiens
aaaagaaagaagtttattggacttagagtctcacatgattgtagaggccttacaatcatggcggaaggcaagcaggagcaagtcacatcttatgtggaaggcagcaggcagagagagagagcttgtgcagggaaactcccgcttttaaaaccattagatctcctgggacttactcactatcatgagaacagcacaggaaagacccaccacgatgattcaattacmccccactgggttcctcccatgacacatgggaattgtgggagttacaattcaagaaaagttatgggtggaggctgggcacagtggctcatgcctgtaatcccagcacttcgggaggccgaggtgggtggaccacgaggtcaggagatcgagaccatcctggctaacacagtgaaatgctgtctctactacaaatacaaaaaaaattagctggtcgtggttgtggacacctgtagtcccagctacttgggaggctgagcgggggagaatggcatgaacccgggaggcggagcttgcagttagctgagatcgtgccactgcactccagcctgggcaacagagcgagactccgtcccaaaaaaaaaaaaaaaaaacgatttgggtgggaacacagccgcagtat

SEQ ID NO: 934484 - DNA, 625 bp, Homo sapiens
aaaagaaagaagtttattggacttagagtctcacatgattgtagaggccttacaatcatggcggaaggcaagcaggagcaagtcacatcttatgtggaaggcagcaggcagagagagagagcttgtgcagggaaactcccgcttttaaaaccattagatctcctgggacttactcactatcatgagaacagcacaggaaagacccaccacgatgattcaattacaccccactgggttcctcccatgacacatgggaattgtgggagttacaattcaagaaaagttatgggtggagrctgggcacagtggctcatgcctgtaatcccagcacttcgggaggccgaggtgggtggaccacgaggtcaggagatcgagaccatcctggctaacacagtgaaatgctgtctctactacaaatacaaaaaaaattagctggtcgtggttgtggacacctgtagtcccagctacttgggaggctgagcgggggagaatggcatgaacccgggaggcggagcttgcagttagctgagatcgtgccactgcactccagcctgggcaacagagcgagactccgtcccaaaaaaaaaaaaaaaaaacgatttgggtgggaacacagccgcagtat

SEQ ID NO: 934485 - DNA, 427 bp, Homo sapiens
tagggcaagaggtacagagagagcagagagagcctgctccaagggagagccttgggacacagggagtctcattcctccctcccagcacgggctacgcccatgccactgaggcctgagccacagggcactgcctagccctgcttgggccggggctcaccagcccttacagacagcaggccccrcctccaagacactaccccatggcaggggaaagccttggggtccccataaaatgcaggcatcgccagacagagaataggtcttcccaggatgggaagatttacttagggaggggccaccctggataccctgccctccagtaggagccaggttccggaagatcccatgaggggccagtgtggacccctccccttcaaccatccaggcctgcaggtctggggctaatggtggggaaagggggctccag

SEQ ID NO: 934486 - DNA, 653 bp, Homo sapiens
cctacttgcattattgtccaaaagactgtggatagcgacattccactgaatcttgtatccctactgatgttgacggatgcccattctgctaaggtttcctgtctactaagtgctaattagagctgcaactctggcttcagctatgatattattatctaggactgaataaacaatataaggcttatggaaattgcagaagcgctagggcgataataatagtaacaacaactattattatttttgaccacttattatttgccaggaaggtgctaactgccttatatatgtctcatttagtgctcactacatttctattatcagtcccattttcagatcacaaaatggtttaaagaaggtaactttagcgttctgaccatttagattggaactwaattttttgaccatacgtcttgctttatccacttgctatcatgtcttaatattaacggatatcactcctatataattcatgtttccagtgacagaatgagttaatggagtccgtggtttaaaagtgaccctggagaaccaaaacgctcagcccatccactttatccataaagagattaggcctgggtgggagattggatgagaggcgtctcttatcagtccgagaggaatagtgtatactaaagaaattgatcaaaaggagg

SEQ ID NO: 934487 - DNA, 554 bp, Homo sapiens
aagggctacctggagccgggcgcggtggctcacgcctgtaatcccagcactttgggagggcgaggcaagcggatcacctgaggtcgggagtttgagatcagcccgaccaacatggagaaaccccgtctctactaaaaaaaaaaaaaaaaaaaggcaaaaaatgagccgggcatggtggcacatgcctgtaatcccagctatttgggaggctgaggcaggagaatcacttgaacctgggaggtagagattgcggtgaagcgagatcacgtcattgcactccagcctgggcaaaaagagcaaaactcagtctcaaaaaaaaaaaaacaaaagaaaaaaaaggctacctgggggccaggcatgtacacatagagggtctatcttccstggttttgttatcacatgcacagtaacagagaaatgagcactatgacgcagctcaggcagagaactcacctgaagaataaaagattagggtggggccaccagaaattcacaccctatgcaaatgacacacctggtctaaccagtttgtccatgacttatataaatcagac

SEQ ID NO: 934488 - DNA, 540 bp, Homo sapiens
aacattgaagtttttaacatcactcacatttcatcaactttttatttaagttctcagcattcttcggccattatatgactttatatctctcctcatttactcacacatttattaataaacttttatttcatgatatattccatttgtaaaacactgtcttttctaattagtgcacaatgctaaactgctaaccacttgagagaacctcagaattgagtatcttggcacactcccaaggtacgtgtgccaagagagtaaattttcacagtgaaattcataaacaaaccatatgttcttttaaacaattttttaaaactaaattccacttatatggactgtttcattatggcttagaaagtatrggtggataaatagtgtctatttttaattatgaaattttgaatgtaaaatgcactttttcatgaaagttatgttattaacggtgattgtatttgtaaaatggcttacagaggctgacacagtaatgtcagatgaattgtgtttgttatttttcaatcaatcagataattccattacaca

SEQ ID NO: 934489 - DNA, 608 bp, Homo sapiens
ttcaggagatggctgcttgaagtaggtagtattaaagcccaatgttgagagatggatggaaaagtgaaaggtagaaggaaaggaaaaaagggcagttaattaagagtgacattttgcaagaatagagcagtgaaaacacaagatatatttggggaacagtgaggagtacgagttagcctgagtatacaggagttagagcctaagcctactttctgcacacctstaaggcaggtgtcctggggccaaaaggtgttcagacttcgttactgttgtagtcttttctgaaaacaaatctttagcaacaatgggtataagaattaacacaatattgaaatgcttttttcaatcctttttcccgtaatttaactcttagctaccaaagcttgtattttcatctgcaagtatagtaagaactatacagaacatctatctctatccattagcatcttttgagttcttgttctgtgtaaattatggtaggaagaaaaaaggacttacataaatatgcaaaaacattcactgttgtgcaagtccctatcgtgttccaattctggaggtggggggaggaggcagagacaggggaaatattaataagataaagctcactc

SEQ ID NO: 934490 - DNA, 763 bp, Homo sapiens
caccactgcactttcggggatctgggaactccccctgcccctgcagctcagaagtgcctctcccactgccaggcctctccccactcctggttcccgctccaattacacagcaaagttgaggccaagtccaggcactgttrcgacccagccaggtgtgcgcacacttgggacagcactgtcacaccagccccctgccgcccctccagacactgggcacccacaagcacaggagggaggttgcaggggcagggagggctgagggcagctcagagtgggcctgcaggcgccccctgacataaacagcctgggtgtgtcatgggtaccgtagatggcagagatggcagacaggctcctgggcagaaaggggcaggtcaccagtgaagctccacctttaagccagggatgggttgaagggctgccagtttcgcagaaaggagaacttatagtgctttttccgggcctgcccatggaccaattggcatgcatctcctcccctctgaagcccataaaaaccctggactcagccagacttggagagacaatggaatgacctgcctgcagataggagctagccactccgggtctcttctctgctgaaagatgcagattatgggatgacctgcatgcagtaggagctacccactctaggttctcctctccactgacagatggacagtcatcaggatgacctgcctgcagaaaggagctacccactttgggtctcctgaaaactgttctgccactcgatgaaactcctctccat

SEQ ID NO: 934491 - DNA, 763 bp, Homo sapiens
caccactgcactttcggggatctgggaactccccctgcccctgcagctcagaagtgcctctcccactgccaggcctctccccactcctggttcccgctccaattacacagcaaagttgaggccaagtccaggcactgttacgacccagccaggtgtgcgcacacttgggacagcactgtcacaccagccccctgccgcccctccagacactgggcacccacaagcacaggagggaggttgcaggggcagggagggctgagggcagctcagagtgggcctgcaggcgccccctgacataaacagcctgggtgtgycatgggtaccgtagatggcagagatggcagacaggctcctgggcagaaaggggcaggtcaccagtgaagctccacctttaagccagggatgggttgaagggctgccagtttcgcagaaaggagaacttatagtgctttttccgggcctgcccatggaccaattggcatgcatctcctcccctctgaagcccataaaaaccctggactcagccagacttggagagacaatggaatgacctgcctgcagataggagctagccactccgggtctcttctctgctgaaagatgcagattatgggatgacctgcatgcagtaggagctacccactctaggttctcctctccactgacagatggacagtcatcaggatgacctgcctgcagaaaggagctacccactttgggtctcctgaaaactgttctgccactcgatgaaactcctctccat

SEQ ID NO: 934492 - DNA, 763 bp, Homo sapiens
caccactgcactttcggggatctgggaactccccctgcccctgcagctcagaagtgcctctcccactgccaggcctctccccactcctggttcccgctccaattacacagcaaagttgaggccaagtccaggcactgttacgacccagccaggtgtgcgcacacttgggacagcactgtcacaccagccccctgccgcccctccagacactgggcacccacaagcacaggagggaggttgcaggggcagggagggctgagggcagctcagagtgggcctgcaggcgccccctgacataaacagcctgggtgtgtcatgggtaccgtagatggcagagatggcagacaggctcctgggcagaaaggggcaggtcaccagtgaagctccacctttaagccagggatgggttgaagggctgccagtttcgcagaaaggagaacttatagtgctttttccgggcctgcccatggaccaattggcatgcatctcctcccctytgaagcccataaaaaccctggactcagccagacttggagagacaatggaatgacctgcctgcagataggagctagccactccgggtctcttctctgctgaaagatgcagattatgggatgacctgcatgcagtaggagctacccactctaggttctcctctccactgacagatggacagtcatcaggatgacctgcctgcagaaaggagctacccactttgggtctcctgaaaactgttctgccactcgatgaaactcctctccat

SEQ ID NO: 934493 - DNA, 687 bp, Homo sapiens
atgggttgaagggctgccagtttcgcagaaaggagaacttatagtgctttttccgggcctgcccatggaccaattggcatgcatctcctcccctctgaagcccataaaaaccctggactcagccagacttggagagacaatggaatgacctgcctgcagataggagctagccactccgggtctcttctctgctgaaagatgcagattatgggatgacctgcatgcagtaggagctacccactctaggttctcctctccactgacagatggacagtcrtcaggatgacctgcctgcagaaaggagctacccactttgggtctcctgaaaactgttctgccactcgatgaaactcctctccatcttgctcaccctccagttgtccacatacctcattcttcatggatgcaggacaagagctcaggatccaccaaatggtggactaaaagagctgtaacacaaacagggctgaaacatgccccctccccgcctgccatgttgcagggaacaagaagaagagacaagctgtggcctttcgggaagcccagacctagggggtccctgagccaggactatgacaccctctttggggtatttgtggttcctcggtgtcttccaagcttccagttgccaccaccacatttccctcacccagatgtgggtgcccacagcagaagccacgcacagta

SEQ ID NO: 934494 - DNA, 580 bp, Homo sapiens
tggagaaccactactctcttcaaagctgtcagacagggacatttaagtctacagaggttactgctgccttttgtttggctatgccctgcccccagaggtggagcctacagaggcaggcaggcctccttgagctgtrgtgggctccacccagttcgagcttccaggctgctttgtttacctaatcaagcctgcacaatggcaggcgcccctcccccagcctcgctgctgccttgcagtttgatctcagactgctgtgctagcaatcagcgagactctgtgggcgtaggaccctccgagccatgtgcgggatataatctcctggtgtgccgttttttaagcccgtcggaaaagcgcagtattagtgtgggagtgatgcgattttccaggtgccgtctgtcacccctttctttgactaggaaagggaactccctgaccccttgcacttcccgagtgaggcaatgcctcgccctgcttcggcttgtgaatggtgcgctgcacactgtcctacacccactgtctggcactccctagtgagatgaacccggtacctcagatggaaatgcagaaatcaccagtcttc

SEQ ID NO: 934495 - DNA, 580 bp, Homo sapiens
tggagaaccactactctcttcaaagctgtcagacagggacatttaagtctacagaggttactgctgccttttgtttggctatgccctgcccccagaggtggagcctacagaggcaggcaggcctccttgagctgtagtgggctccacccagttcgagcttccaggctgctttgtttacctaatcaagcctgcacaatggcaggcgcccctcccccagcctcgctgctgccttgcagtttgatctcagactgctgtgctagcaatcagcgagactctgtgggcgtaggaccctccgagccatgtgcgggatataatctcctggtgtgccgttttttaagcccgtcggaaaagcgcagtattagygtgggagtgatgcgattttccaggtgccgtctgtcacccctttctttgactaggaaagggaactccctgaccccttgcacttcccgagtgaggcaatgcctcgccctgcttcggcttgtgaatggtgcgctgcacactgtcctacacccactgtctggcactccctagtgagatgaacccggtacctcagatggaaatgcagaaatcaccagtcttc

SEQ ID NO: 934496 - DNA, 580 bp, Homo sapiens
tggagaaccactactctcttcaaagctgtcagacagggacatttaagtctacagaggttactgctgccttttgtttggctatgccctgcccccagaggtggagcctacagaggcaggcaggcctccttgagctgtagtgggctccacccagttcgagcttccaggctgctttgtttacctaatcaagcctgcacaatggcaggcgcccctcccccagcctcgctgctgccttgcagtttgatctcagactgctgtgctagcaatcagcgagactctgtgggcgtaggaccctccgagccatgtgcgggatataatctcctggtgtgccgttttttaagcccgtcggaaaagcgcagtattagtgtgggagtgatgcgattttccaggtgccgtctgtcacccctttctttgactaggaaagggaactccctgamcccttgcacttcccgagtgaggcaatgcctcgccctgcttcggcttgtgaatggtgcgctgcacactgtcctacacccactgtctggcactccctagtgagatgaacccggtacctcagatggaaatgcagaaatcaccagtcttc

SEQ ID NO: 934497 - DNA, 675 bp, Homo sapiens
agtttgcccttatatcatgggactggactagaaatagatgagcatctgtgcaggaaataacgatgatactctctgtggcacagcgtcactgagcttgagctcaagaacatgatagacctggatttgaatccctgcttgccacctactagctatgaaactttaggaaggtttcttaaactctctttaagagttagttttctgcccaggcatggtggctcaggcttgtaatcccagcactttgggaggtcaaggccggcagatcgcttgaggtcaggagttccagaccagcctggccaacatggtgaaaccccatttccatcaaaaatacaaaaattagctggatgcctgtaatcctagctactcaggaggctgaggcaggagaattacttgaacccaggaggcagaggttggcagttagcaagattgtgtcactgcactccagcctgggagacaaagtgagactctgtctcaaaaaaaaaaaaagacwtagttttctgtctgtttaataggaatgctaacagtagtcacttcataggatttttgtgaggattaaatgacaagatatacacaaaactttaagcccacagtgcagtacaaagcaagagctcagtacaaagtacaagggtgtaatatttatttattttgttattattattattatttgaacccacatag

SEQ ID NO: 934498 - DNA, 772 bp, Homo sapiens
gctaactcctgatacttttaaagtggggggcactaaaaagcaaattggaagctctctgtgcatgtagtgtcctctgtctgggccattttcttaggaatattactgtcttttctcttgggctggtcatattttccagaaatggcttttcttgcctggaatacacaatcgtttatgctagtgatctaggagcagagtgagaagaagattgagagtcttaatactcaaagtgatactttcatttaatctccgtatttagtatcaatacaggacctctgccttcagctattcctgttgtctgcaagtctagaaacttttccctctcctaataacaaacttgtagtagagtgccagggttggggttgcttagctgctgcaagtcagggaggacaactgggagatctcacrgcttcttacgcagactggcgatgaatctttctcttttaggcctgccttcacccctgcttccagggatatcttgtgcttgccaattcttgtgcctgctgtaaatcagtttgcttctctgctttcctagttctgcagtgaaaattattactcattaattttctttccagagtctaaaggtactgctttttatttcatcttcttgatttttttataggcgtattccctttaaaaattacatttttatcattttagtaggatgtttggacggagcggaaactaatgaatgtgtacaactagttatctttacttggaagttttctttttttaattgcagaagaaataagaattcactcctataaaaatttag

SEQ ID NO: 934499 - DNA, 599 bp, Homo sapiens
aaagtcctggcagttcctcaaaaggttaaacagggtgagggttagagttaaacagagtttaaccttttccactcttagatacatatccaagggaaatccacacaaaaacttgtacacaaatgttcatagcagcatttttcataatacccaaaatgtggaagtaactccaaagccccatcaactgaagaatggataaataaaatgtggtatatccatccartggaatatcattcagcaataaaaacgaatgcagtacagttgcatgctacaacatgggtgaatgttgaaaaccgtacgctaagggaaagaggccagtcacaaaaggtatgttggggtatgtgatttcattcatatgaaatggcctgaataagcaagactacagagacagagtagatccacgattgccacaaggttgcagggaatggggagtgactgctagtgggtactaggtttctttctggggtgatgaaaatattctaaagttgattacgtggtgatgattgtacaactgtgtgaatgtgctagaagttattgaactgtatactttcaattggtaaattttatggtaagtgaattatatctcagtaaagctagtatat

SEQ ID NO: 934500 - DNA, 611 bp, Homo sapiens
atatcatattatgaaatgtttaattcaattacagtctaatcctcatcttacttcggtttataaaatgagtgatattttttatcttccaataacaaaaaataatatgtaagccatcacaatggttggctttttaagcaatatactgtttaaaattaaactcatagaagtttttatacttcatttcattcagaaatgtgctcttgataaaatttatgtttaataatatctatacaattatttcttaagttattaaaataataatgttaatgataattcmacccaagagaaatttttcaaacttagaactttatgaaacaggaaatatgacacattttaaaatacctatttgtagacataattttgttgcaaagagtatgatagagtaatcaataaagtatcgggaagtataataacacacaacactaggatagaactttgtgaaatggccgggtgcagtggctcacacctgtaatcccagcactttgggaggccaaggcgggcagatcacaagatcaggagtttgagaccagcctggccaatatagtgaaaccccgtctttactaaaaatacaaaaaaaaaaaaaaaattagccaggcgtggtggcatgcacc

SEQ ID NO: 934501 - DNA, 777 bp, Homo sapiens
aaccattagtatttgcccttaagttaacatattcaatacctgtgtgcgcacacaaactactttcctttaaagaagagtagtttgcttttttttttctcttctgtagttaggtggctcaaatgtcattgctacattaaaaaatatatcattccagtttaaacaccatagtgtgtatatagtatattttaaatatctatttaaaactacttttatgctgacagcaacctaattgtttaaatcataagttttttttttctgctgtgatttgatagtattacaaaaattggtggactactgaccaaatcctccctacttttttattttttactttatttatttatttatttttttggagatggggtctcgctctgtcgtccaggctggaatgcagcggcacgatctcggctcactgtgagctctacttcccaggttcacgccattctcctgcctcagcctcccgagtagatgggactacaggcgcccgccaccacgcccggctaattttttgtatttttagtagagacggggtttcaccrtgttagccaggatggtctcgatctcctgacctcgtgatccacccgccttggcctcacaaagtgctgggattacaggcgtaagccactgtgtccggccaatcctccctacttttttaaaccacattctttgggaaacattattttgacccacaaaagtgtaaaatgtctatagtgacatagctatttttaaagtttattcaaatgaaagttaattggttgtaatctttttattcttcatcct

SEQ ID NO: 934502 - DNA, 399 bp, Homo sapiens
tgtggctaaagcaggtgggtaaatgcaatacccagtgatgggcagaggtctcagccttgacagaggtggctggaggagtgagttgcaatgaggtcttacctggggtaagggttggagccacctcagctcccctgccaggttagcaggaaagttatccctctcaaacacactcctgtttcagtgctccagcttttcatctccagacagscacctcttttcatctgcaggaattttgatgttccaaatagagaaaaattgtgaacgtctctcatacaagcttgaacctagagggtgcccctcctatggggatgcagtcaccctgatgtcttccagaaagactgtctatagttgcactcacaccaagctccaatgggagaagctccaactgtgcctgcagtg

SEQ ID NO: 934503 - DNA, 805 bp, Homo sapiens
tgtctgaatatcatgcagaatcatctgtgaaccaggccctagttttctctttccctgtcaattgatcatagggaacccccccaatgaggccactggtgcaggctggggttggggagagaagacaggttggcaggaaaggagaccatggacatttgaaccacttcctcatgtaacttacttgttccttcaggacctactcgaacctgatcacgtatataccacttccatttgatgatggaatgctgctgtgcatgacccactttatggctagataggtgagaaagctcccagttcatgataggcaattcaggttgcatggtgactggatgacccatagcatagtcaaacgttcagtttccaccaaagctgagtagaagkccaagagctgtctctcaaaaggggagtagttataggcagaagatggcagggccctgttccaaaatcctagaggtcaaaatcctgtgggggcctgcaaaaggctccaaacagcatccatatctatcacctgacacctcaaacaccattggatctgctgggtcatatggcccaagtggcagagcagcttcaacagcagcctggatctgttgcagagccttctcctattctggaccccactcaaaactgggaaccttttgggtcacttaataaatggactggagtaacacacacaaatgaggaatgagttgcttccaaaatccaaataggcccactaggtgttgttcctctttcttggtggtaggaggggccaaatgcggcaacttattcttaaccttagaaggaatatctcaacagtccccacaccagt

SEQ ID NO: 934504 - DNA, 707 bp, Homo sapiens
cctgacacctcaaacaccattggatctgctgggtcatatggcccaagtggcagagcagcttcaacagcagcctggatctgttgcagagccttctcctattctggaccccactcaaaactgggaaccttttgggtcacttaataaatggactggagtaacacacacaaatgargaatgagttgcttccaaaatccaaataggcccactaggtgttgttcctctttcttggtggtaggaggggccaaatgcggcaacttattcttaaccttagaaggaatatctcaacagtccccacaccagtggacccctagaaattttactgaggtagaaggtccctgaattttagtcagatttatttcccatcctctggtatgcaaatgtctcaccaataagtccagtgtgtttgctacttcttgctcactggatccaatcagcataatgtcatcaatgtaatggaccagtgtgatatcttacggaagtgaaaagtgatcgaggtctctccaaataagattatgacacaaagccagagagttgatatacccctgaggtaggacagtaaaggtatattgctggccttgtgagctgaaggcaaattgcttctggcgggccttatggacaggaatggagaaaaaatcatttgccaagtatatggctgcacaccaggtaccaggagatgtgttaatttgctcaagcaatgaggccacatc

SEQ ID NO: 934505 - DNA, 753 bp, Homo sapiens
aatcctgtgggggcctgcaaaaggctccaaacagcatccatatctatcacctgacacctcaaacaccattggatctgctgggtcatatggcccaagtggcagagcagcttcaacagcagcctggatctgttgcagagccttctcctattctggaccccactcaaaactgggaaccttttgggtcacttaataaatggactggagtaacacacacaaatgaggaatgagttgcttccaaaatccaaataggcccactaggtgttgttcctctttcttggtggtaggaggggccaaatgcggcaacttattcttaaccttagaaggaatatctcaacagtccccacaccagtggacccctagaaattttactgaggtagaaggtccctgaattttagtcagatttatttcccatcctctggtatgcaaatgtctcaccaataagtccagtgtgtttgctacttcttgctcactggatccaatcagcataatgtcatcaatgtaatggaccagtgtgatatcttayggaagtgaaaagtgatcgaggtctctccaaataagattatgacacaaagccagagagttgatatacccctgaggtaggacagtaaaggtatattgctggccttgtgagctgaaggcaaattgcttctggcgggccttatggacaggaatggagaaaaaatcatttgccaagtatatggctgcacaccaggtaccaggagatgtgttaatttgctcaagcaatgaggccac

SEQ ID NO: 934506 - DNA, 765 bp, Homo sapiens
agtccggggacccactggacccactgtaagtcagacctgagctaaaactccgttaattacctgacctccataagcccctactttaaccacaatgatgttttgggtcttctggaatcaacgtcagctcagagccagtgtccagtatccccaatatgtctgatcatttccctttccccattgcatagttaaccctggtaaaaggccgagagcttcttggggaaggttgggagaaagattcactgcataaattgtctgtaatatagtgaggtccttcctcaaggagacctgggctccccttcattcaaggggttctgtgtctgtaaactggctcaagtctggaaattgattgaggggctgtgattctctggttttataattcaaattagcctttgtccatacaacctagaagttttctgcttatataaattaattaggaatgcagtagacttcttataaatttcacttctaggaacaccatgattagccaatgccagagctctacaagagtcagactattctgattgctgctttrcctctgctgtccattacagtagctataccaccttgcctttgatggttgattgccgccacttggcacttgccacgaaaggatccaattattcccattgtatttaaattttgtagttgagtgactattgttgtatctgacatacagaaaagagcaattacagggctcttcagagatgcaggtgctgcccccacaaatctattttgcaaggcattggtcaaggatataccttctgg

SEQ ID NO: 934507 - DNA, 608 bp, Homo sapiens
ttctaccagaggtacaaagaggagctggtaccattccttctgtaactattccaaaatatagaaaaagagggactccttcctgactcatgttctgaggccagcctcatcctgataccaaaacctgtcagagacacagcaagaaaagaaaatttctggtcaatatccctgatgaacatcgatgcaaaaaccctcaataaaatatgagcaaaccgaatccatatcaaaaagcttatccactactatcaacccagcttcatccctgggatgcaacactggttcatatgtataaagcaataaatgtaatccatcacataaacagaaccaatttgaaaaaaccacatgattacctaatgcaagcagaaaaggcctttgataaaattcaacacaccttcatgctaaaaactctcagtaaactaattattgaaggaacatayctcaaaataataagagctattcatgacaaacccatagccaatatcatattgaatgggcagaagctggaagcattttctttgaaaactggaacaagacaaggatggcctgtctcaccactcctattcaacatagtattggaagttctggccagggcaatcagtcgagagaaataa

SEQ ID NO: 934508 - DNA, 871 bp, Homo sapiens
tatcaggccctactcttagagggttctcacgtccaattaaagacttgttctagcctaaatccagccaccttcctccctgaggaaactggggaacctgagcataactgtgaacaagtcatagcacagatctatgcagccagggaggatttcagagaaactcccttaaagaatccagactgaaccctcttcacagatgcgagctcttttgtagaacaagggatccacaaggcaggatacgcagtagtcactctaaatgacgtcattgaaagtgtgcctcttcctctaggcacaagcacttaattagytgagctaatagctcctacaagagcaattgaattaagcaaaggaaaggtagctaatatttacactaactccaagtaagctttcctacttctccatgctcatgaggccatttggaaggaaaggcattttcttaccaccaatggttctcctataaaatatcaccaggaaattaataggttactatcctcagttttccttccacgagaaatcgcaataatgcattgtaggggacatcaaaagggaatagatgaggtagctgaaggaaatagattctctgatcaggcagctaagtcagtgggaagaaaacctcaagatatcaacacacttcaaacccctctagtctgggaaggctccataagagaaattaaacctcagtattcccctaaggaagtagaatggtccacttcttgagggtatacatttcaacactcaggatggctacagtcagaggatggcaagctccacttgccagcctctagccaatggaaagtcctcaaagtccttcaccaagcttttcacttgagaaaggttaaaatgtatcaatgtgcccagagattgttttcaggag

SEQ ID NO: 934509 - DNA, 708 bp, Homo sapiens
cctcagttttccttccacgagaaatcgcaataatgcattgtaggggacatcaaaagggaatagatgaggtagctgaaggaaatagattctctgatcaggcagctaagtcagtgggaagaaaacctcaagatatcaacacacttcaaacccctctagtctgggaaggctccataagagaaattaaacctcagtattcccctaaggaagtagaatggtccacttcttgagggtatacatttcaacmctcaggatggctacagtcagaggatggcaagctccacttgccagcctctagccaatggaaagtcctcaaagtccttcaccaagcttttcacttgagaaaggttaaaatgtatcaatgtgcccagagattgttttcaggagagaacttactaaaaacaattaatcaaattgttgatgcttgtgaagtctgtcttaaaaataatcccctaaacagtagactccttcctcctcaaacccaaagaataggagattatcctggggaagactggcaaatagacttcacccacatgtcagaggcaaagggcattcaatacctgatggtatgggtagacaccttcactaactgggtagaggcattcccatgccatacagaaaaagcctctgaggttaaaaaaaaaaaaaagtgttagttaatgaaataactcccctcttttgtctacctaggtatcttcgaagtgatgatgg

SEQ ID NO: 934510 - DNA, 585 bp, Homo sapiens
aatttctctgtctggactgtttctccttaaactaaacaaaaacattaaaaaaaaaaaaaaggagcatgaggtcaagaagatggatgacacaatcaattatggtatttctggcattgagtttcttatttagtgtaaatgtsaaacaatttccctacaagaaaaattttacgaaacatcattcaagacatggctgttttattatggaagcacttgaaaagtttacaaagctactatttagcacagtaaaaagaggaatggaggtaactgtttaagagttgggtgcagctaggccgggtgtggtagctcacgcctataatcccagcacttcgggaggccgaggtgggcgaatcacgatgtcaggagttcaagaccagcctggccaacatggtgaaaccctgtctctactaaaaatacaaaaaattagctgggcatagtggcgggtgcgtgtactcccagctacttgggaggctgagtcaggagaatcacttgaacccaggaggcagaggctgcagtgagctgagatcacgccactgcactccagcctgggcgacagagtgagactccatctaaaaaaaacaaaagaga

SEQ ID NO: 934511 - DNA, 557 bp, Homo sapiens
gctgctgctgctaagggaaccccactttgagaactactaggggagataaacatcagcctctgccacacaacttcacaggtgccagatgaagtcaagtgttattagtggcttatttacaggcataggtaaggattagtgtttatctcatatgcagatatattttcatactggcctcacctacagttgtaggcaagggttagtagtggcctctcattcagagtcagattatgcactgaatcaaagcaagtyatcatcattttaaatagtatttattatgtgattcatcatgtcaaacctataggaaaactataaaataacactttctttgagtagcaaaaattaactcctgaagccaaaatattggccagtccaagaagaaagtaaaagcttagaacaataatgagttcagaaattgaatcagtaacaaaacaacaacaacaaaaacctacctaccaaccaaaaaaacatacctggaccagatagattcacaactgaattctatcaggtgtataaagaagaactggtaccaattctactgaaactatttcaaaaatttt

SEQ ID NO: 934512 - DNA, 654 bp, Homo sapiens
ttctatatgccagccactatcctataccctttacattatagttaatttttccaacaaacctataagcaaaagtctattaatataatacccactttaataaaatgtggaaattgatacacaataacattaagcatcttgtccaaggtagcatctcgtccaaggtagcatctctagtaaatgaggaagtcrtggctttaaccagggtaatctgactccagagatatgtttctttaaacaatgtaatataaatacatcaaggaagcccaatgtcatggaattctgccaagaagggggcaccagcctagaactcgggggcatctccaaatgttggcttttcaatggctcgcacccagggttctgtccatggtagtttcgggtgatggatgtttggagccccttgtgattccagtccgtggatgaaggccagtcttccattcctgctggtaacctcggtatctctcaagggttcactcagaggctctcttactggcttgtgtgaggctgacaaaacaacatgatgtatgtggccatttaccaaacagtaaaaacttggtgggtataacagggaaagtctttctttttttcttttcacttctactttagaaaatcaagaatatggacagatttgtggattaccagtttcagatcaatgta

SEQ ID NO: 934513 - DNA, 654 bp, Homo sapiens
ttctatatgccagccactatcctataccctttacattatagttaatttttccaacaaacctataagcaaaagtctattaatataatacccactttaataaaatgtggaaattgatacacaataacattaagcatcttgtccaaggtagcatctcgtccaaggtagcatctctagtaaatgaggaagtcgtggctttaaccagggtaatctgactccagagatatgtttctttaaacaatgtaatrtaaatacatcaaggaagcccaatgtcatggaattctgccaagaagggggcaccagcctagaactcgggggcatctccaaatgttggcttttcaatggctcgcacccagggttctgtccatggtagtttcgggtgatggatgtttggagccccttgtgattccagtccgtggatgaaggccagtcttccattcctgctggtaacctcggtatctctcaagggttcactcagaggctctcttactggcttgtgtgaggctgacaaaacaacatgatgtatgtggccatttaccaaacagtaaaaacttggtgggtataacagggaaagtctttctttttttcttttcacttctactttagaaaatcaagaatatggacagatttgtggattaccagtttcagatcaatgta

SEQ ID NO: 934514 - DNA, 582 bp, Homo sapiens
tccttttaaatataaatttcaaatttaagtcatttctttgctcccacatctgagcataggtttttaggagcagccaggtcacaacttgaaagctttgctgcttaaaaatatcttctaccagataccctaaatcatcactttgaagttcaatactttcatatatcactaagtcatgaacaaaatgcagccaagctctttgctaaggcatcacatgtgtgacctgtgctccagtttccaataagatttctcatttcaatctgagacctcagcaatccagacttcactgtccatatcactatcagcattttggtcacaaccattttaccagtttccaagaaatatcaaactttctctcatcatcttgtcttcctctgagccctccaaactcttmtaacctctgcccattacgcagttccaaagtcacatccacattttcaggtaactttatagtaatgcctcacttctcagtactgattttatgtatcaggttgttcttacactgctctaaaaaaaatacctgacactgggtaatttatttaaaaagaggcttaattggctcatgcttctgcaggctatatagga

SEQ ID NO: 934515 - DNA, 571 bp, Homo sapiens
tcaaggtatagtttgggttgttgcttcagagggtgcaagccctaagccttggcagcttccacatggtgtcgagtttgcgggtgcacagaagtcaagaattgaggtttgggaacctctgcctagatttctgaggatgtatggaaatgcctgatgtccaggcagaagtctgctgcaggggcagagccctcatggagaacctctggggaaaatgtggaagggaaatgtggggttgcagcccccgcacagagtccccactggggcactgcctagctgagctgtgagaagagggccactgttctccagaccccagaattgtagatccaccaacagcttacagcacaagcctggaaaagctkcagacactcaatgccagcctatgaaggcagccagaaagggggctgtaccctgcaaagccacaggtgtgagactccccaaagctgtgggagcccacctcttgcttcagcatgacctggaggtgagacatggagtcaaaagagatcattttggagctttaagatttgactgccctgctagattttggacttgcttgggtcctgtagcccctttgttt

SEQ ID NO: 934516 - DNA, 571 bp, Homo sapiens
tcaaggtatagtttgggttgttgcttcagagggtgcaagccctaagccttggcagcttccacatggtgtcgagtttgcgggtgcacagaagtcaagaattgaggtttgggaacctctgcctagatttctgaggatgtatggaaatgcctgatgtccaggcagaagtctgctgcaggggcagagccctcatggagaacctctggggaaaatgtggaagggaaatgtggggttgcagcccccgcacagagtccccactggggcactgcctagctgagctgtgagaagagggccactgttctccagaccccagaattgtagatccaccaacagcttacagcacaagcctggaaaagctgcagacrctcaatgccagcctatgaaggcagccagaaagggggctgtaccctgcaaagccacaggtgtgagactccccaaagctgtgggagcccacctcttgcttcagcatgacctggaggtgagacatggagtcaaaagagatcattttggagctttaagatttgactgccctgctagattttggacttgcttgggtcctgtagcccctttgttt

SEQ ID NO: 934517 - DNA, 607 bp, Homo sapiens
aaaatagccatatttttcttcttgcagagagcctataaacagacgtgcaagtaggagagatactactaaattcttttcctagcaaggaatattaatattaatatcctgggaaaggaatgcattcctggggggaggtctataaatggccgctctgggagtgtctgtcttatgcagttgagataaggactgagataagccctggtctcctgcagtactctcaggcttactaggttggggaaaaacctctgccctggtaaatttgtggtcagaccagttctctgctcttgatccctgttgtctgttgtttaagatgyttatcaagacaatacgtgcaccactgaacacagacccttatcagtagttctgcttttgccttttgtcttgttccctcagaagcatgtgatctttgttctgctttttgccctttgaagcatgtgatctttgtacctactctctgttcttatgccccctccccttttgaaacccttaataaaaaacttgctggtttgaggctcaggtgggcatcatggtcctaccgatatgtgatgtcacccctggcagcccggctgtaaaattcctctctttgtactctttctctttatttctc

SEQ ID NO: 934518 - DNA, 653 bp, Homo sapiens
aaacatttgtatctgtcagatagacatgagtgcattttacctgacaaccacggattatcttagagttttaaacactgttacagagaaaagaaaatttatttgcataggtcacataatatttagatcctctccgtagcacctccatagatagtagatcctgcagtactttaagcattagagttacacatcaaaattaagctagtttcaaatctcaaaggaattcataagctgagatttaagtctygggtacccctccccttactttccacataggtacttagttctcacacctgcacttaccagcatccagaatatatttcttaaggcctactcttgttaggtactctatgaaaaagggttttaggccaggcacagtggctcacacctgtaatcccagcacttgggaagcccaggcgggcggatcacttgaggtcaggaatttgagactagcctcactaacatggtgaaacccccatctacactaaaaatacaaaaagttagacaggcgtggtggtgggtacctgtaatcccagctactcgggaggctgaggcaggataattgcttgagcctgggaggcagaggctgcagtgagccgagattgcaccactgcactcccttccaggtgaaagaagaagcctctgtcaaaaaaaaa

SEQ ID NO: 934519 - DNA, 663 bp, Homo sapiens
caggcacagtggctcacacctgtaatcccagcacttgggaagcccaggcgggcggatcacttgaggtcaggaatttgagactagcctcactaacatggtgaaacccccatctacactaaaaatacaaaaagttagacaggcgtggtggtgggtacctgtaatcccagctactcgggaggctgaggcaggataattgcttgagcctgggaggcagaggctgcagtgagccgagattgcaccactgcactcccttccaggtgaaagaagaagcctctgtcaaaaaaaaaaggggggcggggaatgggctttgatgggcaaacaaaattagaaagtggggtgtctcagacagtattctccaggatgcagattctgagatatactttaattgcaggatatttattaagaagtgccttttgccaaacatttgttcaaagagagagagaagcggaattgggagaaaatgagttataatgtaggtccaaygacagccttggccaaccccacagggagctctggagttaaaacggccctcggagatgtcctcagatgggcaagagaacaactttgtatctccacactgatcaatccttggctatgggccactccacaaaaaagtgtgaccttaggtgaagtggttttctacagctatgccaattcctgaag

SEQ ID NO: 934520 - DNA, 685 bp, Homo sapiens
cataaactgtgaagatttcatggacatttatcagttcccaaataatacttttataatttcttatgcctgtctttaatttcttaatcctattatcttcataagctgaggatttacatcacctcagaaccactgtgataattgtgttaactgtacaaattgactgtaaaacatgtgtstttgaacaatatgaaatcagtgcaccttgaaaaagaacagaataacagtaatttttagggaacaagggaagacaaccgtaagtaaagtctgactgcctgcggggtcgggcaaaaagagccatatttttcttcctgcagagagcctataaatgggtgtgaaagtaggagagatatcactaaattcttttcctagcaagaaatattaatattaataccctgggaaaggaatacattcctgggggaaggtctataaacggctgctccgggaatgtctgtcttatgcgggagatgcgcctggtcttctgcagtaccctcaggcttactagggtggggaaaaactccgccctggtaaatttgtggtcagaccggttctctgctctcgaactctgttttctgttgtttaagatgtttatcaagacaatacatgcaccgctgaacatagacccttatccatagttctgcttttgccctttgccttgtgatctttgttggacccttatcagtagttc

SEQ ID NO: 934521 - DNA, 685 bp, Homo sapiens
cataaactgtgaagatttcatggacatttatcagttcccaaataatacttttataatttcttatgcctgtctttaatttcttaatcctattatcttcataagctgaggatttacatcacctcagaaccactgtgataattgtgttaactgtacaaattgactgtaaaacatgtgtgtttgaacaatatgaaatcagtgcaccttgaaaaagaacagaataacagtaatttttagggaacaagggaagacaaccrtaagtaaagtctgactgcctgcggggtcgggcaaaaagagccatatttttcttcctgcagagagcctataaatgggtgtgaaagtaggagagatatcactaaattcttttcctagcaagaaatattaatattaataccctgggaaaggaatacattcctgggggaaggtctataaacggctgctccgggaatgtctgtcttatgcgggagatgcgcctggtcttctgcagtaccctcaggcttactagggtggggaaaaactccgccctggtaaatttgtggtcagaccggttctctgctctcgaactctgttttctgttgtttaagatgtttatcaagacaatacatgcaccgctgaacatagacccttatccatagttctgcttttgccctttgccttgtgatctttgttggacccttatcagtagttc

SEQ ID NO: 934522 - DNA, 658 bp, Homo sapiens
ggcagaggaacataaactgtgaagatttcatggacatttatcagttcccaaataatacttttataatttcttatgcctgtctttaatttcttaatcctattatcttcataagctgaggatttacatcacctcagaaccactgtgataattgtgttaactgtacaaattgactgtaaaacatgtgtgtttgaacaatatgaaatcagtgcaccttgaaaaagaacagaataacagtaatttttagggaacaagggaagacaaccgtaagtaaagtctgactgcctgyggggtcgggcaaaaagagccatatttttcttcctgcagagagcctataaatgggtgtgaaagtaggagagatatcactaaattcttttcctagcaagaaatattaatattaataccctgggaaaggaatacattcctgggggaaggtctataaacggctgctccgggaatgtctgtcttatgcgggagatgcgcctggtcttctgcagtaccctcaggcttactagggtggggaaaaactccgccctggtaaatttgtggtcagaccggttctctgctctcgaactctgttttctgttgtttaagatgtttatcaagacaatacatgcaccgctgaacatagacccttatccatagttctgcttttgccctt

SEQ ID NO: 934523 - DNA, 623 bp, Homo sapiens
cagctgcttgggaggctgagatgggaggattgcttgagcccaggagttagaggctgcagtgagccatggttgtgccactacagtgcagcctgagtgacagagtgagaccctgtctcaaaaaaaaaaaaaaaagaaaaggaaaaaaagagaaagaaaagaaaaaaggaaagacagaggttatgttagaaagcagcactttaggcacagaaygtggaaaacaaaattagcccctacattcagctcctagcgggctctgccgggtcagccaatgtatgctgaaattaacaaaaatcttgccccctttctatatcactatgccaatcaatgtgaagaatgagctaaaacaaaatgaaatatatggtcatcccaataacaatgtgggcctttatttaagggagtcatacatacacctttgcttttcaagagagtatttcatcagattttcattggaattggatggctgcacagaagtctatctatggggagcatgtgaaaacggctttcacggctactgttaatgatcagagataattttgatgagggactacacaaggatgaaagtctttgatgctaagaaaatgtctgcagcgtcagttcttaagcacgggataaaccatccactg

SEQ ID NO: 934524 - DNA, 554 bp, Homo sapiens
ctaggatttccaatataaccttgacaaggagtagtgagagaagaccttcttaccttgttttctaatattagggtgaaaacatcccatcatttgccattaatatattaatatgaagagctgctgatttttcttagattccttttcttcagactgagaaagttctcttgaactcctagtttgctaagagtttttatcaggattgcatgttggattttctttttttttttctttgttttttatgagacggagcttcactcctgttgcccaggctggagtgcaatggcacgtcctcagctyactgcaagctccgcctctctggttaaagtgattctcctgcctcagcctcccgaatagctgggattacaggtgcccgccaccacgcctggctaatttttttatattcttagtagagacagtgtttcaccatgttggccaggctggtctcaaactcctgacctcaggtgatccacccgcctcagccttccaaagtgctgggattacaggcatgagccaaagtgcccagccttccattttcttaaatgccttttctgatg

SEQ ID NO: 934525 - DNA, 762 bp, Homo sapiens
accttatttcctagttaactgagaacaagaaaaggaatcagaagaggccaggtgcagtgactcacacttttaatctcaacactttgggaggctgggtgggcgaatttcttgagcccaggagttcgagaccagtctgggcaacatggcaaaactctgtttctaccaaaaatgcaaaaaaaaattagtctcataacgtggtctcaaaaaaataatttttttaaaaaaggaatcagaagataattcctcttctctgtgcatcttattcttgcattctttctsttgctatggttgacactttgttctcttacctaagatcaagttgtcctctagtgtattagatcccatccttaaactagggcataattcctacagtttttctctttcctgcatttattttttttttcgtctactggatctttcccattagcatagtaacatgtatttttctcatctcaaattatatgtgtgtgtgtatacgtgtgtgtgtgtgtgtgctatatccccctctacctacctaccactccatttcttgcatcactcaatagtaagattcctcagtagaggtgtggaatactcatctctaattcctcttcttccattcgctcttgtacccactccaatcaggtctttgtgtctgctctcatcagagatccctgatggattccatgtggctaaatccagtggtctttttcagtcctattgatgcaggcagatgagctcatacaggtgcttggcttctcccaggaaagaattcaaaggcaa

SEQ ID NO: 934526 - DNA, 590 bp, Homo sapiens
caaagagtggtcaagttactctgtagttctcaatcaggacagagaaaaaatgagagaaaatgggggaatcaatgttatccttggtagtaagaattaatcttgagaagtgtgagtcattcagtttcacttttcttttttaagattgttttgtgaatttggtttcctgtgcatatccatattgttttgttttattttgtttttggagaggggacttgtcaatttttacaaaaaaaaaacataactgggaattggaagatattacattgaatctgtagattaatctgtaaagtattgttatcttagtattaagtatttttrtccttgaaaattggacatcttttaattatttcagatcttctgtgacttatttcagcattttaaaaagtgagtgtaaaaactttgcacttctattgttaacttttttctagatatttatttttttgatgctattataaatgaaattgtattcttcgttttattatattttcattgttggttgcattcattcaaagtacaattgaattttgtatgtggatcttgtatcctgtgacattgatcaatttgtttattaattctagtggtattttagt

SEQ ID NO: 934527 - DNA, 585 bp, Homo sapiens
ctttacctactcaagcctcggcaatggcggatgcccctcccccagcctcactgccgccttgcagtttgatctcagactgctgtgctagcaataagtgaggctccgtgggcataggaccctccaagccaggcgggagatataatctcctggtgtgccrtttgctaagactgttggaaaaagtgcagtatcagggtgggagtgacccgattttccaggtgccatctgtcacccctttctttgactaggaaagggaattccctgaccccttgcgcttcccgggtgaggcgatgcctcgccctgcttcggcgcacactcagtgcagtgcacccactgtctgacactccccagtgagatgaacccagtacctcagttggaaatgcagaaatcacccgtcttctgtgtcactcacgctgggagctgtagactggagctgttcctattcggccatcttggttccacccttttcttttcaattaaaaaaaattattatatatttatgagatacaatgtgatgtttgatatatgtatacagtatggaaagattcaattgagccaattaacatagccatccactcaccaatttag

SEQ ID NO: 934528 - DNA, 585 bp, Homo sapiens
ctttacctactcaagcctcggcaatggcggatgcccctcccccagcctcactgccgccttgcagtttgatctcagactgctgtgctagcaataagtgaggctccgtgggcataggaccctccaagccaggcgggagatataatctcctggtgtgccgtttgctaagactgttggaaaaagtgcagtatcagggtgggagtgacccgattttccaggtgccatctgtcacccctttctttgactaggaaagggaattccctgaccccttgcrcttcccgggtgaggcgatgcctcgccctgcttcggcgcacactcagtgcagtgcacccactgtctgacactccccagtgagatgaacccagtacctcagttggaaatgcagaaatcacccgtcttctgtgtcactcacgctgggagctgtagactggagctgttcctattcggccatcttggttccacccttttcttttcaattaaaaaaaattattatatatttatgagatacaatgtgatgtttgatatatgtatacagtatggaaagattcaattgagccaattaacatagccatccactcaccaatttag

SEQ ID NO: 934529 - DNA, 606 bp, Homo sapiens
ttttactgctaaatatgatgttagctgtagttttttttaatagatgcactttatcacattgaggatgtttccttttattcctagtttcctgagggttttttataaaaatcatgaatgggtgttaaattttgtcaaatgcttttttttttgggcatatattgagaaaattgtaagtttttttttcccttttttctcttagtgtgttgaattactctaaccactttttgagtcatgaaccaatcttacattcctgagataaatctcatttggtcatattgtattatccttttaatagattgctagatttgatttgcaaatattttattaaagatttttgcattaactttcatgaagggtattgatgtattttttcttgtatgcacatatgctggccttaaaaatgggttgaaaatatcctcatctcaggacacaagggcrtaagaatgatacgagggatcttggggactcgggagaaagggtgggagcgggtgagggataaagactacacatgggtacagtgtacactgcttgggtgatgagtgcatcaaaatctcagaaaccaccactaatgaatttattcttctaacgcaccaccacccattcccc

SEQ ID NO: 934530 - DNA, 479 bp, Homo sapiens
gtctctaagagatggaaaaggcaaggaaagggcttctcccccagagcttttggaagaaaaagagtcctgccaacaccttgattttagcccatcttggattcctggcctacagaactacaaggaagtaaatgtacattgtttaagccacccagtttatgataactgtcacagcagccataggaaactaacatatgcckcctcgggaaggctgtccttgactgtcccatcccatctttctgtatctctctgtcttagtcagtttaggctgctatgacaaaaatgccgtacactgactggctgaaacaacagattattgctgatggttctagaggctggaaattcgaatatcgaggcaccagctgatttggtatctggtgagggctggcttcctggttcacagatggtgccttctcagcatgccctcatgtagtgaaaggggtaaggcagctttctcaagtccctttgacaagtgcactaat

SEQ ID NO: 934531 - DNA, 680 bp, Homo sapiens
tcccagttaatcctgacagcaagcacatacattatgcacatgcagggaaccgaaaccccctgaaaaaattatttttcttgaatattaaaagatcccacttctaccccaggctttcatttcctctcacgcaagcgccagttctattaaagccaaattacaccacagaaatgactgtgaagtgtacatcagcagatcaatttatttaattagcctgggtaattatagaggagtgagaaatgccttgtgctgggaaggagcacagggagagtgggagccggtggatggtgcrcatgtgtttcctggccagggagagagactgctcagcagggctgcttcctggggcctcagctcagagcagggcgtgggccaaggtagctccagcacagcccggctcctgtggtccccgccaaatgcagggatggcagcagcttccaaatcattcaggggcaacgaggttttaagaacaggtaaaatgaaatgtactctcttgacaagttttttttttcttcccagacacagttttgctctgtcacccagactgaagtgcaatggcatggtctggctcactgaaacctccgcctccctgtttcaagcgattctcctgcctccgcctcctgagtagctgggattacagatgcatgccaccacgcccggctaattttttgtatttttagtagaga

SEQ ID NO: 934532 - DNA, 627 bp, Homo sapiens
cacgctgtggcagctttgttctttggctctttgcaataaatcttgctgctgctcactctttaggtccacactccstttatgagctgtaacactcaccacaaaggtctgcagcttcactcctgaagccagcgagaccacgagcccaccaggaggaagaaactctgaacgcatccgaacatcagaaggaacaaactgcggacacgccctctttaagaactgagacactcaccgtgagggtccgcagcttcattcttgaagtcagtgagaccaagaacccaccaattccggacaactagcttcagacttagctgcatctaggttcaaataatgtcatcagggtcctctgtatgtctctctctttatccctcagctccactttgctttattatcagacaagctttatccaggtggacacaagacggcagttcacggtctcaagcctgtgtactacacacagccctcaataccagcttaggagaaagtgtctttcccacaacctctgagaaaagactcatggaaagtagtgattggtccattcttaggatatatccattcctggaccaatcaatgtggccagcaggattgagtcctctgattggacaaggctgagtcatgtgacctccctga

SEQ ID NO: 934533 - DNA, 552 bp, Homo sapiens
aaccaaccaatcagctctctgtaaaatggaccaatcagcaggatgtgggtggggccagataagggaataaaagcaggctgccccagccagtagtggcaacctgctggggtccccttccacgctgtggcagctttgttctttggctctttgcaataaatcttgctgctgctcactctttaggtccacactccctttatgagctgtaacactcaccacaaaggtctgcagcttcactcctgaagccagcgagaccacgagcccaccaggaggaagaaactctgaacgcatccgaacatcagaaggaacaaactgcggacacgccctctttaagaactgagacactcacygtgagggtccgcagcttcattcttgaagtcagtgagaccaagaacccaccaattccggacaactagcttcagacttagctgcatctaggttcaaataatgtcatcagggtcctctgtatgtctctctctttatccctcagctccactttgctttattatcagacaagctttatccaggtggacacaagacggcagttcacggtct

SEQ ID NO: 934534 - DNA, 640 bp, Homo sapiens
ttgcaaacctgttaacccacaggccagagagagagagaagccagaagcatgatctgttaagcttgagtttaatatttgatgcacagagatcactgagttttttgataagaattagaggagaagacacggccacagagaacaatttctatccccaggtgaggattcaggagataattctgggaacagaacttcctgagaactgagatgggggaaatcgctggtgttagaagggtgaaaaggtcagtaattaagcctacgactgtgctctgagaggcgaaagaagaaaatgagactgccaggcakgaataatgagaaatctttgatggaattagccgtgcagaacagatactaaatgcatcctcattcctctcatagtcaaaagtttttgcttaagctggatgggaaaaagagaatcccttttcactaagtataaaagagaggattttagagaaggtctcagaagaaagagatgtgggggtttggtgaaactcaccagaggctgaaccctctccagcataacacagggattgcgaggagcggggtagcattaggccaggtgcatagcccagtgctgctctctctggactttctgctctctctggacttgtttgctagctgagctcatccatttgcataattt

SEQ ID NO: 934535 - DNA, 640 bp, Homo sapiens
ttgcaaacctgttaacccacaggccagagagagagagaagccagaagcatgatctgttaagcttgagtttaatatttgatgcacagagatcactgagttttttgataagaattagaggagaagacacggccacagagaacaatttctatccccaggtgaggattcaggagataattctgggaacagaacttcctgagaactgagatgggggaaatcgctggtgttagaagggtgaaaaggtcagtaattaagcctacgactgtgctctgagaggcgaaagaagaaaatgagactgccaggcaggaataatgagaaatctttgatggaattagccgtgcagaacagatactaaatgcatcctcattcytctcatagtcaaaagtttttgcttaagctggatgggaaaaagagaatcccttttcactaagtataaaagagaggattttagagaaggtctcagaagaaagagatgtgggggtttggtgaaactcaccagaggctgaaccctctccagcataacacagggattgcgaggagcggggtagcattaggccaggtgcatagcccagtgctgctctctctggactttctgctctctctggacttgtttgctagctgagctcatccatttgcataattt

SEQ ID NO: 934536 - DNA, 575 bp, Homo sapiens
ctaaaaggagccaagatacaacgtaggctgtgacttcagagggtgcaagccccaagccttagcagctttcacatagtgttgagcctgtgggtacaaagaagtcaaaaattgaggtttgggaaccactgcctagatttcagaagatgtatggaaatgcctagatgtccaggcagcagtttgctgcaggggcagggcactcatggagaacctctactagggcagtgcggaagggaaatgtggggtcrgagcccccacatagagtccctactgtggcacccacctagtggagctgtgagaagagggccaccatcctccagaccccagaatggtggattcactgacagcttgtactgtgtgcctggaaaagctgcaaatactcaatgccaaccagtgaaaggagcccctcctttcacctcctggttttattccaggaggggtgttataccctacaaagccacaggagtggagctgtggcctttattctcccaaggccatgggagcccacctcttacatcagcatgacctgcatgtgagacatggactcaaaggagatcattttggagctttgggatttt

SEQ ID NO: 934537 - DNA, 594 bp, Homo sapiens
tcccatatgtcatgtagccttgcttcactcttttttctttctttttgtctgactggattattttaaaagactagtcttcaacttcagaaattctttgttttgcttgatctagtctattgttaaagctgtcagttatcttttgtatttctttcaacgatttcttctcttccaggatttgtgtttggttctttgttatgctgtctrtctctgttgaatttctcattcagatcatgaattgttttcctgatttttttgtattcattatctgtgttctcttatatctccctgagtttctttaatgtcattattctgaaaattttttcaggcatttcatagattttctttttattggaatctgttgctggagaattattgtgcttctttggaggtgttatgtttcctttttcatatttcttgcatccttatgtgactatctgtgcctctgacataaccgtcacttcttccaattttatggattcgcttttataggggaaagaccttttcttatagctgtatctacaatgttcattggatatcacactttggctttgattctgggtaggtacagtgatatagtctgcatatgatttcttc

SEQ ID NO: 934538 - DNA, 572 bp, Homo sapiens
tctggcatgagcatgtctgggaagctctactttgctcttggtgtctcttatcttccgctggaagctgcaggctggcctgggcttgctctcatggtgatagcaggagtgagcgagcacaaatgaatgcacagtttccaagtttttggtcatgcagattaatattccagtggccaaagctagacacaggactaaacccaatattaggggctggagaaatatgctccgattcttcagtgggaggaactgcagagacaaatggcagagtcttggatgcagggaggacttggatccattaatgtaccttaatcatccgcaaccctctaaccaycaatgcaattcaataagtatttgttgaatgcacttttgcctgaatgcttctggctgcagcccaggcaatgggggcctgactagggaggtaccatagcagggactcgatgtcctgcaggtctgcatgtaattgtgtacggccgactccacattggtcatggctgacttgctttgtcctgcgtccccaagggacaatgattggctgattttatttccgatcaattttgacaaagttgttttcagga

SEQ ID NO: 934539 - DNA, 572 bp, Homo sapiens
tctggcatgagcatgtctgggaagctctactttgctcttggtgtctcttatcttccgctggaagctgcaggctggcctgggcttgctctcatggtgatagcaggagtgagcgagcacaaatgaatgcacagtttccaagtttttggtcatgcagattaatattccagtggccaaagctagacacaggactaaacccaatattaggggctggagaaatatgctccgattcttcagtgggaggaactgcagagacaaatggcagagtcttggatgcagggaggacttggatccattaatgtaccttaatcatccgcaaccctctaaccatcaatgcaattcaataagtatttgttgaatgcacttttgcctgaatgcttctggctgcagcccaggcaatgggggcctgactagggaggkaccatagcagggactcgatgtcctgcaggtctgcatgtaattgtgtacggccgactccacattggtcatggctgacttgctttgtcctgcgtccccaagggacaatgattggctgattttatttccgatcaattttgacaaagttgttttcagga

SEQ ID NO: 934540 - DNA, 758 bp, Homo sapiens
tccatccttaactaattacatttacaaagaccctgttttcttccttttttttgagacggagtctcactctgtcacccaggctggagtgcagtggcatggtcttggctcactgcaacctctgcctcccaggttcatgccattctcctgcctcagcctcctgagtagctgggattacaggcgcccgccaccacgcccagctaattttttgtatttttaatagagacagggtttcaccctgttagccaggatgatctcgatctcctgacctcatgatctgcccacctcggcctcccaaagtgctgggattacaggtstgagccatcatgcctggactacaaacaccgtgttttctaataaggccacattctgaggtaccaagtggacatagatttttggaggacactatttatcctatactgggagtgtcctggtacttccagttgccccaggcaaaaggctaggccttctctcctttttctgatgctgaatgtgtttagctatggcagccacgtagtcacattgtaggccatggagaagttatagtacattcacctgtaagtgactgggaacccaactctcagcgggtgaagagtgggatgatccacaggaagcctggagggtgggtggtgtttctggggttggttcattaactgcatgggatcagggctctgggttgtggactctacaattctcttggtttttccttcatggttgcaaaatggctgctgagatctaaacagcgaatcattacccacctc

SEQ ID NO: 934541 - DNA, 758 bp, Homo sapiens
tccatccttaactaattacatttacaaagaccctgttttcttccttttttttgagacggagtctcactctgtcacccaggctggagtgcagtggcatggtcttggctcactgcaacctctgcctcccaggttcatgccattctcctgcctcagcctcctgagtagctgggattacaggcgcccgccaccacgcccagctaattttttgtatttttaatagagacagggtttcaccctgttagccaggatgatctcgatctcctgacctcatgatctgcccacctcggcctcccaaagtgctgggattacaggtctgagccatcatgcctrgactacaaacaccgtgttttctaataaggccacattctgaggtaccaagtggacatagatttttggaggacactatttatcctatactgggagtgtcctggtacttccagttgccccaggcaaaaggctaggccttctctcctttttctgatgctgaatgtgtttagctatggcagccacgtagtcacattgtaggccatggagaagttatagtacattcacctgtaagtgactgggaacccaactctcagcgggtgaagagtgggatgatccacaggaagcctggagggtgggtggtgtttctggggttggttcattaactgcatgggatcagggctctgggttgtggactctacaattctcttggtttttccttcatggttgcaaaatggctgctgagatctaaacagcgaatcattacccacctc

SEQ ID NO: 934542 - DNA, 758 bp, Homo sapiens
tccatccttaactaattacatttacaaagaccctgttttcttccttttttttgagacggagtctcactctgtcacccaggctggagtgcagtggcatggtcttggctcactgcaacctctgcctcccaggttcatgccattctcctgcctcagcctcctgagtagctgggattacaggcgcccgccaccacgcccagctaattttttgtatttttaatagagacagggtttcaccctgttagccaggatgatctcgatctcctgacctcatgatctgcccacctcggcctcccaaagtgctgggattacaggtctgagccatcatgcctggactacaaacaccgtgttttctaataaggccacattctgaggtaccaagtggacatagatttttggaggacactattyatcctatactgggagtgtcctggtacttccagttgccccaggcaaaaggctaggccttctctcctttttctgatgctgaatgtgtttagctatggcagccacgtagtcacattgtaggccatggagaagttatagtacattcacctgtaagtgactgggaacccaactctcagcgggtgaagagtgggatgatccacaggaagcctggagggtgggtggtgtttctggggttggttcattaactgcatgggatcagggctctgggttgtggactctacaattctcttggtttttccttcatggttgcaaaatggctgctgagatctaaacagcgaatcattacccacctc

SEQ ID NO: 934543 - DNA, 758 bp, Homo sapiens
tccatccttaactaattacatttacaaagaccctgttttcttccttttttttgagacggagtctcactctgtcacccaggctggagtgcagtggcatggtcttggctcactgcaacctctgcctcccaggttcatgccattctcctgcctcagcctcctgagtagctgggattacaggcgcccgccaccacgcccagctaattttttgtatttttaatagagacagggtttcaccctgttagccaggatgatctcgatctcctgacctcatgatctgcccacctcggcctcccaaagtgctgggattacaggtctgagccatcatgcctggactacaaacaccgtgttttctaataaggccacattctgaggtaccaagtggacatagatttttggaggacactatttatccyatactgggagtgtcctggtacttccagttgccccaggcaaaaggctaggccttctctcctttttctgatgctgaatgtgtttagctatggcagccacgtagtcacattgtaggccatggagaagttatagtacattcacctgtaagtgactgggaacccaactctcagcgggtgaagagtgggatgatccacaggaagcctggagggtgggtggtgtttctggggttggttcattaactgcatgggatcagggctctgggttgtggactctacaattctcttggtttttccttcatggttgcaaaatggctgctgagatctaaacagcgaatcattacccacctc

SEQ ID NO: 934544 - DNA, 546 bp, Homo sapiens
ggtgaatgttatagctcataaaggttgtgcagacccaaagagtgagcagcagcaagatttactgtgaaaagcaaaagaacaaagctaccacagcacagaatgggacccaagcgggttgcttctactggctccggtggccagcttttattcccttgtttggccccacccacatcctgctgattggtccattttacagagagctgattggtccattttacagagtgctgattggtccgtttttacagagtgctgattggtgcgttttcaaacctttagctagacacagagttctgattggtgcgtttttacagagtgctgattggtgyatttacaaacctttagctagacacatagcgctgattggtgtgtttacaatcctttagctagacataaaagttctccaagtccccacccgacccagaagcccagccagcttcacctctcattacaatgcattatactgagacagccaaatgcctaggcagataaaaagaggtccccagagaatctccagcccgccctacaagtgtttacatcagatgcttt

SEQ ID NO: 934545 - DNA, 588 bp, Homo sapiens
acaaatgcttaatcatgcatccattattacagcatagcagagaatggttccactgctataaaaatgtcctgtgctctgcctattcatcctttcctttcttcctttcctaacccctggcaactactgatgtttttactgcctgtgtagttttgtgttttccaatatgtcatatagttagaattgtattgtatgtagtcttttcatactgatttctcttactgagaaatatgtatttaaggttcatccatgttttttcatggcttgatagctcatttacatttattacaaaatragactctatttaccataatttattcatttacctactgcaggacatcctgcttgcatccaaatttggcaactgtgaataaaactcacattaaaaattgtgtgcgggttttgtatggatgcaagagttcaactcacttggcaaatacataggagtatgattgctgattatatgctaaaaccatatttagttttgaaaaaactgtcaaacttttcaaaaggagttgtactatttgcattcccaccagcaatgactgggagttcctgcttgtccacatatttatctacatttgctgtttt

SEQ ID NO: 934546 - DNA, 574 bp, Homo sapiens
ctgtattgattgactagacaacattattgtgtgtataactcttaactgaaagaatattattttcttaccattttttttacttttctaagtatgtgtgacccactattttaaccatcttatacttcatgtgtttaagttttttattgtgaagtataacatgcataagaaaagttatacaaaacagctgtctgaataatcaattagtattaaacacttayaaccacctatgaagacaagaatggcaacattgtaagtccactaacaaccccctgcataaccagtcttattgatagttgttcccttccattccaggatatacccaatatcctgatatttaaccagtattatgatttgtatggtaattacttaattgcttttaattacatttttacttatataagtagagtctttaagtatgtgttcttgtatgtcttatcagattatttttcttctatgttaaacgtttcctcttgtactttcttttatgtaagactactgctggaagtctgcttttattttataaaaacatattttcaaactttccttgaagaaaaacatactgaaaataaaattt

SEQ ID NO: 934547 - DNA, 574 bp, Homo sapiens
ctgtattgattgactagacaacattattgtgtgtataactcttaactgaaagaatattattttcttaccattttttttacttttctaagtatgtgtgacccactattttaaccatcttatacttcatgtgtttaagttttttattgtgaagtataacatgcataagaaaagttatacaaaacagctgtctgaataatcaattagtattaaacacttataaccacctatgaagacaagaatggcaacattgtaagtccactaacaaccccctgcataamcagtcttattgatagttgttcccttccattccaggatatacccaatatcctgatatttaaccagtattatgatttgtatggtaattacttaattgcttttaattacatttttacttatataagtagagtctttaagtatgtgttcttgtatgtcttatcagattatttttcttctatgttaaacgtttcctcttgtactttcttttatgtaagactactgctggaagtctgcttttattttataaaaacatattttcaaactttccttgaagaaaaacatactgaaaataaaattt

SEQ ID NO: 934548 - DNA, 663 bp, Homo sapiens
aaggctaaaaccctggtttaaggccacttagccaatgaattggactggaacataagcagtccaatttctgagtctaacttttaacccccagtatattgctttaattttaaaaatagactttttaagggcagttttagatttacagcaaaagtgaacaaaaagtgtaaaacaaagagttcccatttacctgtcccccaccccccacacacaatctcttgtactagcaaagtcctgtaccagagtggtacattttttacaattaaatctgaattgacacgttatcaaaccaactacagtttacattaggatttactcttagtgtacattctgtgggttttgacaaatgtataatgacatatattcaccattatagtatatcatacagagtagtttcactgccccagaagtcgtgtgtgttctgcctattcatycttctctcccccttcagccccaggagccactgatctttttactgtctccatagttgtatattttccagaatgtcatatggttggatattgcctgctttttttttgatacaaagtcttgctctgttgcccaggctagagtgtagtggcaccatcatagctcactgcagcctcgaattcataggctcaagggatccttccacctcaggtccccaagtagccaggactacagata

SEQ ID NO: 934549 - DNA, 539 bp, Homo sapiens
ttcccctttcccactgaaagtggagatacggtggtgttattaatgttcttgcaaaggggtgacccctcctgtcttccccaggagttttacaattccagtcaagccactggcctagctttccagggaaattccatccaagttacatagctcagtttcatcctgctgctatctgggcatgtcttagcaacccatggtcatatctttgagctcctccaaagacatagtttgaataggcaatacatgtctataatacacaatccaaaaggatatctagtgaaaagaaagtttccttctagcaactgttcaattttkatcacttttaggattaagtttaacagtatagcccagacactgctcaatgatgctctaattattttaccataacctagttttcatacatgctgggcaatatattaatacaaacttttagaaattcacagttccaataaagagattcttcacagttcccaggagtttaagattcttagattcttataaagttacaagggaccatttcaaaacagggaagtcaactcaat

SEQ ID NO: 934550 - DNA, 784 bp, Homo sapiens
gacggggaccattccagcattgcctaagaatattccatagggggaacagcctggtaaggttagaagatgagccctttttttaaggtgaacctagagaggtggccataccagtttaatctagtcattgtggttataattggggatagaaatgttttagcaagaaagtggtttgtaggttggctggagatggactttgatgtctggctcctcctgtctcttttgagaaacctggtataactggaaatgtggggagccttaggatcaagcatattgaacgtggttttcctttggccagaattaaaatttgattttgcttttctagattgtccaagttgctgtgattatcaaactgaaatgaagtaccattatattataaaataccattatattataaaatatttgctacatagatctgttataacttttctgtactgtttatcaattagtaaatggtattaaatttatttagataatcagctactaaaataaactagtcatgaggaaggacctgttttcattgaatttttcaataatagtgcatttcctggcacataaaaggcattcartaaattgatgaaataataagtaataaagtttaacaaggatctactgataaagttttacttataatgcaccctagcaagtttttatatatagactattttaaaaaagattaatcaagacattaaacctaaagggagatttttttaaatggtttgggaagaaaagcacagtaatatgtatttttaagattaatattgtacaagtatttttattatgtttg

SEQ ID NO: 934551 - DNA, 668 bp, Homo sapiens
aaggaagaggaggacgagtgtaaaaaactaacttcagattctgagtgtgaggaacagctactggaggagattaaagaaaagaaaggaaagctacagtatgttttactagcctgtcggctccaccggctgaattaagtgagtggccacctcctctctctcccctgaatgggtgagaaaatgaattaggtgaaaaasttactgctcctgtagttgcaacattaaaacctggagcaattggtggtgctatacaaaattctattcaaaaagccagatagagccaagggagaccttgaagcatggcaatttccagttactataacccagcaagaaggacagaatatagctaattgggccaactttccttttaagttaccaaaggaattcaagcaagccattagtcattacggcctgaactctccttttgtgcaaactttgttaaaaaatgtggctcttggtaataggttaataccatatgattgggatactttaacaaaatctgttctcactctgtctcagtatttacagtttaaaacttggtgggctgatgaagctcaaactcaggcaagggaaaacacacaagcacagccacctctgcctgtttcttttgaacagttaatgggagttggccctaactggggtcgattacagaatcaagcagtaacggagga

SEQ ID NO: 934552 - DNA, 622 bp, Homo sapiens
acatgcatacacacctaagtgtttatatacaaacatgtaatctttgtatatatatatatatatatgtgtgtgtgtaatatgatctctcaagtttaaatgacagttttatcaatatgtcccatgaggttgacagagacctattaaaaaatctgggaaccattaagcattacttatctgtgtrgtaaggatttcctgatactgagtagccaaaacaataaaacaacatcaacaacatgttactaaagatgataaaaaatttaactgtcatctaatgtcaacatttcttttttatttctaattgataaattataactgtatatatttctggggtataatatgatgttttgatatatgtttgcaatgtagaatggttaaaccaggctagttaacaattccatcatctcctatactttttaaatagtaaagtttcatttttaagagagtcttttatttatctcttacttatactattttgggttataattggcaaactttataaatttcaagtaaaatgaatttatattagtaaaatttgtatttgttttgtaaatactgggatccaggacaaaatttaatttgaaagaagagatgtcttctactaaaaatgtttgcagtcccctgg

SEQ ID NO: 934553 - DNA, 561 bp, Homo sapiens
agagccaaatcatgaatgaactcccatttggaattgctacagaaagaataaagtgcctaggaatacagctaacggagaaatgaaggaccacttcaaggagaactacaaaccactgctcaaagaaatcagagaggacacaaacaaatggaaaaatatctcatgctcatggagaggaataattaatatgatgaaaatggccatactgcccaaagtaatttatagattcaatgacatacccattaaactactgttgacattcttcacagaattagaaaaaagctattttaaaattcatttgaaaacaaaaaaggacctacgaatagccaagacaatyctaagcaaagagaacaaagctggaggcatcacactacccaacttcaaactatactacaaggctacattaatcaaaacagcatggtactggttcaagaacagtcacatagaccaatggaactgaatagagaactcagaaataagactgacaaataaaaccatctgagctttgacaaacctgacaaacctgagaaaaacaagcattagggaaatgattccctattcaat

SEQ ID NO: 934554 - DNA, 727 bp, Homo sapiens
ccaaacaccacttgttcccccaaaacctatggaaacaacaaaagaatatacttcaacacattaaaggtcatatatgacaaacccataggtaacatacctagggggaaagttgaaagctttttctctaagatcaggaataagtcaagggtatccacttttaccacttttattcaatatggtattggagatcttagaacaattaggcaacagaaagaaatgaaaatggccgggcgcggtggctcacgcctgtaatcccagcactttgggaggccgaggtgggcagatcacgaggtcaggagatcgagaccatcctggctaacatggtgaaaccccatctctactaaaaatacaaaaaaattagccaggtgtggtggcaggtgcctgtagtcccagctactcaggaggctgaggcaggagaatggtgtgaatctgagtggcagactttcagcgagccaagttcatgccagtgcactctggcctgggcgacagagcaagactccgtcttaaaaaaaaaaaagtcatctaaatcagaaatgaaattaakttgtccctgtttgcaaatgacatgatcttaaatatagacaactccaaagcccacgtcagaaaaatgattagatctaagaaacaaatcagtaaacttgcaggataccaaattaacataccaaagtcaatagcatttctatacactaatagtgaattatctgaaaaaaaaaatcaataagacaat

SEQ ID NO: 934555 - DNA, 561 bp, Homo sapiens
atgataagaacatttagaaagcaggggttggagggataaagcataaacacaatgcttcattcaataataatgcatattgcaacatattggagttacagaataaaataatgggaataatgatgaacaaagaaaagttcaatgataactaagaaactgcaaatgaaaataatgtacaatgagagtcttaccaggtttccaatgttgagaagagtgttagtttgtttactcattggataatgctccaaggtcagaaaacatacgtttaaaattatgcatatgataaggaaaagatcagtaaatggtgccattataatcctatggacaaactctttcaattctmaccaacagggagaacaattccagatcacgaaagttttggcaaacttataccagtataatgggcatatcttcttggatttttcaagttctgaaatgaaagaatacgaaagttaaacattctggccgggtgcagtggctcatgcctgtaatcccagcactttgggaagccgaggtgggtgaatcacttaagttcaggagttcgagaccagcctggtcaatata

SEQ ID NO: 934556 - DNA, 612 bp, Homo sapiens
tattggctttttcaaccagacaggctttgtctggttcccttaattcaagcctaccctttaaattttaaacgtaccatctacttatgtctacatctgacgctgtcatttagtgtttaatgaactctcaaggctgtgcagtgtagtatttaataagaaatttggaaagatactttttctgggtttaaaccragataaaatttctagggctgccaaaagagcaagaaaaacacaaacagctaatgttctgtagactaggaatggcacataaaagaaatggaaaggaaataaatagttggaacatgaaagaaaattgggaaaataatgaataatatacctaatgctttgcctatgagctcacagggaaaatcctgcaagggatccctcagtcagaccaagaggattttatttttggttttatcattttccaggattttatgtttgaagatctctaacaagaacctagatatattgagaatagtaagttcttgttaatggatgcttaaagtggaatatataatatgttatatattatatacaacatatgtattatacataacatatattataacataatatagtaatataatatataacatgttataatatataggt

SEQ ID NO: 934557 - DNA, 577 bp, Homo sapiens
aaatatttcccctatgtagttttctaattttctccttctttttcttcatggagaaacttctgaaagaataaattttatgtgtttttctacatctaaaactcctattcactgacacctcaactctctaatatggcttcttctcttgttccttagctgaaattactactttttcgttcaccaaggacctttgtattactaaaccaagataaacttatgagttcttatctcacttaaacccattgcaggacatgaccttgtggaacactttctcttttattatgttctctctatcatagtcttccaggacagtaccrtcttctttttattttttcctacttctttaggtactccagcttttttctttctctacccttttctttggtactggtattctccagtttcatcttcaactcttacttcactcaatcctgtaaaattttatgtgtatgtatgaataagttaatatctataaattcaattaccacttatccttatgtttctaaatctctatcgctaaatcaaatttttcttaggttctgctttaccacatatagaatatttatctgaatatccaaca

SEQ ID NO: 934558 - DNA, 587 bp, Homo sapiens
ttctagtattcctaactttgtaaatgacaccaaaagcctgccaagttgtttaagctaaaaactgggacgttttcttagactgcactcttttcttcacctcccaggacattccccttcatccattcatttttttccttgcctttcctcttgtttttcctttcctttcctttctaacagactcrctgtctcactcaggctagaatgcagtgacgtgatcatacctcaatgtaaccttgaactcctgggctcaagcgatcctcccactcagcctcccaagtagctgtgaccacagacacataccaccatgcccggctaatctttttaattttattttcatatttattttttatattcactgtgttgcccaggctggtctcaaactcctggactcaagcaatcctcccacattggcctcccaaagtgctgggactacagactgagccattgcacctggacctaaaggcccataattttaaccttgtaccctgctgcttcctgccactgagtccatagagtctctgccttttcatctgctgtctccatcttgctgcggctgcctcttcctttttcagctgatgtcattctca

SEQ ID NO: 934559 - DNA, 725 bp, Homo sapiens
aggttattgttttttatggttgcatagtattccatggtgcatatgtaccatattttctttatccaattcactgtgcatgggcacccaggttgattctgtatctttggtattgtgtatagtgctgcagtgaacatacaaatgcatgtgtctttttgatagaacaatttattatccttatggtatacaaccagtaatgagaatgctgggtcaagtattagttctgctttaagttctttgagaaatgtctgaactgctttccccagtggctgaactaatttgcattcacaccaacagtgtataagcsttcccttttctatgcaactctgtcattctcacaggagagatagtctatctcattgtggttttgatttgcatttctcagattattagtatgttgagcattttttgatatgtttgttgtcacatgtgtgttttctgttgagaagtgtctgtttgtgtctttgcctattatttaattggattatttgttttttttcttgttcattttcttaacttccttgtagattctgaatattaggcttttgtccaatgcagtttatgaatattttctcccatactgtaggctgtctgtttactctttgaataatttcttttgctgtgcagaagctctttagattgtttaggttccacttgtcaatttttgtttttgttgcaattgcttttggggacttagccataaattatttgccaaagctgaggatgag

SEQ ID NO: 934560 - DNA, 562 bp, Homo sapiens
tagaaggaaaactaagaaacagaaaggacatctacaccaaaaccccatctgtacatcaccatcatcaaagaccaaaggtagataaaaccatgaagatggggataaaacagagcagaaaagctgaaagttctaaaaatcagagtgccagtcaccctccaaagaaactcagatcctcaccagcaatggagcaaagctggacagagaatgactttgacgagttgagagaagaaggcttcagacaatcaaacttctccgagcaaaggaggaagcttgaacccatcacaaagaagctaaaaaccttgaaaaaagattagacraatggctaactagaataatcagtgtagagaagtccttaaatgacctgatggagctgaaaaccatggcacgagaactacctgatgaatgcacaagctttagtagccgatttgatcaatgggaagaaagggtatcagtgattgaagatcaaataaatgaaatgaagtgagaaaagtttacagaaaaaagagtaaaaataaatgaacaaagcctcgaagaaatatgggactatgtgaaaagaccaaat

SEQ ID NO: 934561 - DNA, 581 bp, Homo sapiens
acaacaaaaaaagagaattttagaccaatatccctgatgaagatcgatgcaaaaatcctcaataaaatcgtggcaaactgaatccagcagcacatcaaaaagctcatccaccatgatcaagtgggcttcatccctgggatgcaaggctggttcaacatatgcaaatcaataaacataatccagcatataaacagaaccaaagacaaaaaccacttgattatctcaatagatgcagaaaaggcctttgacaaaattcaacagcccttcatgctaaaaactctcaataaattaggtattgatgggacatatctcaaaataataagagctatctatggcaaacccacagccaatatcatactgaatgggcaaaaactggaagcattccctttgaaaactggcacaaaacagggatgccctctctyaccactcctattcaacatagggttggaagttctggccagggcaataaggcaggagaaagaattaaagggtattcagctaggaaaagaggaagtcaaattgtccctctttgcagatgacaagattgtatatttagaaaaccccatcatctcagcccaaaa

SEQ ID NO: 934562 - DNA, 612 bp, Homo sapiens
agctggtacctggtgggtgcccctctgggacaagcttacagaggaaggaatatgcagcaatttttgctgttctgcagccaacactgcgtaatacccaggcaaacagggtctggagtgaacctccagcaactccagcagacctgaagcagaggggcctgaccgtaaaaggaaaactaacaaacaggaaggaatagcatcaacatcaaaaggatgtccactcagaaaccccatccaaggtagataaatcaaagaccaaggtagataaatccacaagataaggaaaaatcagtacaaaaggctgaaaattccaaaaaccagaatgcctcttctcctccaaggatcacactcctctccagcaagggaacraaactggacggagaataagtttaacaaattgacagaagtaggcttcacaaggtgggtaataacaattcctccaagctaaaggagcatgttctaacccatgcaggaagataagaatcttgaaaaatgttagatgaattgctaagtagaataaccagtttagagaagaacataaatgacctgacggagctgaaaaacagcacaagaacttcgtgaagcatacacaagtatcatagctgaatcaaccag

SEQ ID NO: 934563 - DNA, 635 bp, Homo sapiens
gtgcctgtgctagtgtgaaagcaagaggagtggtagtcagagacagagcagggggagaaggaactgccaaacagggagatggcctactgtgaggtgctggccaaccagggtgagaagggcattgccatgaaggccaaggggatgctggccaggcccagggtatcaatgtgaagctataagagctggcttgggggttttggaacatagggatagtgagcaaggcatccactcatgacattggttacattcacagggttgaacaagcaagtaaacctgaacaaagaatttctgtattaatgataatgagtcagatttcttttttttttttttttgtaactttcattttaaattcaggggtacatgtataggatgtgcaggtttgttacataggtraccatgtgtcatgggggactgttgttgtaccaattatttcatcacccaggtattaagcctagtatccattagttatttttcctgatcctctccctccttccaccctctactctcagacaggccccagtgtctgttgttcccctctatgtgttcctttgttctcatcacttagctcccacttataagtgaaaacatgtggcatttggttttctgttcctgtgttagtttgctaaggatattag

SEQ ID NO: 934564 - DNA, 655 bp, Homo sapiens
aaattacctagtatgacatccaagccaagggtccaaaaactaagtaaatgagaacatagccttcttgtcttctaatgtaaaaaattattagtgctcccaaaagttgtttacatacataaatttttacttttaactgcacaaactctgaagagtataaaaaaagaaatgtaccctgactttttattaaatgtaattgaatctgagggaaaaacactcattttttattgtctaccaaaacaatatgtattatttaatacataaagtaggtaactattaatcattcattttttctacttcatccactcaacttctatttgttacacctaaaatagctaagtcttctaggatatttataaataaactgatatacatgtatgtagtgtatataaaaatactgatgtttacacacattccatcaatgctgagttgtcttccagtatttgtttagaaggtattaaaacttttggttcagtaataaaatactaattgtgtttgctaaaayatgcatcttaagaattataaaccccaagccaggtgcagtggctcacgcctgtaatcccaacattttgggaggccaaggctggcagttcatctgagctcaggagttggagaccagcctgggcaacatggtgaaagcccatctatacaaaaaata

SEQ ID NO: 934565 - DNA, 652 bp, Homo sapiens
atgaaaatcctaatcacatcaaccttctttctatcttccttccttctgacagcaatttactcctacctttaactcagactggataaaatgatctcgtctttcagagcaccctcgttaccttcccatttactctttgcctagttatmcttcccgcttctttagatgtctcatacaatcacccatcctcttccactagctcctaattacctctacaagactctcaatgtaacccactctctgttaaaccagtccaatccttcctggcaaatgactgttggctttgtatctctctatcaacctctgcttatgttgacactcccattcccgcaaaaaagttgggtctttaccaacttaaactaccaccctcattatgaaggaaaagaccctttctgacttctaaatatgcatcattagccaacttccctatctctgataggaccaagactaccctaacaggacatgcatccaatttgcgtccttacttttccaacctcacctattacacaagcatgaaaagcccatacacggcctgtaactatgaataccatcttaactttccaagcccctttatgcatccaaattgcaacctgttaacaggcctgcccctggggcacctactaccgcatcagtgtaattataccctacaacttga

SEQ ID NO: 934566 - DNA, 577 bp, Homo sapiens
ctcagactggataaaatgatctcgtctttcagagcaccctcgttaccttcccatttactctttgcctagttatccttcccgcttctttagatgtctcatacaatcacccatcctcttccactagctcctaattacctctacaagactctcaaygtaacccactctctgttaaaccagtccaatccttcctggcaaatgactgttggctttgtatctctctatcaacctctgcttatgttgacactcccattcccgcaaaaaagttgggtctttaccaacttaaactaccaccctcattatgaaggaaaagaccctttctgacttctaaatatgcatcattagccaacttccctatctctgataggaccaagactaccctaacaggacatgcatccaatttgcgtccttacttttccaacctcacctattacacaagcatgaaaagcccatacacggcctgtaactatgaataccatcttaactttccaagcccctttatgcatccaaattgcaacctgttaacaggcctgcccctggggcacctactaccgcatcagtgtaattataccctacaact

SEQ ID NO: 934567 - DNA, 638 bp, Homo sapiens
tcacatcaaccttctttctatcttccttccttctgacagcaatttactcctacctttaactcagactggataaaatgatctcgtctttcagagcaccctcgttaccttcccatttactctttgcctagttatccttcccgcttctttagatgtctcatacaatcacccatcctcttccactagctcctaattacctctacaagactctcaatgtaacccrctctctgttaaaccagtccaatccttcctggcaaatgactgttggctttgtatctctctatcaacctctgcttatgttgacactcccattcccgcaaaaaagttgggtctttaccaacttaaactaccaccctcattatgaaggaaaagaccctttctgacttctaaatatgcatcattagccaacttccctatctctgataggaccaagactaccctaacaggacatgcatccaatttgcgtccttacttttccaacctcacctattacacaagcatgaaaagcccatacacggcctgtaactatgaataccatcttaactttccaagcccctttatgcatccaaattgcaacctgttaacaggcctgcccctggggcacctactaccgcatcagtgtaattataccctacaacttg

SEQ ID NO: 934568 - DNA, 652 bp, Homo sapiens
atgaaaatcctaatcacatcaaccttctttctatcttccttccttctgacagcaatttactcctacctttaactcagactggataaaatgatctcgtctttcagagcaccctcgttaccttcccatttactctttgcctagttatccttcccgcttctttagatgtctcatacaatcacccatcctcttccactagctcctaattacctctacaagactctcaatgtaacccactctctgttaaaccagtccaatccttcctggcaaatgactgttggctttgtatctctctatcaacctctgcttatgttgacactcccattcccgcaaaaaarttgggtctttaccaacttaaactaccaccctcattatgaaggaaaagaccctttctgacttctaaatatgcatcattagccaacttccctatctctgataggaccaagactaccctaacaggacatgcatccaatttgcgtccttacttttccaacctcacctattacacaagcatgaaaagcccatacacggcctgtaactatgaataccatcttaactttccaagcccctttatgcatccaaattgcaacctgttaacaggcctgcccctggggcacctactaccgcatcagtgtaattataccctacaacttga

SEQ ID NO: 934569 - DNA, 641 bp, Homo sapiens
gatcttcaatctctgatatcctttcttcagcttggttgattcagctattgatacttgtgtatgcttcacgaagttcttgtgctgtttttcagctccgtcaggtcatttatgttcttctctaaactggttattctacttagcaaattcatctaacwtttttcaagattcttatcttccttgcatgggttagaacatgctcctttagcttggaggaattgttattacccaccttgtgaagcctacttctgtcaatttgttaaacttattctccgtccagtttcgttcccttgctggagaggagttgtgatcctttggaggagaagaggcattctggtttttggaattttcagcctttttgtactgatttttccttatctttgtggatttatctacctttggtctttgatttatctacctttggatggggtttctgagtggacatcctttttgatgttgatgctattccttcctgtttgttagttttccttttacggtcaggcccctctgcttcaggtctgctggagtttgctggaggttcactccagaccctgtttgcctgggtattaccagtgttggctgcagaacagcaaaaattgctgcatattccttcctctgtaagctttgtcccagaggggcaccca

SEQ ID NO: 934570 - DNA, 641 bp, Homo sapiens
gatcttcaatctctgatatcctttcttcagcttggttgattcagctattgatacttgtgtatgcttcacgaagttcttgtgctgtttttcagctccgtcaggtcatttatgttcttctctaaactggttattctacttagcaaattcatctaacatttttcaagattcttatcttccttgcatgggttagaacatgctcctttagcttggaggaattgttattacccaccttgtgaagcctacttctgtcaatttgttaaacttattctccgtccagtttygttcccttgctggagaggagttgtgatcctttggaggagaagaggcattctggtttttggaattttcagcctttttgtactgatttttccttatctttgtggatttatctacctttggtctttgatttatctacctttggatggggtttctgagtggacatcctttttgatgttgatgctattccttcctgtttgttagttttccttttacggtcaggcccctctgcttcaggtctgctggagtttgctggaggttcactccagaccctgtttgcctgggtattaccagtgttggctgcagaacagcaaaaattgctgcatattccttcctctgtaagctttgtcccagaggggcaccca

SEQ ID NO: 934571 - DNA, 667 bp, Homo sapiens
caaagtctcactctgtcacccaggctggagtatagtggcatgatcaaggatcaaggctcactgcagcctcgaccttccaggctcaagcaatcctcccatctcagcttcctcagtagctgggactacaggcacacaccaccacacctggataatttttgtttttttgttttctggttttagagacagggtttcattatgttgccttggctggtcttgaactcttggcctcaagcaatcctcctacctcagcctcccaaatagctaagattacaggcaggagccactgtgcctggcaggaatttgagttttcttagargcggcttgtgatctgatgaatatatttaaaatctaatctacactgatacaggggatgaaggaggaggcagcaagaccagttagaaggttactgcaatagcttagatgggagataccagtggtttggatgaagtggtggtggtagaggtggtaagacgtagtcagattttgggtatagtttgaaggtagaatcaacaggacttgctgagcaattggaggtgataggtgaagaaaagaatcaagaataacttcctgggatgggcagactaaagtgggagtggctctggcaatcatccccccagcctgtttcacatggtaacacagatcccccactgtcatttatgtaagaatg

SEQ ID NO: 934572 - DNA, 684 bp, Homo sapiens
gagtgtcctcaagctctgcccacattgacgtccagactgccatgactctctaagaagcaggggcatgtgggccaggccagaaagagtgggggtgatgagacaggacgtatgcctatgatcctctgcaggggagacaggaaggccacaggggatttctggtgtcagtcctggcacccacaggcaagaasagcttaggagattgtgagagctgtgacaggcaggatcccctgcccccaggcttcctttcccacacccattccataaagctgctccctgaggaggcctggtgctggtggcctcgccctctggggttgggaccctggcaggcagtgtggtgcaacggtgtgagaactgaatttgtagtcaggcgaacagtgtcaattacaccctgccccttctgaactatgggatcttgtcctttgtccctctgagccccagtttcctcatctgcaaaatgaagataattttatatagtgacataagagtaatgaaacagaacacctaagacacgccagccctcaacaaaccacctctggcccaaatgccccatctttatctcctgccatggcacccacatatgtcggtatttggtaaagatgggctcttcaatttcaaagcccagtgagggaagagtcttccaagctctgtgaaggagatgcagtcagcgggtaagtgggcaagaaa

SEQ ID NO: 934573 - DNA, 587 bp, Homo sapiens
cagctatgaaaaataaaatacataggaataaattaaaccaaggaggtgaaagatttctacaataaaaaataaaaaattgtccctctattctctcttctctctctttccacggtttccctctgttgccgaggttggacygtactgccttgatctcggctcgccgcaacctccctgcctcgggctcccgtgattctcctgcctcagcctgccgagtgcctgggatcacaggcacgcgccgccacgcttgactggtttttgtatttttggtggagacggggtttcaccgtgttggccgggctggtctccagctcctgacctcgagtgatctgcccacctcggcctccccgaagtgctgggattgcagatggagtctcactcactcaatgctcaatgttgcccaggctggagtgcagtggcgtgatctcggctcactacaacctccacctcccagccacctgcttggcctcccaaagtgctaagattacagcctctgcccggctgccaccctgtctaggaagtgaggagtgtctctgcctggccgcccatcgtctgggatgtgaggagcccctctgccaggccgccccatc

SEQ ID NO: 934574 - DNA, 587 bp, Homo sapiens
acaacagctatgaaaaataaaatacataggaataaattaaaccaaggaggtgaaagatttctacaataaaaaataaaaaatgtccctctattctctcttctctctctttccacggtttccctctgttgccgaggttggacygtactgccttgatctcggctcgccgcaacctccctgcctcgggctcccgtgattctcctgcctcagcctgccgagtgcctgggatcacaggcacgcgccgccacgcttgactggttttgtattttggtggagacggggtttcaccgtgtggccgggctggtctccagctcctgacctcgagtgatctgcccacctcggcctcccgaagtgctgggattgcagatggagtctcactcactcaatgctcaatgttgcccaggctggagtgcagtggcgtgatctcggctcactacaacctccacctcccagccacctgcttggcctcccaaagtgctaagattacagcctctgcccggctgccaccctgtctaggaagtgaggagtgtctctgcctggccgcccatcgtctgggatgtgaggagcccctctgccaggccgcccatctg

SEQ ID NO: 934575 - DNA, 643 bp, Homo sapiens
acattgaataagaaaaaactcaatgcttttcctctaaaatatgggaacaagacaaggatgcccaccttcaccactcttattcaacccagtactggatgtcctagccagagcaatcaggcaagagaaagaaataaaggatatccaattaaaaaagaggacgtcaaattgttcctgtttgtggatgacatgatcgtatatataaaaaactctaaaggctccaccaaaaaaactgtaaaactaataaacaaatttagtaaaattgcaggatacaaaatcaacacacayaaaaatcagtagtttctgtacaccaataatgaactatctgaaaaataaatgaaaaaacaaatcctatttacaacagctatgaaaaataaaatacataggaataaattaaaccaaggaggtgaaagatttctacaataaaaaataaaaaattgtccctctattctctcttctctctctttccacggtttccctctgttgccgaggttggaccgtactgccttgatctcggctcgccgcaacctccctgcctcgggctcccgtgattctcctgcctcagcctgccgagtgcctgggatcacaggcacgcgccgccacgcttgactggtttttgtatttttggtggagacggggtttcacc

SEQ ID NO: 934576 - DNA, 692 bp, Homo sapiens; identical to SEQ ID NO: 927775

SEQ ID NO: 934577 - DNA, 584 bp, Homo sapiens
tacatctcaaaaaaaaaagaaagaaggaaattggtcactaatgtgcaacgacaggccgactcattcagaaatgaatgcagaaaccccatgcctctgtgcaggtaaggctgtctgtccctgcccacccaccacagcactcaagaaggcagcaccgaaaggttccatcgggtcctttcacttccatttccatgagtccaatttagaccgtgctctggaacaagtggaaaactatcttgaagcatgtttttggagttctttaatatccactgggatgactcacagttatgcatcatagaggccaggtacttttatttctataaaaggaatatgtytgagagttgggaaggccagcctagagctcaaaagcctggtgatcaggctagaaaaacaagggagaaactggctgtctccagctcaggcaaagtggttttaaggaccaaaagctggtttaaaatgtcacacttgagttgcaatttattttccagcatagtcccatgaatctagtcaacatctaaatactactcagtagtgctaatgggtgtacctcttaaaagtctgtttaacaagctattcaaaacactctg

SEQ ID NO: 934578 - DNA, 619 bp, Homo sapiens
ctgtcttattttaagaaattgccgcagccaccccagccttcaagcagccaccaccctgagcagtcagcagccatccacatcgcggcaagaccctccaccagcaaaaagattacgactctctgaaggctcagatgatgttagcactttttcttttcttttttttttttttagcataaagtatttttaaattaaggtgtgttcatttttaaagacaaatactaccacacatttaataaactacagtataggataaatgtaccatgtaaygtatagtgtaaacataatttttatatgcactaggaaaccagaaagttgtgtgactcgctttattgcagttgtctggaaccaacccacagcatattgagttgtattgtaaaaggtatttcttaatgtgggttaaggtcacaaagtttgaaacccagtaggttagatgatgtcttagttccctttcatcgcacctcattttgtattgttttgaatccttagctcagacccccagccagtaaatcatctgctctgagacaacactaagaataaaagaagctgggaagcttttaacctgacctaagcattgtcttggaaacagtaaaatgcagccccttccagacctcttttctca

SEQ ID NO: 934579 - DNA, 553 bp, Homo sapiens
gtgcaaacgacaggccgactcattcagaaatgaatgcaagaaaccccatgcctctgtgcaggtaaggctgtctgtccctgcccacccaccacagcaactcaaagaaggcagcaaccagaaaggttccatcggggcctttcacttccatttccaatgagtccaaatttagaccgtgctctggaacaaagtggaaaaactatcttgaagcatgtttttggagttctttaatatccactggatgactcacagttatgcatcatagaggccaggtacttttatttctataaaaggaatatgtytgagagttgggaaggccagcctagagctcaaaagcctggtgatcaggctagaaaaacaagggagaaactggctgtctccagctcaggcaaagtggttttaaggaccaaaagctggtttaaaatgtcacacttgagtttgcaatttattttccagcatagtcccatgaatctagtcaacatctaaatactactcagtagtgctaattgggtgtacctcttaaaagtctgtttaacaagctattcaaaacactctg

SEQ ID NO: 934580 - DNA, 746 bp, Homo sapiens
atatctgaaatcttggggttaaattggagagaaaaaatatcaaacaaaagaaaaaaataaatttgaccttgtcaaaatttaaaacttctattcatcaaaagacataaagaaaacagtcaagccacagactaggtgtaatatctcaatacrtatatccgacaagagacttgcatctagaatgtataaagaatttctatgacccaattatagctatcagggatatacaaattaaaaccaaaatgaaacatcactacacaccgattggaatggttaaaaaggaaaaatactgacaacaccaatatttgtaaagacaggaggtaccagaactctcattcattatattcataaattgacaaatataaaaactgctatagtagggcagtcttccttagaaagggattgtgggcatgacagagaacaatattaatctgtccattatattccttaactgtaaaatggagaccatatgttccaccagcttcacttggtaattatgatacatggctattaagagactcaaatgactccatttcatcaactaatatgccctgtcaattctacttctaaagtatcccatgttctatccaatgtcataccactatcataatttaagtgttcataactctctataatatttcaataatctaactggtctcaatgcctgtagtagaaattgcagattggctcacccaatgtctgttccctaggaaggctgagaagcttttaaaaaaagaccttcatttccc

SEQ ID NO: 934581 - DNA, 743 bp, Homo sapiens
atcttggttcaccgcaacctctgcctcctgagttcaagtgattctcttgcctcagcctcccgagtagctgggattacaggcatgcattaccatgcctggcaaattttgtatttttagtagagacagggtttctccatgttggtcaggctggtcttgaactctcgacttcaggtgatccgcccacctcggcctcccaaaatgctgggattacaggtatgagccaccatgattgaacttttatacagacatttctctgatagaatcctcctygtatattagccaagtgaactgatgtaatggcacctggctgtccctggacagtcccctccctcagccaagtgggcacaggactgccttcctaccctcttccccagtgacttgctggaggattgtgacaaactaatcgatcaactaccatcacgttgtcaggatttcagtattgcttactgcctggaatctcaaagctggttcttcgtctgattgaaatatttatcttgctagaaatttcacacatattagcaattttaactttcaaaacccctacaaagacactattatagagggggacaatgaggttcgatgttgttgaatgaatcgtctaaaatatcatgcctggtaatgttaaaaggaatgggatttaaaaccatattcatatgacagagccatgatgtcatggctttagctattgaagacttcacaacgcaggggtagaaaacaggttcctctctcagtgcctgggtgct

SEQ ID NO: 934582 - DNA, 479 bp, Homo sapiens
caattaaaagaaacagagtggcaagcaggagaaaaaactagcacccattggtatgctgtcttccagagacctgtttcacatgtaatgacacctataggctcaaaataaagaggcggagaaaaatctacccagaaaatgggagacagaaaaaatgaggggttgaaatcctagtttctgaagcaaaacagactttaaacaacaaagatcaaaatagacaaagaagggctttacgtagtggtaaagggttcaactcaacaagatctacctctcctaaatacatatgcatccaagrcaggagcactcagattcaaaaagcacattgtttgggacctgcaaagagacttggattcccacaaaatagtagtgagaggctttaacactccactgatgatataagacatattattgagataaatacttaacaaagatattcagaatctaaactcagcactggatcaaatggacctgatagacatctg

SEQ ID NO: 934583 - DNA, 612 bp, Homo sapiens
ttggttcaagcacctcttgagaaaaattaaacttgccctcttttttttcttacctcttctacgattgaagaacctgggtcattttaattactttgaattattaactattgtattgagccagaatcttttaacatctgccctctagcattgcaggaaaaaaaaaagaaaaacaagctttctttcatttgaaattagcaattgaaaacagcactcctgcccctagttttatttttttatgttgtttttcattcagaaattctgcggtgtttaggccattgctgcatatttggagtctttaccacattgctctctctagtaatstgcactttttaccacattgctcttaaggacatgttccagtttgccagaatccttccagatgtccagtggctggagctgagtacagtagtatataatctaatgggctcatattaaagattagctctaatctccgttactgtatggactcaacttctctgaatgaaacctttgattgtaattgcttttgtggagaaggggtagacctatcaagtccttagatctcattgccattgatcctattgataacgtaaaaccgtaaaaactgcagtcctgacttaaacatagttttca

SEQ ID NO: 934584 - DNA, 632 bp, Homo sapiens
accaagtacatcctgggccagcgcctggaggagctggactgcatggagaccagaacagctactggggccgtggtgaggggccccagtgccatctgttggtcccatgcacattgactgagcacctactgtatgccagtgaaagagaataaaagggacaaagaggacttcgtggagttgagcaggcctgcctcccccaccgtgaagcccactcctaggctggcctagtgctcctttccttggtgggcagggggtgggcaaggatgctgtgccctgaggccctgtgccacctcaccagccctccggcccgcaacttcagtacatggtggtgatggtcggctaccagacttccttttcaaactgggtctgtggacaaggagtatgaggtgggactgtgtcctgcctgcccarcctgaccacagcctctctgctaatggcaccctgggagggcaggtggctgccatggccggttgtggcgctatctgcagccttgccctggtctgcggctgagtgctgcccatgcccctcatagtttaaggtccatgggaagacctattacaagaacatcttgaacagcatctgcttcagcatccagctctcagtcaagaagactgggcaggagatgacaagtccat

SEQ ID NO: 934585 - DNA, 565 bp, Homo sapiens
  misc_feature 504: n = A,T,C or G
ctcaaccacagggacccctctctctgcagggctggcccctggcaaggcccgggacaggaaggcctacacggtcctcctatacggaaacggtccaggctatgtgctcaaggacggcgcccggccggatgttacggagagcgagagcggtgagtgccgyggggtggccctgagggggaccagggtgccaaggatggggggctggcgggaaggggtcacctcttgtctgcctggaactgaaacttcctactgaaactgaaccctccaaccagggagccccgagtatcggcagcagtcagcagtgcccctggacggagagacccacgcaggcgaggacgtggcggtgtttcgcgcgcggcccgcaggcgcacctggttcacggcgtgcagagcagaccttcatagcgcacgtcatgccttcgccgcctgcctggagccctacaccgcctgcgacctcgccccgcgccggcaccaccgacgccgcgcacccggggccgtccgtggtccncccgttgcttcctctgctggcagggaccttgctgctgctggggacggccactgctccctga

SEQ ID NO: 934586 - DNA, 565 bp, Homo sapiens
  misc_feature 504: n = A,T,C or G
ctcaaccacagggacccctctctctgcagggctggcccctggcaaggcccgggacaggaaggcctacacggtcctcctatacggaaacggtccaggctatgtgctcaaggacggcgcccggccggatgttacggagagcgagagcggtgagtgccgtggggtggccctgagggggaccagggtgccaaggatggggggctggcgggaaggggtcacctcytgtctgcctggaactgaaacttcctactgaaactgaaccctccaaccagggagccccgagtatcggcagcagtcagcagtgcccctggacggagagacccacgcaggcgaggacgtggcggtgtttcgcgcgcggcccgcaggcgcacctggttcacggcgtgcagagcagaccttcatagcgcacgtcatgccttcgccgcctgcctggagccctacaccgcctgcgacctcgccccgcgccggcaccaccgacgccgcgcacccggggccgtccgtggtccncccgttgcttcctctgctggcagggaccttgctgctgctggggacggccactgctccctga

SEQ ID NO: 934587 - DNA, 623 bp, Homo sapiens
acccaactatggccaaactttggtacgttgttaggaaagatcaatgcttttttttttcttttctttttttgagacagagtctcgctctattgcctaggctggagtgcagtggctccatcacctctcactgcaacctccgcctcccaggttcaagtgattctcctgtctcagcctcccgagtagctgggattacaggtgcctgccaccaygcctggctaatttttgtagttttagtagagacgaggtttcaccatgatggccaggctggtcttgaactgctggcctcaagtatcctcccacctcagcctcctgagtagctgcaactacaggtgcgcaccaccatgtttggctaattttttattttttggtagagataggggtctcattatgtggcccaggcttgtcttaaactcctgaactcccatcttggcttcccaaagtggtgggattacaggcatgagccactgcacctggcccaagttaatattttttgccacaaaagtaaaaatgtaattttataatgttgctatggtttgaatgttggtgtttctccaaaattcatatgttagaacctaatacccaatgctacagtcttaagagatggggtctttggggaagtgatt

SEQ ID NO: 934588 - DNA, 674 bp, Homo sapiens
gaagtaaaacgtacccaactatggccaaactttggtacgttgttaggaaagatcaatgcttttttttttcttttctttttttgagacagagtctcgctctattgcctaggctggagtgcagtggctccatcacctctcactgcaacctccgcctcccaggttcaagtgattctcctgtctcagcctcccgagtagctgggattacaggtgcctgccaccacgcctggctaatttttgtagttttagtagagacgaggtttcaccatgatggccaggctggtcttgaactgctggcctcaagtatcctcccacctcagcctcctgagtagctgcaactacaggtgcgcaccaccatgtttggctaattttttattttttggtagagataggggtctcattatgtggcccaggcttgtcttaaactcctgaactcccatcttggcttcccaaagtggtgggattacaggyatgagccactgcacctggcccaagttaatattttttgccacaaaagtaaaaatgtaattttataatgttgctatggtttgaatgttggtgtttctccaaaattcatatgttagaacctaatacccaatgctacagtcttaagagatggggtctttggggaagtgattaagtcatgtgctctgccctcatgaatgtgattagtgctc

SEQ ID NO: 934589 - DNA, 606 bp, Homo sapiens
ccacccaaccaaatactgcgtttttccaatagtcttagcaaatggcacaccaaaagattatatcccactcctggcttggcaggtcccacacccacagaaccttgctcactgctagcgtggcaatctgagatggacctgcaagcagcagctggcagggggaggggtgtccgccactgctgacgcttgagtagataaacaaagtgctcaggaagctagaattaggtggagcccaccrcagctcagcaaggcccgctgcctctgtagactccacctctaggggcagggtatagctgaacaaaaagcaatagaaacttctgcagacttaaacgtccccttctgacaggcctgaagagagcagtagttctcccagcatggtgtttgagattggagaacggacagactgcctcctcaagtgggtccctggccgccatgtagcctaactgggagacatctcccagcaggggcagaatgacacctcatacaggcaggtgcccatctgggatgaagtttccagagaaaggatcaggcagcaatatttgctgttctgcagcctccactggtgatacccaggcaaacggcgtctggagaggacctccagcaacctcc

SEQ ID NO: 934590 - DNA, 604 bp, Homo sapiens
ggaatcagtcatgccttctctgcttctggaaaactcctcttagtgcacaccataagttgccatttgttgtagacatttttatttgtagcctcttgagaagatagctgagttaagggaaaagctgtggagtctgcatgctgwcaccatattctacttcctacctgtgtgacccagggctagttgtttaattctctgtgcctcagtttcctcaccagaaaaataagaaaataacagtgtctgtgtcactggatgcacatatggatatgtgagttaatatggatgaagcgcttagaacagtgtggacactgagcagtgcctaaccttgtgctgtctagcacagtatcatacaatacaatatggactactcaacaatgtctctggatgaaagaatccattgaaattaaaaaataatgtggccaaatggaaaggttcttctgttgaacacaggaaattctattaaagttgaaaatttccaaactctttagggctctcattattaatgatcaattgtagaaataaaattctaattgtcattttctcacttctaataataaaattcagccaaacgaaagaaaaaagaaagaaagagattgatgggaaagaa

SEQ ID NO: 934591 - DNA, 604 bp, Homo sapiens
ggaatcagtcatgccttctctgcttctggaaaactcctcttagtgcacaccataagttgccatttgttgtagacatttttatttgtagcctcttgagaagatagctgagttaagggaaaagctgtggagtctgcatgctgtcaycatattctacttcctacctgtgtgacccagggctagttgtttaattctctgtgcctcagtttcctcaccagaaaaataagaaaataacagtgtctgtgtcactggatgcacatatggatatgtgagttaatatggatgaagcgcttagaacagtgtggacactgagcagtgcctaaccttgtgctgtctagcacagtatcatacaatacaatatggactactcaacaatgtctctggatgaaagaatccattgaaattaaaaaataatgtggccaaatggaaaggttcttctgttgaacacaggaaattctattaaagttgaaaatttccaaactctttagggctctcattattaatgatcaattgtagaaataaaattctaattgtcattttctcacttctaataataaaattcagccaaacgaaagaaaaaagaaagaaagagattgatgggaaagaa

SEQ ID NO: 934592 - DNA, 604 bp, Homo sapiens
ggaatcagtcatgccttctctgcttctggaaaactcctcttagtgcacaccataagttgccatttgttgtagacatttttatttgtagcctcttgagaagatagctgagttaagggaaaagctgtggagtctgcatgctgtcaccatattctacttcctacctgtgtgacccagggctagttgtttaattctctgtgcctcagtttcctcaccagaaaaataagaaaataacagtgtctgtgtcactggatgcacatatggatatstgagttaatatggatgaagcgcttagaacagtgtggacactgagcagtgcctaaccttgtgctgtctagcacagtatcatacaatacaatatggactactcaacaatgtctctggatgaaagaatccattgaaattaaaaaataatgtggccaaatggaaaggttcttctgttgaacacaggaaattctattaaagttgaaaatttccaaactctttagggctctcattattaatgatcaattgtagaaataaaattctaattgtcattttctcacttctaataataaaattcagccaaacgaaagaaaaaagaaagaaagagattgatgggaaagaa

SEQ ID NO: 934593 - DNA, 604 bp, Homo sapiens
ggaatcagtcatgccttctctgcttctggaaaactcctcttagtgcacaccataagttgccatttgttgtagacatttttatttgtagcctcttgagaagatagctgagttaagggaaaagctgtggagtctgcatgctgtcaccatattctacttcctacctgtgtgacccagggctagttgtttaattctctgtgcctcagtttcctcaccagaaaaataagaaaataacagtgtctgtgtcactggatgcacatatggatatgtgagttaatatggatgaagcgcttagaacagtgtggacwctgagcagtgcctaaccttgtgctgtctagcacagtatcatacaatacaatatggactactcaacaatgtctctggatgaaagaatccattgaaattaaaaaataatgtggccaaatggaaaggttcttctgttgaacacaggaaattctattaaagttgaaaatttccaaactctttagggctctcattattaatgatcaattgtagaaataaaattctaattgtcattttctcacttctaataataaaattcagccaaacgaaagaaaaaagaaagaaagagattgatgggaaagaa

SEQ ID NO: 934594 - DNA, 592 bp, Homo sapiens
ccagcaatctcactgctggacatctacctcccaaaaaagaaattaatataccaaagggatatcctgcacttgcatgtttattgcagcactattcacaacagcaaaaacatggaatcaaccaaagtgttcaacaatggaagaatagattttttaaatgtgatatatatatgcatacaatggaatagtattcagccataaaaaagaatggwgtcatgtaattggtggcaacatggatggaactggaggttattatcttaagtgaaataagtcaggcccaaaaagacaaatatcacatgttcccacttacatgtgggagctaaaaaacttggtaacacaaaggtagagagaggaaagatagataacaaaaactatgaaaggtgagtggggggagaagggaggatgaaggcaaaggtgttaaaaggtacaaatatacagtttgatagaaggaataagtttaatgtctgatagcacagtagggtgactatagttaacaaaaatgcattgtactcaggtgacaaacatccttaataccttggcttgatcactatgtatttcatatatgtaacaacatttcatatgtatcctataaatt

SEQ ID NO: 934595 - DNA, 592 bp, Homo sapiens
ccagcaatctcactgctggacatctacctcccaaaaaagaaattaatataccaaagggatatcctgcacttgcatgtttattgcagcactattcacaacagcaaaaacatggaatcaaccaaagtgttcaacaatggaagaatagattttttaaatgtgatatatatatgcatacaatggaatagtattcagccataaaaaagaatggagtcatgtaattggtggcaacatggatggaactggaggttattatcttaagtgaaataagtcaggcccaaaaagacaaatatcacatgttcccacttayatgtgggagctaaaaaacttggtaacacaaaggtagagagaggaaagatagataacaaaaactatgaaaggtgagtggggggagaagggaggatgaaggcaaaggtgttaaaaggtacaaatatacagtttgatagaaggaataagtttaatgtctgatagcacagtagggtgactatagttaacaaaaatgcattgtactcaggtgacaaacatccttaataccttggcttgatcactatgtatttcatatatgtaacaacatttcatatgtatcctataaatt

SEQ ID NO: 934596 - DNA, 512 bp, Homo sapiens
agcactgaaacaaccaaatggtggaaggagtatcagtagcctatggagacatttttagaggaaataaaaaagcaaaaattcagataaattataatttattcccataaagctacatcaaatgtgcctgcctctcctgcctccccttctacttccactacctctttcactttgctgtctctgagagcaaaccctcatcttcctcatccgcctcagcctagttaaagtgaagacaacaaggatgaagacttttatgatggtccacttctgtttaatgaatagtaaatatattktattttccttatgattttcttaataatatttttctttctctgtcttactgtattgtaagaatacagcagccaggcatggtggctcacatctaatcccagcaatttggaaggccgaggtgggtggatcacttgaggtcaggagttcaagaccaccctggccatcatcaaaaattagccgcatgtggtggcacatgcctgtaatcccagctactcagggagctg

SEQ ID NO: 934597 - DNA, 618 bp, Homo sapiens
ctggttgttaatcttaactttagccaagacaaaattccaattcagctacttatctagggatggatctcaggctgaagactgctctctaccatctgaggtgcagaaaaaactcaaactctcttccttgttgaaagtgagctcaaagtccagaaaggaattacctgtttgaaatcatcatggaagcagaaaaacttgccttccctgttggaagaaagtaaaactccaaaaaataaaaggagttaaactttagatctcaaccaaattttgggagatcagggattctccagagggagagcttccaggcctcagcaaattttcctattggtttgagccataaagaagctcaagctggtaccacacacccataggaactttgtcaaagctcagagatacctccactcagaatccctttgttgttaccaattctgaatgcaaaatatctgagacaggtctyagttaatttagaaagtttattttgccaaggttaaggatgcacccatgacacaccctcaaggagtcctgagacatgtgcccaaggttgttgggggtatggtttgcttatatacattttagggagacataagacatccatcagtatgtgtaagatgtacattggct

SEQ ID NO: 934598 - DNA, 575 bp, Homo sapiens
ccacagacgtactggccacctactgttacatgtgaaggaacactcctaggtatttccccacttttctcccatggcttcagcatctggcccaaccacagaaacacagacatatccccactcagttctgatcttgtttggctcattgttctagtctgctgggatcttyttgaatcccaactctgtcatctgatggtatctcttccaacttcatgtcatcctctgggaatctgataagtacaagttctatattattacaaacattgataaaaatgtggagtggggtagtgctaagacacacagaataccatgtgaaatctccctccctatttacatggactctttaacaagccccattttggtgacattctgttgcctaggctgtatctttccacctcttccaataggggaacataaaacgatcttgtcaaatgctttgcaaaagtccaaatgcaccatgcccactgcatttccctcatcaagctggcaaataaatgaataatgctggcaaatggaagaatataattagattggcaagacttgtttttagcacactgatgccaaatggtcatgattta

SEQ ID NO: 934599 - DNA, 575 bp, Homo sapiens
ctcctatatcaataagtgtagtcttccttttgtcctccccctcatcctacccgtcttctttacctccctttttgcctttttttgtcttcttttattttttaaggctaacttttaaaaaaagagagtgacttgccttgaacaaatcagaactagtatccaaattataaaagatttgtgccaagagccttggagaaatctattgtactcctttgataaaacaggcagattttccttaatcaagtaaatgtgtgaccacgcccccccggcaaaagaagtcattagaaaacagattatgtggaacatatttttatggtaaggttaaaagaataccactaattccaagaggtagtaggtgtcaaaatatttttcatataattacttgggaaatgatcaaaagaaagaatgaggaagaaactaaaraatactcttggctctacttctataacattgattgcatcctcaactaaacttgcttctacatttgctaataagagtattttattgcatctaacctgctttctaacaggtaaggcctgttgcaacttccagtattcgttcctcaccatttcataccc

SEQ ID NO: 934600 - DNA, 557 bp, Homo sapiens
ctgtaccctgccaagccacaggggtggaacgtcccgaggctgtgggagcccacccgttgcatcagtgtgccctggatgtgagacatggagccgaaggagattattctggagctttaggatttaacgactacctgctgggtttcagacttgcatgggacctatagccccattggccaatttctccccttggaatgacagcatttaccyaatgcctgtactgccattgtatcttggaagcaactaacttgttttttattttacaggcttataggcaggagggacttgccttgtgtcagatgagacttttgacttggacatttgagttaatgctggaatgagctaagactttgggggactgttcgggaggcatgattgtgttttgaaacgtgagaagaacatgacttttgggaggggccggggcagaatgagatggtttcgctctgtgtccccactcaaatctcatgttgaacattgggattatatattatatattatattaaatatatattatattatatacattatatatataaagctcagaaggctttttgctattt

SEQ ID NO: 934601 - DNA, 557 bp, Homo sapiens
ctgtaccctgccaagccacaggggtggaacgtcccgaggctgtgggagcccacccgttgcatcagtgtgccctggatgtgagacatggagccgaaggagattattctggagctttaggatttaacgactacctgctgggtttcagacttgcatgggacctatagccccattggccaatttctccccttggaatgacagcatttacccaatgcctgtactgccattgtatcttggaagcaactaacttgttttttattttacaggcttataggcaggagggacttgccttgtgtcagatgagacttttgacttggacatttgagttaatgctggaatgagctaagactttgggggactgttcgggaggcatgaytgtgttttgaaacgtgagaagaacatgacttttgggaggggccggggcagaatgagatggtttcgctctgtgtccccactcaaatctcatgttgaacattgggattatatattatatattatattaaatatatattatattatatacattatatatataaagctcagaaggctttttgctattt

SEQ ID NO: 934602 - DNA, 657 bp, Homo sapiens
gaggcatgattgtgttttgaaacgtgagaagaacatgacttttgggaggggccggggcagaatgagatggtttcgctctgtgtccccactcaaatctcatgttgaacattgggattatatattatatattatattaaatatatattatattatatacattatatatataaagctcagaaggctttttgctatttatatgggataattataaattatttcataagaatcaaggaattaaggatcaatacttaaaagactatgcattgagcaaacaagaccaagatctattaacaatgaaaagagaccaggtgcggtcactcatgcctgtaattccagcactttgagaggccaatgcrggtgaattacctgaggtcaggagtttgagaccaccttggccaacatggtgaaaccccatccctattaaaatacaaaaaaaaaaaaaatccaggcatggtggcaggcacctgtaatcccagctactcaggaggctgaggcaggagaattgtttgaacctgggaggcagaggttccagtgagccaagatcacaccattgcactccagcctttgcattgcattctagcactctagcctgggcaacaagaggaaaactctgtggaaaaaaaaaataaaaaggaagaaagaaagaaagaaaggaga

SEQ ID NO: 934603 - DNA, 616 bp, Homo sapiens
attgcctggagaaagaaaggttcttccaagagaaaacttaaccaaagaggaggatcagaatggtgagcccgatgcagagagaaggatagctggaagagctaaggaagacccagtgcagattcatgagatatgctttttttttttttttttttgagagggattccgctctgtcccccaggctgagtgcagtggcgtggtatcagctcactgcaagctccgcctcccaggttcacgccattctcctgcttcagctccccagtagctgggactacaggtgcccgccaccacacccggctaattttttgtatttttagtagagatggggtttcaccacgttagccaggatggtctcaatcttctgacctcgtgatccacccrctttggcctcccaaagtgctgggattacaggcgtgcagcctatcctggctgagatatgctgattctaacccaacttccttatcatcacatttgaatgctagaaattagagattctgcctacaattcgaaagatctgctcaggaatataaccttttaaaatggaagtaactttggtttaggatctgtttaccaagttgagtgttacagaagactgttgttttctcacttcattagaaag

SEQ ID NO: 934604 - DNA, 460 bp, Homo sapiens
taaatagggctgtgttcttcatttggctcttagctagaatattattggtatatagcaattcaactcattttgtacattggttttgtatcctgaaactttgctgaatatgtttattagttctagaagcatttctgcagagkttttaggattttctagatatagtatagaatcatatcaccggcgaaaagagatagtttgacttttcatatttggatatcttttatttatttatcttgcctgattgttctggagaactagacagccacaaaataatagtaacaggcttcaagactctactgacagtgttagacagcatcaaagcagaaacctaacaagtaagtcctggacttaaatttgacactcaaccaattggacctgatgctacttttcttccacctattgtatggaatcagtctacctcagctatagtgcaaattttggtgagcttaccaatcttttt

SEQ ID NO: 934605 - DNA, 666 bp, Homo sapiens
tagaacaaacacatagttttagtcttcagttctattaatgtgttgtgtaacatttataggcttatgtattacttaaaaaaatagactaattaaattaagagtaattgagcaaagagagatttgcaaatcagggagccaccagaagtagaatagttccagagcagttctggggctgccacatggtttartaacatttatgaacacaaagggaaagtgatgtaccaaaaatggaaatgaggcacagtggccacctgtgactgtctgaaactcagctgctgtgattagctgagattccgctccttgttacaagaatagtttgaagtctgtttacacacccagttaggttatagttaaatatgtatgaagaagccctttggccaaatgtatatgtaaggaagcagctttaggctaaacttaatttaacagttgttcagtcatttttgcattccagggataaatcctattatatcattgtgaattttttatgtgctattgaattaatttttctagtattttgttgaggatttttgcatgtatgtttattagggacgttggcctgtaattttcttttcttgcagtgtctttgcctcattttgatgtcagggtaatgctgtccttgtaaaatgaatttggaagtattctattttcttgaatctttagaagagt

SEQ ID NO: 934606 - DNA, 639 bp, Homo sapiens
acattccttccagcagtgtcaagtattccttccaattttgccagtgtttattatttatttgtttgttgtgagacagagcctcactctgtagcccaggctggagtccagtggcatgatctctgctcactgcaacctccgcctcccaggttcaagtgattctcctgcctcagcctcccaagtagctgggattacaggcacccaaccaccacggctggctcatttttgtatttttaatagagacagggtttcaccatgttggtcaggctggtcttgaactcctgmcctcaggtgatcttctcacctcggcctccctaagtgctgggattacaggcatgagccaccggacctggcctattattattattattattattattatattagccatcctaacaggtgcgaagtgctataccattgtggtttctgcatgtacgtattttgtgaatatatgttttaataagccaattacaaatttgaatcagagaagaccataggaatacaaaatttagagaattttaatttataaaaagggaaggctatgttcttcaaattttgtaagttacttttttattcatacaaagtattttatgtatttatggggtacatgtatttgttcaatgcatagaatgtgtcaagtca

SEQ ID NO: 934607 - DNA, 639 bp, Homo sapiens
acattccttccagcagtgtcaagtattccttccaattttgccagtgtttattatttatttgtttgttgtgagacagagcctcactctgtagcccaggctggagtccagtggcatgatctctgctcactgcaacctccgcctcccaggttcaagtgattctcctgcctcagcctcccaagtagctgggattacaggcacccaaccaccacggctggctcatttttgtatttttaatagagacagggtttcaccatgttggtcaggctggtcttgaactcctgacctcaggtgatcttctcacctcggcctccctaagtgctgggattacaggcatgagmcaccggacctggcctattattattattattattattattatattagccatcctaacaggtgcgaagtgctataccattgtggtttctgcatgtacgtattttgtgaatatatgttttaataagccaattacaaatttgaatcagagaagaccataggaatacaaaatttagagaattttaatttataaaaagggaaggctatgttcttcaaattttgtaagttacttttttattcatacaaagtattttatgtatttatggggtacatgtatttgttcaatgcatagaatgtgtcaagtca

SEQ ID NO: 934608 - DNA, 739 bp, Homo sapiens
atatgtagacctatatgcaaaatgtaaaacaaaaaaagtttgagaagaagaaaacataagagaaaatctagtgactctgggtttggcagtgacttttgaggtacaccaaaaatgtgatccgtgaaagaaaaaaattggtaagttggacttagttaaaattaaaaacttcctctctgaaaaagatgctattaagaggatggaaaggcaagctacagactgagagattgtatttgccaaacacatatctgayaaatgactggtatccaaaatgtaccaaacaacgcttaaaactgaattttaagaaaacaacttaactaaaaaaatcagcaaaacatctgaacagacacctcataaaagaagagataaagatgggtgggtgcagtggctcatgcctgtaataccagcactttgggaggccaaggtggggggatcacctgaggtcaggagtttgagaccagcctggccaacatggtgaaaccccgtctctactgaaaatacaaatattagccaggtgtgatggcatccgccagtaatcccagaaactcgggaggctgaggcaggagaattgcttggacctgggaggcggaggttgcagtgagctgagattgtgccactgcactccagcctgggcaacagagcaagactctgtctcagaaaaaaaaaaaaaagaagaaagtcatgcacagagagggaagaaggccagccacctgagggtggcggcagagtgtggagttatggg

SEQ ID NO: 934609 - DNA, 769 bp, Homo sapiens
ttaattcttatgaaatgcctttctatatttccagggatacttctttccttgaagactcatattgttagaggtattcaagctttattcagcttgatgtttgaactttgtattttctactcttttacattctacctatatgtatctttatatttaatatatttagatatactggatctggaatttttatccagtttgactcgataagggattcgcttatttgatggaatgaacttattaatatgtttgratctaagtctgccatattgatgcttttttctatttgtctcttgccctttttccttctttatttcttcctttaaaataacattgaagaatattttcactgggtatagaattctaagttttattcaatcagcatgttaaatattttattccatcagcttctttttctatttttttctaataagaaatcagccgtcattcttatctttgttcctttggttgctcttataattttttcatcacttttggtttttaggagtttgagaataatatgctaaggtgtggtttctctcatatgtatctgcttgtggttttctgagattcttagatctattggttgatcattttattcaaatttggataaatttcagtcagtatttttaatatattttttctgcctcattatctcttttcttttcttttgagactttcattatatgtatgttagagctcttgatattggcccacagattatcaagactttgtttattgttttagttctttcttctgtcaatcgtttttactg

SEQ ID NO: 934610 - DNA, 579 bp, Homo sapiens
cagagttgagtacttgcatagagacagaccatatgttccataagacttaagtatttactatgtggacattaaacaaaagtttgctaatcactgctctaaaccattataaatggtaatataaaccaaatagcctacaccaaaaaacaacaatcattatgaaacactaagaaaacaaaaccactaattattaagcaacagaccttcacagccaactcttcacttggccatctctttttttttttttttttttkggggagacagagtctaactgtgtcacccaggctagagtgcagtggcatgatctcggctcactgcaacctctgcttcctgggttcaagctattctcctgtcccagcctcccagtgcctgtagcctcccatgcctgtagctgggattacaggcatatgccaccaggcctggctaatttttgtatttttagtaaagacaggatttcactgtgttggtcaggctggtctccaactcctgacctcaggcgaccccccctgcctcggcctcccaaagtgctgggatgacaggcatgagccactgcacccagcccacttggccatctttcaatag

SEQ ID NO: 934611 - DNA, 400 bp, Homo sapiens
aagaacaaagcttccacaccatggaaggggacccgagtgggttgccgctgctggctctggtggcctgcttttatttgcttatttggccccacccacatcctgctgattggtccattttccagagagctgattggtccattttacagagtgctgattggtccattttgacagaatgctgattggtgcatttacaatcctttagccagacacagagcgctgattggggmatttacaatcctttagctagacagaaaagttctccaaatccccacccgattagctagacatgcagagtactcattagtgcgtttacaaaccttcagctagacacagagtgctgattggtgcatttacaatcctttagctagacagaaaagttctccaagtccccacccctctg

SEQ ID NO: 934612 - DNA, 776 bp, Homo sapiens
cccatgtgtctatttttgatttggttgcttgtgcttttaaggtcttatattaaaaaaaaatctttcccagaccactgttctggagcacttccctaatgtttcttctagtttcagagttttgggggttagatttgagacagtaatctattttgagtgtaggttgtgtatatattgagagatatggatcagtttcattctgctgacttatagttatccagcaccatgggagcaacactacttatcaaagatgctgtcctttccccattgtatgttctaggtaccttcatcaaagatgatttggctgtaaatgcatggatttatccctgggttctttattgtgttccattggtctatgtgtctgttttttatgccagacaatgctgctttaaatactacagttttggaataaattttgaaatccaggtagtgtgatgcctccagctttgtttttttttttttycccacaggattgttttggttatttggggtcttttatggttccatacaaattttaggattgtttcttctatttctgtgaaaaatatcattggcattttgatagagattgcactgaatctgtagattgctttggatagtatggacattttagcaatattgattctttcaattcatgagcatgaaatgttcttttcatttttcgtgtgtcctgtttaatttctttcattagtgttttaccattttcctggtaaagatcttttactttctgggttaaatatatttgtaggtattttatattctttgtagctcttgtaaat

SEQ ID NO: 934613 - DNA, 776 bp, Homo sapiens
cccatgtgtctatttttgatttggttgcttgtgcttttaaggtcttatattaaaaaaaaatctttcccagaccactgttctggagcacttccctaatgtttcttctagtttcagagttttgggggttagatttgagacagtaatctattttgagtgtaggttgtgtatatattgagagatatggatcagtttcattctgctgacttatagttatccagcaccatgggagcaacactacttatcaaagatgctgtcctttccccattgtatgttctaggtaccttcatcaaagatgatttggctgtaaatgcatggatttatccctgggttctttattgtgttccattggtctatgtgtctgttttttatgccagacaatgctgctttaaatactacagttttggaataaattttgaaatccaggtagtgtgatgcctccagctttgttttttttttttttcccacaggattgttttggttatttggggtcttttatggttccatacaaattttaggattgtttcttctatttctgtgaaaaatatcattggyattttgatagagattgcactgaatctgtagattgctttggatagtatggacattttagcaatattgattctttcaattcatgagcatgaaatgttcttttcatttttcgtgtgtcctgtttaatttctttcattagtgttttaccattttcctggtaaagatcttttactttctgggttaaatatatttgtaggtattttatattctttgtagctcttgtaaat

SEQ ID NO: 934614 - DNA, 738 bp, Homo sapiens
atgaatgcatagagagcaagttctgtagactgggaagtgcagaaatgggtgagcccctagggtgggtgctgtaagggtcggaggaggacccccccatcccacccggtgtgtggtgtgggaagactttctggagcggagacgtgagagctgagtcctgcgggatgggccggacctcactggggaagaaggaagggaarggcctactgggacgaaggaacagcatgagctaaggaacagaagtttgaaatatcatggaacctgtggggcattatcaggcatgggcagagatgacattggcacccaggccttctgtttcctgatcttgtgttctagtcagaacagaatttatcccagctttctggaagaagttgctcctgttattttacttacaatactctcttccatttatttatttatttatgagacggagtctcgctctgtcacccaggctggagtgcggtggcgccatctcggctcactgcaagctccacctcccaggttcatgccattctcctgcttcagcctcctgagtagctgggactacaggcgcctgccactatgcccggctaatttttcgtattttttagtagagacagggtttcaccgtgttagccaggatggtctccatctcctgacctcgtgatctgtctgccttggcctcccaaagtgtggggattacaggcgtacaggcgtgagccaccacgcccgtcctatttatttattttttcttgagacaga

SEQ ID NO: 934615 - DNA, 738 bp, Homo sapiens
atgaatgcatagagagcaagttctgtagactgggaagtgcagaaatgggtgagcccctagggtgggtgctgtaagggtcggaggaggacccccccatcccacccggtgtgtggtgtgggaagactttctggagcggagacgtgagagctgagtcctgcgggatgggccggacctcactggggaagaaggaagggaaaggcctactgggacgaaggaacagcatgagctaaggaacagaagtttgaaatatcatggaacctgtggggcattatcaggcatgggcagagatgacattggcacccaggccttctgtttcctgatcttgtgttctagtcagaacagaatttatcccagctttctggaagaagttgctcctgttattttacttacaatactctcttccatttatttatttatttatgagacggagtctcrctctgtcacccaggctggagtgcggtggcgccatctcggctcactgcaagctccacctcccaggttcatgccattctcctgcttcagcctcctgagtagctgggactacaggcgcctgccactatgcccggctaatttttcgtattttttagtagagacagggtttcaccgtgttagccaggatggtctccatctcctgacctcgtgatctgtctgccttggcctcccaaagtgtggggattacaggcgtacaggcgtgagccaccacgcccgtcctatttatttattttttcttgagacaga

SEQ ID NO: 934616 - DNA, 738 bp, Homo sapiens
atgaatgcatagagagcaagttctgtagactgggaagtgcagaaatgggtgagcccctagggtgggtgctgtaagggtcggaggaggacccccccatcccacccggtgtgtggtgtgggaagactttctggagcggagacgtgagagctgagtcctgcgggatgggccggacctcactggggaagaaggaagggaaaggcctactgggacgaaggaacagcatgagctaaggaacagaagtttgaaatatcatggaacctgtggggcattatcaggcatgggcagagatgacattggcacccaggccttctgtttcctgatcttgtgttctagtcagaacagaatttatcccagctttctggaagaagttgctcctgttattttacttacaatactctcttccatttatttatttatttatgagacggagtctcgctctgtcacccaggctggagtgcrgtggcgccatctcggctcactgcaagctccacctcccaggttcatgccattctcctgcttcagcctcctgagtagctgggactacaggcgcctgccactatgcccggctaatttttcgtattttttagtagagacagggtttcaccgtgttagccaggatggtctccatctcctgacctcgtgatctgtctgccttggcctcccaaagtgtggggattacaggcgtacaggcgtgagccaccacgcccgtcctatttatttattttttcttgagacaga

SEQ ID NO: 934617 - DNA, 771 bp, Homo sapiens
aggggccctgggctggagcaggaaacagtccctagagatctgcgcagacaagtcaaaaaaggagaaatcacaacgtgacaatgagttcctcagttacatttctgagcacctgccaaatgccagggataacgctgggtgctgtgctgtcaacgacaaagaagatacggtcctacccctaaaaagcgacggtgggaggcatgtgaacaggtcgtcactgtccataggatcgaactgcgactgccttccagcacgcatgcttctggagaatagaggagaggaactcgcttctgcttggaggaacaggagcagggaacactggaggctccaagtaaagaatgagtaggtgcgtcccaggcaggaaagggatgggaggggaatggcaatgtgaagggagcaattgcaaaggctgaagtccagatgaggtcaaatgtgcttggggagaggcaagggkgtgtgtgtgtgtgtgtgtgtgtgtgtgtgtgtgtgtgtgtgtgtgtgatggttaacataagaaaagaagtttaagaaataagaagcctctagattgtgacgggctttttcttccatgctaaggactgtggtctacgaagaatgcagggtgctgaggtgggggttgtggatgtggtcaggggtataggaagctggccaaaggataagctgtgatgattttataatgactcaggaaagagagcccctaaactatgacaatggcagtcagcacctcaccctaaaagaatgtgggaagacaatgtatggaccgaggcattggag

SEQ ID NO: 934618 - DNA, 762 bp, Homo sapiens
tctcaaaaaaaaagaaggagaaggagaaggagaagaagaagaaagaagaagaaaaaagaaaagaaaaatttatttcaaactgtaaaaaaatttcaagattaattatttaaaatgaatatttgccaatacatttaaagctgacaatgggtagtatattctcattcatcttttacaaatgctgctctgatatttgaatttttaaaacatctcttttgagtacctgtggactttcatttttggcctttaattttattggaacacacacaggcaggaaccacgttgtaggcaagaacacgtaagtgcttagctgtagggaggccaaaattgttctagactgaaatgtgtagtaaaagaacrtattactcaaatatattttataacttttacatttgcctttgtttttcaaatataaggacattacaaaaactgcagatagaatcagatagtaaaaattattatagcccagaagtcagaatggcagtcttctatgcctaggtctttatgaccttagctaaagtcatttaacatctccagattagttcctttatttaaaaaaaagcaatgtggaggttaaactagatgaggtccactgttttgaagtgtgttggcattttaagattttgagataaaaacatctttaaaatggtgactctctgctgtcatgtttaaaaggaaaattatttatgtggaataagcataaatatgctatgatgtgaaacatgcccaaggtcctaatttttccggtgtttaattattgaaacc

SEQ ID NO: 934619 - DNA, 455 bp, Homo sapiens
cagagatacaaagaggagctggtaccattccttctgaaactattcccatcaatagaaaaagagggaatcctcccgaattcattttatgaggccagcatcatcccgataccaaagcctggaagagacacaacaagaaaagagaattttaggccaatatccctgatgaacatcgatgcaaacctcctcaataaaatactggcaaaccgaatccagcagcacatcaaaaagcttcaaagttggcttcatccctgggatacaaggctggtacaacctacayaaatccataaaggtaattcatcacataaacagaaccaaagagaaaaaccatatgattatcttaatagatgcagaaaaggcctctgacaaaattcaaccaccttcatgctaaaaactctcaataaattaggtattgatgggacgtatctcaaaataataagagctatttatgacaaacc

SEQ ID NO: 934620 - DNA, 593 bp, Homo sapiens
gttccctgtagttctatacgcccaaagattttatgtctttgtcagatacatagtttgtgactatcttctccaattctgtaggttgtctgtttgctccgttgagaatttcttttgctgtgcagcagctttttagtttaactaagtctcacttctctatttttatttttgttgcaattgcttttcgtgacttagccagaaattccttgccaaggctgatgttgagaagagtatttcctagattgttttcaagaatttttatagtttgaggtattacatttaaataattctattaaaaactttttaaatgttagatttaggaggtacatgtgtaggtttgttacatgaatatgttgcataatgctggggtttgggctyctattgaacctgtccttcaaatagtgaacatagtatctaataggtaattgttcaactcttgccccagccctctctttcttcttttgaagtccccaatgtctattgttttcatctttgtgtccatatgtacccattttttagctcctacttataagagaacttgcagtatttgatttgattttctgtttctgcattaattcacttaggataatggtctc

SEQ ID NO: 934621 - DNA, 593 bp, Homo sapiens
gttccctgtagttctatacgcccaaagattttatgtctttgtcagatacatagtttgtgactatcttctccaattctgtaggttgtctgtttgctccgttgagaatttcttttgctgtgcagcagctttttagtttaactaagtctcacttctctatttttatttttgttgcaattgcttttcgtgacttagccagaaattccttgccaaggctgatgttgagaagagtatttcctagattgttttcaagaatttttatagtttgaggtattacatttaaataattctattaaaaactttttaaatgttagatttaggaggtacatgtgtaggtttgttacatgaatatgttgcataatgctggggtttgggcttctattgaacctrtccttcaaatagtgaacatagtatctaataggtaattgttcaactcttgccccagccctctctttcttcttttgaagtccccaatgtctattgttttcatctttgtgtccatatgtacccattttttagctcctacttataagagaacttgcagtatttgatttgattttctgtttctgcattaattcacttaggataatggtctc

SEQ ID NO: 934622 - DNA, 622 bp, Homo sapiens
ttccttcatttcaaccttggtgaatctgacaattacgtgtcttggggttgctcttctcaaggagtagttttgatgtgttctctgtatttcctgaatttgagtgttggcctgccttgctaggttgacgaagttctcctgggtaatatcctgcagagtgttttccaacttggttccattctccccatcactttcaggtacaccaatcaaatgtaggtttggtcttttcacatagtcccatatgtcttggaggctttgttcattccttttcatttattttttctctaatcttgtcttcacactttatttcaytgagttgatcttcaatctctgatagcctttcttctgcttgatcgattcagctgttgatacttgtatatgcttcacgaagttctcatgctatgtttttcagctccatcaggtcatttatgttcttctctaaactggttattctagttagcaattcatctaaccttttttcaaggttcttagcttccttacattgggttagaacatgctcctttagctcagaagagtttgttattacctaccttctgaaggtaggtaatatcaaaattcatcaaactccttctccatccagttttgttcccttcctgcgaggagt

SEQ ID NO: 934623 - DNA, 603 bp, Homo sapiens
gtgtcaggcgtaccctactgagagatgtctccaagttagactacataggggcagggacccacttgaggaggcagtctgtccattctcagagctcaaacaccatgctggagaaccactgctcccttcagagctgtcagacagggacgtttaagtctgcagaagtttctgctrtctttgttcagctatgccctgccccttgagttgcagtctacagaggcaggcgggcctcattgagctgcagtgtgctccacccagtttgagcttcctggctgctttgtttacctattcaagcctccgcaatggtggacgccccttctgcagccaggcttgacaccttgctgttcgatctcggactagcagtgagcaaggctccgtgggcgtgggacccactgagccaggcgtgggatataatctcctggcgtgtggtttgctcagaccattggaaaaatgcagtgtttacgtggcagcgtcctgattttcccagtacagtctgtcactgcttcccttggctaggaaagggaaatcccccaaccccttgcacctcccgggtgaggcaatgccccgccctgcttcagcacaccctctgtgggctgcacccacttt

SEQ ID NO: 934624 - DNA, 725 bp, Homo sapiens
gctctcttcaaagctgtcagacagggatatttaagtctgcagaggttactgctgtctttttgtttgtgtgtgccctgctcccagaggtggagcctacagaggcaggtaggcctccttgagctgtggtgggctccacccagttcgagcttcccggctgctttgtttacctaagcaagcctgggcaatggtgtgcgcccctcccccagcctcgctgccgccttgcagtttgatctcagactgctgtgctagcaatcggcgagactccgtgggcrtaggaccctccaagccaggtgcaggatataatctcctggtgtgccgctttttaagcctgtcagaaaagtgcagtattcaggtgggagtgacccgattttccaggtgccgtctgtcacccctttctttgactaggaaagggaactccctgacaccttgtgcttcccgagtgaggcaatgcctcaccctgcttcagcttgcgtgcagtgtgctgcacccactctcctgtgcccactgtctggcactccctagtgagatgaacccagtacctcagatggaaaagcagaaatcacccatcttctgcgtcgctcatgatgggagctgtagactggagctgttcctattcagccatcttggcttcttcccccccagttttgagttttttaaccattaagttgaagattgttgttgggcaaaaagcataagaaaaagcacacaaaaatctttctattttt

SEQ ID NO: 934625 - DNA, 725 bp, Homo sapiens
gctctcttcaaagctgtcagacagggatatttaagtctgcagaggttactgctgtctttttgtttgtgtgtgccctgctcccagaggtggagcctacagaggcaggtaggcctccttgagctgtggtgggctccacccagttcgagcttcccggctgctttgtttacctaagcaagcctgggcaatggtgtgcgcccctcccccagcctcgctgccgccttgcagtttgatctcagactgctgtgctagcaatcggcgagactccgtgggcataggaccctccaagccaggtgcaggatataatctcctggtgtgccgctttttaagcctgtcagaaaagtgcagtattcaggtgggagtgacccgattttccaggtgccgtctgtcacccctttctttgactaggaaagggaactccctgacaccttgtgcttcccgagtgaggcaatgcctcaccctgcttcagcttgcrtgcagtgtgctgcacccactctcctgtgcccactgtctggcactccctagtgagatgaacccagtacctcagatggaaaagcagaaatcacccatcttctgcgtcgctcatgatgggagctgtagactggagctgttcctattcagccatcttggcttcttcccccccagttttgagttttttaaccattaagttgaagattgttgttgggcaaaaagcataagaaaaagcacacaaaaatctttctattttt

SEQ ID NO: 934626 - DNA, 747 bp, Homo sapiens
gagtgttaacagggaaatgtatagcactaaacaccaacaacaaaagggaatatttcaaattaacaacctaatattacaactgaaagcatcagagaagcaagagcaaaccaaccccaaagctagcagaagattagagataaccaaaatccaagctgagctgaaggaaataaagacatggaaaaccattcaaaagatcagtgagcccagagtagtttttctgaaaaaattgatgagatagataggctgctagctaaactaataaagaagaaaagagaagatygaaataaacacaattagaaacaacaaaggaaatgttaccactcaccacacagaaataaaaataaccatcagagactactatgaacacctctaagcacacaaactagaaaaccttaaaaagatggataaattcctggacaatataacctccaaaaactaaaccaggaagaatttgattacctgaacacaccaaaaatgagatctgaaattgaacaaataataaataccctaccaaccccccaaaaagcccaggatcagatggatttagagctaaattttaccatatgtacaaagaagatctggtgtcatttctactgaaactaattttaaaaattgagaaggagggactcctcccaactcattcaatgaggccggcatcattctgataccaaaacctggcagagacacaacaaaaacagaaaacttcaggccaatattcttgatgaatattaatgcaaaaatccttaa

SEQ ID NO: 934627 - DNA, 747 bp, Homo sapiens
gagtgttaacagggaaatgtatagcactaaacaccaacaacaaaagggaatatttcaaattaacaacctaatattacaactgaaagcatcagagaagcaagagcaaaccaaccccaaagctagcagaagattagagataaccaaaatccaagctgagctgaaggaaataaagacatggaaaaccattcaaaagatcagtgagcccagagtagtttttctgaaaaaattgatgagatagataggctgctagctaaactaataaagaagaaaagagaagattgaaataaacacaattagaaacaacaaaggaaatgttaccactcaccacacagaaataaaaataaccatcagaractactatgaacacctctaagcacacaaactagaaaaccttaaaaagatggataaattcctggacaatataacctccaaaaactaaaccaggaagaatttgattacctgaacacaccaaaaatgagatctgaaattgaacaaataataaataccctaccaaccccccaaaaagcccaggatcagatggatttagagctaaattttaccatatgtacaaagaagatctggtgtcatttctactgaaactaattttaaaaattgagaaggagggactcctcccaactcattcaatgaggccggcatcattctgataccaaaacctggcagagacacaacaaaaacagaaaacttcaggccaatattcttgatgaatattaatgcaaaaatccttaa

SEQ ID NO: 934628 - DNA, 816 bp, Homo sapiens
gaagtggagtcttgaaatggtgtcttgaaagccactgtataaacttctgactcttatcttagttagatgggaagccacttaaatttaatgttgagctaagtagtaacatgataagcattgcatttttacgggagcttctatttctttcattggttcaaaaatgaatgcgtttatatttgaaaatagtgtgtagggctgtaaaggaaaatgtaagtagaccaatttgaccaattagtagactatagcaatactgcaagtgggagatgctggtggcctgggccttagtggtagcaggagaggaactaataagtgattgaaatttagatatgttaaataggagcagatagaagttgctggtgtattgtgtgtggtcatgggacaaagggaagagtcatgactgaaaccaaggttgaggcttgagcaacttgaggaggggactaggatttattgaaatggaagacttaagcagtagaagggctgtgtgcaggagagaaaacaggagttgaatttgccatatttgagatggcgattaggcattccaatagtgattgtgaagaggtaattggataaagaagtatggagtttggaaagaggtctgagctggaaatataaattttggatttatcagtgtaagatggtwtttaaaactatgagatgacatgagattgttaagggagtgaatgcaggagaaaagagaagaggagaaggcctgaagttaatgaagtggatttatttgtggagactgagcaagagtagcagaaacgtataaagggaatcaagagagaatggttttctggaaatccagtgaagatatat

SEQ ID NO: 934629 - DNA, 664 bp, Homo sapiens
aattctcgctctgtgttaatatcttgtttttctgcagtacaaaaagcagttgcagcagccggtttagttattgccccagaaaaaatccaaacttcttctccttatcactatttaggaatgcagctagaagacaaggttattaagcgccccccccccaccaaaaaaaatcattgttcccctcacccgattacaagtccaacaggcttttgcaacctgcatcgcttggcaagtacatttggcaactttcccgggtataattgataatcactatcctaatgtaaaattatttcagttccttcctcacttcttggattttrcctaacattactagaaacaccccattggctgaagctgtcactgtttttactgatgcttcctgtaatggccgagcagcatatacaggaccaagagaacgtgttcttaatacaggagctatttcagcacaatgagctgagctacttgctgttatggctgtccttgaagatttccctgaaccagttaacattctttctgacttggcgtatgtagcacatgttgctcgcaatattgaaactgccttaatcaaatttctgcctaatgataacctattctttctttttcaaaggttttagtctgtgctcaaagcaaggtcttctcctttctacattactcgcattcaggccca

SEQ ID NO: 934630 - DNA, 602 bp, Homo sapiens
cccctataactctcaaggacaggccttggtggaacgagccaataaaacactcaaagatcaacttcgaaaacaggacactaaaacagagggatgctgccactcctcatgctcagttaaatctggctccttttacactaaatttcttaarcctagcaagaaatcaaccttttacagtggcagaacaacatttcactggaagtaaatttgatccacaaaaaggaatgcgggtatggtggaaggatgcaactaacaaataggaattaggcacagtcgtaacatggggtaggggttttgcttgtgtttccccaggaaaaggactacagcccatgtgggtctcccccaccgacaactgaaattgcaccataactccaaagatgaaacgttcccagaaacaaaaggcaaagacccctcaaaaaccgaggaggaaatttcgcctcctgacacataaacttcatgacctcgacattgagacaaaatctcgctgtgtgacctacaacaccactcgttcaactccaccaacatggggtcaaataaaggtcttatcccatcacacagaaaatttattaaaagaaaaaggaatcccaaaaacgaccagtaatata

SEQ ID NO: 934631 - DNA, 613 bp, Homo sapiens
cttccataaaaccagtctctagcgccaaaaaggttgaggactgctggcctagagagaaaccattccaaagtggagcaggacacttgtgggctccaggggaggaaaggaactgatgaattacgaatgtgtttaactgtttgagggggatttttgagagctaacagaaaagcctaagaataataatgatacatacattggtggggaatgagggaaggtggggggaggaccaaacaaaattagtaattattaacacaagaaaaaawttttttaaaggaaatgtgatgggccaggcatggtggttcacgcctgtaatcccagcactttgggaggccaatgcagacggatcatcaggtcaggagttcgagaccagcctgaccaacatggtgaaacctcgtctctactaaaaaatacaaaaaaattagctaggcacggtggcgcgcacctgtaatcccagctactcaggaggctgaggcaggagaatggcttgaacccaggaggcagaggttgcagtgagctgagattgtgacactgtactccagcctgggtgacagagtgagactctgtctcaaaaaaaaaaaaaaaaaggaaatgtgatgataataatatagggctc

SEQ ID NO: 934632 - DNA, 625 bp, Homo sapiens
gaatgactttgacaagttggcagaagtaggcttcagaaggtcggtaataacaaacttctctgagctaaaggaggatgttcgaacccattacaaggaagctaaaaaccttgaaaaaagatgagacggatcactagagtaaatggtgtagagaagaccttaaaggacctgatggagctgaaaaccatggcatgagaacgacgtgacgcatgcacaagcttcagtagctgattcggtcaagtggaagaaagggtatcagtgattgaagatcaaatgaatgatatgaagcgagaagagaagtttagagaaaaaagagtaaaaagaaacaaagccttcaagaaatatgggactatgtgaaaagaccaaatctacatttgattggtgtacctgaaagtgacagagagaatgaaascaagctgaaaaacacgcttcaggatattatccaggagaacttccccaacctagcaaggcaggccaacattcaaattcgggaaatacagggacatcacaaagatactcctcgagaagagcaacctcaagacacatagttgtcagattcaccacggttgaaatgaaggaaaaaatgttaagggcagccagagagaaaggttgggttacccacaaagga

SEQ ID NO: 934633 - DNA, 623 bp, Homo sapiens
tggagtgaggcggtaaagtgaggggcagcagggctgtgtgtgcatgggtgtgttacctatcacattctgctgctcagatgcagttatggagttgagtggcaatttggatatattcagggtttatgttttgccctgaagagctcagttgagggtgagagaagcacagctctttagagttttggcactggagtaataataaccttgggccttgaaatctaagctgagtacggatcaaagtgaggctaagaaaggaaaygagggatgaatagatcaatgtattggaggtcctggggcagttgaggagctgttgaactgagagcactagactgattaaagtaaaaagatagcatgtggtagtcaaagaagggagaagttgaaattgagtttatgagttattagtaatggcatgatatagtatagcacgtgactgaatgtttctatgtaaaggtagatttagaagacaaggccatgggagagaggaggtaaaggcagtgagaagccagaatactggatgcatcatccagatgtttcaactatctatcgttgcaaagcaaactcctaaaaacttagggaggggggagggatagcatttggagatatacctaatgttaaatgacgagtta

SEQ ID NO: 934634 - DNA, 728 bp, Homo sapiens
tttgctcgttagttgatgcagtttcatcctagccttgatggtctttacaatttggcatgtttttgcagtggctcgtactggttgttcctttccatgcttagtgcttccttcaggagctcttttagggcaggcctggtggtgacaaaatctctcagcatttgctcgtctgtaaagtattttatttctccttcagttatgaagcttagtttggctggatatgaaattctgggttgaaaattcttttctttaagaatgttgaatattggcccccactctcttctggcttgtagagtttctgccgagagatccgccgttagtctgatgggcttccctttgtgggtaacccgacctttctctctggctgcccttaacattttttccttcatttcaactttggtgaatctgacaattatgtgtcttggaattgctcttctcgaggagtatctttgtggcattctctgtatttcctgaatctgaatgttggcctgcctcgctagaytggggaagttctcctggataatatcctgcagagtgttttccaacttggttccattctccccgtcactttcaggtacaccactcagatgttgatttggtcttttcccatactcccatatttcttggaggctttgttcatatctttttattcttttttctctaaacttctcttcttgcttcatttcattcatttcgtcttccatcactaataccctttcttccagttgatc

SEQ ID NO: 934635 - DNA, 531 bp, Homo sapiens
ctaacaaagggcctcaatcctctgtacagcctgccttccaactaatgggccagggattcaaatgtccttcatagataaggaatgaatctccaggttggccactcccagattccttagctcagaactctgaacacacattcttcttagatcataggcacattctgagggtatgctgaagtgattgctgccaagtacctctgccacacaggttataccacccttgaacaattcttccrcagcaaatgcagtgagaacagcagccaatgctcagaaaccaggttatacgagtaacttgttggaaggaaagcttttcctctgccagggtgaatccagtggttgggggcctgtatattaactgacaatggacagattaacaggaaaaaaggtttgcttatgcattaaaggagttcaggaaatgccactataaaatatgccccttcagtgtgttgacatttcatactgagggcacttgggggacagtggatgtaggcagaggctttctctgggctccccttatgtgtctaaaaacag

SEQ ID NO: 934636 - DNA, 531 bp, Homo sapiens
ctaacaaagggcctcaatcctctgtacagcctgccttccaactaatgggccagggattcaaatgtccttcatagataaggaatgaatctccaggttggccactcccagattccttagctcagaactctgaacacacattcttcttagatcataggcacattctgagggtatgctgaagtgattgctgccaagtacctctgccacacaggttataccacccttgaacaattcttccgcagcaaatgcagtgagaacagcagccaatgctcagaaaccaggttatacgagtaacttgttggaaggaaagcttttcctctgccaggktgaatccagtggttgggggcctgtatattaactgacaatggacagattaacaggaaaaaaggtttgcttatgcattaaaggagttcaggaaatgccactataaaatatgccccttcagtgtgttgacatttcatactgagggcacttgggggacagtggatgtaggcagaggctttctctgggctccccttatgtgtctaaaaacag

SEQ ID NO: 934637 - DNA, 711 bp, Homo sapiens
  misc_feature 335: n = A,T,C or G
agctgtgtttcattagaaggatccatgaagtagttgggtaaagcagtgaatgatctaaaaatcatggccgggcgcagtggctcacgcctgtaatcccagcactttggaaggctgagacgggtggatcacgaggtcaggagatccaaaccatcctggctaacacggtgaaacccgtctctactaaaaatacaaaaaaattagccaggcgtggtggcgggcgcctgtagtcccagctactcsggaggctgaggcaggaaaatggcgtgaacccgggaggcggagcttgcggtgagcggagatcgcaccactgcactccagcctgggcaacagatgtntctccgtctcaaaaaaaaaaaaaaaatctattaagaaaacttcatattagtctatattttgctattgttgatttatttgaatggtttgagacattggtcttattctattttgtatttaataacaatagacttaaagtatactgagtgccctttcaaatgaattgagtttatattaattcaataaacataccagaaagagagaagatcaaggattcttttactcttaaatgatattttcaaaaaataatcaggctaaaatgcatttgaagtttgtttttcagtcaatatgaaaaaatctgtggtgataagacagggacatatttagctgtttgactcaaggcagcagaagttgaaggttgaagtgtagtcaaggtta

SEQ ID NO: 934638 - DNA, 711 bp, Homo sapiens
  misc_feature 335: n = A,T,C or G
agctgtgtttcattagaaggatccatgaagtagttgggtaaagcagtgaatgatctaaaaatcatggccgggcgcagtggctcacgcctgtaatcccagcactttggaaggctgagacgggtggatcacgaggtcaggagatccaaaccatcctggctaacacggtgaaacccgtctctactaaaaatacaaaaaaattagccaggcgtggtggcgggcgcctgtagtcccagctactccggaggctgaggcaggaaaatggcgtgaacccgggaggcggagcttgcggtgagcsgagatcgcaccactgcactccagcctgggcaacagatgtntctccgtctcaaaaaaaaaaaaaaaatctattaagaaaacttcatattagtctatattttgctattgttgatttatttgaatggtttgagacattggtcttattctattttgtatttaataacaatagacttaaagtatactgagtgccctttcaaatgaattgagtttatattaattcaataaacataccagaaagagagaagatcaaggattcttttactcttaaatgatattttcaaaaaataatcaggctaaaatgcatttgaagtttgtttttcagtcaatatgaaaaaatctgtggtgataagacagggacatatttagctgtttgactcaaggcagcagaagttgaaggttgaagtgtagtcaaggtta

SEQ ID NO: 934639 - DNA, 673 bp, Homo sapiens
ctgctggcttatttggtagaggtgggtccctgattgggcaggtgacatgctccaaacacaagtcagccaccgcaggagctgcatgcacactcagtacacacggcacttctttggacagagggctctggggccccatcccacatttgaggctcaggggaccggttttcacccgtaaggctccaggcagtagcccaagtatctcaagaccttcaggtggtcagaacatggccttgaaagatagagaaactgttatcctttgcggggrttggtttgtttttgtttagactccattaaaatcaggacacaaggtcttaatgactccaaatgtctttgcaatcctgcagttttagaactattagttctacctggatggaggtacccagggaggggcaggggggcgaactattctcagctaatctaatctcagcacagccactcagcaaacatctggttactttggtaaatattggcagtctctagcgactggaggtgggtgaggctgcgtgtccccctgacagccttgggactggtggcctatgacaacaaaaggaaatcctagagcagggtttgccaaatccctataggcgattttaggcggcaggtccaacctgttcttgtagctcagaggaagtctcagcgctgccctctggcagatgcactccgagcaggaccc

SEQ ID NO: 934640 - DNA, 665 bp, Homo sapiens
gctgctttgatcttctatccagaccactcaaactttctctgtatcagcaataaggcagtctcactttcttatcatttgtgtgttccctggagtagcagttttaatttcctttaagtactttttttttgagatggagtcttgctctgttacccaggctgtagtgcagtggcatgatcttagttcactgcggcctccacctgccaggttcaagygattcttctgcctcagcctcccaagtagctgggattacaggtgcacaccatgcacaccaccacgcccggctaatttttgtatttttagtagagatggggtttcatcatgttggccaggctggtcttgaactcctgacctcaagtaagccggccgcctcagcctcccaaaatgctgggattacaggcgtgagccaccgtgcctggccaagaacattttctttgcactcacaatttggttaactgtttggcacgaagatgcctagcttgggggcctatctcagctttcgacatgccttcctcacttagcttaattacttctaccttttgatttaaagtcagaggcctgtgactctccttttcacttgaacacttagaggccattgcagggttattaattgtcctaatttcaatccccagggaacagggatgcacaagatgagggagacagacaga

SEQ ID NO: 934641 - DNA, 768 bp, Homo sapiens
aacatacccaagagtaggtaatttataagaaaaagaggtttaattgactcacagttcagcatggctggggaggtctcaggaaaattgcaatcatggcagaaagggaaacaaacatgtccttcttcacagggtggcagggagaagaagaatgagaactgagcgaagggggaaaccccttataaaaccatcagatctcatgagagttcactcactatcatgagaacaatatgagaggaactgccccatgattcagttacccctgacaaggtccctcccatgaaacatggggattatgggaactacagttcaagatgagatttgggtggagatacaaycaaaccatatcattccacccctgacccctcccaaatctcatgtcctcacatttcaaaacacagtcatgcccttccaacagtcctccaaagtcttaactcattccagcattaacttaaaagtccaagtctctcatctgagacaaggcaagtcccttccacctataagcctgtaaagtcaaaagcaagttagttacttcctagatagaatgggggtacaggcattgggtaaatacacccattccaaattggagaaattggccaaaatgaagagactacaggccccatgcaagtctaaaatccatagggcagtcattaaaccttaaagttccaaaatgatctcctttgactccatgtctcacatccaggtcacaatgatgcaagaggtgggcttccatgaccttggacagctccacctctgcggctttggggggta

SEQ ID NO: 934642 - DNA, 646 bp, Homo sapiens
tatctcttttaaaataggatccagagtgtgtattgttaaaataaacacagtttctggaaaatgacttttcaaacaaaatgatagagttatccataatatattattcaaagtgatgaaagacaatccacataaaaagttaaataacatgagaatcctctgcactggactatagagttcaccatatatgagaaagggtgagttctaatgtatagcattcataccacagagaaagtgcagtgctaagactaaaatttaaagcagtgtgcttgggtggggaggagttgttttaaatgttgtggtcaggaaagtcctttctgargaagtggcatgtgagtagaaatctgagtaagataaatgagctagtcatagaggtatgttgaggaagagcatttctgaaaagagggcatagcagttgcaaatgtctcaagtcaaagacttgtcttgagtgtttgggaagagaaggaggctggtctagatggaggaaagaaagagggagagtaggaggagataaggcaagtaaggggagccagatcaacacattgatcttcaggtcactggaacttacttggcttttcttggaaaactcatcacagggttctgagcagagaaataagagatctgacttttattttttattaaaagtttt

SEQ ID NO: 934643 - DNA, 622 bp, Homo sapiens
ggtactgctataaaaatacccaaaaaggtgggatgaaatttggacctgggtaacagacaaaggttggaataatttggagggctcaaaagacaggaagatgtgggaaagtttggaacttcctatagacttggtgaatggctctgatcaaaatgctaatagtgatatgaacaatgaagttcaggctaaggttgtctcagatggagtgaaggaacttgttgggaactgaaataaaggtgatgcttgctatgctttagcacaagagactggtgacattttgtccttgtcctaaagatctgtggaactttcaaacttgaagagatgatttagggtatctgggagaagaaaattctaagcagcaaaccattcaagatgtgacctggrtgctcttaaaagtattcaattcatgcattaacaatgagatggtttggaattggaacttatgttttaaagggaagcagagcataaaagtttggaaaatttgcagactgatgatgcaatagaaaagagaaatccattttctggggagaaattaaagctggcagcagaaatttgcatgagtaatgattaaccaaaagttaatcaccaagagaatggagaaaatgtccccagggcatgtcagagg

SEQ ID NO: 934644 - DNA, 771 bp, Homo sapiens
gtcttgcaaataggggcattactttcatgtaagaaacttcagataaatatgacagaaatccaaagtccttggtaaataattaatatgtaggtcattgacatatattgccttttaaatctgtgaatccttacttagtagaaactagagagcttcttgatctaataattgaacttaacaaatatttctgaacatctactttgtgtcatagtgctggagattgggatagaaacatgtacaaaagtcacttttgcctcatacaggtaaatctaagaaagtagggactatgagaacccctatgtatytatatccaccatagtattctagcactgactacagggcctaggaaaagggtaggcattcacatagggagtatttgctggataaaaggcaggttggaagatgcaggaggggagtatgcagaaagaaaggaagaaagagaggaaggagagcgggaaggaaaaacactttctgagtttaattgaatttataagtcacaattttaacaacttttttgatgtttatttctgaacaactgacctacatactcagaataaaaaattgacaatttctaactgaaatagatcttttgagaaaatggggatcacataggaagtaaatccatacattgtaatatgagacaatttaccaaaaggaatagaatgagaaaagatattttattacatgccacctactttgcctctcagaccaaaattgactatgaaggagtagctggaagtcagccaaccacttaatgataaatctaccactccc

SEQ ID NO: 934645 - DNA, 555 bp, Homo sapiens
agtgacatattatcatccttttgatatatcataactcaagcctgttctgctatgatttgaatacaatgcttccccactaaggggccaacagaagtagtcataaataaactgtaaagttgttccttacaaagagttctaaagctaccattttaataactggaaatcaaaatctttaagtgttaaataagaatgcctgtaaaataaacctaaaaatctagtttttggttttttttttttaacttctgtaatacaaatttcttaacctamcaactctgcatcaagattgttgtaaaacagtctcataattacacagattaaatgtagagctggtcaaattatatcctctaagacacaggggcaaatgatagatatgtattataatacagctaacccataaaaggacaattttttgagttgattttcgatggtagtccttttactagttaccaaatatttttaaaagtctttcgatgtacttttccaactatttctttataacatgtgttagagtaatgaaaagtattttaatgagtgagtaaataagaaaaaaaaaag

SEQ ID NO: 934646 - DNA, 596 bp, Homo sapiens
ggcaggagaatggcgtgaacctgggaggcggagcttgcagggagccgagatcgcgccactgcactccagcctgggcgacagagcaagactccgtctcaaaaaaaaaaaaaaaaaaaaaaaagaattgataggacctagcaagtaaaaatgytaaatttcctatcaatgttgacaaacatgagatactcatagatgatgtttaactctctctaacatggaagtgttagaaaactagttaattattacatatatttaattagcaaataagaaaaatcaccgaataatatcaaattgatgaacatcttttactaggttggcagataattttaataataatgtgaatattttatcgtagatccttaagcatatgcagctaactcagaaagtttcattgtgatttgaaagtacctttggatcttagaaatttggtgcttatgtatataaaccagaaattttttagtttaataatgtctgctcaactagcagaatactttccccctacttttagatgaacaatgaacattttatgtaaatttacatttcactaccatttaccttgtcataagaacctttatgaatagtttgatactttggat

SEQ ID NO: 934647 - DNA, 494 bp, Homo sapiens
taaatgattgaataagtaaacaaataggttgaataaacaaatattctgtacaagaatttcaactgatttatgtaaatattttgccttcaaagagttgatgtataaactctccattccttaagtgtgttttgtttgtagtgacttcattccaaaaagtacaagttggaaaggggagaatcasttgagtttatggtagagaaaactggcaaatactgccttagccaggtggtcatagtcaacatcaagagttatgagtcatgacaataatatttaccattgatacaatatgataagaatggcagtttgttcatagtctttatcccctaaacccataactctagtctaactatgagaaaaatatcagagaaattccagttaagtgacattctataaaatgcctgactagtactcctcagaacttgcaaggtgatcaaaaatgaggagtggcagagaaactgtcacagccaagagaggctaaaaagacacatgaataa

SEQ ID NO: 934648 - DNA, 619 bp, Homo sapiens
acaactttacctatttccaaactgaattccttttatttcccttgtattattgcactagttagaacctccagtacaataagatgagagtgaacgtctttgtcttattcctgatgttagagagaaggcatttagtccttcaccattaaatattatgattgctgtacgttttcatggatagcagtaaatttttttatctcaaatatggtagttttcatctctacgagttttattttggtcttttatatctcccatgtctctacttaacattcaatatttccttttgctttttgaacatgtggaacactgtcatacctcttttaatgtctctacctactaattctatcatttttgttatttgtaattcagtttcattagactgattttattcttaatggtgagttgtattttctctgcctgcctaggatcttttgattggatgccagacaygaattctaccttaattgatactagatatttttctcatcctataagtattcttaaaaattgctcttaacatggttgcattacgtgggaagagtctgatccttttaggtcttatttgtaagtcttgtttgtgaggacaagacctgcatttaatctggggttaatattttcccac

SEQ ID NO: 934649 - DNA, 658 bp, Homo sapiens
ctgggaagacctaatccctggggtagggcatgagaggggcctctgagggattggacaggctctgggtgctggtttgatgagtgtgttcacattgtgaaaattcatcatatgcagacttttctttatttatgtcatatttcaattaaatgtttaccaaaaattaagggggaaaaaagcaataattcatactccagcagcaccacacagtcagaggcttaactgaagacaatacttcagttaaactcctccaactcctggatgtaattactagataggcaaatcacattaaatgaacctcagtttgctcacttgtaaaataagaacaatgccccttcataagtggatgaaaaatgactataaaaatttttatatatgtttatatgtatattactatctgccagtttgtaacttgctatgaaaattcagtattaygctactattattgttataattattatataatccttaatttcttttcttgttttttgaaacagggcctcactctatcgcccaggctggagtgctgtggcacgatctcggctcactgcaacctccacctcccagtctcaagcaattctccaaaattgctcagcctccagagtagctgggtctacaggcgcgcaccaccatgcccagctaactttttgtagtttactgg

SEQ ID NO: 934650 - DNA, 547 bp, Homo sapiens
gttaaaacataaatcagaatatgccactcttctgctgcgttctctccaatgacttcctgtgtctctcagaataaaagccaaactctttacaactgcctacaaagactgctatttaaagaagaccacaacagtggcatcatctggtaacttggaaatgcagaagtgcagaacccaactcccaactacaaatcagaatctgcattttcacaagaccaagtcatgtgcacrcacaccaatttttcagaaacactgacctacaagaccttgggtgacctgtccccactaagcccccgagttcatctacttcacttcctctcactcactcttctccagcctctttgttcctctgccattcatcagacatataagacacacttccacctagctgtttcttcggtctagaatcttcctgcccaggtgtctctatagtttgctccgtcacctacttcagttcttgacttagtgaagccttccttgtcatttaaaaagttcaaaaccccctgacacttcatactcttttttttttctacttagtacttcttgctat

SEQ ID NO: 934651 - DNA, 727 bp, Homo sapiens
tactttcttgatttctttttacttctcttctgcttttcttatgatcttctattatagttttcgggaacggcagctaaatattccccatttttctatagacaaaatcagaggtgcatagaatttcagaatgttaagaaatcctagagactaaacaaaatatcctctagtacttgaatccttgcttaacatcctgatcaagtggttgttcaggtggagaacctgaaactcaaagagaaaaaattatttggatacagtaaatcagagaaatgagaattgcactcagctttctttgttcaaaacccagtcttcttttacattctgtcattgagcgattttagttttagaaagagggagtggctctagtgaacacagtggaagaggatgagaatggaatgagctgttgaacccaatgaaagtggataagaatggaatttgcaggggacagccaaatttgaagagaaacaaacccttagttgsatggaaatgagggttttaggaaaaaatccgaatgtttggctttattacaagtttgataaagataagggaattgaaaacacaggatgtcgggagctatcaggaaaggcatattagaatacggcattcaaggaattctgaagtggttgctgcctttttgtttgtttaactggaggaactgacaaacttcaaggttttattgaaaaatgttaaaagaatttgagccactggaaatagtctccggagcagatag

SEQ ID NO: 934652 - DNA, 727 bp, Homo sapiens
tactttcttgatttctttttacttctcttctgcttttcttatgatcttctattatagttttcgggaacggcagctaaatattccccatttttctatagacaaaatcagaggtgcatagaatttcagaatgttaagaaatcctagagactaaacaaaatatcctctagtacttgaatccttgcttaacatcctgatcaagtggttgttcaggtggagaacctgaaactcaaagagaaaaaattatttggatacagtaaatcagagaaatgagaattgcactcagctttctttgttcaaaacccagtcttcttttacattctgtcattgagcgattttagttttagaaagagggagtggctctagtgaacacagtggaagaggatgagaatggaatgagctgttgaacccaatgaaagtggataagaatggaatttgcaggggacagccaaatttgaagagaaacaaacccttagttggatggaaatgagggttttaggaaaaaatccgaatgtttggctttattacaagtttkataaagataagggaattgaaaacacaggatgtcgggagctatcaggaaaggcatattagaatacggcattcaaggaattctgaagtggttgctgcctttttgtttgtttaactggaggaactgacaaacttcaaggttttattgaaaaatgttaaaagaatttgagccactggaaatagtctccggagcagatag

SEQ ID NO: 934653 - DNA, 570 bp, Homo sapiens
cccatctcggcctcccaaactgctgggattgcagatgggagccaccatacccaacttacttgactgtgattttgaagaaaagagggggctagaaatattcctttgtaatatatctttacaaaggcctttgtctaggtgctcccaggaaggcctgttttcttttcttttctttttttttccttttcagaaaggatctctccctgtcacccaggctggagtgccgtggtgcgatcatggctcactgcagcctcaacttcctgggctcaagtgatccacccgcctcagccwccagagtagcggggacaacacaggcatacacccccacccccacctaatttttaaagtcttttggtagagacagagtttcaccatgttggccaggctggtctcaaactcctgggcttaagcgatcctcctgcctaagccttctaaagtgttgggattacaggcatgagccaccatgcctggattcaaaaagacctgtttctaccacttcagttttgtggatgagtctgttgtaaattgaagcagatgagtgcagacaggtctagctgtgtgacttttatgaag

SEQ ID NO: 934654 - DNA, 570 bp, Homo sapiens
cccatctcggcctcccaaactgctgggattgcagatgggagccaccatacccaacttacttgactgtgattttgaagaaaagagggggctagaaatattcctttgtaatatatctttacaaaggcctttgtctaggtgctcccaggaaggcctgttttcttttcttttctttttttttccttttcagaaaggatctctccctgtcacccaggctggagtgccgtggtgcgatcatggctcactgcagcctcaacttcctgggctcaagtgatccacccgcctcagcctcyagagtagcggggacaacacaggcatacacccccacccccacctaatttttaaagtcttttggtagagacagagtttcaccatgttggccaggctggtctcaaactcctgggcttaagcgatcctcctgcctaagccttctaaagtgttgggattacaggcatgagccaccatgcctggattcaaaaagacctgtttctaccacttcagttttgtggatgagtctgttgtaaattgaagcagatgagtgcagacaggtctagctgtgtgacttttatgaag

SEQ ID NO: 934655 - DNA, 570 bp, Homo sapiens
cccatctcggcctcccaaactgctgggattgcagatgggagccaccatacccaacttacttgactgtgattttgaagaaaagagggggctagaaatattcctttgtaatatatctttacaaaggcctttgtctaggtgctcccaggaaggcctgttttcttttcttttctttttttttccttttcagaaaggatctctccctgtcacccaggctggagtgccgtggtgcgatcatggctcactgcagcctcaacttcctgggctcaagtgatccacccgcctcagcctccagagtagcggggacaacacaggcayacacccccacccccacctaatttttaaagtcttttggtagagacagagtttcaccatgttggccaggctggtctcaaactcctgggcttaagcgatcctcctgcctaagccttctaaagtgttgggattacaggcatgagccaccatgcctggattcaaaaagacctgtttctaccacttcagttttgtggatgagtctgttgtaaattgaagcagatgagtgcagacaggtctagctgtgtgacttttatgaag

SEQ ID NO: 934656 - DNA, 688 bp, Homo sapiens
tcctgatgaatcttccagaaggaagaaacaccttgtctttacatgaagaccaaggcaccagcagattccatatctgatgagggctgttctttgcctccaagatggtgccttcctgatgaatattccagaaggaagaaacaccttgtccttacatggtaaaggtggaagaccaagggaaatgaatgttacaggaagcctgtctctttctttctttctttctttctttctttctttctttctttctttctttctttctttcttttctctctctttctttctttctttttctttctttctttctctctttttttcaagaaggagtcttgctctatcgcccaggctggagcacagtgktgtgacctcggctcactgcaacctccacctcccaggctgaaacaattcttctgcctcagcctcctgagtagctaggattacaggtgcctgccaccacacccggctaatttttgtatttttagcagagatggggtttcaccatgttggccaggctgatcttgaactcctgacctcatgatccacccgcctcagcctcccaaaatgctgggattacaggcatgagccaccatgtctggccaggaagcctctttcctaaggaccttaagcccattcatgagaaagatgccaccatggcctgatcaccccttcttttaattcaagttatgtcatgtta

SEQ ID NO: 934657 - DNA, 588 bp, Homo sapiens
ccatttggtagacagaataatgacctcaaatatgtccatgtcctaatcccatgtggcagacagaataatggccccaaagatgtacacatcctaatccccatgtggcagacagaataatggccccaaagatgtccacgtcctaatgcccatgtgatagacagaataatggccccaaagatgtacacatcytaatccccacgtggcagacagaataatggccccaaagatgtccacgtcctaatccccatgtggtagacagaataatggccccaaagatgtccacatcctaatccccatgtgggagacagaataatggtcccaaagatacccatgtcctaatcctcatgtgatacagagtataatggtcccaaagatgtccatgtccgaatactaggtagcagacagaataatggccccaaggatgtctacatcctaatccccatgtggttgacagagtaagcacccccttcaccccctcaaaaaaaaatccacatcctaattccagaaatctgtaaaaacctgtcatagctaaaaacatttgcagatgtgattagttcagaatcatgagatgaatgacgcttgattatc

SEQ ID NO: 934658 - DNA, 615 bp, Homo sapiens
aggtatattttatttacatgcatgcatacacacacacacacacacacacacaaattatatatagatgtgtagaaaatatagaaaagtagaaaaatgtatacaaatatttgaaatacattatgtggaatcatgtttgtatttttttagcttaggaaagaaagccattaaaagagttacatgtcaataaccatgatactataggattttagtagttgcaaagtattacattacttaaataaatgattcatggaatagtctttttttattggacaagggattttcccctccccctcaatctttgagagttagaaacaatgcagagatgagtgtctttatagttaaacctttgtacgttttataatttactcatgataaattttcaagttgaattcctaggccaaagggtrtacagattttaaagactttcaaagttggcagatatcactgtaggataattataccaatttatactcttaccagtaatatatgagtgtatatatttacctattccttgccagttctggaaattatgaatttaacagaatcttccaaaaagcattgaaaattggcctgggaatgtaaatatcctttccttccccattcagcttactaatg

SEQ ID NO: 934659 - DNA, 713 bp, Homo sapiens
cacattttctttatccagcctatcactgatgggcatgcgggttgggtccaagtctttgctattgtgaatagtgctgcaatagacatacatgtgcatgtgtctttagagtagaatgatttttaatctttggggtatgtattcagtaatgggattgctgggtcaaatagtatttctggttctagatccttgaagaatcaccacactgtcttccacagtggttgaaataattgacactcccaccaacaatataaaagtgttcctatttctccacatcctctccagcatctgttgtttcctgacttactaatgatcaccgttctaactggygtgagatggtatctcattgtggttttgatttgcatatctctaatgttcagtgatgatgagcctttttttcatatgtttactggctgaatagatgtcttcctttgagcatatccttcacccactttttgatgaggttgtctgttcttttctcataaatttgtttaagttccttttagaatctggatattagccttttgtcagatggagagattgcaaacattttctcctgttctgtgggttgcctgttcactctgataatggtattggaagttctggccagggcaatcagacaagaggaaaaaataaagggtattcaaataggaaaaaaggaagtcaaattgtctctgcagatgatatgattgtatatttaggaaaccaaaacgtct

SEQ ID NO: 934660 - DNA, 713 bp, Homo sapiens
cacattttctttatccagcctatcactgatgggcatgcgggttgggtccaagtctttgctattgtgaatagtgctgcaatagacatacatgtgcatgtgtctttagagtagaatgatttttaatctttggggtatgtattcagtaatgggattgctgggtcaaatagtatttctggttctagatccttgaagaatcaccacactgtcttccacagtggttgaaataattgacactcccaccaacaatataaaagtgttcctatttctccacatcctctccagcatctgttgtttcctgacttactaatgatcaccgttctaactggtgtgagatggtatctcattgtggttttgatttgcatatctctaatgttcagtgatgatgagcctttttttcatatgtttactggctgaatagatgtcttcctttgagcatatccttcacccactttttgatgaggttgtctgttcttttctcataaatttgtttaagttccttttagawtctggatattagccttttgtcagatggagagattgcaaacattttctcctgttctgtgggttgcctgttcactctgataatggtattggaagttctggccagggcaatcagacaagaggaaaaaataaagggtattcaaataggaaaaaaggaagtcaaattgtctctgcagatgatatgattgtatatttaggaaaccaaaacgtct

SEQ ID NO: 934661 - DNA, 643 bp, Homo sapiens
ttcccactgcctccagggctccctcctggtgcaagccaacaccatctcaccaggcacagcaacagccccttgaaggatgttcttgctcccactcctgtctctcacctcctgtcttttcccaacacagaggtcatgagttcctgttaaaatgtaaatgagatcacatctctctttaagataacatgctcttttgactccctgtctcactcagcacaaaagccaaggtcctgagcaggccccacctggcctgccccagcctgccctgcctccagcatctcayacctgtctcttctcctctcccactgctctctgcctcactcactccatcccagaccaggggcttccctactgttctgacacacctggcatatttccacctgaggacgttgcacttgctgttctctctgcctggatccccaatcccctggtagacatgtcgcatgctccgtcactttctcctggtctgcccaaatagcaccttcttggtggatccttccctggacatcttacctgagatgacaccccaaccctacgtttcatattcccctactcagatgaagtttccttcatggtatttagcattttctaatattaacttgaattctaactactttattgtccatctttccctaccattctttcc

SEQ ID NO: 934662 - DNA, 617 bp, Homo sapiens
atatatgaatatcattaatcattagtttgtagcaattactttttattccaatattatgataatcctcactctataatcatagtctaggaaaaaccaggccatacagagataggagctgaggggacatagtgaggtgtgaccagaagacaagagtgcaagccttctgttatgcccggacagggccaccagagggctccttggtctggcagtgacgccagcgtctgggaagacgcccgttaccaggcggatcgtggtccagcagtagcaaaaggtgtcaaggaacaacacccgctccttagcagactgggaagcrggggggagggtctccctttccccgggggagtttagagaagactttgctcctccacctcttgtggagggcctgacatcagtcaggctctcccacagttatccggaggcctaaccgtctccctgtgatgctgtgcttcagtggtcccactcctagtctgccttcatgttccatcctgtacacctggctctgccttccagatagcagtagtaaattagtgaaaatactgatagtccctgatatgcagaaataatggcgtaagctgtctttctctgtctcctctccctctctgtctcctctccctctc

SEQ ID NO: 934663 - DNA, 572 bp, Homo sapiens; identical to SEQ ID NO: 917470

SEQ ID NO: 934664 - DNA, 617 bp, Homo sapiens
ctttgtactctttctctttatttctcagactggccaacacttagggaaaatagaaagaacctatgttgaaatattgggggatggttcccccaataattcttctcaaggtgacttataatcagctacagcccagggcttacttcttttaaggagttcatgaaaaggacttttgaacactggtttcttataactttatagattatgccattggattagagagaaaacttccrggactctaattaaaaggctaatgtgttcataaggattgctaacccaacatgaagcagagcagcagttgattttatggattaaactgatggagaactaaaatcattttaatggctttgttgttattgttgttgtttgaaccactgctgactcttcagactctggagaactgttttcctgctgagctatttacaacctttaatgcttgagtagagtatactcttgtaaacagaatttgggacatatttctctctctctgcctaatttatccagaatttgtaaactgtttgtgaatattcttaattcatggcaatgtttttggctgtaagagttcagtaagaatccgtttttgttttgttttgttttgttaaacaatgggacacaattgg

SEQ ID NO: 934665 - DNA, 617 bp, Homo sapiens
ctttgtactctttctctttatttctcagactggccaacacttagggaaaatagaaagaacctatgttgaaatattgggggatggttcccccaataattcttctcaaggtgacttataatcagctacagcccagggcttacttcttttaaggagttcatgaaaaggacttttgaacactggtttcttataactttatagattatgccattggattagagagaaaacttccgggactctaattaaaaggctaatgtgttcataaggattgctaacccaacatgaagcagagcagcagttgattttatggattaaactgatggagaactaaaatcattttaatggctttgttgttattgttgttgtttgaaccactgctgactcttcagactctggagaaytgttttcctgctgagctatttacaacctttaatgcttgagtagagtatactcttgtaaacagaatttgggacatatttctctctctctgcctaatttatccagaatttgtaaactgtttgtgaatattcttaattcatggcaatgtttttggctgtaagagttcagtaagaatccgtttttgttttgttttgttttgttaaacaatgggacacaattgg

SEQ ID NO: 934666 - DNA, 631 bp, Homo sapiens
tttaagacacttgtaagtgatgataccagctatttagttcatccttacagaaatgagagtcctgggaatttaaccgtgtcaatgcagtctcttttactttattaactgaagaaaagtgggtgagctttaaaattttttttaagattaacaaacaaaaaggagtcggaaggagccagttcaggattgtaaggtagatgcctcatgattctctatagaaactcttacaaaattgcccttatttgatgagacgaataagaaggaacattttcatggtggagaaggactctctggtaaattctcccttggtgtttttctgctaaagctgtggctaactttctcaaaacatgtttgtaataagcagaygttataattcttttgccctccagaaagtctacaaacaaaatgcatgagcatcccaaaatactgtttccatgacctttgctcttgacctattcacttctgctttgactggaccacttccacctcttggtgccattgctttgattgtgctttgtcttcaggatcatacttgtaaagccatgttttaatcttttgttacaattcttcaaagaaatgcttcaggatctggatcccacgtgtttaaaatttctattgaaagctctgctcttgt

SEQ ID NO: 934667 - DNA, 747 bp, Homo sapiens
cccatgaggccatcagtgcaggttgggggagagaaggcagggtggcaagagtggagaccatgggcatttgagccacttcctcgtgtaacttacttgtgccttcaggacctgcttgagcccaatcacatatataccactttcatttggtgatggaatgctgctgtgcatgacccactttatggctagatgggtccgaaagcatgcagttcattataggtagttcaggtcgcgtggtgacttgataacccatagtcaaatgttcattttctaccaaaccccagtaacagtccaaaagckgtctctcaaaaggagagtagttatctgcagaagatggcaggggcttgctccataattctagagccctccactgtgactaatcaatgggggcctaccaaaaactccaaatggcatccctatctgccactgacacctcaagcatcattggatctgctgggtcatacggcccaagtggcagagcggcttgcacagcagcctggacctgttgcagagccttcttctgttttggactccactcaaagctggtagcctttcgggttactagataaatgggtcagagtaacacaaccaaatgagaaatgtgttgcctccaaaatccagataggtccaccaggcattgtgccttttttttggttacaggaggggccaaatgcagcaacttattcttcactgcagaaggaatatctcgacaagccccacacgatttgacccctagaaattttactgagg

SEQ ID NO: 934668 - DNA, 500 bp, Homo sapiens
atattcccaagtgcaggattacagatatctttttgggggccataatttaacctataacaatcctttatgaacctcctatacacagatcaggcatatgaattgctgccttttctctgtgctacagaaacagcttaagggttagactgttccttctttcctgataattttctgtatattcctaaagagaaaataatgttataataaaacatatacctaagcacatgtctacattctttctgaataaactttaaaattccttctcatttagactatgaacagaggttatttggagaaagattasattgatacatataaaattattttcagtaactcaaaatatgcaatttaaaaaaattttcttgctcattttactctgagcttccaatcttctgaaatgtttaggaaattaattgtgggtacattttttacttcactactgctacagttgtgagtttggagagttccagaaagagttacacaaataagctaagatattacta

SEQ ID NO: 934669 - DNA, 464 bp, Homo sapiens
gatgtccgatagagcggttgcggtggaggctcccagcaagaatgaaaacagtgagcgaatcctgtaccggcaaccaagatatccatgttctctcattgagactgactaggcagtagtgcaaccaagagagagtgaggaaaagcagggtggagcgacggttcatytgggagctacatgagcgagggagccctcactcccagctatgggaagtggtgactgattgtgctaccctgcccgggaaaccgtgctttttccatggatctgtgcaacccatggatcaggagttcccctggtgagtcaatgccaccaaggccttgggtctgaagcacagagatgtgtagattctcagtggccactcggctggagactacttaaggccaccaagttcttgggcgaaggggtagctgtcatcatcacagatgtctgctgcctaaggcaactaagctcccagtgggaggtaatgg

SEQ ID NO: 934670 - DNA, 640 bp, Homo sapiens
atgttccgtgaatcatattcagaatatcaatgtaagttttctgacatttttgcttttagtttggtaaaacaacataaaatttagaatcctaaccattttcaagtgtacaattcagtgacaccaaacacactcacaatgctgcacaatcaccaccaccatccatctccagaacactttcacatcccaaacaaaagcccccaccaaggaatgataactcccctttcccctttcccttggcccctgcaacctccattctgcttctgtctctaggaattcacccaatctaggtgctgatagaaggcaaaccatacaaaacagacgcttttgtgcataacttattttacccagcacaatgttctcaaaattcatcagtattgtagcatgtatcagaacatcactacttttaaaaggaaaaagtattcattgcatgcatayaccacactgcatctatccatccaactgtctgctgaaggaaacctgggcagcctccatcctttggctactgtgaacaatgctgctatgaacacgagtgtacacatgtttgtgtgaatgcttgttttcaattctttccactgtacacctagaagtgaaaccactggatttcatagcaattctatgtttaagtttttgagaaaacacc

SEQ ID NO: 934671 - DNA, 823 bp, Homo sapiens
tctctttgctaaagcatagcaagagtgatccttgctccagttcccaagaagttcctcatctccatctgagaccacttcagcctgggtttcattgtccacatcactatcagcattttggtcaaagccatttaacaagtctctaggaagtttcaaactttccccatctttctgtctttttctgagccctccaacctgtttcaatctctgcctcttacctggttccaaagttggcttccacattttcaagtatctttatagcagtaccccactctctgagatcaggtaattagtggagtttcagcagaggtctgacttacagtgggtccagtgggtcctggactcatcctgtggtcatttccccagtgccagaatgcataattggcataagcatacttagcagatggcagaactcccacattggctccctgaccagtaaggtgagggctattatggtgggaaagaccaaatggaagccattagagctgcttctacctagaaaaatagtaaatcaaaaacaatatcacatctctggagggattgcacagattagtgccaccatcaaggacttgaaagatgcacrggtggtgatttccaccacatccccactcacttctactatttggtcagtgcagaagacagacagatcttggagaatgacagtggattatcataagcttaaccaagtggtgactccaattgttgctactctaccagatgtagtttcatggcttgagcaaattaacacatctcctggcacctggtatgcagctattgatttggcaaatgcctttttctccattcctgtccataagatccaccagaa

SEQ ID NO: 934672 - DNA, 593 bp, Homo sapiens
attctatcagatattcaaagaagaattggtaccagtcctattaatcctgttctaaaagatagagaaagaggagtcctccctaagtcattctatgaagccagtatcaccctaataccaaaaccagcaaaggacataacaaaaaaagaaaactacaaaccaatatccctgaggaacatagatggaaaaatactcaacaaaatactagctaaccaaatccaacagcatatcaaaaagataacccaccatgatcaattgggttttataccagggatgcayggatggtttaacatacataagtcaataaatgtgatacaccacataaacagaattaaagacaaaaatcacatgatcatctcaatagatgaagaaaaaacatttgagaaaatccagcaatactttatgattaaagatctcagcaaaattgggatagaagggacataccttaaggtaataaaagccatctatgacaaaccctcagcctacattatactaaacagggaaaagtggacagcattccccctgagaactggaacaagacaaggatgcccactttcaccatttctattcaacagagtactagaagttctagccag

SEQ ID NO: 934673 - DNA, 786 bp, Homo sapiens
taccagaggtacaaagaggagccagtaccattcctgctgaaactattccaaaccacagaaaaagagagactcctccctaattcattttatgaggccagcatcatcctggtactaaaatctgacagagacacaacataaaaagaaaatttcaggccaatatccctgatgaacattgatgcaaaaatccccaataaaatgctggcaaaccaaatacagcagcacatcacaaagcttatccaccacaaccaagtcrgcttcatccctgggatccaagactggttcaacatatgcaaatcaataaacataatttatcacataaacagaaccaatgacaaaaaccacatgattatctcagtagatgcagaaaaggactttgataaaactcaacaccacttcatgctaaaaactctcaataaactcggcattgatggaacatatctcaaactaataagagctatttatgacaaatccatagccaatatcatactgaatgggcaaaagctggaaacattcacctagaaaactggcacaagacaaggatgcccccctcaccactcctattcagcatggtattggaggttctggtcagggttatcaggcaagataagaaaataagggatattcaaatacgaagagaggaagttaaactgtctacatttgcagatgacatgattgtatatttagaaaaccccatcatctcagcccaaaaactccttaagctgataagcaacttcagcaaagtctcaggatacaaaatcaatgtgtaaaaatcacaagcattcttat

SEQ ID NO: 934674 - DNA, 786 bp, Homo sapiens
taccagaggtacaaagaggagccagtaccattcctgctgaaactattccaaaccacagaaaaagagagactcctccctaattcattttatgaggccagcatcatcctggtactaaaatctgacagagacacaacataaaaagaaaatttcaggccaatatccctgatgaacattgatgcaaaaatccccaataaaatgctggcaaaccaaatacagcagcacatcacaaagcttatccaccacaaccaagtcggcttcatccctgggatccaagactggttcaacatatgcaaatcaataaacataatttatcacataaacagaaccaatgacaaaaaccacatgattatctcagtagatgcagaaaaggactttgataaaactcaacaccacttcatgctaaaaactctcaataaactcggcattgatggaacatatckcaaactaataagagctatttatgacaaatccatagccaatatcatactgaatgggcaaaagctggaaacattcacctagaaaactggcacaagacaaggatgcccccctcaccactcctattcagcatggtattggaggttctggtcagggttatcaggcaagataagaaaataagggatattcaaatacgaagagaggaagttaaactgtctacatttgcagatgacatgattgtatatttagaaaaccccatcatctcagcccaaaaactccttaagctgataagcaacttcagcaaagtctcaggatacaaaatcaatgtgtaaaaatcacaagcattcttat

SEQ ID NO: 934675 - DNA, 610 bp, Homo sapiens
aggtgtacaacagggttcgttttctaaagtgttgcactggagctttgcattagccatctgtattaggcaggtcgagatatcataacaaaacaccacaaactgggtggtggcgggcaacagaaatgtattttctcacagttctggagactggaagtccaagatcaaggtaccctcagggttggtttctgatgacgcttcccttccagctcgcagccatctgcctgcttgctgtgtcctcatctggcctttcctctgtgcatgtgtggaaagaaagagactggggtaggcagggagggaagatagctagtatttcttactctttttataagtattccaatcttatgacattaggctgccactcttataaactcatttactcataattatccccttaagggccttatctccaaatataktcacattgtgggttatggtttcaacatatgaatgggtgtagggcacaattcagttcataacaccatccaaatgaagctgtagtataggcagttagatatgtgaatctgaagtttggcatagaggtgctggccaggaatataattcagagagtcttcagaatacggttcatatttggacccattagactagatac

SEQ ID NO: 934676 - DNA, 595 bp, Homo sapiens
gagttctggcaaatgtcgctatggtaggctaaagtgctctgggatcctataaaaacttgtaaggcagtatagactgcaaagactgcaactcctaggtgggtcctagtgctgaactgggctcagaaccagggaacttggagggcatatgacatactgagacatcatctggggtggccaagggagtgcttacatcacccccgcaaccttaggctgcacagctcatggctccaaaacagactgcttccttctgcttgaggattgaagagagtaaagagaactctgtcttacatcttggataccacctcagtcacagtaagataggccatcagtcaragccgtgaggccccctttccaggccctagttccaaaatgacaattctagacacaccctaggccagaaggaaacctgaggccttgaaggaaattacccagtcctggcaggattcatcacttgctaactaaagagcccttggaccctgaataactaggagaaatacccaggtagtatcttgtggcccttcagtgagactctgagactggctaccttcaggtaaaactcagcaccatcccagctataggggctatggagaaaaac

SEQ ID NO: 934677 - DNA, 595 bp, Homo sapiens
gagttctggcaaatgtcgctatggtaggctaaagtgctctgggatcctataaaaacttgtaaggcagtatagactgcaaagactgcaactcctaggtgggtcctagtgctgaactgggctcagaaccagggaacttggagggcatatgacatactgagacatcatctggggtggccaagggagtgcttacatcacccccgcaaccttaggctgcacagctcatggctccaaaacagactgcttccttctgcttgaggattgaagagagtaaagagaactctgtcttacatcttggataccacctcagtcacagtaagataggccatcagtcaaagccgtgaggccccctttccaggccctagttccaaaatgacaattctagacacaccctaggccagaaggaaacctgmggccttgaaggaaattacccagtcctggcaggattcatcacttgctaactaaagagcccttggaccctgaataactaggagaaatacccaggtagtatcttgtggcccttcagtgagactctgagactggctaccttcaggtaaaactcagcaccatcccagctataggggctatggagaaaaac

SEQ ID NO: 934678 - DNA, 595 bp, Homo sapiens
gagttctggcaaatgtcgctatggtaggctaaagtgctctgggatcctataaaaacttgtaaggcagtatagactgcaaagactgcaactcctaggtgggtcctagtgctgaactgggctcagaaccagggaacttggagggcatatgacatactgagacatcatctggggtggccaagggagtgcttacatcacccccgcaaccttaggctgcacagctcatggctccaaaacagactgcttccttctgcttgaggattgaagagagtaaagagaactctgtcttacatcttggataccacctcagtcacagtaagataggccatcagtcaaagccgtgaggccccctttccaggccctagttccaaaatgacaattctagacacaccctaggccagaaggaaacctgakgccttgaaggaaattacccagtcctggcaggattcatcacttgctaactaaagagcccttggaccctgaataactaggagaaatacccaggtagtatcttgtggcccttcagtgagactctgagactggctaccttcaggtaaaactcagcaccatcccagctataggggctatggagaaaaac

SEQ ID NO: 934679 - DNA, 668 bp, Homo sapiens
ccagactgtaaccgtttgagaagtgacaaaaagtgaggaaagattcaggaatataggccaataactggttcccaactaggcagctttcttgaatacagaaccctgccaggcacagtgcctcacgcctataatcccagtcctttgggtagctgagtcggaaggatcacttgaggccaggagttcaggacacagcaagaccccatctctacaaaaaaaatataaaaattagcagccgggtgtgctggctcatgcctataatcccagcactctgggaggccgaggtgggtggatcacttgaggtcaggagttcaagaccagcctggccaaaatggtgaaaccctgtctctactaaaaataaaaaattagcgaggcgtggtagcacacacctgtaatccaagctgctcggtaggctaaggcaggagaatcacctgaagctgggagacggaggttgcagtgagccgaggtcatgccattgcactccagcatgggcaacagagtgagaaactgtatcaaaawtaaaataaaataaaataaaataaaataaaataaaataaaaaagcctggcatggtggcttgcacctgtagtaccagttgcttgggagaccgaggcaagagtatctcttgagcccagagagctaggggctacagtgagctgtgatcacgccact

SEQ ID NO: 934680 - DNA, 615 bp, Homo sapiens
catctcttggctttcaggacaccacattgttctggttttctccctttttcaatggcttccccttctgagtcttcttttctggttcctctaactctgagaaactacatgtcagtgatcttccagggtatagtccttggccttctgtctcttctggctttactctctccctaagcaatttcatctcttctaatgggtataaatgtcagcaatatgccagtgatttccaaatctgtttttttaagctgtaatagttttaaaacaagtccataaatgttttgacacacctcttaccaaaggtggagtctgattcccctccctttgaataggggccaggcttagtaattgacttacttctagtaagtagaaagaagcaaaagtgacgctgtgggactcctgaggctagactgggaaaggtaatacagcttcaccctggttctgtctctcttggsatgtgcacccttggaacacaaccatgtatgaggaaaccaggcagccacatggacaggccatgtgtgggagtgctggcccagccccagcagatggctgatggccatccccaaccaccagacaagtgagtaagacaggctgcagatcattccagcttccagccttcaa

SEQ ID NO: 934681 - DNA, 614 bp, Homo sapiens
tgctgagctgtaatgggccctgcccagttcaaacttcccagcagctttgttcaggctgtgaggggaaaaccgcctactcaagcctcggtaatgtctgacgcccctccctccaccaagctggagctctcacgtggacttcagactgctgtgctggcaaggagaatttcaagccagtggatcttaacttgctgggttccatgggggtgggatctgctgagcattggcttcctggtttcaccccctttccaggggagtgaactgtctgtcttgctggcattccaggtgccactggggtatgaaaaaaaaaagctcctgaagttagttcagtgtctgcccaaatggccacccagttttgtgcttgaaacccagggccctggtggcataggcaccaaagggaatctcctagtckgcaagttacaaagaccgtgggaaaagcgtagtatctgggctgggatgcaccattcctcacggcacagtccctccagggttcccttggctaggggagggagttccccaaccccttgcacttcccgggtgaggcgacgccccaatctgcttcagcttgccctccgtaggctgcaccggctgtctaaccagtcccagtgagatgagcc

SEQ ID NO: 934682 - DNA, 646 bp, Homo sapiens
gttcatgtttttttttttcctggtggagtgacccaaaccttcattcctgaagtgtctgggggatttgtagtcctgcctggattgggctgttgtagtttcccattgaccttaatcacagggcatggtaatattaatagacgccctaatggatcttttgtaattctatgcatactcttacttamctcctttgtggagctgtagactgatttcatctcgagagtctgggtcaatcactccagccaacactgtaactccttcttagcctgttgacttaaaggtaggaggagcccagagtgtccaggtggcaatcttaacttctagcttaatggaacagttgtgtctcctggtggcagcgttcctccctctggaactaagacctctaggccagcagaacataatgtcgtgggaacaggaagcaaacattttgctagtggatcactaggggtgatggcgagtggtgccacttccacttgagtgccttgattcctggacccgtgcatcctggctaagggagaaacaatatcatatcttggatgctgattcagagcatacatggccttctggagaacttggtcccagccctgcaaagtattgtcacctagttggtgttgtaattgtgacttcagaaggccattccaccgttcta

SEQ ID NO: 934683 - DNA, 733 bp, Homo sapiens
ccctgcacatgctctttgcctgccgccatgtaagaggtgcctttgctcctccttcaccttcaccatttccctttgccttcagcaagcacctcagcagttcatgtttttttttttcctggtggagtgacccaaaccttcattcctgaagtgtctgggggatttgtagtcctgcctggattgggctgttgtagtttcccattgaccttaatcacagggcatggtaatattaatagacgccctaatggatcttttgtaattctatgcatactcttacttacctcctttgtggagctgtagactgatttcatctcgagagtctgggtcaatcactccagccaacactgtaactcctwcttagcctgttgacttaaaggtaggaggagcccagagtgtccaggtggcaatcttaacttctagcttaatggaacagttgtgtctcctggtggcagcgttcctccctctggaactaagacctctaggccagcagaacataatgtcgtgggaacaggaagcaaacattttgctagtggatcactaggggtgatggcgagtggtgccacttccacttgagtgccttgattcctggacccgtgcatcctggctaagggagaaacaatatcatatcttggatgctgattcagagcatacatggccttctggagaacttggtcccagccctgcaaagtattgtcacctagttggtgttgtaattgtgacttcagaaggccattcc

SEQ ID NO: 934684 - DNA, 513 bp, Homo sapiens
aaagaatttacaacccagaatttcatatcgagccaaactaagcttcataagtgaaggagaaataaagtactttacagacaagcaaatgctgagagattttgtcacaaccagccctgccctaaaagagctcctgaaggaagcastaaacatggaaaggaacaaccagtaccagccactgcaaaaacatgccaaattgtaaagaccatcaaggctaggaagaaactgcatcaactaatgagcaaaatcaccagcgaacatcataatgaaaggatcaaattcacacataacaatattaagtttaaatgtaaatgggctaaatgctccaattgaaagacacaggctggcaaattggataaagagtcaagacccatcagtgtgctgtattcaggaaacccatctcacgtgcagagacacacataggctcaaaataaagggagggaggaagatctaccaagcaaatggaaaacaaaaaaaggcaggggttgcaatccaagtctctgataaaacagactt

SEQ ID NO: 934685 - DNA, 592 bp, Homo sapiens
cttcatgattaaagcaccaaaagcaagggcaacaaaagccaaaattgacaaatgggatctaattaaactaaagggcttctgcacagcaaaagaaactaccatcagagtgaacaggcaacctacagaatgggaggaaatttttgcaatctacccatctgacaaagggctaatatccagaatctacaaagaacttaaacaaatttacaagaaaaaaaacaactccatcaaaaaatgggcaaaggatatgaacagacaattctcaaaagaagacatttatgcagccaacrgacacatgaaaaagtgctcatcgtcactggccatcagagaaatggaaatcaaaaccacaatgagataccatctcacaccagttagaacagcgatcattaaaaagtcaagaaacaagaggtgctggagaggatgtggagaaataggaatgcttttacactattggtgggagtgtaaactagttcagtcattgtggaagacagtgtggtgattcctcagggatctagaactagaaataccatttgacccagccatcccattactgggcatatacgtaaaggaatataaatcatgctgctataaggac

SEQ ID NO: 934686 - DNA, 592 bp, Homo sapiens
cttcatgattaaagcaccaaaagcaagggcaacaaaagccaaaattgacaaatgggatctaattaaactaaagggcttctgcacagcaaaagaaactaccatcagagtgaacaggcaacctacagaatgggaggaaatttttgcaatctacccatctgacaaagggctaatatccagaatctacaaagaacttaaacaaatttacaagaaaaaaaacaactccatcaaaaaatgggcaaaggatatgaacagacaattctcaaaagaagacatttatgcagccaacggacacatgaaaaagtgctcatcgtcactggccatcagagaaatggaaatcaaaaccacaatgagataccatctcacaccagttagaacagcgatcattaaaaagtcaagaaacaasaggtgctggagaggatgtggagaaataggaatgcttttacactattggtgggagtgtaaactagttcagtcattgtggaagacagtgtggtgattcctcagggatctagaactagaaataccatttgacccagccatcccattactgggcatatacgtaaaggaatataaatcatgctgctataaggac

SEQ ID NO: 934687 - DNA, 621 bp, Homo sapiens
ttatactgcctgctcctaacaagtgattattctcaagcccctttctttcccctaaatgagataattttattaaggtaattctgtctgtggtgcacctttatttgcccctctgaatccttctccacgctccaccttcctctacctgcaatgctatcctgggaggctgacctgcatgaaaaaccttaaaggattcttacctcctctggcttccagttgggttcagccaatggcacagcagtagataagaaggaggtggggckggcgcggtggctcaagcctgtaatcccagcactttgggaggccaaggcgggcggatcacgaggtcaggagatcgagaccatcctggctaacatggtgaaaccccgtctctactaaaaatacaaaaaaaaaattagccgggcgtggtggcgggcgcctgtagtcccagctactagggaggctgaggcactagaatggagtgaacccgggaggcagagcttgcagtgagccgagatcgcgccactgcactccagcctgggcgacagagcgagactctatctccaaaaaaaaaaaaaaaaaaaaaaaaagaaggaggtgggaggctaggagctaggataagggtacttatcttaagcctccgtt

SEQ ID NO: 934688 - DNA, 621 bp, Homo sapiens
ttatactgcctgctcctaacaagtgattattctcaagcccctttctttcccctaaatgagataattttattaaggtaattctgtctgtggtgcacctttatttgcccctctgaatccttctccacgctccaccttcctctacctgcaatgctatcctgggaggctgacctgcatgaaaaaccttaaaggattcttacctcctctggcttccagttgggttcagccaatggcacagcagtagataagaaggaggtggggcgggcgcggtggctcaagcctgtaatcccagcactttgggaggccaaggcgggcggatcacgaggtcaggagatcgagaccatcctggctaacatggtgaaaccccgtctctactaaaaatacaaaaaaaaaattagccgggcgtggtggcgggcgcctgtagtcccagctackagggaggctgaggcactagaatggagtgaacccgggaggcagagcttgcagtgagccgagatcgcgccactgcactccagcctgggcgacagagcgagactctatctccaaaaaaaaaaaaaaaaaaaaaaaaagaaggaggtgggaggctaggagctaggataagggtacttatcttaagcctccgtt

SEQ ID NO: 934689 - DNA, 754 bp, Homo sapiens
ccatgtttgtcccttgtcaagtggctttccttcttgtctggattttgcccccgtctccctgccatgctgtggccatgtaaataatttagatgcctagggtggtctggagcatgtccgttttatttttttgtttttcgagacagagtcttgctctgtcgcccaggctgaagtgcacaggtgtgatctcggctcactgcaacctctgcctcccggggatcaagccattctcctgccttagcctcccaaggagctggggttacaggcacccaccaccacgccggctaatttttgtatttttagtagagacggggtttcaccatgktgtccaggctggtcttgaactcctgacctcatgatccacctgcctcagcctcccaaagttctgggattacaggcgtgagctagggtctggcctgtttttctgtttgtttgtttgtttgtttgtttgtttgttttaagatggatcctcgctctgtcacccagtctacagtgcagtggtgcaatctcagctcactgcaacctctgcctcctgggttcaagtgattctctgcctcagcctcctgagtagctggggttacaggcgcacgccaccacgctcagccaatttttgtatttttagtagggacagggtttcaccacgttggccaggatggtttcaaactcctgcctcaagtgatcggcccaccttggcctcccaaagggtggggattacaggcgtgagctgctgtgcccagccacatgtcagttttcatat

SEQ ID NO: 934690 - DNA, 822 bp, Homo sapiens
taaccatgtttgtcccttgtcaagtggctttccttcttgtctggattttgcccccgtctccctgccatgctgtggccatgtaaataatttagatgcctagggtggtctggagcatgtccgttttatttttttgtttttcgagacagagtcttgctctgtcgcccaggctgaagtgcacaggtgtgatctcggctcactgcaacctctgcctcccggggatcaagccattctcctgccttagcctcccaaggagctggggttacaggcacccaccaccacgccggctaatttttgtatttttagtagagacggggtttcaccatgttgtccaggctggtcttgaactcctgacctcatgatccacctgcctcagcctcccaaagttctgggattacaggcgtgagctagggtctggcctgtttttctgtttgtttgtttgtttgtttgtttgtttkttttaagatggatcctcgctctgtcacccagtctacagtgcagtggtgcaatctcagctcactgcaacctctgcctcctgggttcaagtgattctctgcctcagcctcctgagtagctggggttacaggcgcacgccaccacgctcagccaatttttgtatttttagtagggacagggtttcaccacgttggccaggatggtttcaaactcctgcctcaagtgatcggcccaccttggcctcccaaagggtggggattacaggcgtgagctgctgtgcccagccacatgtcagttttcatatggccaccatccacacatgaggtctgcatcaactggggacctggtgacgatgctcccagtgtgcac

SEQ ID NO: 934691 - DNA, 610 bp, Homo sapiens
gcctactgcaacctccgcgcccgtcgggttcaagcgattctcctgcctcagcctcccgagtagctggaattacaggtacccgccaccacgtctggctaatttttgtatttttagtagagacagggtttcgccatattggccaggctggtctggaactcctgacctcgggagatccacccgcctcggcctcccaaagtgctgggattacaggcgtgaaccacagcagccggmcttttgtttttgtttttgtttttttgtttgttttgagaggagtctcactctgtcacccaggctggagtgtagtggtgtgatctcggctcactgcaacctccacctcctgggttcaaatgattctcctgcctcagcctcccaagtagctgggattacatgcatgtgccaccatgcccgggtaatttttgtctttttagtagagatggggtttcaccatattagccaggctggtcttgaactcctgacctcgggtgatccgcctgccttggcctcccaaagtgctgggattacaggcatgagccaccgcgcctggcctggcccttcctaattgaggacagtgccagccagccagcaacagcccgggagaggctgtgcagct

SEQ ID NO: 934692 - DNA, 568 bp, Homo sapiens
agccgacagcctcgggacggggacccaggctgcccggcatgtcgctcgtcgtgaggacctctgaaaaccacggtcctagatcagagggcgcgcacgctcctcgaccctcgcgctatactccagcccgcggctgtccttgcaaaccaggcccagcacccttgggaggccgcagggcatgagggcggcaggacgcccccttaatcccctccacgaatatccaatccaagtagaaaaactgtccttggaggcaaatcccagccctactttccaaccagactgccgaccccaagcttccaccgacgccccctggctcatcagtcgcactcagacgcgacaccggtgcaggaggctgaaaaacccacttccgagttgtcyaggtctgggcaggatggctctctgcatctcagctactaacgcacctcgaggttcccgcccgtcgtggccccaggcaccatcctgactgggtttggcctgcctccagcacccccttcaagcacctcgctgcttcctgaagacttgccccggctgcgcccccgtgctgagggcctgcgggcctaaccttgccacc

SEQ ID NO: 934693 - DNA, 568 bp, Homo sapiens
agccgacagcctcgggacggggacccaggctgcccggcatgtcgctcgtcgtgaggacctctgaaaaccacggtcctagatcagagggcgcgcacgctcctcgaccctcgcgctatactccagcccgcggctgtccttgcaaaccaggcccagcacccttgggaggccgcagggcatgagggcggcaggacgcccccttaatcccctccacgaatatccaatccaagtagaaaaactgtccttggaggcaaatcccagccctactttccaaccagactgccgaccccaagcttccaccgacgccccctggctcatcagtcgcactcagacgcgacaccggtgcaggaggctgaaaaacccacttccgagttgtctaggtctgggcaggatggctctctgcatctcagctactaacgcrcctcgaggttcccgcccgtcgtggccccaggcaccatcctgactgggtttggcctgcctccagcacccccttcaagcacctcgctgcttcctgaagacttgccccggctgcgcccccgtgctgagggcctgcgggcctaaccttgccacc

SEQ ID NO: 934694 - DNA, 653 bp, Homo sapiens
gatgtttgcaaaccatattcatttcctatcgccactgtagcaaattagcataaactgagtggttcaaaccaacagaaatgttttataattgtggaggccggaagttgggaatatgtctcgtggggataaaatcaaggtatcagcagggctggtcctggagactccaggggagaatccattcattgccatttccagcttttggtggttgccagcatcccttggtttgtggccacatcattcgaatctctgccttgttgakcacatcaccttctcctctgtcctagttagtcaaatctccctctgcctccttcttataaagatacttgtgattccatctagggcccacccaggtaatccagaataatctcttcatctcagtgttcttaacctaatcatatctgcagggtcccttttgccatctaagggaacattcccaagttacagggattagggcatgttcttcttgggagccattattcagcctaccacactgggcttttgaccttttatttttaattatctatgcttttatttttctggttcacttccctatatagtaaaagagctagttttctacttagggtagtggtctaacatttttctaagtcactttttaaagtaaaaagggcaagttgttttcattgaaagaatgt

SEQ ID NO: 934695 - DNA, 653 bp, Homo sapiens
gatgtttgcaaaccatattcatttcctatcgccactgtagcaaattagcataaactgagtggttcaaaccaacagaaatgttttataattgtggaggccggaagttgggaatatgtctcgtggggataaaatcaaggtatcagcagggctggtcctggagactccaggggagaatccattcattgccatttccagcttttggtggttgccagcatcccttggtttgtggccacatcattcgaatctctgccttgttgagcacatcaccttctcctctgtcctagttagtcaaatctccctctgcctccttcttataaagatacttgtgattccatctagggcccacccaggtaatccagaataatctcttcatctcagtgttcttaacctaatcatatctgcagggkcccttttgccatctaagggaacattcccaagttacagggattagggcatgttcttcttgggagccattattcagcctaccacactgggcttttgaccttttatttttaattatctatgcttttatttttctggttcacttccctatatagtaaaagagctagttttctacttagggtagtggtctaacatttttctaagtcactttttaaagtaaaaagggcaagttgttttcattgaaagaatgt

SEQ ID NO: 934696 - DNA, 661 bp, Homo sapiens
cacctctagattgttattctcatcagttacatgtgggtttcacaaatttatttctcagaatgcaagtctgtctcttatatcctcgggaaacacacctttatatcccagttagtactgacaaaaattaaactagggactggccaaaaacagtgcctttcctcactttaatctcactaaagtagataagactcaagttattttgttcttgcaatggcattgacaaatgtttgcaccaaaaaccatgttgaagttcattaaggaaactgtgatccaagatccaaggtcaaaaaaacaaattcatcaattcagcacaccaccaactcacaggctaagcatcttactgctaattcattgatgctgccatttgtcaagtgccaaattgaattattgatttgtcaataatttccttcygttggttacttatatagtatattgcaattcttgttgctgaagtcagctacactttttctatttgaaaaacaatttcttgcatttgggatttcaggtatagtgattgttacaaatatgaaggacttgaattaacagcaagttttcaagtaaaactttacttatgtataactgaatgagttcttaaagacatttactaacaattttccacaaactaaaaatttataaaacaataaataaaatagactttaaa

SEQ ID NO: 934697 - DNA, 864 bp, Homo sapiens
ctcaaaagcatcctttaacttgtgcacagatatggggatccttatgagtccctgcttggtctggatgtcaggttgggccatggacagctcttcctctccctcatctccaccttgcatgggtcactagcacattcactggcagtcttctctcacagtccctttgcgagctcaagtcacttggcatcacccacagctctacatacttcctattccaagtttagcataggttcctcctgggtgaatccaggtgctgggtcctggccctcccaacagccttcctctctgagctactcattcatgcatgtgaccagtattttcctaagctctcactatgtgccaggcccagtgttgccagcaccttctgttttactctctgtcattgatagctctggcccccaccattttctagtgagggagtgtggcacagatggcaaagcacacacttgggagtcagagttatctgggtttcagtcccggatctgtcatctgtttgtttgtttatttgtttatttatatatttatttaagaccaagtctcactctgtcacccaggctagagtgccgtggcgtgatctcggctcactgtaacctccacctcccaggttcaagcgattctggtgcctcagcctcctgagtagctgagattacaggtgcctgccaccacgcccggctaatttttgtatttttttagtagwgacagggtttcaccatgttggccaggctggtctcaaactcctgaactcaagtcatctgcctgccttggcctcccaaagtgctgggattacaggcatgagccgctgagcctggccatgttgtctatttaattatgaaaacttagacaagttgcttcactggaagcttcggt

SEQ ID NO: 934698 - DNA, 787 bp, Homo sapiens
tccagtagtgtactctaagatggcagagcctaccccatggccaggctgtacggtgtggcctgtgcgtcctgggctccagggctccaaatgtgcacagcaggtgacagcactgaacgctgcaggcaactgcagcacaatactgtatgtctgtatgtctcaacacatctaaacacagagaaggtgccgtgaaaacacaggatcagtgactttaaagtggcgtacctgatatggcacttagcacgaacggagcttgcgggagyggaagttgctctgggtgagtcggtgagagagggtgagtgagtgtgaaggcctgggacgttactgtgcaccactggagactatttttttgagacagggtctcgctctgtcgcctaggctggagtgtagtggcaccatctcggctcactgcaacctctatttcccaggttcaagcgattcttctgcctcagcctcctgagtagctgggactacaggcgtgcaccatcaaaccctgctaatttttgtatttttagtagagatggggttttgccatgttggccaagctggtctcgaactcctgacttcttgtgatccaactgcctcggcctcccaaaatgctgggattataggtgtgagccacccttcctggcctactgaagactttataaacactgtatacttaagctatactctgtttattaaaaatattttttcttcaataataaagtaaccttagcttactgttactttgtaaactttaaaaaaatttttactttttggtaatacttagcttaaaacacaaacacgt

SEQ ID NO: 934699 - DNA, 787 bp, Homo sapiens
tccagtagtgtactctaagatggcagagcctaccccatggccaggctgtacggtgtggcctgtgcgtcctgggctccagggctccaaatgtgcacagcaggtgacagcactgaacgctgcaggcaactgcagcacaatactgtatgtctgtatgtctcaacacatctaaacacagagaaggtgccgtgaaaacacaggatcagtgactttaaagtggcgtacctgatatggcacttagcacgaacggagcttgcgggagtggaagttgctctgggtgagtcggtgagagagggtgagtgagtgtgaaggcctgggacgttactgtgcaccactggagactatttttttgagacagggtctcgctctgtcgcctaggctggagtgtagtggcaccatctcggctcactgcaacctcyatttcccaggttcaagcgattcttctgcctcagcctcctgagtagctgggactacaggcgtgcaccatcaaaccctgctaatttttgtatttttagtagagatggggttttgccatgttggccaagctggtctcgaactcctgacttcttgtgatccaactgcctcggcctcccaaaatgctgggattataggtgtgagccacccttcctggcctactgaagactttataaacactgtatacttaagctatactctgtttattaaaaatattttttcttcaataataaagtaaccttagcttactgttactttgtaaactttaaaaaaatttttactttttggtaatacttagcttaaaacacaaacacgt

SEQ ID NO: 934700 - DNA, 787 bp, Homo sapiens
tccagtagtgtactctaagatggcagagcctaccccatggccaggctgtacggtgtggcctgtgcgtcctgggctccagggctccaaatgtgcacagcaggtgacagcactgaacgctgcaggcaactgcagcacaatactgtatgtctgtatgtctcaacacatctaaacacagagaaggtgccgtgaaaacacaggatcagtgactttaaagtggcgtacctgatatggcacttagcacgaacggagcttgcgggagtggaagttgctctgggtgagtcggtgagagagggtgagtgagtgtgaaggcctgggacgttactgtgcaccactggagactatttttttgagacagggtctcgctctgtcgcctaggctggagtgtagtggcaccatctcggctcactgcaacctctatttcccaggttcaagcgattcttctgcctcagcctcctgagtagctgggactacaggcgtgcaccatcaaaccctgctaatttttgtatttttagtagagatggggttttgccatgttggccaagctggtctcgaactcctgacttctkgtgatccaactgcctcggcctcccaaaatgctgggattataggtgtgagccacccttcctggcctactgaagactttataaacactgtatacttaagctatactctgtttattaaaaatattttttcttcaataataaagtaaccttagcttactgttactttgtaaactttaaaaaaatttttactttttggtaatacttagcttaaaacacaaacacgt

SEQ ID NO: 934701 - DNA, 620 bp, Homo sapiens
gactacaggtatgtgtcaccatgcccagctaatttttaatttgttgcagaggcagggtctcgctatgttgaccaggctggttttgaactcctaactttaagaaatcctcctgcctcagcctcccaaagtattaggattactggtgtgataacttttcatattattcctttgtaattcttttttgtttctataaagtctatagttacatccactttttaagttttatgttagtaatctgaaatttttttggtcaatctagctaaaagttcgtcaaatttttggtcttttcaaataaccaattttttatgtgctttttttccctattgttctatttcttatttaggaatgtgttgtttaattttcacacatatctaaacttccaaaatttcattgtgttattgatttataatattattctagagtgtctgaagaatatattttgtatgaagtcagtccttgtaagtttattgasgtttattttatgtcctcacatatggtctatcctgtagcatttccaatgctcatttaagaagaatttattcagctattgttgggtggagtgctctatagatacctgttatgtctagttggtttatagtgtttttcaaatcttccatttc

SEQ ID NO: 934702 - DNA, 665 bp, Homo sapiens
atgaagtaaaaaagagagatggtccaaataaacacaatcagaaatgacaaaggggacgttaccaccaactccacagaaatacaaaaaaccatcagagactgttataaacacctctatgcatacaaactagaaaatctagtagaagtagataaattccagaacacatacaccctcccgaaactgaatgaggaagaaattcaagccctgaataaaccaatartgggtttagaaactgaatcagtaataaaaagcctaccaaccagaaaaaggccagggccagatagattcacagtcaaattctaccagaagtataaagaagagctggtaccattcctactgaaactattccaaaaattgaggaggaggactccttcctaactcattctatgaggtcaggatcatcctgataacaaaacctggcagtgatgcaacagaaaaagaaaaattcaggtcattatccttgataaaaattgatgcaaaaatcctcaacaaaatactagcaaactgagtccagcagcacatcaaaatgctaatccatcacaatcaagtaggttttatctctgggatgtaaggttggttcaacatgtgcaaatcaacaaatgtgatccatgacataaacagaactaaaaacaaaaatcacacaatcacctcaatagatgcagaca

SEQ ID NO: 934703 - DNA, 548 bp, Homo sapiens
gttaaaacataaatcagaatatgccactcttctgctgcgttctctccaatgacttcctgtgtctctcagaataaaagccaaactctttacaactgcctacaaagactgctatttaaagaagaccacaacagtggcatcatctggtaacttggaaatgcagaagtgcagaacccaactcccaactacaaatcagaatctgcattttcacaagaccaagtcatgtgcacrcacaccaatttttcagaaacactgacctacaagaccttgggtgacctgtccccactaagcccccgagttcatctacttcacttcctctcactcactcttctccagcctctttgttcctctgccattcatcagacatataagacacacttccacctagctgtttcttcggtctagaatcttcctgcccaggtgtctctatagtttgctccgtcacctacttcagttcttgacttagtgaagccttccttgtcatttaaaaagttcaaaaccccctgacacttcatactcttttttttttctacttagtacttcttgctatc

SEQ ID NO: 934704 - DNA, 446 bp, Homo sapiens
tccaggaacttggatttcaggggagttcctgctactctcagaacagattggagtggcttgctatgcctaaccaaacaaatcgtatggtttctgctgaacacacttgcctcatggattcctggcattctggtatgtgccaggcagacaatgcctatgtaaccagcccctggtaaaaamcctgggcaccaagtcccttgtgaacttctaccaaccctggtgtctccactgggataggactcaaagcctgagcctgatttcttccagacttcaccccctacacgtttttcctttgttgaatttattttacatccttttgctgtagtaaatcctagccatgggtatgctgtatgctgggtcctgtgagttctggacaatcacaggatctgaagctggtcttggagttcctgaacatatctacattctaagcttttattgattttgtctag

SEQ ID NO: 934705 - DNA, 594 bp, Homo sapiens
actatgtaattagtgtattaaagccttattataccacatgaattactctgttgtctcatttagtgaactgatatttctacttatattttattaagacatttcaaaagaatatgctaggcagaatgctgtatcatcatccatatttcaatatgttttgtaactttattagtgacaaaaatagtctcattattttcattcggaatactcatgttttcaaatgactaattgaaaagataatacaacatttaaagactcaacagatgttttgtttattagaaatattatggggccgggcacagtggttcacgcctgtaatcccagcactttgggaggcmgaggcaggcggatcacctgaggtcaggagttcgagaccagcctggccaacatggtgaaaacccctctattgaaaatacaaaaattagccgggcgtggtggcgggcccctgtagtcccagctacttggcgggctgaggcgggagaatcgcttgaaccccatgaggaggaggttgcagtgagcagagatcgcaccactgcactccgacctgggcgacagtgtgagaccctgcctctaaataaataaataagtaaataagaa

SEQ ID NO: 934706 - DNA, 594 bp, Homo sapiens
actatgtaattagtgtattaaagccttattataccacatgaattactctgttgtctcatttagtgaactgatatttctacttatattttattaagacatttcaaaagaatatgctaggcagaatgctgtatcatcatccatatttcaatatgttttgtaactttattagtgacaaaaatagtctcattattttcattcggaatactcatgttttcaaatgactaattgaaaagataatacaacatttaaagactcaacagatgttttgtttattagaaatattatggggccgggcacagtggttcacgcctgtaatcccagcactttgggaggcagaggcagkcggatcacctgaggtcaggagttcgagaccagcctggccaacatggtgaaaacccctctattgaaaatacaaaaattagccgggcgtggtggcgggcccctgtagtcccagctacttggcgggctgaggcgggagaatcgcttgaaccccatgaggaggaggttgcagtgagcagagatcgcaccactgcactccgacctgggcgacagtgtgagaccctgcctctaaataaataaataagtaaataagaa

SEQ ID NO: 934707 - DNA, 553 bp, Homo sapiens
aaaattgaaaaaattgtcatattccacagataaatataatctatagaaataatcaaatattcattctaaaacaacaaactgtaatatctgaaattaagaaacattggataatttaactgattatcctgattcattagaagatyattaaagtcaagtaaagataaataggaaacatgcagataaacgcataaaagcaaaataacagatatggagcagattatgtaggttgatgttaaaagtcgatcataggccgtgcgcggtggctcacacctgtaatcccagcacttcgggaggccgaggcgggtggatcacgaggtcaggcgatcgagaccatcctggctaacacggtgaaaccccgtctctactaaaaatacaaaatattagccgggtgtggtggccggcgcctgtagtcccagctactcgagaggctgaggcaggagaacggcgtgaacccgggaggcggagcttgcagtgagccaagatcttgccactgcactccagcctgggcgacagggtgagactccatctcaaaaaaaaaaaaaaaaaaaaaagc

SEQ ID NO: 934708 - DNA, 565 bp, Homo sapiens
aagggacagagtacaaaagagagaaattttaaagctgggagtctgggggagacatcacatgtcggtaggttctgtgatgccccttgagccgtaaaaccagcaagtttttattagtgattttcaaaagaggagggagtgtatgaatagggtgtgggtcatagagatctcatgctttacaaggtaatagaatatcacaaggcraatggaggcagggcgagatcacaggaccacaggaccagggcgaaattaaaattgctaatgaagttttgggcatgcattgtcattgataacatcttatcaggagacagggtttgagagcagacaaccggtcagaccaaaatttattaggcgggaatctcctcatcctaataagcctgggagtgctatgggagactggggcttatttcttccctacagttttgaccatagaagatggccgcacccaagggggccattttagaggcctaccctcagggacacattctctttctcagggatgttccttgctgagaaaaagaattcagtgatatttctcccatttgcttttgaaagaagagaaatatgg

SEQ ID NO: 934709 - DNA, 618 bp, Homo sapiens
tcttcaaattgtcctgctctattctcacctggaaacctgctcgtacaccagtgcttccctcctcagtaaaaagaaccatcaattgcctaggcaaagttatctttcacccctctcattcatacaccatatccaatctattggaaattttgagaatacacgtggagattagatcacctctaaccacttatgtttctcccactgagatgcatgattttaggtattgacttgactagattaagagatatccaaatgcctggyaaaacactatttctgggtatgtctgtgtgggtgtttctggaagcaattagcattttaatcagtggactgaggaaaggagagcttccctcaccaatgtaggtgggtatcatccaattctgagggcttgcatagaactaagaggttaagaaagtgcaaattcactcttttcatgagctgggacatctatcttctcctgacctaggacattagaattccagtttctctggcttttggactctaggacttataccatcagctcactggttctcaggctctcagattcagaatgaattataacactggtattctaattctccagtttgcaagtggtattttgtgggacttctcagcctccataat

SEQ ID NO: 934710 - DNA, 618 bp, Homo sapiens
tcttcaaattgtcctgctctattctcacctggaaacctgctcgtacaccagtgcttccctcctcagtaaaaagaaccatcaattgcctaggcaaagttatctttcacccctctcattcatacaccatatccaatctattggaaattttgagaatacacgtggagattagatcacctctaaccacttatgtttctcccactgagatgcatgattttaggtattgacttgactagattaagagatatccaaatgcctggtaaaacactatttctgggtatgtctgtgtgggtgtttctggaagcaattagcattttaatcagtggactgaggaaaggagagcttccctcaccaatgtaggtgggtatcatccaattctgagggcttgcatagaacwaagaggttaagaaagtgcaaattcactcttttcatgagctgggacatctatcttctcctgacctaggacattagaattccagtttctctggcttttggactctaggacttataccatcagctcactggttctcaggctctcagattcagaatgaattataacactggtattctaattctccagtttgcaagtggtattttgtgggacttctcagcctccataat

SEQ ID NO: 934711 - DNA, 564 bp, Homo sapiens
atctgtctggtcttgggctttttttgtttgtttgtttggtagtctattaattactgcctcaatttcagaactcattattggtctattctgggattcgacttcttcctggtttagtcttgggatggtgtatgtgtccaggaatttatctgtttcttctagattttctagtttatctgtgtagagttgtttatagtattctctgatgatagtttgtatttctgtgggatcagtggtgatatcccctttatcattttttmttgtgtctatttgattcttttctcttttcttctttattagtctggctagtggtctacctattttgttaatcttttcaaaaaaccagctcctggattcattgattttttgaagggatttttgtgtctctatctccttcagttctgctctgtcttggttatttcttgtcttctgctagcttttgaatttgtttgctcttgcttctctagttcttttaattatgatgttagggtgttgactttagatctctcctactttctgatgtgggcatttagtgctataaattttcctctaaacactgctttagct

SEQ ID NO: 934712 - DNA, 442 bp, Homo sapiens
tcaagccaaacactcaggagttctccatgatttttctctttctctcctatcacaaaatctataagcaaacaatgctggctttacctgaaaaacatacctggaatgtttttccatttctttgtctgagctctgaacaaagaaccataactgggctccctgcttcctcccttgccctcttacagtgtatgctcaaatggcacacaggatttttctttgtaaatgtaaatcaaatcttactatccctasctcaaaatcctccaatgattttctaccttaatcagaataaaagcccaaattcctttacaattatttagaaagtaattaccaacttgctacttctcttatctcatttcctactttccactcttcatttgctccactccattctctctaacctgtttgtcattcctcaagcacactagacatactcccacctcaggac

SEQ ID NO: 934713 - DNA, 442 bp, Homo sapiens
tcaagccaaacactcaggagttctccatgatttttctctttctctcctatcacaaaatctataagcaaacaatgctggctttacctgaaaaacatacctggaatgtttttccatttctttgtctgagctctgaacaaagaaccataactgggctccctgcttcctcccttgccctcttacagtgtatgctcaaatggcacacaggatttttctttgtaaatgtaaatcaaatcttactatccctagctcaaaatccyccaatgattttctaccttaatcagaataaaagcccaaattcctttacaattatttagaaagtaattaccaacttgctacttctcttatctcatttcctactttccactcttcatttgctccactccattctctctaacctgtttgtcattcctcaagcacactagacatactcccacctcaggac

SEQ ID NO: 934714 - DNA, 587 bp, Homo sapiens
cagctgaaattggtgtgcgtatctgtgaagaaggaattcttttttttttttttttcacatgcatacgtatgtttattgcggcactgttcacaatagcaaagacttggaaccaacccaaatgtccatcaatgatagaytggattaagaaaatgtggcatatatacaccatggaacactatgcagccataaaaaatgatgagttcatgtcctctgtagggacatggacgaagctggaaaccgtcattctgagcaaactatcacaaggacagaaaaccaaacaccgcatgttctcacccataggtgggaattaaacaatgagaacatttggacacaggatggggaacatcacacactgggcctgtcatgggatgggggaaggtgggagggatagcattaggagatatacccaatgtaaatgacaagttaatgggtgcaccacaccaacatggcacatctatacatatgtaatatacctgcacgttgtgcacatgtaccctagaacttaaagtataataataataaaaaaagagttcttctaccagtaaaattattgttttattatagggaatctgttttttcctctctgg

SEQ ID NO: 934715 - DNA, 730 bp, Homo sapiens
gaaactcctaataaattctaaactcttccgaattttagaaccttgatatttctttacaccttttataaaagatgcctcttgactagggctaagcaagcagtgtgtacacaaacagaattgtgtgcaagtatacacacaccaaatgcactaataatgaagaagagagaacaaaatgaatttcaaatgccgaattcgggaacctcctcaaactattgcctttttcaaatggctggaccaacgattaaacttcagccaagtttttttcttaaggtcttccatatcattaaaaacaaggcatgccaactctgactttataaatctaaaattcagtgatctgcacagtttctgagcttgaagtattgaattgtgactcatctatttttttttcccattttccttctgaggtagagttaccaatccaattttatcaggaccacagatattttgagctaaaccccatratcttttcatacagtaaaaataatttttatgaaaaaagaaagcaggcttcccaggccatggcacatagatatatttacaatttttaatgtaataattaaaaatggtattgtttatattttaaaaaacagcccagctgtattattctgtcaccaagaattattaattgaggatgctgtcaatgctgaattttatagttcagccttcacaatcccatccatgatgaagagttgattctcttacggtatacaatatactctcacaactttca

SEQ ID NO: 934716 - DNA, 470 bp, Homo sapiens
gacagacaatacctggaaaatggggacactcccaccctaacactgcacttttccaatggtcttagcaaacggcacaccaggagattatatcccatgcctggtttggagggtcccatgcccacagagcctcgctcactgctagcacagcagtctgagatcgaactgcaaggcagcagcgaggctgggggagcaagctcaaactgggtggagcctagcgcagctcaaggaggcctgcctgcctgcctctatagactccacctctgggggcagggcatarctgaacaaaaggcagcagaaacttctgcagatttaaacatccctgtctgacagctttgaagagagtagtggttcccccagcatggagtttgagatctgagaatagacagactgcctcctcaagtgggtccctgatccctgagtagcctaactgggaggcacctcccagtaggggctgactgacatctcatatg

SEQ ID NO: 934717 - DNA, 571 bp, Homo sapiens
gcaatttacctttactgtcctacctcaggagtatatcaactctccagctttgtgtcataatctaattgagagagaacttgatcacttttcacttccacaagctatcacactggtccattacattgatgacattatgctgattagacctggtgagcaagtagcagcaaacatgctggacttactggcgagacatgtgtatgccagaggatgggaaataaatctgactaaaatttaaggaccttctacctcagtaaaatttctaggagtccagtggtgtggggcctgttgagatattccttctaaggtgaaggatgagttgttgcatttggcccctcatacaaccatgaaagaggcacaatgcctagtgggcctatttggattttggaggcaacacattcctcatttgggtgtgtcacatttatcgagtgacctgaaaggctgccagttttgagtggggtccagaacagaaggctctgcaacaggtcaggctgctgtgtaagcggctctgccacttggrccatatgacccagaagatccaatgttgcttgaagtgtcagtggcagatagagat

SEQ ID NO: 934718 - DNA, 726 bp, Homo sapiens
aaaggcttcaaacagcattcctatctgccactgacacctcaagcaccattggatctgctgggtcatatggcccaagtggcagaccagcttgcacagtagcctggacctgttgcagatccttctcctgttctggaccgctctcaaaactggcagccttttggttcactcaataaatgggccagagtaacacaccgaaatgaggaatgtgttgcctccaaaatccaaataggcccactaggcattgtacctcttttttggttgtaggatgggccaaatgaggcaacttattattcaccttagaaggaatatcttgacaggtcccacaccactggacccctagaaattttattgagggtagaaggtccatgaattgtagttgtatttatttcccatcctttggcacacaaatgtctcaccartaagtccagtgtgtttgctacttcttgctcactgtatccaacagcatgatgtcattaatgtcatcatatcagtgtgctatcttgcagaagcaaaaagtgatcaaggtctctccaaataagataacgacacaaagccagagagttgatatacccctgaggtaggacagtaaacgtatattgctgagcttgccagatgaaggcaaattgcttctggtgggtgttacagacaggaatggagaaaaaggcatttgccaagtcaatggctgcataccagataccaggagatgtgttaatttgtttaagcaat

SEQ ID NO: 934719 - DNA, 615 bp, Homo sapiens
ttcctcatcgtaaatgaggctaacaacagtactgtcagaggcatttgaaccagagaaactccatcttgaagaggagctgggtaaaatgaggctgagacctactgggctgcattcccagacagttaaggcattccgtgtcacaggatgagataggaggtctgcacaagatacaggtcataaagatcttgctgataaaacagcttgcagtaaagaagcctgccaaaacccaccaaaaccaagatggcgatgagagtgacctctggtcgtcctcactgctacgctcccaccagagccatgacagtttacaaatgccaaggtgtagtcaggaaattatggggaggcatgaataatccaccccttgtttagcatataatcaagaaatarctataaaaatgggcaaccagcagccttcaggtctcctctgtctatggagtagccattcttttattcctttactttcctaataaacttgctttcactttactgtatgtactcgccccgaattgtttcttcagcgagatccaagtaccctcttttggggtctggatcaggacccctttctggtaacagtactactgactttatagggttgccacaaagactgaatgagctaat

SEQ ID NO: 934720 - DNA, 555 bp, Homo sapiens
actctgtgttcatgtgtacacattacaatatgggtttcatcaggtagcagattaccttggccgttggcttattgttatgtctctaaccaagaacattttgtagtcacaatttttaaaactaggtttactcttaattttatacttacactcctgtagcatttctaaattgatccatagtttaggacaaataaktagtttaccatctaacatcaatatattattcactttattatgactcatgacatttaatataattgtgacactttaaatgtaacatttaaggtgtcacaattatacccttgttgttattattttagtataatccccattattattattattattaacattttattcttaatcatcacctctcaattaataagtaactcatgtggacaacctatagtatttgaagaaaaaggataaaagaaagaacataaataagcaaatcctccatgcaccatttttgtgttccactctactaaaattttacactgcagaacaattccagatcctgtaacttaggtcctgtatgttgacagtatttaaagaaaa

SEQ ID NO: 934721 - DNA, 750 bp, Homo sapiens
accccaagatatctttgccattaactatcttgcttttatgactattttcacatcactcttagtatatcaactttggcgaccaaggacatcgttctacttatagcattctgtttttagtagtggtatttccatttacaaaatatagtaattctcaactgctgaaaatgtcaaatcctagaaaaaggagcattcctacgtgtgatattaacatcgttctcaaacagtcgttggctagagatttatttgacggatccgatttttctgaaatagacgattctgatgattcagatgattctgatgttagttctatttagaaataactccaagaacagtttttatattttcatattgaaagtcagtcagatttgcttcagcatcaaagagcatgtttatataaaattaaatgagtgctggcascgagctgcactttttttttttctaaaagggaaaagggttcaatgtaagacttgaaactatgaaactactaaaagaaaacattgggggaacactacaggacactggtctggacacagattttttgagtacagcctcaaaaacacaggcaacaaaagcaaaatcagacaaatgggattacataaagctaaatggcttctgaacagcaaaggaaacaacagagggaagagacaacttacagaatgggagaaatattcacaaactatacatccaacaagggattaagaaccactatctatctataaggaacccaagcaactcaacagcaaaaaaaaa

SEQ ID NO: 934722 - DNA, 624 bp, Homo sapiens
aaagacacagaggttttccataccctctgcctcgtgtccccagttaccaacatcctgcaccagagtggtacgttggttacagttgatgaacctaagttgacatcattatcacccaaagtccatagtttacattagggttcactcttggtgttgtacgttctgcgtgttcgaccaaatgtataatgacatttgcatcttgccttataatagagaggattttcactgccctaaacattttttgtgcttcacctattcatcccttcccccacttcctggcaaccttctggctgcctccataattttgccttttccagaatgtcacataactggaatcatgtagtatgtagcctttttagattgacttctttcatgtagtaatatgtatttaagattcctccatgtcctttcatggtttgatagctcatttctttttagtgtagaataataatccattgtctgcatgtaccaagtttatcaastttgacctactgaagggcgtctccattacttccaagttttggcaattatggataaagctattataaacatccacgtaccggtttttgtgtggacacaagatttaaacttgttgggtagataccaaggaaatgtttgctggatcat

SEQ ID NO: 934723 - DNA, 625 bp, Homo sapiens
ttgctcactctgtcacccaggctggagtgcactggcaccgtatcagctcactgcaacctctgtctcctgggttcaagcaattctcctgcctcagcctcccaagtagctgggactacaggtgccctccaccgtgcccggggtttcaccatgttggccagactggtctcaaactcctgacctcaggttatccgcccgcctcagcctcccaaagtgctgggatttcaggtgtgagccaccgcgcctggmcccagatctggtttattctgaggcctctctccttagcttatagatagccaacttctctgtgtcctctcacgatctttcctctgtgtctgtgtgttaatctcttcttattaggacactgtaagaccaaattagaacccaccctaatgaactcatttaatcttagttccccctttaaagaccctatctccaaatacagtcatcttttgcagtactacgggttaagacttcaacgtaggagtttggtggggagcacagttcagctcatgacaccttcattcctaccacatctcatctttcactttactgcgaagattcagacctttaaaccctgttgtcaaatcttcattgccttcttgcatggcttaggactcttgtcttt

SEQ ID NO: 934724 - DNA, 625 bp, Homo sapiens
ttgctcactctgtcacccaggctggagtgcactggcaccgtatcagctcactgcaacctctgtctcctgggttcaagcaattctcctgcctcagcctcccaagtagctgggactacaggtgccctccaccgtgcccggggtttcaccatgttggccagactggtctcaaactcctgacctcaggttatccgcccgcctcagcctcccaaagtgctgggatttcaggtgtgagccaccgcgcctggccccagatctggtttattctgaggcctctctccttagcttatagatagccaacttctctgtgtcctctcacgatctttcctctgtgtctgtgtgttaatctcttcttattaggacactgtmagaccaaattagaacccaccctaatgaactcatttaatcttagttccccctttaaagaccctatctccaaatacagtcatcttttgcagtactacgggttaagacttcaacgtaggagtttggtggggagcacagttcagctcatgacaccttcattcctaccacatctcatctttcactttactgcgaagattcagacctttaaaccctgttgtcaaatcttcattgccttcttgcatggcttaggactcttgtcttt

SEQ ID NO: 934725 - DNA, 730 bp, Homo sapiens
tgccaaaggcttcaaacagcattcctatctgccactgacacctcaagcaccattggatctgctgggtcatatggcccaagtggcagaccagcttgcacagtagcctggacctgttgcagatccttctcctgttctggaccgctctcaaaactggcagccttttggttcactcaataaatgggccagagtaacacaccgaaatgaggaatgtgttgcctccaaaatccaaataggcccactaggcattgtacctcttttttggttgtaggatgggccaaatgaggcaacttattattcaccttagaaggaatatcttgacaggtcccacaccactggacccctagaaattttattgagggtagaaggtccatgaattgtagttgtatttatttcccatcctctggcacacaaatgtctcaccartaagtccagtgtgtttgctacttcttgctcactgtatccaacagcatgatgtcattaatgtcatcatatcagtgtgctatcttgcagaagcaaaaagtgatcaaggtctctccaaataagataacgacacaaagccagagagttgatatacccctgaggtaggacagtaaacgtatattgctgagcttgccagatgaaggcaaattgcttctggtgggtgttacagacaggaatggagaaaaaggcatttgccaagtcaatggctgcataccagataccaggagatgtgttaatttgtttaagcaat

SEQ ID NO: 934726 - DNA, 623 bp, Homo sapiens
cctcccaggagatctcatatccaatgactagcataagacagcctatacaaacacaacctcttcccccaactaggtacaattctaaaatgccagccagccatgagctacccgtggagttgactgaagccttattgtgactattccgtagcctgacttatgcctccactcagggctttgtccttccttttggccacaactgttcatcttgatggccctcactaaggaccgtctaacatggaatctcatcttagagtcaatcaacttcctagggacctatggtaggcagaattctaaaatggcccccagatttctgacacctaataaccataccttgcgtcatcccttccccttgagtgctacgggaatctgtgagtgtgatggactgttattctcataattaggttatgttatgtggcaaaagtaaagagatttgcagaggcaattaagatccctagtcagttgactttggattaacaagaaggcayattgccctgtgtgggcctggcctaatcaggtgagcccttattaaagagacattctcatgtcactatgctgtgagagaggcatgtggctagggcatgaaagcacctctaggagctaacagagactcccagccaatagcc

SEQ ID NO: 934727 - DNA, 681 bp, Homo sapiens
agaagcataattggaaaattggtgacaatgaaatttggggaagaagtatgtggatggatctctctgagtagtcaaaaactgaaaatatttgtatcccatgttagtgctcaccagtgggtgaccacagtggaggaggagttgaataatcaactggatagaatgactcattctgtgtacaccactcagcctctttcctcagccacccctgtcatcgcccaatgggcacatgaacaaagcggatatggtggcaggaatggaggttgtgcatggactcagcaacatggacttccagtcaccaaggctgacctggctacggcaactgcagagtgccaaatatgacagcagcagagaccaacactgagkgctcgatatagcaccattccttggggtgatcagcgagctacctagtggcaggctgattatattggacctcttatatcatggaaagggcagaggtttgtcctcactggaatagacacttagtctggatatgggtttgcctatcctgctttcaatgcctctgccaagactaccatcgtggacttgcagaatgtcttatccaccatcatggtattccacacagcattgcctctgaccaaggcactcactttacatctaaagaggtgcagcagtggtctcatgctcatggaattcactggtcttaccatgtttgccatcatc

SEQ ID NO: 934728 - DNA, 751 bp, Homo sapiens
tgcagattgaatcattcaatcgtttccagagtccttctactactaaaataaaggacacattatatcttctctgtcttatctttcctcatcttctttcctgccttgctttccctgccaaaagttttgataaagcaggaggtaaagatggcagggagagagataatggctaaaaacacagaatctgtttctcagagttgtgtgtgtgtgtgkgtagtattaagtcacgggggtcaagggtatcaatgcagaggctgaatacatacatagtggtgcctctcctgcatcacaccctcctcctgcattcagttgcagccatgcatcataggtaggatggattgactcttgcctgtatccaaggatggttctaatcccctctcttgccatcatgattggttctgggatggcttcatcagaacaaagtgctgaacttcagtttaatggctgagtgaagtaagagttttctcccctttaatgggaatgaagacgttagtaactagtgttgctcctatcagtcacttgcaactaagagggaggccagtttgaggacagagtcaactcacaaagaagggcaaagcccagggaaacacagagaaagagaggtggagctctgcctttggactttccaaaatgtgtgagcttgccctgcctttcgacttttcaaatacatgagctgatgaatcaccttgattgttttagccagttagcgtcaggggttttgttgcttcactcaaaagtaccttaactgatgcag

SEQ ID NO: 934729 - DNA, 572 bp, Homo sapiens
tcaaactatttaaaattctttttttaattaaaccactgggccacatgaaatatacacactctatttgtagttatctgtagttcttttcagagtttacaaaaataatggtctttgatttatctcatgtaatttgtatcctattcaccaacattgatttgatattcaaatcttggtaaactattgaagactctactcacacttaaaacaacagtgaagaacaccggatataatttcttattggctgtgtgatcttaggcaactcagttaccctctctaagcttcttgatattgcctgttatttgatgaagatgcctgcaagatattcatgactaatctgaataccatacaaaaattgtcctttttatgagyaatcgatttgtttttatcccatggttatggtgagtaaccaatttagagagctaggtagagagagagagaaagagagagagagagagagagagagagacagaaaatgtagctatgttaccaacctaataacagcattgactctcatttttctcatctttaaatgtagaagatttatttaaatataagctcctttctgataaatt

SEQ ID NO: 934730 - DNA, 565 bp, Homo sapiens
ccgatgctgagctgaagagtggactgatctgatttttctcctaggttttacgagaggcagagtatttttcgtatgaacgaacccttgaccccttcccaggatattagtcctttcaactttcactcatttttgtcacrccctttctttggactgcctcagtaacccattggggctggaggaacacaagctttctggatgattgtaaacaccaaactgaaaaaaaaacctgtatcatggaacacgttatagaattatctgagaattaatctttcagaatacaccacattccccatgctatttatgttgaactgccactagcaattttttattatttcaatttttcattatacttgtattttaattttagtagttggtaattttttattttgttttgcttttttaaacagcaaaagcctttatagtagatatttataccaatcaaggatccttctgccttaaggtatttagtggtatttagaactttccatatatcccacacccagcttttcctattggtagtagcttacattagcatggtacatctgtcataactaataaccaatat

SEQ ID NO: 934731 - DNA, 628 bp, Homo sapiens
atttttcctttgttttaaccttggagaatctgatgattatgtgtcatggggttgctcttctcaaggagtatcttagtggtgttctctgtatttcctgaatttgaatgttggcctgtcttgctatgttggagaagttctcctggataatatcctgaggtgtgttttccagcttgattccattctccttgtcactttcaggtacaccaatctaacgtaggtttggtcttttcacatagttccatatttcttggaggctttgtttgtttcttttctttctktttttctctaatcttatcttcacaccttatttcattaagttgatcttcaatccctgatatcctttcttccactcgattgattgagctattgatacttgtatatgcctcacgaagttcttgtgctgtgtttttcagctccatctggtcatttatgttcttctctaaactggttattttagttagcagttcctgtaaccttttatcaaggttcttagcttccttgcattggggtagaacatgctcctttagctcagaggagcttgttattacccatcttctgagtcctacttctgtcaattcgtcaatctcattctccatccaggtttgtgcccttgctggagaggagttgc

SEQ ID NO: 934732 - DNA, 628 bp, Homo sapiens
atttttcctttgttttaaccttggagaatctgatgattatgtgtcatggggttgctcttctcaaggagtatcttagtggtgttctctgtatttcctgaatttgaatgttggcctgtcttgctatgttggagaagttctcctggataatatcctgaggtgtgttttccagcttgattccattctccttgtcactttcaggtacaccaatctaacgtaggtttggtcttttcacatagttccatatttcttggaggctttgtttgtttcttttctttctgtttttctctaatcttatcttcacacyttatttcattaagttgatcttcaatccctgatatcctttcttccactcgattgattgagctattgatacttgtatatgcctcacgaagttcttgtgctgtgtttttcagctccatctggtcatttatgttcttctctaaactggttattttagttagcagttcctgtaaccttttatcaaggttcttagcttccttgcattggggtagaacatgctcctttagctcagaggagcttgttattacccatcttctgagtcctacttctgtcaattcgtcaatctcattctccatccaggtttgtgcccttgctggagaggagttgc

SEQ ID NO: 934733 - DNA, 628 bp, Homo sapiens
atttttcctttgttttaaccttggagaatctgatgattatgtgtcatggggttgctcttctcaaggagtatcttagtggtgttctctgtatttcctgaatttgaatgttggcctgtcttgctatgttggagaagttctcctggataatatcctgaggtgtgttttccagcttgattccattctccttgtcactttcaggtacaccaatctaacgtaggtttggtcttttcacatagttccatatttcttggaggctttgtttgtttcttttctttctgtttttctctaatcttatcttcacaccttatttcattaagttgatcttcaatccctgatatcctttcttccactcgattgattgagctattgatacttgtatatgcctcrcgaagttcttgtgctgtgtttttcagctccatctggtcatttatgttcttctctaaactggttattttagttagcagttcctgtaaccttttatcaaggttcttagcttccttgcattggggtagaacatgctcctttagctcagaggagcttgttattacccatcttctgagtcctacttctgtcaattcgtcaatctcattctccatccaggtttgtgcccttgctggagaggagttgc

SEQ ID NO: 934734 - DNA, 776 bp, Homo sapiens
caggctaaaaaaacttagagttaataatgttagattcaattgtatatgtggtgtcccatggtcctagtttccccctttctgcttttgcaattgtcattttagggagagattcattctttctactgtggcttgtccttgagaattatatgggatgccagtaatgtgtttaatattccatatagagaaaaatgtacctagagcttggctagtgtagcctggggcattatctgtttaatagaagctggaatgcccatcgctgcaaaaggtgacacttaacacagacagaagactctcctgattggcatgtagcccagacataatgagaaaaggtgtccacacrtacatgtacataagctagtctcccaaacgagggaacatgtgtgacatccatttgccaaagagaattaggttccagtcctcgaggattaactcctcctgtaaaagataaggaacgcaccatttggcaagttgggcatcgctggataatagctttagcttctttccaggtaatgctgtatctgcgtttgagaccagaggcattaatatgggttaaattgtgaaagtgtctggcattagatattgcagtagcaactaggtgatcagccatttgattcccttcagttaaaggtcctggaagaggtgtatgagccctaatgtgagtgatattaaaaagagtgcattctagtcctaactgctgtttgcaattgggtaaataaagtcatcagttgttcatctgtatcaaatcataactgagcattttcaattaattgtgtgga

SEQ ID NO: 934735 - DNA, 776 bp, Homo sapiens
caggctaaaaaaacttagagttaataatgttagattcaattgtatatgtggtgtcccatggtcctagtttccccctttctgcttttgcaattgtcattttagggagagattcattctttctactgtggcttgtccttgagaattatatgggatgccagtaatgtgtttaatattccatatagagaaaaatgtacctagagcttggctagtgtagcctggggcattatctgtttaatagaagctggaatgcccatcgctgcaaaaggtgacacttaacacagacagaagactctcctgattggcatgtagcccagacataatgagaaaaggtgtccacacatacatgtacataagctagtctcccaaacgagggaacatgtgtgacatccatttgccaaagagaattaggttccagtcctcgaggattaactcctcctgtaaaagataaggaacgcaccatttggcaagttgggcatcrctggataatagctttagcttctttccaggtaatgctgtatctgcgtttgagaccagaggcattaatatgggttaaattgtgaaagtgtctggcattagatattgcagtagcaactaggtgatcagccatttgattcccttcagttaaaggtcctggaagaggtgtatgagccctaatgtgagtgatattaaaaagagtgcattctagtcctaactgctgtttgcaattgggtaaataaagtcatcagttgttcatctgtatcaaatcataactgagcattttcaattaattgtgtgga

SEQ ID NO: 934736 - DNA, 797 bp, Homo sapiens; identical to SEQ ID NO: 924309

SEQ ID NO: 934737 - DNA, 888 bp, Homo sapiens
cacaagctctctttgcctgcggccatccatgtaagatgtgacttgctcctccttgccttccatcatgattgtgaggcctccccagccatgagtaactgtaagtccattaaacctctctttcttcccagtcttgggtatgtctttattagcatattagcattgtgaaaatggactaatacagtaaattggtaacagcagagtggggtgcggctgaaaagatacctgaaaatgtggaagcaactttggaactgggtaacaggcagaggttggaacagtttggagggctcagaagaagacaggaaaatgtgggaaagtttggaactccctagaaacttgttgaatggctttgacaaaaatgctgataataacatggacaatgaaatccaggctgaggtggtctcagatggagatgaggaacttgttgggaactggagcaaatgtgactcttgttatgttttagcaaagagactgacagcattttaccactgccctagagatttgtggaactttgaacttgagayagatgatttagggtatctggcagaagaaatttctaaacagcaaagcattcaagaggtgacttaggtgctgttaaaggcattcagttttataagggaggcagagcataaaagttcagaaaatttgcagcctgataatgcaatagaagagaaaatcccattttctgaggagaaattcaagcctgctgcagaaatttgcataagtaacaggagccaaatgttaatccccatgacaatggggaaaatgtctccaggccatgtcagagacctttgtggcagcccctcccatcacaggccaggaggcctaggaggaaaacgtggtttcatggaccaggcccaggatccctgtgctgtgtgcagcctggggatt

SEQ ID NO: 934738 - DNA, 574 bp, Homo sapiens
cttctaggctcaagcagttctcccaccttggcctcccaaagtgctgggattaccagcacacccagccattgttttgttctttacattaaaacaaaacaaaaaagtctctgagcttaattatatctaaattcatccacattgttgatttataatttctttgatgacaccctatgcaattcaattggttaggaacatctctagtactataagtggrttgctgtgaccattttaattttactttggacgttagagtgtaaagcaccagcatccgacagtacagataaatctacatgctcttctactccttcactcttcccatagtcaccttagtcagataggcatatggttttggtatgtgtgttttaaataatctccgaaaagagattttgtaaaatttctgaatgcctttctcagactttgggggaggagtaatgggactgaaaggtacatgtacaaggtctaaagaaataccacaaaccctctttcttttccttctccagcctttaatgattttaaatgtgcctgtgtcacttttttttcagatcttactacaacatgttataaaaccattaaa

SEQ ID NO: 934739 - DNA, 597 bp, Homo sapiens
gaaataaatccaggtatttatggtttattggccttccataaaggtactaagaaatacaatgagtaacagatagtccttttaataaatgctacaaggaaaaataaatatccacacgcagaaaaataaaattggacccttgtctaccacaatacacaaaaatcaactcaaaatggattagagacttaaacataaggcctgaagctgtaaaactaytggaggaaaacatagagaaaaagcttcttgacattggtgtgggaaattatattttggatataactcctaaagttcagccaacaaaagcaaaatagacaagtgggattgcatcacactagaaaactattgcacagtaaaggaaacaatcaacacagtgaaaagataatctacataataggaggaaatactttcaaaccatttatctgataaggggttttatgcaaaatatataaagaactgaaacaagtcaatagcaacaaaacaaataacctgatttaaaaatgggcaaaggacctgaatagaagacatacaaatgatcagtagttataagaaaaaatgctcaacatcactaatcctcagggaaatgcaaagcgaaaccacaat

SEQ ID NO: 934740 - DNA, 779 bp, Homo sapiens
aaaccagaagagattaggggcctatattcaatattcttaaagaaaaaatatattcaaccaggaatttcatatctagccaaactaagcttcctaagcaaaggagaaataagatccttttcagataagcaaatgtcgagggacctgcctttcaagagatcttgaagggatcactaaatattgaaaggaaatagtgctaccagctaaaacagaaacacatttaaatacgcagaccagtggcactatagagcaaccacatgaataatccagcataataaccagctaayaacacgacaggatcaaatccacacatattaatactaaccttaaatgtaaatgtgctaaatgccccacttaaaagacacagagcagtaagctggataaaaaagtaagacccaatggtatgctgtctttgagagacccattggacacataatgacacccataggttcaaaatgaagggatggggaaaaatttactaagcaaatggaatacagaaaaaagcaggagttgcaatcctaatttcagacaaaacagactacaaaccaacaaagatcaaaaaagacaaagaagggcattacataatgctaaagagttcaattcaacaagaagacctaactatcctaaatatgtatgcacccaacacaggagtacccagattcatgaagcaagttcttagagacctacaaaaagatatagacttccacacagtaatagtgggagacttcaacactctactgacagtattagacagatcatcgaggtagaaaattaacaaagat

SEQ ID NO: 934741 - DNA, 595 bp, Homo sapiens
aaccctataaaccagaagagattaggggcctatattcaatattcttaaagaaaaaatatattcaaccaggaatttcatatctagccaaactaagcttcctaagcaaaggagaaataagatccttttcagataagcaaatgtcgagggacctgcctttcaagagatcttgaagggatcactaaatattgaaaggaaatagtgctaccagctaaaacagaaacacatttaaatacgcagaccagtggcactatagagcaaccacatgaataatccagcataataaccagctaataacacgacaggatcaaatccacacatattaatactaaccttaaatgtaaatgtgctaaatgccccacttaaaagacacagagcagtaagctggataaaaaagtaagacccaatggtatgctgtcwttgagagacccattggacacataatgacacccataggttcaaaatgaagggatggggaaaaatttactaagcaaatggaatacagaaaaaagcaggagttgcaatcctaatttcagacaaaacagactacaaaccaacaaagatcaaaaaagacaaagaagggcattacataatgcta

SEQ ID NO: 934742 - DNA, 779 bp, Homo sapiens
aaaccagaagagattaggggcctatattcaatattcttaaagaaaaaatatattcaaccaggaatttcatatctagccaaactaagcttcctaagcaaaggagaaataagatccttttcagataagcaaatgtcgagggacctgcctttcaagagatcttgaagggatcactaaatattgaaaggaaatagtgctaccagctaaaacagaaacacatttaaatacgcagaccagtggcactatagagcaaccacatgaataatccagcataataaccagctaataacacgacaggatcaaatccacacatattaatactaaccttaaatgtaaatgtgctaaatgccccacttaaaagacacagagcagtaagctggataaaaaagtaagacccaatggtatgctgtctttgagagacccattggacacataatgacacccataggttcaaaatgaagggatggggaaaaatttactaagcaaayggaatacagaaaaaagcaggagttgcaatcctaatttcagacaaaacagactacaaaccaacaaagatcaaaaaagacaaagaagggcattacataatgctaaagagttcaattcaacaagaagacctaactatcctaaatatgtatgcacccaacacaggagtacccagattcatgaagcaagttcttagagacctacaaaaagatatagacttccacacagtaatagtgggagacttcaacactctactgacagtattagacagatcatcgaggtagaaaattaacaaagat

SEQ ID NO: 934743 - DNA, 608 bp, Homo sapiens
gactgggagggggagctggtggcttcagcaactgagtttaactctgtgggtgtcagcttcaatagcttcctgatccagagcaaagcaggaagctatagttaaaaagaatgtgtaaaagtacagcacagcaaagtgaaaacatgccaaagacagaatgaaacaatgctagagaactgattagaaaatctatgtttaagaaagattatctttgcaaaggagtagaagatagttaagaacacaacacctcgagcacagattgaaaaactgattccatggtcaggcgcggtggttcacgcatataatcctagcactttggaaggcccaggcaggcggatcgttttaggtcagcagcctggcccacatggtgaaacccygtctctactaaaaatacaaaaaaaaaattagctgggtgtggtggcgggcgcctataatcccagctactcaggaggctaaggcagaagaatcacttgaacctgggaggcggaggttgcggtgagctgagattgcaccattgcactccagcctgggcaacaagagcgaaactccatttccaaaaaaaaaaaaaaagaaaaactgatttcagggtaacaatagctgtaatttattga

SEQ ID NO: 934744 - DNA, 620 bp, Homo sapiens
aaaagggaacacttataccctgttgatgggaatgcaaattagtacaacacgtgtgaaaaagattatggagatttttcaaaggactaaaaatagaaatgcaatatggttcagcaatcctactactgggcatctacccaaaagaaaaggaatcgtcatatcaaagatacttgaactggtatgtgtatcgaatcactattcacaatagcgaagatattgcaatcaacctaaatgtccatcagtggatgattgyatcaaaaaatgtgagatatatatctatatatctatatctatagctatatctatctatctatcatctatctatctatttatctatctatctatctatctatctatctactcttcagccataaaaaggaatgaaatcatgtcttttgcagcaacagggagggagctggaagcctttatcttaagtgaagtaactcagaaacagaaagtcaaataccacatgttgtaatttataagtgggagataaataatatgtacatattgacagagagaatgaaataatagagcttggacactcagaaacatagaaaggaggtgaagaatgggaacttacctaatgggcacaatgtacactaatatgtgatgattacact

SEQ ID NO: 934745 - DNA, 623 bp, Homo sapiens
tttaaggttatctctcatattccctgaacaattgctgttatcctgttcttttttcaaggtgcccacatttcatattgctcaaacacacatgctgtacaatttgtgcagttaatgcaattattacagggtcctgaggtgacatacatccttctcggctgacaggactaagagactaaagtaaagacaggcataggaaatcacaagggtattgattggggaagtgakaagtgtccatgaactcttcgcaatttatgtttagagattgcagtaaagacaggcataagaaattacaaaagtattaatttggggaactaataaatgtccataaaatcttcacaatccacgttcttctgtcatggcttcagccggtccctccgtttggggtccctgacttcccgcaacaattttatctctagaatcaacctgggctaaagcaggaagataaaaagatgtatttcaaaaacctgttagtgttatgtgttgttttaatagaatgttgtcttgaggaacacatgatgttgcaaataattcccaggtttagaaagaaccggaccctaatgacaatgggtgttagtgccacgaggagaggatcagagaatatccttccgctttgggtgggtttt

SEQ ID NO: 934746 - DNA, 623 bp, Homo sapiens
tttaaggttatctctcatattccctgaacaattgctgttatcctgttcttttttcaaggtgcccacatttcatattgctcaaacacacatgctgtacaatttgtgcagttaatgcaattattacagggtcctgaggtgacatacatccttctcggctgacaggactaagagactaaagtaaagacaggcataggaaatcacaagggtattgattggggaagtgagaagtgtccatgaactcttcgcaatttatgtttagagattgcagtaaagacaggcataagaaattacaaaagtattaatttggggaactartaaatgtccataaaatcttcacaatccacgttcttctgtcatggcttcagccggtccctccgtttggggtccctgacttcccgcaacaattttatctctagaatcaacctgggctaaagcaggaagataaaaagatgtatttcaaaaacctgttagtgttatgtgttgttttaatagaatgttgtcttgaggaacacatgatgttgcaaataattcccaggtttagaaagaaccggaccctaatgacaatgggtgttagtgccacgaggagaggatcagagaatatccttccgctttgggtgggtttt

SEQ ID NO: 934747 - DNA, 518 bp, Homo sapiens
accaggccaaggaatgcctgcagcccaggatttctcctaagccacgtcccatctctgcgggaccccactagaaatcggactgttcaactcacctggcagccactcccatagcttctggaactctggcccaaggctctctgactccttcccagatcttcttggcttagcggctgaagactgatgctgcctaattgcctcggaaacaccgtagaccatcacggacgccgagcttcaggtaactctcacagtggaaggtaagtccttccccttcttaatcaatatggaggctacccactccacattaccttcttgtcaagggcctgtttcccttgcttccataactgttgtrggtattgacggccaggcttctaaacctcttaaaactccccaactgtggagccaacttagacagtactcttttaagcactcctttttagttatccccacctgcccagttcccttattaggccgagatactttaactaaattatctgcttccctgactattcctggattac

SEQ ID NO: 934748 - DNA, 846 bp, Homo sapiens
ttagaaggaaaaaaagcaggggttgcggtcctagtctctgataaaacagactttacaccaacaaagattaaaagagataaagaaggccataacataatggtaaggggattcaacaagaagagctaattatcctaaatatagatgcacctaatacaggagcacccagattcataaagcaagtccttagggacctacaaagagacttagattcccacacaataaaaatgggagactttaacaccccactgtcaatattagacagatcaacgagacagaaggataacaaggatatccaggacttgaactcagctctgcaccaagtggacttaatagacacctatagaaatctccacccaaaatcaacagaacatacatctttcttagcaccacatcatacttattctaaaattgaccacataattggaagtaaagcactcctcagcaaatgtaaaagaacagaaatcacaacaaactgtctctcagaccacagtgcaatgaaattaaaactcaggattaagaaactcactcaaaaccacacaactacatggmaactgaaaaacctgatcctgaatgactactgggtaaataacaaaatgaaggcagaaataaagatgttctttgaaaccattttttaacaaagacacaacataacagaatctctgggacacatttaaagcagtatatacagggaaatttatagcactaaatgcccacaggagaaagcaggaaagatctaaaatcgacaccctaacatcacaattacaagaacgagagaagcaagagcaaacaaattcaaaagctagcagaaggcaagaaataactaagatcagagtagaactgaaggag

SEQ ID NO: 934749 - DNA, 591 bp, Homo sapiens; identical to SEQ ID NO: 921494

SEQ ID NO: 934750 - DNA, 594 bp, Homo sapiens
ttgggaggttgaggcgggaggatcacttgaacccaggatgcagaggttgcagtgagctgagatcacgccactgcactagagaggctggatgcaatggttcacatctgtctgtaatcccagcactttggaaggccaaataggaggactgcaaagaaaaggaagagagtgaccagtagctctgagaggtgatgggggtattattggatgccaggatgattgtttttaaaggtgaaacagatctaagtatctttaaaagacagacagataggccaggtaagatggctcatgcctttaatcccagtattttgggaggctgagggagctggattgcttgaactcaggaattcaagactaacctgagtaacatartgagaccctgtctctacaaaaaataaaaaattagctgggcctggtggtatgcacctatagtcccagctactcaaggagtctaaggtgggaggatcacttgagcccaggaggttgaggcaacagtgagctgtgttcatgccactgcaccctatcctggatgacagagcacaattctgtctcaaaaaagaaaaaaatacaaataagcaattaaaaataccaaattta

SEQ ID NO: 934751 - DNA, 614 bp, Homo sapiens
ataggattgtgcctcttctttgtaaaagatgattcaccattccagtcagtcaggatttatctggactctgattaaatcaatcagttaattccacaaattcctcccaggcttgggtcactcacaaattttatcaccatgccatcagcaccctgacgttaaggtactgaaaggaacaaagttagggatagagatacatggcatataagtacagacctctcttcagtctgcctgattctttcagtagtaagtcaggtttttatttcacctaactggattgccatcagtccatctccatcttgctcactaagagaggcagtaaagcacatttgctagctagagaagcagactttgaagctaggtcatctggattcaaatttcagctctcccatttactagctctgtgggcaagttccttaatctctttatgcccatgcttccacatctgtaaaawgggaatagtacctaataattggttaggagcattaagctagttggcctatgtaaaacatccaaaacagtacctggtatataataaatttgctataataatgactactgtaggtacctcctgccagcatccttctgatgctgcctgtctagtataggtcttgctt

SEQ ID NO: 934752 - DNA, 607 bp, Homo sapiens
cagcccagctggaagggcaggctagaaatctcatcatgagttgaaattgcagtacgcaggtagaatttctcctctgaaggaagcctcagttctgcttttgaaaagccaaactttcggccaggcacgatggctcaagcctgtattcccagcactttgggaggccgaggtggatgtatcacaaggtcaggagttcaagaccagcctggccaagatggtgaaaccccatctctatgaaaaatacaaaaagcagccaggtgtggtgacaggtgcgtgtaatcccagctactctggaggctgaggcagagaattgcttgaaccagggaggcagaggttgcrgtgagccaagatccagcctgggtgacagagcgagactctgtctaaagtaaacaaacaaacaaacaaaagaactttctttcaactagttgaatcaagatcacccagattatctaaagtaaactttactgaaagtcaattgattatagacttttattacatccttaaaatatctacatagcaacaactagactagtatttgaaggaataatttagactatagtctaacatagtttacatatcaaaataaatgatcacagaatgaagtttcact

SEQ ID NO: 934753 - DNA, 561 bp, Homo sapiens
aggaagggctggcagcatccctcaaacaggaagcaggcggccgggcgcggtggctcacgcctgtaatcccagcactttgggaggccgaggcgggcggatcacgaggtcaggagatcgagaccatcccggctaaaayggtgaaaccccgtctctactaaaaatacaaaaaattagccgggcgtagtggcgggcgcctgtagtcccagctacttgggaggctgaggcaggagaatggcgtgaacccgggaggcggagcttgcagtgagccgagatcccgccactgcactccagcctgggcgacagagcgagactccgtctcaaaaaaaaaaaaccaaaaaaaaacaaaaaaaacaaaacaaaaaaaaaaacaggaagcaggcatcaagaaggatttccaaaagggagtcacatctttgaaatacagtataaacaggattctggatctttccattttgagaaccaaatctgacatgatggggtccagagagagataactgttgctttttaaaagctgatttctagagacgagtcttgatttggtaaagaacaaatgagaaaccc

SEQ ID NO: 934754 - DNA, 688 bp, Homo sapiens
aatgtgtatcccattggaagacaagaatctagctgagtaagccgggagtggtggctcacgcctgtaatcccagcactttgggagcccgaggcgggtggatcatctgaggtcaggagttcgagaccagcctggccaacatggtgaaatctcgtctctactaaaaaattagccaggcgttgtgggtgatgcccataatcccacttactcgggaggctgaggcaggagaatcgcttgaacccgggaggtggaggttgcagtgagctgagatcacaccactgcactccagcctgggcaacaagagtgaaactccatctcaaataaataaataaataaacaaataaaatactaccaaaattaaaaaaaaaaagactctagctgagtagtgctcaggaaagtgagaaattagaacaaagtgaaagacrctagcaaaggctaatagtggttctatccccccaaattctagagtataatagatatttaatgtcatgtaaaagaactacacaaagaactagacacgtgcaggtgcatgtgactggtacatagtaggtgatcaaataaatgtttcaattattgccttcttttaaggggtgcaaatgtactaaattctacatgaaaatactatcttagctgttgtatcttgaaaacgttatgtttcaaataacagttatatttcaaactgacataactg

SEQ ID NO: 934755 - DNA, 657 bp, Homo sapiens
agtgtaaccagagagggcatggaagctctgtgttccttccctcataccctgccctaagtacctctttatctggctgtttatcttttgtatcctctataacagtggttcccaaaccctgggctgtaaactgataccagtctgtggcctattagaaactgggctgcacagcaggaggtgagcagcaggcatgtgagcactattgcttgagcagcacctcctgtctgatcagtggtggcattagattctcmtaggagcaagaaccctattgtgaattgctcatgcaagggatctaggttgcccactccttaagataatctaatgcctgatgatccgaagtggaaaaatttcattctgaaaccaatccgccactccctgggtcatacaatattctctctctctttttctctcttttagagacagggtcttgctctgtcacccagcctggagtgcagtggtatgttcatagctccccacagcctcagacttctggcctcaagcaatcctcctgcttcagcctcctaaattgttgggattacaggtgtgattcaccacacttagcttatgatagtctttataaataaactggtaaatgtaagtaaagtgctttttagagttttgtgaactgttctgggaaattactgaacctgaggagggggt

SEQ ID NO: 934756 - DNA, 589 bp, Homo sapiens
catcaatagatgaattgataaaatgtactctgtaaaaacgcaccaatcagcgctctgtgtctagctaaaggtttgtaaatgcaccaatcagcactctgtaaaaacgcaccaatcagtgctctgtgtctagctaaaggtttgtaaacgcaccaatcagcactctgtraaaacggaccagtcagcactctgtaaaatggaccaatcaacactctgtgaaatggaccaatcagcaggacatgggtggggccaaataagggaataaaagctggccaccggagccagcaggggcaacccgctaggtccccttccatgccatggaaagctttgttcttttgcttttcacagtaaatcttgctgctgctgaaaaaaaaaaaaaaaaaggaaaggaagaaaatgtgctatatatacacaatgggatacaattaagctataaaaaagaattaaatcatgttatttgcaacagcatggctggtactagaggtcattatgttgagtgagataagccaggcccagaaagacagatactgcattttctcactcatatgtgaaagctgaaaaaaaagatctcatggacataaagaacagaata

SEQ ID NO: 934757 - DNA, 589 bp, Homo sapiens
catcaatagatgaattgataaaatgtactctgtaaaaacgcaccaatcagcgctctgtgtctagctaaaggtttgtaaatgcaccaatcagcactctgtaaaaacgcaccaatcagtgctctgtgtctagctaaaggtttgtaaacgcaccaatcagcactctgtgaaaayggaccagtcagcactctgtaaaatggaccaatcaacactctgtgaaatggaccaatcagcaggacatgggtggggccaaataagggaataaaagctggccaccggagccagcaggggcaacccgctaggtccccttccatgccatggaaagctttgttcttttgcttttcacagtaaatcttgctgctgctgaaaaaaaaaaaaaaaaaggaaaggaagaaaatgtgctatatatacacaatgggatacaattaagctataaaaaagaattaaatcatgttatttgcaacagcatggctggtactagaggtcattatgttgagtgagataagccaggcccagaaagacagatactgcattttctcactcatatgtgaaagctgaaaaaaaagatctcatggacataaagaacagaata

SEQ ID NO: 934758 - DNA, 602 bp, Homo sapiens
tggtggggacttggagaacctttatgtctagctaaggtattgtaaatacaccaatcggcactctgtatctagctcaacgtttgtaaacacaccaatcagcaccctgtgtctagctcagggtttgtgaatgtaccaatcgacagtctgtatctagctaatttagtggggacctggagaacttttgtgtctagctcagggattataaacacatcaatcagcaccctgtcaaaatggaccaatcagctctctgtaaaacagaccaatcggctctctgtaaaatggaccaatcagcagaatgtgggtggggccagataagagaataaaagcaggctgcgtgagccagcagtggcaaccagctcgggttccctcccacagygtggaagctttgttctttcgccctttataacaaattttgttgctgctcactgtttgggtccacactgcctttatgagctgtaacactcactgcgaaggtctgcagcttcactcctgaagccatctagaccacgaacccaccaagaggaacgagcaactctagacgcgctcccttaagagctgtaacgctcactgcgaaggtctgcagcttcagtcttgaagctagc

SEQ ID NO: 934759 - DNA, 583 bp, Homo sapiens
ccagccatgactgaatggggtcaatatagagtttgggttgttccttcagagggtggaagccccaaactttagcagcttccatgtggtattgagctgcgggtacagagaagtcaagaattgaggtttgggaactccacctagatttcagaagatgtatggaaacacctggatgcccaggcagaagtttactgcaggggcagggcctcagtgaagggcctctgctagggcaatgcagwagggaaatgtgggactggagcccccacacagaatccctactgggcactgcctagtggagctgtgagaagagggccacagtcctctagaccctagaatagtagatccacctacagcttgcactgtgtgcctggaaaagctgcagacactaaacaccagcccatgaaaggagccaggaggaaggctccaccatgctaagccacagagttccccaagatcatgggaacttgccccttaagtcattgtgacctggatgttagacctggagtaaaaggagatcattttggagctttaaaatttgactgccccactggatttcagacttgcatgggccctgtaacccctttgt

SEQ ID NO: 934760 - DNA, 620 bp, Homo sapiens
tacagaggagccacatggctgagcaaaagcttacctactggccattatgtttaagcaccatctactggatcacagtccaaactttaacaccaaaaatactttgctaacatacccccaccccatgaaaccaaagacaaaagttcacctacaaataaagaccttgcacaaaggcttggccctttgaaagcatccagaaacaaagtcaactgactatactcaaattgtgctacagtttaaggaacatcggcccaccacagatgagaaagaactagcacaagaattttggcaatttaaaaagtcagagtgtcttctttcctccaaaggattamactagttcctcagcaaaaacttaaatggttgaaattacaaaaatagaattcagaatatggatgggaaagaaggctattaagattcaggagattgttgaaacccaatcaaggattacaatacaacaatacaggagcagaaagacaaaatgccccattttaatataaaataaaattaataggatagaagtgaaaaacacacaacaagaaccttataattcagttgaaagtattaacagtagactagaccaagctgagttaataaactcagagatcaaagactggttctctgca

SEQ ID NO: 934761 - DNA, 624 bp, Homo sapiens
ttggtctaaagcatgacgaagcaaatatgcaagaaaacaataacagaatcagaggggctacaatcagagtgactcaagtctgctgcaatactgtcaaaggttttttgaaggtactttaaaccctaatttaagatacatatttaaagtacatagaaagttaactaatacagagtaagcatctaatatctagtcaatactggtagcagcagaaacagaggcactgtcaatctaagagcatcccaaataagccctatcatgtaagataaggaaaatattattatttttattattattttattattatagtttaagttctggggtacatgtgcagaacgtgcagttttgttacataggcatacacrtgccatagtggtttgctgtacccatcaacccatcgcctacattaggtgtttctcctaatgctatccctctcctagccccccaccccacaacaggccctggtgtgggatgttgccctccctgtgtccatgtgctctccttcttcaactcccacttatgagtgagaacatgcggtgtttggttttctgttcttgtgctagtttgctgagaataatggcttccagcttcatccatgtcccggcaaaagacgtgaactcatacttt

SEQ ID NO: 934762 - DNA, 669 bp, Homo sapiens
gactcttccctaattctgctggctgcctgactcttccttaattctgctggctgccttccctcagggtgcctgtaagatatagtcagggatggcttccctgggcttgagctggagactgagaatgcctatatggctcttctcaatgctacttctactttcatattttgcaccattccctaaatccattccagctccaggtaaggttaaagccttytcctgtgatctggattttcagattccccagtggagatgtgcattcagaggcagattctccccatctcacactctgcaaacttgtttccccttttattttatgttgttttaaaaagagtttttatataaaccagtagaagatcatttattttttaaattaattttattgtacttcagtgtcatcaaaagatgctttatcatgcctactttataaaatttattaagattttccttgttatttaacatatagccaattaaaaaatattccatatgtatttcaacagatgtaatgtgccatcatctttcactcactggaacacggaaacatggccaacttacctgtaagggagactagaaaatgtagttttttaaattgtagtaaaatacaactaagataaaatttaaaatcaactatttttcagtgtacagttcagtggcagtaagtagattcacatt

SEQ ID NO: 934763 - DNA, 626 bp, Homo sapiens
gccagttatgccagcaccatttattgaataaggagtccaaagatcagatggttgtaggtgtgtggccttatttctgggctctctattctgttcaattggtctatgtgtctgtttttgtaccagtcccatgctattttggttactgtagccctgtagtatagtttgaagttgggtaacatgatgcttccagttttgttcttttttgattaaaattgccttggttatttgggctcttttttggttccatatcaattttaaatagtttttttctagttctgtgaarcatgtcattggtagtttgacagtaatgaatctctaaattgcttcaggcaatatggcaattttaatgatattgattcttcctatccatgaacgtggatatttttccatttgtttgtgtcatctctgttttctttaagcagtgttttgtaatttcattgtagagatctttcaccttccttttaagctgtattactaggtattttattctttttgtggcaattgtgaatgggattgtgtttttgatttggctgttggtttggctattgttggtgtatagaaatgctagtaatttttgtacattgattcttgtatcctaaaacattgctgaaggtgtttatcagctg

SEQ ID NO: 934764 - DNA, 620 bp, Homo sapiens
ctgttttttttaaaaaaaaaaatcaacaaaatagatagaccactagccagactaataaagaagaaaagagagaagaatcaaatagacacaataaaaaatgataaagagggtatcagcactgatcccacagaaatacaaactaccatcagataatactataaacacctctacgcaaataaactagaaaatctagaagaaatggataaattcctggacacatacaccctcccaagtctaagccaggaagaagtcaaatccctgaatagaccaataacaagttctgaaattgaggcagtaattaatagcctaccaaccaaaaaaagtccaggaccagrtggattcacagccaaattctaccagaggtacaaagaggagctggtaccattccttctgaaatgattccaaacaatagaaaaagagggaatcctccctaactcattttatgggacaaatttcttgaatacagaaaggtgtgagatgcagagtacagtgaagggtttggccttggataagagcagaaggagagacaaaaagagtgcacctagatgttaatgggttggttgagtcagtgataggaggatgagggagtagccataatcagttacaacaattatgaagta

SEQ ID NO: 934765 - DNA, 582 bp, Homo sapiens
cttccaggaagatcaagttgaagtacttgtctattctccttccacttagtacaataaaaaacctagacattatattttacacacacacacacacacacacacacacacacacacacacggccctaaaacatagagaaaaggcccayaggctaggaaccctaagatccaagatcaacaggttggggtattcccaaggctttcttttagcctcatatatctcagaggtggaactgaaatggctagcaaactggaaatgccagtgggcataggccaaaaacatcctaacaaaatctttctttctttactaaaacaatcaggaaagggggaaacgtagcaaggcagaaaacttttagtaacaacttctctacttcagccaaatatcacagaaaaagtggtggagaacttagggtttcactttctggaggctgtaaggtggtatcaggaggctgagtagggaatgtggactttcatcctcttaggcagtatcaaggaccctgccctcaccagagtgtcagtggaggctgtgtggagtacctggacttccacctccactctgtagtaatgaaatggcacccccatttt

SEQ ID NO: 934766 - DNA, 762 bp, Homo sapiens
ctttctcagttggctcaaagagaacatcccccacagatgtaggctataacccccatgaaccttctggcttaccattctgtttatacacattcttttatttaccattgtagatggcaccaagggaaggaaagaaaatggagagaggaaaggaaaggggaaagagggagagtaggagggaggaaaatgggggaaggaaggaaaggaaaaaaaargagggaggaatgaaagggaggaagggcgggtgggcaaaaataaagggagaaaagaaagacggggatgtagaaaaaaagaaggaagaaaggaaccggatgaggaatggaaaggagggaggaaggaaggatctcagatatattcctgccttctctgtattctggcctgtatctcagagaattacatttcctaggctcctttgccctctgggtaggtttggacactgggagggctttgtaggaaactggagggtggaagaagaggcaaatccagagtcagtctctctctctctctctctctctctctctctctctctctctctctctctctctgtctttccctacactccccctcctatctccctcccagctttctctctccttcctatggcatctccagcagtgactgggtctcctctgtggctccagctcctaccagagaagtccccctccatggttgcagctcctaccaagtagccatcactatggttctagttccttctggatggttctgagttccagtgctaccacctcctcctcctgtttttccagt

SEQ ID NO: 934767 - DNA, 673 bp, Homo sapiens
caggagaatagcttgaacctgggatgcggaggttgcaatgagctgagatcactccactgcacttccagcctgggcaacagaatgagactccgtctcaaaaaaacaaaaacaaaaacaaaaaaaaactcccacaactttttgagagttggaagaccatgaagtatagtatctgggacttagagtctggccattaattttgaataccatcctttctacttatctgtatggcaaggggtgagatgtccatcctctgagactcagcactctcatctgagttgatttgtagttgatccaatggaagtgagtgatgattaaaccgatcgtgggctcccgctgcatgatctctatgatggatgcataaagtaaaggtaaagtgaattttagatacatttgttaatattttaagcttaaactccatacaattcaatggaaatatcccctgacctgaagttctggtttccctgcaytccagacaggacattttattttgtccttatctcagtaagtactgagtattgtgagaggaacaagtgagtctcttttgtttctgactccccagagcctacatcttgcttggcacataggagacagcaaaagtaaacatctatgtgaattattgaattgacacttccttggttcacaaaaattggctgtcatcagtgtgacttcgact

SEQ ID NO: 934768 - DNA, 547 bp, Homo sapiens
gcgaaatcaattctccctgtgcttacagagaccctgccccgaccccaagaagcctcctttattcaatacacagcaagcagccctccacaggtcagccaccaagccagtcacttccttcaatgatccggaggcttcctaacgcacctcagacagaaagttcagggtrgggaacccctgccaactcagccacagcctctaaagtgttaagaaaacaaccgggacactgggagggagctgacaggctgggaggaaggagggccttttggaaatccaatcccagttagaatcgtacggatcccagcagcgccaaagctctgtgtacctgttcccccacggtgctgtgacccccatccacacccacccaagttcagagcaccgtgcgcccagttgggcaccctaggagactgaactaaggccagccgcctgctggacaagtccctactcccggcgccaaccccaaccccctacagcttccactttgcaggtagtcaacctcccctacctcctaccccgcacccagtagtttccagtctgacctgggttctca

SEQ ID NO: 934769 - DNA, 631 bp, Homo sapiens
actatgcaatggtagagattgccatgaaatggtaatagcggtttaaaatttttttgtatcattttatgttacaatgagaatatcttcatgtagaacttgagtgattaaacaattttttctttattttaattattagtattatttttttttttgagacggagttttgcttttgtcrtccaggctacagtgcagtggcactatctcagctcattgcaacctccgccttccaggttcaagcgattctcctgcctcagcctcccaagtagctgagattacaggtgcccaccaccatgcccagctatttttttttttttttggtatttttagtagagacagggtttcactatgttggccagactggtctcgaactcctgacctcaggtgatctgcccaccttggcttctcaaagtgctggaattacaggcgtgagccaccacgccaggccaattttcaattttttattttaaattttcgtgaatacatagtaagtgtatatatttatgggatacagggatattttggtataggcatgcaatacataatcacatcgtggaaaactgggtatctatcccttcaagcatttatcctttatgttacaaacaatccaattatacctttttagttattttta

SEQ ID NO: 934770 - DNA, 607 bp, Homo sapiens
gtcacaaacccctggccttaagcgatcctcccattttggcctcccaaagcactgggattacaagtgtaagccgctgtgcccaacccaatttactttttattgaaatataatttcagacttaggaaaaagttgcaagaacaatacaaagaattcccatgtacctgtcacccagatttcccaaatgttaccacattaccactttgctgtatccttcccccaccccccacccctgtctctgtagatacagctataaagaggagaaaaatgcttgttttctcagacatmacacctctgtgaaatacttcactctgaatttcctaaaaacaagcaacattgtcttacaaaaccacaatacaatgatcaaacgtagggaatgaacactgacacagcgttattgtctcatctgaaaactttctccaggtctccccatttgtactgatgatgtcctttgtcaccaaaggaagctccagatgtcatatggcatttcgttgtcctctcttttgctttctttagtctgaagcagttcctgtgtctttttatatctttcataacactgacatttttcaagagcacacgtcagagattttattgaacatccctcaatttg

SEQ ID NO: 934771 - DNA, 607 bp, Homo sapiens
gtcacaaacccctggccttaagcgatcctcccattttggcctcccaaagcactgggattacaagtgtaagccgctgtgcccaacccaatttactttttattgaaatataatttcagacttaggaaaaagttgcaagaacaatacaaagaattcccatgtacctgtcacccagatttcccaaatgttaccacattaccactttgctgtatccttcccccaccccccacccctgtctctgtagatacagctataaagaggagaaaaatgcttgttttctcagacatcacacctctgtgaaatacttcactctgaatttcctaaaaacaagcaacattgtcttacaaaaccacaatacaatgatcaaacgtagggaatgaacactgacacagcgttattgtctcatctgaaaactttctccaggtctccccatttgtactgatgatgtcctttgtcaccaaaggaagctccaratgtcatatggcatttcgttgtcctctcttttgctttctttagtctgaagcagttcctgtgtctttttatatctttcataacactgacatttttcaagagcacacgtcagagattttattgaacatccctcaatttg

SEQ ID NO: 934772 - DNA, 601 bp, Homo sapiens
agtgtagtggtgaaatctaggctcactgcacactctgcctcctgggttcaagtgatcctcctgcctcagcctcccaagtagctgggactacaggcgtgcgccaccatgctggctaatttttttgtatttttagtagagacggggtttcaccatgttggccaggctggtctcgaaaccctgacctcaagtgatcygcctacctcagcctcccaaagtgctgggattacaggcgtaagccattgtgcccggccagatcctaccctttcagtatcttcagatggcagggtgtggaatagtctctgatgtctcaatttcccagccaatgtattaagcctatttgatttctgtggccaaccattcctcaaactccaggatggcctcgaagggcacagacagcttcggtgaactggactggagcccaaatttggttttagaagaataatgagctggtctctcatgcaaacacacatcttacctgaaaatctttgagctatttcaagattcaactcaggttggtatttaaggccttatatacaggaatctccaaacattcccttgaagacacatgaagttcctttgttttctgtgagtagcaggctct

SEQ ID NO: 934773 - DNA, 633 bp, Homo sapiens
acaaaagccagcttcagatttccactgaccacatgcaagacatttaaagcaacaaaataaatagtgatagtaatgaattatgactcattgactaaaataagaatccatgagtccatactgataaaaataaataattagttagattaatggaggacaagggaaaacawtttctgacagtagaatgctaatgcatataaaataaaggatgggtgttagaaaatcactaacgaatgctaaaattggtaagcaaaccaatttgatgaagagcaagatatgtacaaaatctcaaagcatctccccataaattacttattaattataaagaaaaaatagtaactttcattggaaaaatcttgcagacgtcatcttaagcaagtgataaagtttaacaatactgaaattggaacaaatcaacatcataggcatcccaatacaataatgcactgagaaagacacaacaaacatcacttctttgttgttgttgtttgtttgtttgtttgttttgttttgttttgttttgttttgttttaaactgagtccctctctgtcgcccaggctggagtgcagtggcacgttctcagctcactgtaacctccactactgggttcaagcaattctcttgcctcagcctcc

SEQ ID NO: 934774 - DNA, 579 bp, Homo sapiens
cttatccaagcagtgctcagcagcccacattgaccaggtccctgctgaccagaccccgcacatcaggtcctccctgatgacaccctcactgattagaccctcatgaccaggccccactaacaaggcccccactgccaggcacacaatgacaaggactccactgaccaggaccttactgacaaggcctcactgacaaggcctcacggaccaagtccttactgacaagtcctcactgactaggtcattattgacaaggcctcactgatgaggttccacggatcatgaactcattccctggcccaaagatgaggccccactgaccaggcctccagggaacaggttgccactgatcagacccctaataacsaggccttatgtcaccagatgcccctgactggaaccctagtgagtagaccccactgaaccggcaccaaatgctgagattcccgctgaccaagtcaccctgtagaccggtgctacaaaagtcaccactgaccaagtcctctctgaccaggacactacagattaggtctcaccgacaaggctgccctgaccagggccccactgacaagggcctca

SEQ ID NO: 934775 - DNA, 586 bp, Homo sapiens
attgtgttctcccgtgtcctcctctggagattcttcacagtcacctcattcatcaataatgtaccatatgttcttactgccatcatccagcagctcacccccagccacccatgactctcctgtctgtcccagctactctccaactacgcccagatttcagcgggagtctgtaccccacaccccagaaacacctacaaactcacagacctcagtgagatcctcgccagtctctctcacgtcttcacccccagcccttacggaccctccagtctgtcccagcatactctccaaccacgcccacatttcagcgcggggcttttccaggaaccctcgggatcaccaccaagcccaccactttcactgagttactccccagtctccagcacgtctttrtctccaaccctcagggactcgcctgtctgtcccagctactctccaagcacgcccacacttcagcgggagtccgttgcaggcacccagaaatcaccaccaaactcaccaatttcactgcgttactccccagtctctctcatgtcttcaccatccctcagggactctcccgtctgtcccagctactctccaacca

SEQ ID NO: 934776 - DNA, 582 bp, Homo sapiens
acacttaggagatcatagtttctaaatggaaatacatataaatatgtctgaaattttttcttttttcttttttttttttgagatggactctcgttctgtcacctaggctggagtgcagtggtgcaatctcagctcactgcaacctccgcctcccagattcaagtgattatcctgcctcagcctccagagtagctgggattacaggcacccgccacgacacccagctaacttttatatatatattttctatttttagtaaagacagggtttcaccatgttggccaggctggtctccaactcctgacctcagatgatccacccgcctcggcctccccaagtgctgggattaaaggtgtgagccactgtgcctggcctggaatttttttctaaaatttacatttctgagttaagaatrcttaaaatattataaaaacagaagcaaaattcattatgtgtttcattaattacctttattaaaaacaatgcaattatattacaataggacaaaaaatgtttaagcaaacgaaaagaaaaccatgacatacccaaactcaggaggaggcaacaaaggcagtgctaaag

SEQ ID NO: 934777 - DNA, 632 bp, Homo sapiens
aactttacgtttccctttcctaaccaagcaggacagtcactcatgtcattgtgttctcccgtgtcctcctctggagattcttcacagtcacctcattcatcaataatgtaccatatgttcttactgccatcatccagcagctcacccccagccacccatgactctcctgtctgtcccagctactctccaactacgcccagatttcagcgggagtctgtaccccacaccccagaaacacctacaaactcacagacctcagtgagatcctcgccagtctctctcacgtcttcacccccagcccttacggaccctccagtctgtcccagcatactctccaaccacgcccacatttcagcgcggggcttttccaggaaccctcgggatcaccaccaagcccaccactttcactgagttactccccagtctccagcacgtctttatctccaaccctcagggactcgcctgtctgtcccagcyactctccaagcacgcccacacttcagcgggagtccgttgcaggcacccagaaatcaccaccaaactcaccaatttcactgcgttactccccagtctctctcatgtcttcaccatccctcagggactctcccgtctgtcccagctactctccaacc

SEQ ID NO: 934778 - DNA, 634 bp, Homo sapiens
tgtgttgaatccaatactgcttggcagacctacaactttacaaatgacctgtgttccacctagagagggtgccagccctctcagcattatgcagtgcccctcctctgtctgcatccccaggaccaccatgggtggggagggcagagattggggagcacctatagaggctctaatgctctaaggtgacagtgatgaggasctgggtgcacccatgagtggagaagctaggcctgtccagagaagcaagacaaacacacacatacacactcacacacacacaggcacatatgcatacacaaatacattgcatacacacatgtcagttcaggggatagaggacatggactctgggccctgttgacccaagcagactcccatggtggtgggttgtgtcaccccagaatgtcactgttgctgagtccccatcgcctctgtgttgtggagcagttagagacacacagcagtgtctgtgagtagctctgcgtgaaggaccattttctagatgagaggcacatctcaacacagctcactgatcagattcaggtgagtgggacctgctcttttctcttccttctggcttgggaaaagtcactatcaggtggatggttttggtctctgggcagctactgagggt

SEQ ID NO: 934779 - DNA, 673 bp, Homo sapiens
accctggagggtggctggaaagagaaggtgagaagatgtgttgaatccaatactgcttggcagacctacaactttacaaatgacctgtgttccacctagagagggtgccagccctctcagcattatgcagtgcccctcctctgtctgcatccccaggaccaccatgggtggggagggcagagattggggagcacctatagaggctctaatgctctaaggtgacagtgatgaggacctggrtgcacccatgagtggagaagctaggcctgtccagagaagcaagacaaacacacacatacacactcacacacacacaggcacatatgcatacacaaatacattgcatacacacatgtcagttcaggggatagaggacatggactctgggccctgttgacccaagcagactcccatggtggtgggttgtgtcaccccagaatgtcactgttgctgagtccccatcgcctctgtgttgtggagcagttagagacacacagcagtgtctgtgagtagctctgcgtgaaggaccattttctagatgagaggcacatctcaacacagctcactgatcagattcaggtgagtgggacctgctcttttctcttccttctggcttgggaaaagtcactatcaggtggatggttttggtctctgggcagctactgagggtaat

SEQ ID NO: 934780 - DNA, 634 bp, Homo sapiens
tgtgttgaatccaatactgcttggcagacctacaactttacaaatgacctgtgttccacctagagagggtgccagccctctcagcattatgcagtgcccctcctctgtctgcatccccaggaccaccatgggtggggagggcagagattggggagcacctatagaggctctaatgctctaaggtgacagtgatgaggacctgggtgcacccatgagtggagaagctaggcctgtccagagaagcaagayaaacacacacatacacactcacacacacacaggcacatatgcatacacaaatacattgcatacacacatgtcagttcaggggatagaggacatggactctgggccctgttgacccaagcagactcccatggtggtgggttgtgtcaccccagaatgtcactgttgctgagtccccatcgcctctgtgttgtggagcagttagagacacacagcagtgtctgtgagtagctctgcgtgaaggaccattttctagatgagaggcacatctcaacacagctcactgatcagattcaggtgagtgggacctgctcttttctcttccttctggcttgggaaaagtcactatcaggtggatggttttggtctctgggcagctactgagggt

SEQ ID NO: 934781 - DNA, 634 bp, Homo sapiens
tgtgttgaatccaatactgcttggcagacctacaactttacaaatgacctgtgttccacctagagagggtgccagccctctcagcattatgcagtgcccctcctctgtctgcatccccaggaccaccatgggtggggagggcagagattggggagcacctatagaggctctaatgctctaaggtgacagtgatgaggacctgggtgcacccatgagtggagaagctaggcctgtccagagaagcaagacaaacacacacayacacactcacacacacacaggcacatatgcatacacaaatacattgcatacacacatgtcagttcaggggatagaggacatggactctgggccctgttgacccaagcagactcccatggtggtgggttgtgtcaccccagaatgtcactgttgctgagtccccatcgcctctgtgttgtggagcagttagagacacacagcagtgtctgtgagtagctctgcgtgaaggaccattttctagatgagaggcacatctcaacacagctcactgatcagattcaggtgagtgggacctgctcttttctcttccttctggcttgggaaaagtcactatcaggtggatggttttggtctctgggcagctactgagggt

SEQ ID NO: 934782 - DNA, 729 bp, Homo sapiens
gtctgtggagcctccttgcctccatctgcagggaaagtgagtcggggcaccctggagggtggctggaaagagaaggtgagaagatgtgttgaatccaatactgcttggcagacctacaactttacaaatgacctgtgttccacctagagagggtgccagccctctcagcattatgcagtgcccctcctctgtctgcatccccaggaccaccatgggtggggagggcagagattggggagcacctatagaggctctaatgctctaaggtgacagtgatgaggacctgggtgcacccatgagtggagaagctaggcctgtccagagaagcaagacaaacacacacatacacactcacacacacacaggcacatatgcatacacaaatacattgcatacacacatgtcagttcaggggatagaggacatggactctgggcccygttgacccaagcagactcccatggtggtgggttgtgtcaccccagaatgtcactgttgctgagtccccatcgcctctgtgttgtggagcagttagagacacacagcagtgtctgtgagtagctctgcgtgaaggaccattttctagatgagaggcacatctcaacacagctcactgatcagattcaggtgagtgggacctgctcttttctcttccttctggcttgggaaaagtcactatcaggtggatggttttggtctctgggcagctactgagggtaatccctgaac

SEQ ID NO: 934783 - DNA, 655 bp, Homo sapiens
aaggtgagaagatgtgttgaatccaatactgcttggcagacctacaactttacaaatgacctgtgttccacctagagagggtgccagccctctcagcattatgcagtgcccctcctctgtctgcatccccaggaccaccatgggtggggagggcagagattggggagcacctatagaggctctaatgctctaaggtgacagtgatgaggacctgggtgcacccatgagtggagaagctaggcctgtccagagaagcaagacaaacacacacatacacactcacacacacacaggcacatatgcatacacaaatacattgcatacacacatgtcagttcaggggatagaggacatggactctgggccctgttgacccaagcagactcccatggtggtgggttgtgtcaccccagaatgtcactgttgctgagtccccatcgcctctgtgttgtggagcagttagagacacacagcagtgtctgtkagtagctctgcgtgaaggaccattttctagatgagaggcacatctcaacacagctcactgatcagattcaggtgagtgggacctgctcttttctcttccttctggcttgggaaaagtcactatcaggtggatggttttggtctctgggcagctactgagggtaatccctga

SEQ ID NO: 934784 - DNA, 841 bp, Homo sapiens
gaagcagacaaaaatatgattttggattttttttaaacctctggagaatatgttaagggctctaatgaatgaagtagacagcattcaagtgtagatgggtaatgtaatcagaaagacagacatcgtaagaaccttcaacataatgtagtgataaaaaatgtggtaaataactgaagaatacctctgatggcttattagtagactggactcagctgagtaaagagtctctgagcttgaggatttatcatcagaaacttcaaaaactaaagaaaagaaacactgaaaagaacagaagatgatatccaagactgtgggacaactacaaaaggtgaaacagagtagtgagaataccaggaggagaagaaatagaagaaagttctgcaactaccatgtctgagaacttccagtattaatgtcagacaccaaaccaaaaatccaggaagctccgagaacaccatgcagaataaatgccaacaacctacacttggacatataattttcaaactatatgaagtaaaagataaaggaaaactctgaaagaaaccagaggtggggcagaaaacaccttacctacagagacacaaagataagaacrgcattcaacattgcagaaattgtgaaagcaagaagacagtgaaatgaaaaattgaaaatattgacagaaaaaaccccaccaacctaagtttctgtacacactgaaaccacccttcaaaagtgaaggagaattaaggccttcctcagaaaaataaaaattcaagaaacttgttgccaggagacctgtcttgcaagaaatgttaaatgaaattctttagagggaaacaaaagatatttaactgaaact

SEQ ID NO: 934785 - DNA, 722 bp, Homo sapiens
cacataccttaaaatttaccatcataaccagttgtaagtatagagttttgtagagttaagaatatttacattgttgtgtagcagatttctagatttttttttatcttagaaaactctatacccattcaacaactattaatttccccttccttccacctcctggcaagtactattctactttgtgtttctaaaaatttggcttatatacctagggttatataatatttgttttttaagtaggttccatgttatgtgcagatgtgtcaggattttcttcctttctatggctgaataatatttcttcatatatatatattttctctctatatatatatgtatattcttttgtttatccatctattcctggatggaagttttggtttcttccacctcgtggctatgtaatgctcctgtgaacataggtgtgcacatatckgtttgaggtcctgctactagttattctgtctctgtagaagttggatggctggatcatatggtcattttattttatttttttgaggagccagttaatatttccaccaacagtgttcaagtgtttcagtttcacctgcacttgttactttctgttgggtttgaagtgatgtcccattgtggtttctatttgcatttctctaatgattagtgatgttacacatcttctcatatatctcatgtatctgttggctatttgtatatcatctttgtatctttggatgaatgtt

SEQ ID NO: 934786 - DNA, 667 bp, Homo sapiens
aataacctaacattacacctgaagggggggaaaaaaaaaactaatgacaaaccaagcaaaaggaagaaaataacagattagagcagagataagcagaataataccagaaaaaaaaggaaaaaaaaacacactgagttttttttaaagatcaataacaattttaaaactcacagctatattaagaaaaaaagagaaatctcaaatactaaaatmgtaaataaaagaggtgacagtacaacagatgccacagaaatgaaaaagattaaaagagactaatgtgagcaaccgtatgccacaaaactgggcaacctagaataaatttataaattcctagaaacacaaaccaccatactgaatcacggagaaataaaaaatccaaagagacctgtaactagtaagaagattcaaccagtaatcaaaaaccccccaaaaaagaaaattccaggtccagataacttcactggagaattttaccaaacatttcaagaagaattaatgccaatcctctgcaaaatattccaaaaatgttcaaaaaccagaaggggacattccaatccattctatcaggtcaacatttatctggttccagagccagatgaacaccttttgtaataaaaagactcaaagaattagtaatatatggaaactcctcagtaaataaagattg

SEQ ID NO: 934787 - DNA, 785 bp, Homo sapiens
  misc_feature 29: n = A,T,C or G
cgatctccctcaggtggaggagtggtcgngagcacggcctggggccctcaggctgggcgcgctgcgatcccaaggccgaccaggccatgcacctccagcccgcctggcaacccgagctgcagccgccttctgcgtgcagacagcagcctccaggcaactcccgagcccgcccacactccccacatctcggaagcagggccaaatgtccctgtggctgtggccaagccaggcggtctgtcccgcagcagctgcacaggggcgggaaccggccctcagccccatcccctgtggctgcagagggcccctggatagagatgtggagctctgacagaggaggagccgggccgagacagggtctggcaggctctcaggccaggggcacccgcgatccagaggctgcccagggcatgctccaccacctgggcgcccagctacaggcgccgggcgamtcccaagctggtggcgcgcccagcctcgcagaaccggggctagatgtcgccgtggctgcgaccaagccaggcggtctacccaggggcggctgcaccggggcaggaaccgaccctcagccccatccccggtggctgcagacggcccctggggcggccccgatctctcttcggaggaggagaggggcgggagtcacggccaggcgggccctcaggcgggaaggaatgcgcgcgcctgcgattccgggatgtcccgcgccagcccaggagaacccgcaagccagcggcgcctgtttctctgtgtgattctttgaggaaccaccaaactcttttccacag

SEQ ID NO: 934788 - DNA, 689 bp, Homo sapiens
ctgtgaccttccagacacaagtgatcctctcacctcagcctcctaagtagctgggacttacaggtgcatgctatcatgtgcaactgatttttacagtttttggtagaaatggggctttgtcatgtagcccaggtttgtgtcaaactcctgagctcaagtgatctgcctgattcagcttccggaagtgctgagattacaggtgtgtgccaccatgctcgactggtgtaaccactttggaaagcagccactgagcccggccttcaccagtataccaatatttgttaatatcgttttattttttacaatttttccatttttaaaaacttattcttttacctgtattattgattataataaacaaygaataattttgtagtagagttgagtccccccaaaaagtatttattgtttaattgaagtagtttttttttttaacctggatatatattttttcattttcactttagttttagtgtttattttgaaaaattatttatatgtatttttattttaataggtgtttgagaaacaggtggtgtttggttccatgaataagttcttcagtgttgatttctgaaatgtagtacccctcattactcattaaattatatattaagtcattataaaatcattaataaaccaaggactttagtaaaatgggaattttattttaacttgcaacctgggac

SEQ ID NO: 934789 - DNA, 544 bp, Homo sapiens
aaatgggaattttattttaacttgcaacctgggacgtaactgtcaaaaaaattagagaaattaccacattaaggttttaaaatcttgaactgaaaaatgaaaaccttggtgcacctaagaaccaccagcccactggtcaargtgaacaaaactaaatgaaaaaataaaaccaggaaaaccaaactcaggattattaggtattctgtaatgctattttctctttggactcacagaaaatagttattattattattattattattatcattattattattattattttgatatggagcctcactctgtcacccaggctggagtgcagtggcgcaatgttggctcactgcaacctctgcctcctgggttcaagtgattctcctgcctcagccttcagagtagttgagattagaggcaggttccaccatgcctggctaacttgtatttttggtagagacagggtttcaccatgttggccaggctggtctgaaactcctgatctcaaacaatctgcctacctcagcctcccaaagtgctggaattacag

SEQ ID NO: 934790 - DNA, 725 bp, Homo sapiens
accactgctctcctcaaagctgtcagacagggacatttaagtctgcagaggttactgctgtctttttgtttgtctgtgtcctgcccccagaggtggagcctgcagaggcaggcaggcctccttgagctgtggtgggctccacccagttcgagcttccaggctgctttgtttacctaagagagcctgggcaatggccggtgcccctcccccagcctcgctgctgccttgcagtttgatctcagactgctgtgttagcaatcatcgagactccrtgggcataggaccttccgagccaggtgcgggatataatctcgtggtgtgccgtttcctaagcccatcagaaaagctcagtattagggtggcagtggcccgattttccaggtgccatctgtcacccctttccttgaccaggaaagggaactaacttcctgaccccttgcgcttcccgagtgaggcaatgcctcgccctgctttggctagtgcacagtgcacttcacccactgtcctgcacccactgtctggcactccctagtgagatgaacccagtacctcaaatggaaatgcagaaatcacccatcttctgcatcgctcatgctgggagctgtagaccggagctgttcctattcggccatcttggctcctcctcccattattttttaatattttctgaaaatcttctttaaagagagaaagccaaatgtcacccactttttcataaaacctta

SEQ ID NO: 934791 - DNA, 665 bp, Homo sapiens
accactgctctcctcaaagctgtcagacagggacatttaagtctgcagaggttactgctgtctttttgtttgtctgtgtcctgcccccagaggtggagcctgcagaggcaggcaggcctccttgagctgtggtgggctccacccagttcgagcttccaggctgctttgtttacctaagagagcctgggcaatggccggtgcccctcccccagcctcgctgctgccttgcagtttgatctcagactgctgtgttagcaatcatcgagactccgtgggcataggaccttccgagccaggtgcgggatataatctcgtggtgtgccgtttcctaagcccrtcagaaaagctcagtattagggtggcagtggcccgattttccaggtgccatctgtcacccctttccttgaccaggaaagggaactaacttcctgaccccttgcgcttcccgagtgaggcaatgcctcgccctgctttggctagtgcacagtgcacttcacccactgtcctgcacccactgtctggcactccctagtgagatgaacccagtacctcaaatggaaatgcagaaatcacccatcttctgcatcgctcatgctgggagctgtagaccggagctgttcctattcggccatcttggctcctcctcccattattttttaatattt

SEQ ID NO: 934792 - DNA, 665 bp, Homo sapiens
accactgctctcctcaaagctgtcagacagggacatttaagtctgcagaggttactgctgtctttttgtttgtctgtgtcctgcccccagaggtggagcctgcagaggcaggcaggcctccttgagctgtggtgggctccacccagttcgagcttccaggctgctttgtttacctaagagagcctgggcaatggccggtgcccctcccccagcctcgctgctgccttgcagtttgatctcagactgctgtgttagcaatcatcgagactccgtgggcataggaccttccgagccaggtgcgggatataatctcgtggtgtgccgtttcctaagcccatcagaaaagctcagtattagggtggcagtggcccgattttccaggtgccatctgtcacccctttccttgaccaggaaagggaactaacttcctgaccccttgcgcttcccgagtgaggcaatgyctcgccctgctttggctagtgcacagtgcacttcacccactgtcctgcacccactgtctggcactccctagtgagatgaacccagtacctcaaatggaaatgcagaaatcacccatcttctgcatcgctcatgctgggagctgtagaccggagctgttcctattcggccatcttggctcctcctcccattattttttaatattt

SEQ ID NO: 934793 - DNA, 756 bp, Homo sapiens
ccactgccccgggccatttttttttaaagatagcgtcttgctctgtcaccctcctcaccacattatagctctgggggccaagctgcatcacaatggaaatcatggagccacaggaagaatccacttagctttgcaagatgctgcccaaggggttgcttggagtaaccaaattaacatttttcattctgctcagagcaaaatatatgtgacaaaacatagacacgagccactttgcttagcacccagtgtcaaactggtaagactcaaacttgctcccagataggccgtgccatctctaaatctttttagaagcttctgcatgttaataggcatccctagatgagactaatttgggagccatcatttttaaatgcacttcagggcattattcatttggaatgttacactataagttatctttagtaagattttgccatttctgtaagactttgctgcttcccaggcctaatgaattagccagaaagaacttagttttccagaaattaaggatcctatttttacctaatatattggctttactctcaggttcccttgattgacttagccaatgattttytttcctacctaagcgtgtgaggaaaatgaaacaaaggggcagaacacaaaaatccccatgaatttccaaaagccaaattttacaaccctccaatattatcatttactaccactttccttctgacccattcagatgtaggaggcctctaactggaactggattcaagccagttaattact

SEQ ID NO: 934794 - DNA, 684 bp, Homo sapiens
aagaacttagttttccagaaattaaggatcctatttttacctaatatattggctttactctcaggttcccttgattgacttagccaatgattttttttcctacctaagcgtgtgaggaaaatgaaacaaaggggcagaacacaaaaatccccrtgaatttccaaaagccaaattttacaaccctccaatattatcatttactaccactttccttctgacccattcagatgtaggaggcctctaactggaactggattcaagccagttaattactggatcaaatctgatcctggacccgggtccgtttctgtcataacttctaacacatccagccagtcatggctggatagcagtttgggacagaaatttgctcagagaaactcagctcaaaacacaaattcatggagctctgaaatccgagagagaatttaccacgatccccagatgctctgagaggtcaaagggcacaagtgttacagaatcctgaggcgtcacttttctgcctgaaacctctggctggtggcgcctttacctgtgttttgctcgggcccactgggttcgttctgtccactcggctcatgctagtggtctggtatcccacacctgccaagggtgagctgggtacagagcagtgaagggtgtgtgagcaagcgagcatgggatctggccactgcacagagccaa

SEQ ID NO: 934795 - DNA, 684 bp, Homo sapiens
aagaacttagttttccagaaattaaggatcctatttttacctaatatattggctttactctcaggttcccttgattgacttagccaatgattttttttcctacctaagcgtgtgaggaaaatgaaacaaaggggcagaacacaaaaatccccatgaatttccaaaagccaaattttacaaccctccaatattatcatttactaccactttccttctgacccattcagatgtaggaggcctctaactggaactggattcaagccagttaattactggatcaaatctgatcctggrcccgggtccgtttctgtcataacttctaacacatccagccagtcatggctggatagcagtttgggacagaaatttgctcagagaaactcagctcaaaacacaaattcatggagctctgaaatccgagagagaatttaccacgatccccagatgctctgagaggtcaaagggcacaagtgttacagaatcctgaggcgtcacttttctgcctgaaacctctggctggtggcgcctttacctgtgttttgctcgggcccactgggttcgttctgtccactcggctcatgctagtggtctggtatcccacacctgccaagggtgagctgggtacagagcagtgaagggtgtgtgagcaagcgagcatgggatctggccactgcacagagccaa

SEQ ID NO: 934796 - DNA, 801 bp, Homo sapiens
actttgctgcttcccaggcctaatgaattagccagaaagaacttagttttccagaaattaaggatcctatttttacctaatatattggctttactctcaggttcccttgattgacttagccaatgattttttttcctacctaagcgtgtgaggaaaatgaaacaaaggggcagaacacaaaaatccccatgaatttccaaaagccaaattttacaaccctccaatattatcatttactaccactttccttctgacccattcagatgtaggaggcctctaactggaactggattcaagccagttaattactggatcaaatctgatcctggacccgggtccgtttctgtcataacttctaacacatccagccagtcatggctggatagcagtttgggacagaaatttgctcagagaaactcagctcaaaacacaaattcatggagctctgaaatccgagagagaatttaccaygatccccagatgctctgagaggtcaaagggcacaagtgttacagaatcctgaggcgtcacttttctgcctgaaacctctggctggtggcgcctttacctgtgttttgctcgggcccactgggttcgttctgtccactcggctcatgctagtggtctggtatcccacacctgccaagggtgagctgggtacagagcagtgaagggtgtgtgagcaagcgagcatgggatctggccactgcacagagccaagcatgccagctgcagtggggtgggcagctccaggcaccgccacaggtgccagctccctgtgaggctgcagctggaccaggc

SEQ ID NO: 934797 - DNA, 723 bp, Homo sapiens
actttgctgcttcccaggcctaatgaattagccagaaagaacttagttttccagaaattaaggatcctatttttacctaatatattggctttactctcaggttcccttgattgacttagccaatgattttttttcctacctaagcgtgtgaggaaaatgaaacaaaggggcagaacacaaaaatccccatgaatttccaaaagccaaattttacaaccctccaatattatcatttactaccactttccttctgacccattcagatgtaggaggcctctaactggaactggattcaagccagttaattactggatcaaatctgatcctggacccgggtccgtttctgtcataacttctaacacatccagccagtcatggctggatagcagtttgggacagaaatttgctcagagaaactcagctcaaaacacaaattcatggagctctgaaatccgagagagaatttaccacgatccccagatgctctgagaggtcaaagggcacaagtgttacagaatcctgaggygtcacttttctgcctgaaacctctggctggtggcgcctttacctgtgttttgctcgggcccactgggttcgttctgtccactcggctcatgctagtggtctggtatcccacacctgccaagggtgagctgggtacagagcagtgaagggtgtgtgagcaagcgagcatgggatctggccactgcacagagccaagca

SEQ ID NO: 934798 - DNA, 684 bp, Homo sapiens
aagaacttagttttccagaaattaaggatcctatttttacctaatatattggctttactctcaggttcccttgattgacttagccaatgattttttttcctacctaagcgtgtgaggaaaatgaaacaaaggggcagaacacaaaaatccccatgaatttccaaaagccaaattttacaaccctccaatattatcatttactaccactttccttctgacccattcagatgtaggaggcctctaactggaactggattcaagccagttaattactggatcaaatctgatcctggacccgggtccgtttctgtcataacttctaacacatccagccagtcatggctggatagcagtttgggacagaaatttgctcagagaaactcagctcaaaacacaaattcatggagctctgaaatccgagagagaatttaccacgatccccagatgctctgagaggtcaaagggcacaagtgttacagaatcctgaggcgtcacttttctgcctgaaacctctggctggtggcrcctttacctgtgttttgctcgggcccactgggttcgttctgtccactcggctcatgctagtggtctggtatcccacacctgccaagggtgagctgggtacagagcagtgaagggtgtgtgagcaagcgagcatgggatctggccactgcacagagccaa

SEQ ID NO: 934799 - DNA, 560 bp, Homo sapiens
tactgcaaactgttttatcagccaggtccttatgacctgtgttttgtgccaacttcctatctcaccttgtgacttggaatgcctaacatcctgggaatgcagcccagtaggtcacagcattattttaccaagcccttattcaagatggagttgctctggttcaagtgcctctgacaaaatcwtctttgcaaaattatgacagtaagagaaatctaacattactaacttcatcttgcttctaacctgacaggctggctgtcttttctcatttctgggcatgggccaagctaattttgggagaaatttagtttatagtttaaattataataggccttctaaaaaaactaaactgctcctataaaactaatggacagccaccaagttatgacggcgagaggggcttgaattctaaataattaccagccattactctggaggtcataagatttgcaactttcccagttactcttggagataacatcactattgtagaacctaagatgggccatttgaaatgtcttttcaggtttttgtattcctaacaactggatagcctggaa

SEQ ID NO: 934800 - DNA, 730 bp, Homo sapiens
aggcgaggagactcatgtctgtaatcccagcagtttaggaagttgaggaaggagaatctcttgaggccaggagttcaagaccagcctgggcaacatagggggatcctgcctctacaaaaaatacaaaaattagccaggcatgatggcctatacctttagttccggttacttgagaggctaacgtgggagaactgcttgagcctgggagattgaggctatgagtgtaccactgcactacagcctgggtgacaaagaaagaccctgtttaaaaaaacatgcactcggcygggcgcggtggctcacgcctgtaaacccagcattttgggaggccgaggtgggcagatcaggaggtcaggagattgagaccatcctggttaacacggtgaaacaccgtctctactgaaaaaaaaaagaatacaaaaaattagctgggcgtggtggcgggcgcctgcagtcccagttactcaggaggctgaggcaggagaatggcgtgaaccaggggggcagagcttgcagtgagccgagatcgtgccactgcactccaggccgggcgacagagcaagactcctgctcaaaacaaaaacaaaaacaaaaacaaacaacaaacaaaaaaccaaaaacatgcactcaaaagagttagctcaagcatctggtggtatccactgtataaaaaccacattatgatccagcaatcccacctctaagtatgtatccaaagggatgaaatgag

SEQ ID NO: 934801 - DNA, 730 bp, Homo sapiens
aggcgaggagactcatgtctgtaatcccagcagtttaggaagttgaggaaggagaatctcttgaggccaggagttcaagaccagcctgggcaacatagggggatcctgcctctacaaaaaatacaaaaattagccaggcatgatggcctatacctttagttccggttacttgagaggctaacgtgggagaactgcttgagcctgggagattgaggctatgagtgtaccactgcactacagcctgggtgacaaagaaagaccctgtttaaaaaaacatgcactcggccgggcgcggtggctcacgcctgtaaacccagcattttgggaggccgaggtgggcagatcaggaggtcaggagattgagaccatcctggttaacacggtgaaacaccgtctctactgaaaaaaaaaagaatacaaaaaattagctgggcgtggtggcgggcgcctgcagtcccagttaytcaggaggctgaggcaggagaatggcgtgaaccaggggggcagagcttgcagtgagccgagatcgtgccactgcactccaggccgggcgacagagcaagactcctgctcaaaacaaaaacaaaaacaaaaacaaacaacaaacaaaaaaccaaaaacatgcactcaaaagagttagctcaagcatctggtggtatccactgtataaaaaccacattatgatccagcaatcccacctctaagtatgtatccaaagggatgaaatgag

SEQ ID NO: 934802 - DNA, 539 bp, Homo sapiens
taaatcattttaccaaaaagacacctgcactcaaatgtttatgacagtactattcacaatagcaaagacatagggtaaactcaggtgtccattaatagtgagttggattaagaaactgtggtacatatacaccatagaatactacacagccataaaaaagagcaaaataatgtcctttgcagcaacacagacgccgctggaggccattatcctaaggaaattaacaaattaagccaaccaaatatgctcacttataagtgggagccaaacattggctatacayggacataaagatgggaacaatagacaccagtgactccaaataggagagaggagggagggggacaaaaggcaaaaaattacctattggatactatgttcactgcccgggtgacaggttcaagtgaagctcacagcatcatgcaatatatccatgtgacacacctgcacatgtaccccctgaatctaaaataaaaataaataaataaataaaaatgttttcttttcattctttttggtttgttttgatcacatcaaaa

SEQ ID NO: 934803 - DNA, 539 bp, Homo sapiens
taaatcattttaccaaaaagacacctgcactcaaatgtttatgacagtactattcacaatagcaaagacatagggtaaactcaggtgtccattaatagtgagttggattaagaaactgtggtacatatacaccatagaatactacacagccataaaaaagagcaaaataatgtcctttgcagcaacacagacgccgctggaggccattatcctaaggaaattaacaaattaagccaaccaaatatgctcacttataagtgggagccaaacattggctatacacggacataaagatgggaacaatagacaccagtgactccaaataggagagaggasggagggggacaaaaggcaaaaaattacctattggatactatgttcactgcccgggtgacaggttcaagtgaagctcacagcatcatgcaatatatccatgtgacacacctgcacatgtaccccctgaatctaaaataaaaataaataaataaataaaaatgttttcttttcattctttttggtttgttttgatcacatcaaaa

SEQ ID NO: 934804 - DNA, 724 bp, Homo sapiens
ctctgtattaaggccatctttagcttgtcttgcaaatactttccttgttcactaatcccttctccccaccctgcttcctttagacccatgttaatctattacctgggagcagctctagattcttgagttggtaatgactaatttctccgttgctctcatcctgttgagtttaataggctctcttttttcttactgatgttttcatgatgagatttctaataagttatttgggagctatcagaatagaaactaataaatattatctatctattagctgtcagaataaaagcttactgagggtcctgaactgtgaggccactgaaggcaggggtttgggtmtgatttatctgtgtttgcctagagctttaacagagcctgacacttgtaactcttaaaaatatgctttaaaataaatctaaactcaggcatggtggctcatgccagtgatcccagcactttggaaggctgaggtgggaggaaggcctgagcctacgaactcaaggtgagagtgagctatgattgtgtcactgcactccagcctgggtaacagagtgcagacgctgtctctttaaaaaaaaaaaaaaaaaaaaaaaaaaaaaaaaaaaatcaaacctcagtgcataagacacaggtgttttcatctgtgaacgagagtagacacattctagtaatacccaatgtttttgtgaatttctttacaattgaaactattttccacttgtag

SEQ ID NO: 934805 - DNA, 594 bp, Homo sapiens
attgctctggcgaggacttccagtactatgttgaatagaagtgctgaaagtgggcatccttgtcttgttgcagttctcagaggaaatgctttctacttttccccattcagtataatgttggctggtggtttgttgtcaatggtttttattaccttaaggtatgtcccttctatgccgattttgctgagggttttaatcataaaggatgctggattttgtcaaaagctttttctgcatctattgagatgatcatgtgattttcgtttttaattctgtttatgtggtgtagcacatttattgacttatgtatgttaaaccatccctgcrtccctgataagaaacccacctgatcatggtggattatctttttgatatgttgttggatttggttagctagtattttgttaaggatttctgcatctatgttcatcaaggatattggtctgtagttttaattttttgttatgtcctttcctggttttggtattaaggtgatactggcttcatagaatgatttagggaggatttcctctttatcttgtggaatagtgttaataagattggtaccaattcttctttgaatgtctgatagaa

SEQ ID NO: 934806 - DNA, 763 bp, Homo sapiens
ctaaaacacacctacctggcacttaaccagctatcttgaaagacgtttgtaaaagcaatttacatctataaaggaaatctccatttgtaagagctctgtctatgtacattagaaactcttaaccattgttttaggtatgacaattctttcatgagcgtccctgtgaagagaccaccaaacaggctttgtgtgagcaacatggctgtttatttcacctgggtgcaggcgggctgagttcgaaaagagagtcagcaaagggagataggggtggggctgttttgtaggatttgggtagataaaggagaaggggggttgttctctggcgggcaggagttggggggtcacaaggtgctcagtaggggagcttttgagccaggatgagccaggagaaggaatttcacaagataatgccatctgttaaggcagraacaggccattttcacttcttttgtggtggaatgtcatcagttaaggcaggaactggccacctggatgtgtacgtgcaggtcacaggagatatgatggcttagcttgggttcagaggcctgacatttctgtcttcttatattaataagaaaaataaaatgaaatagtggtaaagtgttgggacggcgaaaatttttggggatggtatggagagataatgggcaatgggctgctttgagcgggattaggggcggcgtgggaacctagagtggaagagattaagctgaaggaagattttgtggtaaggggtgatattgtgggactgttagaagaaaca

SEQ ID NO: 934807 - DNA, 741 bp, Homo sapiens
ggcagagagagaagggacccaggggccaacgcctttactgggtacagggcattatccaaacagatttcctgcagggagttttaattggtgggtttaaagcaagcaggtactagttccaggaggtcacgctgtgactgaaaggtggtcactttgagttcgagggccaatgtctgaatggtctgtcatttgcaggaacatgaatagaactggaaatcattatgttaagtgaaataagccaggcacagaatgacaaatattgcatgttctcacttatatgtgggagctaaaatagttgatctcatggaggtagagagtagaatgatggttcccagaagctgggaagggggtgcatgtggggaacagggtagagaaataaagaaagattggttaatgggtacaaacatacagttagatggaaggaatgagttctggcrttcaataccacagtagggtaacaatggtatattgtatatttcaaaatagcgagaaaatagagaatgtggaatatttgaaatattcaatagagaatatttgaaatacatgtatacaatgtgtgaatatttgaaatacatgtatacaatgaatcatcacacattgtatacctgtattaaaatattacatgtattccataaaatgtataatattatgtaccagtaaaaaacagaatgaatgtttcgtttaaagaaagcagtgtgaaggctgggagcccagcttgctgggtgagagattcttccagttttt

SEQ ID NO: 934808 - DNA, 772 bp, Homo sapiens
tacagctgagtatgcattcaagcagagttgtgaagtctctaatatctagactcactcagatggggaccaacactaaccaggtgaaataaaatccagtatctaatgcatcgttgcagaacatggtcctaatatagtggttcctaatgttagtcatggggccagcatcatcatcatcatcatcatcatcakcagcatcatcatcatcagcatcatcatcatcagcagcatcatcagcatcatcatcatcatcaccatcatcatcatcatcatcatcatcatcatcaccatcatcatcagcagcatcatctaggaactcatgagaaatgtgaattctcaggtcccacctagacataccaattcagaaagccttggggtggggtacaataatgtgttttacaagccctgcagggaatcctgatgcagtttatgacactaatactattgtccaaatgtatttctttcaaatacacagatttaatacgtgcatattggttagcacagtaaaatggtccattattacttgtgcaaaggcttgcaagtttcccaccagcctctatttcagagtaaattcttagaagaaacaaaccctaaggagacctaaaatgagattttttttccataacagtaagaagaattaaaaaaaaaaaagaaaaaataatcaagtggtcattttaataatgcaattttgcttcttgtaatgtggcttaatagaatcaccatggagaatttttaaaagaatagcctgtgcaattggagctttattggctttttg

SEQ ID NO: 934809 - DNA, 770 bp, Homo sapiens
ctgcagctgaacggaatttctcctcagaaaatgggtttttcttttctattgcatcctcaggctgcaaatttttggaacttttatgctctgctgcccttttcaacatatgttccaattccaaaccatatctttgtgaatacataaaaccaaatgctttaaacagcatgcaggttgcatcttgaatgctttgctgcttagaaatttcttccaccaggtaccctaaatcatctctctgaagttcaaagttcctcagatctttagggcmggggtaaaatgtcaccagtgtctttgctaaaacatagcaagagtcacttttattccagttcccaacaagttcctcatctccatctgagatcacctcagcctgaacttcattgtacacatcactatcagcattgtggtcaaagccattcaacaagtctccaggacgttccaaactttcccacatctttctgtcttcttttgagccctccaaactgtttccacctctgctgattacccagttccaaagttgcgtccacatttttgggtatctttacagcagcaccccaacacccagtaccaatttactgcatttgtccaatctcacactgctaataaagcacggtcatttttacagtattgatcctaccaatctatgtacatgggatgtgtttccatttgtttgtgatatatatatatatatatatatatatatatatttgcagctattatagaaggggttgagttcttgatttgatcttctgctatgtcactgttggtgtatagaa

SEQ ID NO: 934810 - DNA, 622 bp, Homo sapiens
aatataaagcaggcagaaaaacatgaagaggagagatgggcctagcctcccagtctacagactgatatccttgatgaacacagatgctaaaatccttaacaaaatactggttaacctaattcaacaatgtatcagaaaaatagtccaccatgatcaagtgggtttcataccagggatacagggatggtttaacatactcaagtcaataaatgtcatacaccacaaaaacagaattaaaaacaaaaatcacgtgatcatctcaatagatgcagaaaaagcatttgaaaaaatccagcatccctttatgattaaaactcacagcaaaatcagcatacaaggcacatacctcaatgaaataaaaatcatctatgacaaacccacagccaacagaatactgaatggggaaatgttgaaataattccctccagaactggaacaagacaaggatgcscactctcagacttctcttcaacatagtactggaaatcctagccagagcaatcagacaagagaaagaaataaagggcatccaaattcgtaaggaggaagtcaaactgtcactgtttgctcacaatatgattggttacctcagaaatcctgaagcctcttccagaaagctcct

SEQ ID NO: 934811 - DNA, 644 bp, Homo sapiens
agtcatgtgccacataatgatgtttcagtcaacaatggaccatatatacactagtggccccataagataataattgagctgaaaaattattattgcctggtgatgtcttgatgatcctgaccttgtacaggccaggctaatgtgtatatttgcactttagtttttaatgaaaaggtttaaaagtaaaaaaaaattttaaataaaaaaagcttataaaataaagatataggaataggaacagctccggtctacagctcccagcctgagcgatgcagaagacgggtgatttctgcatttccctctgaggtaccgggttcatctcactagggagtgccagacagtgggcgcaggtcagtgggtgcgcgcaccgtgcgcgagccgaagcagggcgaggcattgcctcacccgggaagcgcagggttcagggagttccctttcctaatcaaagaaaggggtgacsgatggcacctggaaaatcgggtcactcccacccgaatactgcgcatttccgacgggcttaaaaaatggcgcaccacgagattatatcccgcacctggctcggagggtcctaccccatggagtctcgctgattgctagcacagcagtctgagatcaaactgcaaggcggcagcgaggctggggga

SEQ ID NO: 934812 - DNA, 644 bp, Homo sapiens
agtcatgtgccacataatgatgtttcagtcaacaatggaccatatatacactagtggccccataagataataattgagctgaaaaattattattgcctggtgatgtcttgatgatcctgaccttgtacaggccaggctaatgtgtatatttgcactttagtttttaatgaaaaggtttaaaagtaaaaaaaaattttaaataaaaaaagcttataaaataaagatataggaataggaacagctccggtctacagctcccagcctgagcgatgcagaagacgggtgatttctgcatttccctctgaggtaccgggttcatctcactagggagtgccagacagtgggcgcaggtcagtgggtgcgcgcaccgtgcgcgagccgaagcagggcgaggcattgcctcacccgggaagcgcagggttcagggagttccctttcctaatcaaagaaaggggtgacggayggcacctggaaaatcgggtcactcccacccgaatactgcgcatttccgacgggcttaaaaaatggcgcaccacgagattatatcccgcacctggctcggagggtcctaccccatggagtctcgctgattgctagcacagcagtctgagatcaaactgcaaggcggcagcgaggctggggga

SEQ ID NO: 934813 - DNA, 808 bp, Homo sapiens
caaatcaaaaccacaatgagataccatctcacaccagttagaatggtgatcactaaaaagtcaggaaacaacaggtgctggagaggatgtggagaaataggaacacttttacactgttggtgggactgtaaactagttcaaccattgtggaagacactgtggcgattcctcaaggatctagaactagaaataccatttgacccagccatcccattactgggtatatacccaaaggattatacatcatgctgctataaagacacatgcacacgtatgttattgtggcactattcacaataacaaagacttagaatcaacccaaatgtccatcaatgatagactggattaagaaaatgtggcacatatacaccatggaatactatgcagccataaaaaaggatgagttcatgtcctttgcagggacrtggataaagctggaaaccatcattctgagcaaactatcgcaaggacagaaaaccaaacaccacatgttctcactcataggtgggaactgaacaatgagaacacgtggacacagggtggggaacatcacacaccagggcctgtcatggggttgggggaaggtggagtgttagcattaggagatatacctaatgtaaatgatgagttactgggtgcagcacaccaacatggcacatgtatacatgtgtaacaaacctgcacgttgtgcacatgtaccctagaacttaaagtataataaaaaataaaataaaataaaaataaaactctgatccccaaatgcttggggagactgatttgagtaacaataaaactctggtctccggca

SEQ ID NO: 934814 - DNA, 616 bp, Homo sapiens
gagaccttagagtgcaaggccttaagaattaatgaaatagggaataatcaccatcctgccttcactgagccggagcaggggcagcaaacttcttaaagtgtcacacaggaacgaggtcaggcctcatgggtcacgccctgtgtcacaaacactcaactctgccatggcagtgcaaaagcagccacagacaatatgcaaacaaatgggcatgcatgaataaaactttatttccaaaagcaagcaacgggccagatttgactcgagggccatagtttgccgactcttgatccagagcagtctatcacacagaaacataatatgggccacatctatcattttaaattttctagcagcaagcacatttttaagaagtagaataaaaaaggtgaaactaattttmataatgtatttttacttagctcaaaaacctaaaatattgtcatttcaacacagaatccatatgaaattactaattagatatttcccttttctttgcacaaagttttagaaatccagtgtgcatcttacactcacagcacatctctagttggacgagccacacgtagctaatcactgcctcacggtacagtacaggaaatgaccccttgccattttc

SEQ ID NO: 934815 - DNA, 732 bp, Homo sapiens
ccaaactcagaggagctgcaaaaataaaacagtacaaagaacatccatataccctgttatcagattcacctgttcttaacattttgccccattttggttgatcagttttactctatgtgtatatatgtgtgtgtatgtgtgtttgcaatatgtatgtacacatgtatagacacacagacttgtgatttttcactgaatcatttgagggctagttacatgcatcgtggccctttaccctttgatgcttcctaagattagggatattctttcatgtaaccacagtttagttatcaacttcctaagtttataattgatacaatatttttttctttcttttttttttttttttgagacggagtctcactctttcgcaggccrgactgcagtggcgggatcttggctcactggaagctccgcctcctgggttcacgccattctcctgcctcagtctcccgagtagctgggactacaggcgcccgccaccgtgcccagctaattttttgtatttttagtagagacggggtttcactgtgttagccaggatggtcttgatctcctgacctcgtgatctgcccgcctcagcctcccaaagtgctgggattacaggcgtgagccaccgcgcccggccttgatacaatatttttatctaatctactttctattttccaattttatcaattgacccaataatgctcttttttttttttttttttttttttttggtagagacgg

SEQ ID NO: 934816 - DNA, 634 bp, Homo sapiens
tttttcttcacataaaaataatgtccacttcttaaaattcaagcaagacagtccactatagtgaagaaagccactcaatattactatccaaatataatcatcattatcaggtgaatcttatgccagataattcttgttacataaacacatatagaagaatatagggggaggagccaagatggccgaataggaacagctccggtctacagctcccagcgtgagctatgcagaagacaggtgatttctgcatttccatctgaggtaccgggttcatctcactagggagtgccagacagtgggcgcaggtcagtgggtgcgcgcaccttgcgcaagccgaagcagggtgaggcattgcctcacttgggaagcgcaaggggtcagggagttccctttccgagtcaaagaaagggatgacggactcacctgggaaatcgggtcactcccacccgaataytgtgcttttcggaccggcttaaaaaacggcgcaccacgagattatatccggcacctggctcagagggtcctacgcccacagagtctcactgattgctagcacagcagtctgagatcaaactgcaaggcggcagcgaggctaggggaggggcacccgccattgcccaggcttgcttaggta

SEQ ID NO: 934817 - DNA, 589 bp, Homo sapiens
gctacttgggaggctaaggcaggaaaattgctggaacccgggaggcggaggttgcagtgaactgaggtcatgccattgactccagtctaggatgacaacagagagactctgtctcaaaaaaaaaaaaaaaaaaaaaaaaattgtcccaaatgtagccactttcggtatataaactgtatgagctaagaaaatgcaatcaaaaaagtttaaaaataagaaaagaaaagcaaaaaaattatcatagtagaccaaaggggtcatataacatacrtccgtatgttctttcatgtgttaatatagttgccctttacccagcaacaaaatgtcatcatgtttgcttccttctccaaattcataacctctgtttattctgcttttggcagctttatagtgcttaaagtttaatttataatgtatttatctacattcctttgatctaatatgtggttatttcgtatatgtgtttgtatcccatttttccaactattttttgaacttctggtaatctgggtcagtcatactttttccttttccgtgtatgtagctccttctcttccacttatctgtcagtatatgttgtatttaacac

SEQ ID NO: 934818 - DNA, 694 bp, Homo sapiens
attacatcttaaaaaatcccaaaattgtatatatactgtagaaataatataagtagttataatgtttaaatatattagaggaaaagtttaaaagtaagatcaaaataagttatattatcaaaataattaggtaaaaattttaaatttaaaggatagaatgcatagaaaaattacataattgaaaaagaaattatgaattagaagatatsatgaagtgaatatttagaagtcccaatagggataaaacaaataaacaatatgaaaaattaaaatacataaaaatctaaaataagtcatgttgtttaagtgcaagttcgaataaataaaatggagtgaatgtcaaatagggaataaaaatatataattattaaaataattaattataatagcttaaaggcattctgatcaaaagaaaaacaatagttaaaagcataataccataatagagaaaatcatgtaaagctatctaagataaaattcaaattaattataaagcaatgaaaagaaacatatttctcaatatgtgaataagatcaagaatccaataggttatggttttcaaagttctgagggaaaaacatgtaaatttaaaattacatatatttgaaaagttattttcaggtttaaggacaaaatgtaacttaatacacaaatacaatgtaagtataattacgtcagtgaaatgcatttaaaa

SEQ ID NO: 934819 - DNA, 595 bp, Homo sapiens
  misc_feature 68: n = A,T,C or G
ctgcctcaccacccctccctcacaccttaacgttccctcaggccctctcccgctttgtggtacccctnaccgcgagagggccctgagttggaaccggcgatccatggtaaccggagcccaacccagggactgatgggaaggcacttttgtccgtgggggacaggcccaggttctcggatatatttttttttatttcctgccacgggtgcctcacctcccctccctcaaagcttacctttccctcaatggcttttgtccgctttggtgtacccctagccggcccgagacgctgcrtgggttctaagcagggacgccagggtcccgtcggtccagcacaggggctgatgggaaggaactttcgtccgtgggggaccaggaacgcttctcggtggcgcgtttttttttttttttttttttttgtgcccaggtgactcacctcctctccctcacaccttaccttccccggcagcttctgcccactttgaggtatccctagtgggcccgagacgctccttgtgctcaaccagtgacgccagggtccccgggacccagagcagaggctgatgggaaggcacattcgtccgtgggggaccca

SEQ ID NO: 934820 - DNA, 595 bp, Homo sapiens
  misc_feature 68: n = A,T,C or G
ctgcctcaccacccctccctcacaccttaacgttccctcaggccctctcccgctttgtggtacccctnaccgcgagagggccctgagttggaaccggcgatccatggtaaccggagcccaacccagggactgatgggaaggcacttttgtccgtgggggacaggcccaggttctcggatatatttttttttatttcctgccacgggtgcctcacctcccctccctcaaagcttacctttccctcaatggcttttgtccgctttggtgtacccctagccggcccgagacgctgcgtgkgttctaagcagggacgccagggtcccgtcggtccagcacaggggctgatgggaaggaactttcgtccgtgggggaccaggaacgcttctcggtggcgcgtttttttttttttttttttttttgtgcccaggtgactcacctcctctccctcacaccttaccttccccggcagcttctgcccactttgaggtatccctagtgggcccgagacgctccttgtgctcaaccagtgacgccagggtccccgggacccagagcagaggctgatgggaaggcacattcgtccgtgggggaccca

SEQ ID NO: 934821 - DNA, 702 bp, Homo sapiens
cctcacctgggttctgggtccagcgatatgtcacaattttccctgtgagcaaggcacaggcaggagaaacacatcacctgtttgctgggcccagaaatatgctacagtttttcttgtgagcagggttcaggcagaaatgggggaatcacattttctaggtgataaatgcagagctatgtcacaaggtccccagtagtcagggtcttggcagaagattcctattgtctaggcgattggcccagtgatacaacacaatagctaaattatgcagggcccaaggcaaagaggagagttgcatcacctaagtgatgaacaaaaagataygtcataatacccaggtggaaatgggccatgcaggtaagtcacattacctaggtgttggacccagtgatatgtcacaatacacaatatatgcagggcccagccaagaggggagagtcaaatcacccaggtgctgggcccgatgatacattgtaatctgtctttggtcagagccctagcagtagaagaaactcacatcacctccatgctgaggtcagccatatgtcacaataaccctgagaaatgagcccaggaaaagagtcacatcatttaagtgagaggcccatagatattttcaattcctcctgtgggtagtcctcagtaaaaagacagtcacattagttagagtctgtccccagcgatgtgtaagaatcccagctg

SEQ ID NO: 934822 - DNA, 702 bp, Homo sapiens
cctcacctgggttctgggtccagcgatatgtcacaattttccctgtgagcaaggcacaggcaggagaaacacatcacctgtttgctgggcccagaaatatgctacagtttttcttgtgagcagggttcaggcagaaatgggggaatcacattttctaggtgataaatgcagagctatgtcacaaggtccccagtagtcagggtcttggcagaagattcctattgtctaggcgattggcccagtgatacaacacaatagctaaattatgcagggcccaaggcaaagaggagagttgcatcacctaagtgatgaacaaaaagatatgtcataatacycaggtggaaatgggccatgcaggtaagtcacattacctaggtgttggacccagtgatatgtcacaatacacaatatatgcagggcccagccaagaggggagagtcaaatcacccaggtgctgggcccgatgatacattgtaatctgtctttggtcagagccctagcagtagaagaaactcacatcacctccatgctgaggtcagccatatgtcacaataaccctgagaaatgagcccaggaaaagagtcacatcatttaagtgagaggcccatagatattttcaattcctcctgtgggtagtcctcagtaaaaagacagtcacattagttagagtctgtccccagcgatgtgtaagaatcccagctg

SEQ ID NO: 934823 - DNA, 702 bp, Homo sapiens
cctcacctgggttctgggtccagcgatatgtcacaattttccctgtgagcaaggcacaggcaggagaaacacatcacctgtttgctgggcccagaaatatgctacagtttttcttgtgagcagggttcaggcagaaatgggggaatcacattttctaggtgataaatgcagagctatgtcacaaggtccccagtagtcagggtcttggcagaagattcctattgtctaggcgattggcccagtgatacaacacaatagctaaattatgcagggcccaaggcaaagaggagagttgcatcacctaagtgatgaacaaaaagatatgtcataatacccaggtggaaatgggccatgcaggtragtcacattacctaggtgttggacccagtgatatgtcacaatacacaatatatgcagggcccagccaagaggggagagtcaaatcacccaggtgctgggcccgatgatacattgtaatctgtctttggtcagagccctagcagtagaagaaactcacatcacctccatgctgaggtcagccatatgtcacaataaccctgagaaatgagcccaggaaaagagtcacatcatttaagtgagaggcccatagatattttcaattcctcctgtgggtagtcctcagtaaaaagacagtcacattagttagagtctgtccccagcgatgtgtaagaatcccagctg

SEQ ID NO: 934824 - DNA, 702 bp, Homo sapiens
cctcacctgggttctgggtccagcgatatgtcacaattttccctgtgagcaaggcacaggcaggagaaacacatcacctgtttgctgggcccagaaatatgctacagtttttcttgtgagcagggttcaggcagaaatgggggaatcacattttctaggtgataaatgcagagctatgtcacaaggtccccagtagtcagggtcttggcagaagattcctattgtctaggcgattggcccagtgatacaacacaatagctaaattatgcagggcccaaggcaaagaggagagttgcatcacctaagtgatgaacaaaaagatatgtcataatacccaggtggaaatgggccatgcaggtaagtcacattacctaggtgttggacccagtgatatgtcacaatacacaatatatgcagggcccagccaagaggggagagtcaaatcacccaggtgctgggcccgatgatacattgtaatctgtctttggtcagagccctagcagtagaagaaactcacatcacctccatgctgaggtcagccatatgtcacaatamccctgagaaatgagcccaggaaaagagtcacatcatttaagtgagaggcccatagatattttcaattcctcctgtgggtagtcctcagtaaaaagacagtcacattagttagagtctgtccccagcgatgtgtaagaatcccagctg

SEQ ID NO: 934825 - DNA, 814 bp, Homo sapiens
ggtatgagcaaccttgcctggctacggcctatattttttgctattaaaataagcgaaagttaagtttgaggacaggtgaaatcaaaatgcacatgctttctagaacagaaagtccttaatgaggataactttgcttgaataagcccaattacaattcgaatgctacggcttattgtgttggctgtacagtcaccatggtttctgtatcctgagatcatggtcattttctgtactatctattctgcctcaatttccccmtaagagattttagggcaataatcatattggaggttgaggggttaggccattatttctggagctgtttcctgctgagtgggtgttacttctgcctagcctgggccttaaagtttcttcctgtgtgatctaacagggtgtaaaccatgtcgttcatggaaccagtgggaagatgttggcaaccaaaggttgaaagccttgcaaaaccatcatgcaaacatggagttgccgtaagcaagagagcaagaaatcagttaacattttaaacaaaattggaacaaaactaaaagctgaaaatataataatgacgggtactattaaagagagcaaggcagacaatggacattgctttcatgttcccatggaagttcctagagattcaattttgtctgcctgggtgatgatattattaatattttcttcgactaaaccagactgattgatctcaaaaacagcattcttcttttagatataaacatgttcctctttacccggctgggagaagatcccaggctctttggttttgtcggactacagtggccatggagtccagatgttg

SEQ ID NO: 934826 - DNA, 457 bp, Homo sapiens
ttcaccgtgattcattcaaactgaaaacatattaacatttctccattagaagttggattcatggattggactcatgctgctttcaaggcactttggccaggacccaacactcattgccaagagtcagcaggctagaagtttgcttttaagatgttcccsggcctgcaacccagacactttgtcttgactacttcttcaactctgagataggttttgctgatataaatgaaaacccagctctatacctaccaagcatctacgtggctagagctgcacattaagcatttaggcactaggcaagaggtcttcccaggtttccaagcagactttctagaatttcccaaaaatactgacattgtctttttcagaccccatctcccaaagagaatcagagaggcggtccggaagccatttagaatctccagcctccaacctagtaacaacggacttggataca

SEQ ID NO: 934827 - DNA, 457 bp, Homo sapiens
ttcaccgtgattcattcaaactgaaaacatattaacatttctccattagaagttggattcatggattggactcatgctgctttcaaggcactttggccaggacccaacactcattgccaagagtcagcaggctagaagtttgcttttaagatgttcccgggcctgcracccagacactttgtcttgactacttcttcaactctgagataggttttgctgatataaatgaaaacccagctctatacctaccaagcatctacgtggctagagctgcacattaagcatttaggcactaggcaagaggtcttcccaggtttccaagcagactttctagaatttcccaaaaatactgacattgtctttttcagaccccatctcccaaagagaatcagagaggcggtccggaagccatttagaatctccagcctccaacctagtaacaacggacttggataca

SEQ ID NO: 934828 - DNA, 457 bp, Homo sapiens
ttcaccgtgattcattcaaactgaaaacatattaacatttctccattagaagttggattcatggattggactcatgctgctttcaaggcactttggccaggacccaacactcattgccaagagtcagcaggctagaagtttgcttttaagatgttcccgggcctgcaaccmagacactttgtcttgactacttcttcaactctgagataggttttgctgatataaatgaaaacccagctctatacctaccaagcatctacgtggctagagctgcacattaagcatttaggcactaggcaagaggtcttcccaggtttccaagcagactttctagaatttcccaaaaatactgacattgtctttttcagaccccatctcccaaagagaatcagagaggcggtccggaagccatttagaatctccagcctccaacctagtaacaacggacttggataca

SEQ ID NO: 934829 - DNA, 457 bp, Homo sapiens
ttcaccgtgattcattcaaactgaaaacatattaacatttctccattagaagttggattcatggattggactcatgctgctttcaaggcactttggccaggacccaacactcattgccaagagtcagcaggctagaagtttgcttttaagatgttcccgggcctgcaacccagacactttgtcttgactacttcttcaactctgagataggttttgctgatataaatgaaaacccagctctatacctaccaagcatctacrtggctagagctgcacattaagcatttaggcactaggcaagaggtcttcccaggtttccaagcagactttctagaatttcccaaaaatactgacattgtctttttcagaccccatctcccaaagagaatcagagaggcggtccggaagccatttagaatctccagcctccaacctagtaacaacggacttggataca

SEQ ID NO: 934830 - DNA, 812 bp, Homo sapiens
cttgccctgttaaaaattaaaggattgcttcaatacatacttagctgcttggctacattgcagaaaaacaaaatgcctttccagagatcagttttttgagacagggttttgctccgtcagccaggctggagtgcagttgtgtgatcatggttcattgcagccttgacctcccaggctcaggtgatcctccagctccagccttctgagtagctgggactgaagtcatgcaccaccaggcctggctaatttttcaatttttttttttttttttttttttttttttttgtagagatggctttctctatgctgcctgggctggtctcaaactcctggtctcaagtgatcctcccacctcagtctccctaatagttcgacctacaggcacagggaagcatgcccggtgtatttattaaaawgtagttaccagaatatttaaaattcacttgtgcctctcatattatttcttagagaattgcctcccttttgaaatctcaggctgcctgctctaaaacctggatgtgccaggaaagtaaaacatctgaaattttaaaacaattgtcattatattgattccatatatgaataacacatatatattattcattaatacaaataatcttacatacaaatgtaaatgcaaatattttacaggcagggccagtttctagttcacagaggaagccctgccagaaaaggatccaggaaaaacctataattcttgctttattcaacccagtgtcaaatcacatatgtcactcatggtctgaggcggcagggtagggaattgaactacatccaatcatgggtcttgg

SEQ ID NO: 934831 - DNA, 589 bp, Homo sapiens
caaaagaaaggatattactgtgtcaaaaagatatttgcattcccatgttcattacagaactatttataatagcttatatatggaatcaattcaaatgtacagcaacagataaatggataaggaaaatgtactatatatacacagcgaaatactattcagccataagaaagcataaaattctgtcagttaaaaagagcatggatgaaccttgagcataccatgttaagtaaaataagccacacagagaaacacaaatactttatgatcttattatctcactcatttgaggaacctgaaaaaaagggttgatagaagcaaagagtacaacaggggttaccagagattgaagcaggaggatgggaaaagtytgcttcacaggtattgtgttatgattagataggggaaataagtttttgttttttattacacagtagaataataataattaatgaaaagttatctcatattacaaaatagctaaaagagaccagttttggtggcatattcttgcaatccatacattttgggagattgaggtaggagaatcacttgatgtcagaagttcaagatgagcctggacaacatagtg

SEQ ID NO: 934832 - DNA, 623 bp, Homo sapiens
atgtgcctagttcacaggctgtcttgaaaaacgtgtggctcagcttggcccagcctttggcccgggatcaatcaggagctgaagggatgattgatagatgctgcttagcttggcccaagacttatcagaagctaaggtgaaagtttgccaaggagcttggcccgggagcactcaggggctgaagtaattattcatagaggtcagacttacagtccaaataaacgagagtgtcgactggaatgcaccagatcccacagtgcccatgccaacaaaaagagaaggaacattttcctgggagcccactgactgtacaaagacaaaagtgcttcttttttttctttttcttgtctttcttttttttgagatgtactttctttttttatttwtttttatttttttttgcagttttgctcttgttgcccagcctggagtgcaatggtgcgatctcggctcacagcaacctccgcctcctgggttctagcgattctcctgcctcagcctcccaagtagctgggattataggcatgcagcaccatgcctggctagttttgtatttttagtaaagacagagtttgtccatcttggtcatgctggtctcaaactcccgacctcagatgatccgc

SEQ ID NO: 934833 - DNA, 623 bp, Homo sapiens
atgtgcctagttcacaggctgtcttgaaaaacgtgtggctcagcttggcccagcctttggcccgggatcaatcaggagctgaagggatgattgatagatgctgcttagcttggcccaagacttatcagaagctaaggtgaaagtttgccaaggagcttggcccgggagcactcaggggctgaagtaattattcatagaggtcagacttacagtccaaataaacgagagtgtcgactggaatgcaccagatcccacagtgcccatgccaacaaaaagagaaggaacattttcctgggagcccactgactgtacaaagacaaaagtgcttcttttttttctttttcttgtctttcttttttttgagatgtactttctttttttatttttttttatttttttttgcagttttgctcttgttgcccagcctggagtgcaatggtgcgatctcggctcacagmaacctccgcctcctgggttctagcgattctcctgcctcagcctcccaagtagctgggattataggcatgcagcaccatgcctggctagttttgtatttttagtaaagacagagtttgtccatcttggtcatgctggtctcaaactcccgacctcagatgatccgc

SEQ ID NO: 934834 - DNA, 575 bp, Homo sapiens
accttggcctccaaaagtgttggaattataagcaggagccactgtatccaatgtgtaatttttgttgtttgtgtatgctttaattactttctctttttctttactatgttttttttttccccagtggttatcatgagacttatgtaaaacctcttgtattttaatrgtctagtttaagatgataacaatttagagtattctgaatttcagtatgtatttaccatttttagtgacatttatactttagtatttttcatattgttagttagcatttcgtcatatcaatgtgaagatttcttccagaccatggctggagaaggaaagaaggtgtgttttgcctgattcagggactatagagagaaccaagttctgcaggcctgtcacctaagtctcagatgagtatgaattctcttgtgtttttcacagatttttgcagtggcaggaccaagttcaaatgagtcatagccaagtctacagtaagatgtggtagtattctgttttgaaccgaggaccatgattggcaagcttgccacttggtcaagtgcttaccctctaaagatgtcttccttggtctt

SEQ ID NO: 934835 - DNA, 629 bp, Homo sapiens
ccccccgaccattcaattgccaagagggagaactggaggagtttctatcctggaatgtgggaagtccctgagcttccagccgtgatcttgaagctgaaaagtgaatcctccatagtctggtgggtgtagtagccaactctggagcctaggctgttgcttccccatctggccatgaatgctgtatagcctggtgagtacatatacatagatatagatatagatagatagatacatacatacatagatatagatagatagataaaaatatagatatagatatagatatctgcaatgccatttacatgggataaaaaagttgtttacccttaaaggtaytgtgtgtgtgtcttttcttctcccatcagcatctcccacacagaacaggaggagacagacaggccttgttacacacctgtttgctgttgtacctctgtttgctctttaggtacaacaaatcatcagcactaatgttaaaatagagatcataagactgacaaaactgactctgtggcaatataataccaaattattgtcacaatttaaggcagtgcaaggcaagtgttaagccatgcatgcaggccagcaatcttgctacatagcatccctatctccacttaagagttaaaact

SEQ ID NO: 934836 - DNA, 501 bp, Homo sapiens
tgggtgtagtagccaactctggagcctaggctgttgcttccccatctggccatgaatgctgtatagcctggtgagtacatatacatagatatagatatagatagatagatacatacatacatagatatagatagatagataaaaatatagatatagatatagatatctgcaatgccatttacatgggataaaaaagttgtttacccttaaaggtattgtgtgtgtgtcttttcttctcccatcagcatctcccacacagaacaggaggagacagacaggccttgttacacacctstttgctgttgtacctctgtttgctctttaggtacaacaaatcatcagcactaatgttaaaatagagatcataagactgacaaaactgactctgtggcaatataataccaaattattgtcacaatttaaggcagtgcaaggcaagtgttaagccatgcatgcaggccagcaatcttgctacatagcatccctatctccacttaagag

SEQ ID NO: 934837 - DNA, 629 bp, Homo sapiens
ccccccgaccattcaattgccaagagggagaactggaggagtttctatcctggaatgtgggaagtccctgagcttccagccgtgatcttgaagctgaaaagtgaatcctccatagtctggtgggtgtagtagccaactctggagcctaggctgttgcttccccatctggccatgaatgctgtatagcctggtgagtacatatacatagatatagatatagatagatagatacatacatacatagatatagatagatagataaaaatatagatatagatatagatatctgcaatgccatttacatgggataaaaaagttgtttacccttaaaggtattgtgtgtgtgtcttttcttctcccatcagcatctcccacacagaacaggaggagacagacaggccttgttacacacctgtttgctgttgtacctctgtttgctctttaggtacaacaaatcatcagcactaatgttaaaatagagaycataagactgacaaaactgactctgtggcaatataataccaaattattgtcacaatttaaggcagtgcaaggcaagtgttaagccatgcatgcaggccagcaatcttgctacatagcatccctatctccacttaagagttaaaact

SEQ ID NO: 934838 - DNA, 601 bp, Homo sapiens
agtgatcgcaaacagccaaataatattgggaaaaaaatataaagatagaggcatcatactttctaatttcaaaacatactataaaggtatagtaatcaaaactgtttggtactgacataaagacaaatgaatgatgaaacagatgagagtgttcggacataagacmtcatgggtttagtaaacttatttttaaaaactgttccaagaattcacaataaggaaagaacagtctcttcaacaaacagtattgagaataataaaaatttacaaggaaaaaataacaaagttacaccttaccttgcaccaataaaaacataaactcaaggccgggtgtggtggctcacacctgtaatcccagcactttgggaggctgaggcaagtgaatcacaaggtcaggagatcaagaacatcctagccaacatggggaaaccacgtctctactaaaaatacaaacaaaaattagttggtggtggtgcacacgcctatagttccagccactcaggaggctgaggcaggagaatctctggaacccgggaggcaagagtttcagtgagcggagatcacaccactgtgcttcagcctggtgacagagaaagactcc

SEQ ID NO: 934839 - DNA, 601 bp, Homo sapiens
agtgatcgcaaacagccaaataatattgggaaaaaaatataaagatagaggcatcatactttctaatttcaaaacatactataaaggtatagtaatcaaaactgtttggtactgacataaagacaaatgaatgatgaaacagatgagagtgttcggacataagacctcatgggtttagtaaacttatttttaaaaactgttccaagaattcacaataaggaaagaacagtctcttcaacaaacagtattgagaataataaaaatttacaaggaaaaaataacaaagttacaccttaccttgcaccaataaaaacataaactcaaggccgggtgtggtggctcacacctgtaatcccagcactttgggaggctgaggcaagtgaatcacaaggtcaggagatcaagamcatcctagccaacatggggaaaccacgtctctactaaaaatacaaacaaaaattagttggtggtggtgcacacgcctatagttccagccactcaggaggctgaggcaggagaatctctggaacccgggaggcaagagtttcagtgagcggagatcacaccactgtgcttcagcctggtgacagagaaagactcc

SEQ ID NO: 934840 - DNA, 734 bp, Homo sapiens
ctgatttttattgctatacaacatatatacataattgtttccccaaaatttgtacaattacatgtgtcaattttaaaatatgaagactataatgtaaaatctatagctgtaaaattcctagcacaatacagaagggtgaagcttcatgacaattggtctcrgcaataatttgggggatgtaacatcaacgaatcagacaacaaaagcaagggaatacacatggtactaaatcagtgtgtgaaaaatatcccaaacaggcaaagcagaacatggaatagatatatgcacatttatgtacactgtagcattactcacaaacatactacctggaagccaatgtacctttaaggatgagtagattcaacaaacagggcacgtatattcactgggatagcattcagccttaaaaataaggaaatcttgaaaagtactacaataaggacaaatctcgaaaacattctgttaagtaaaacaagacagtcaaaaaggaaaactgtataattacacctatgtaaaatatttagtcaaactcaaagaaaccaagtgttgtagtctcagcagtgcaccaagatgtaacagtctctcatagtctgagatagcatcgaaagttctttgttctacttctagggagattaaggagcgtgaacacaaaggtgaggttagagtgaaagtttgataagcaagagaagaaagctctttgccagcagagatagtttctgaatggggtgacctct

SEQ ID NO: 934841 - DNA, 679 bp, Homo sapiens
agactctcgggaactgaatcaggccccagcccatgccccccagcccagtccagccaacgtgcccgctgtcttcccacccagccagccgagccctcaggattgttagatggaaccaggctccatcaccacccaggcatggagggaagatgtcctggtccttagcaagcaaggcctggtttccaaagtgctctccgaagaggcctcatgtttgtgacatcttagaaggtacctttctgctgttcttgcacccagcatgttggcaagtcaagttcccccactgagttctccacacataaggagggagtcaacaccattgctaagtcggatcagctcaagkgtctccagtatcagttttatcagatcccagggacctgtctgctcccagaggtgacagagaaaaatcaaggaatgatctgtatggtcactgacatggatgaaacccttgtgcatagctccattaagccaatcagcaatgctgactgcctagtgactgtaaagattgaggggaccatgaggccctatatggatgagttcctgagatgactggaggaactgtttaaatgtgttttcttcattgctctcttcattccagactgaacaagtatgcagatcctgttgagaggtgacagcgtgctggcagtcctcacaacccttgctcactctccgggcctcctctgcc

SEQ ID NO: 934842 - DNA, 455 bp, Homo sapiens
ttattactttatttctcacttagtattttatgattctgtcttctttaatatgaagattactatgactgtgttttcaatttctgaattatcatgtgtcacatttgtctgtaatttcctttcagaagttgtaaaatagcatgctcaaatgtatatattatgtataaattatataatttataatttattaaaatatttggcttgtatgtttaattgactctaggcacaatgttactattagcatcttcttccagttttcccaacttttatttgactaatagtacaatytatttccaatttttattttatatgtcaatgttttatactgtatttacaatatttatagttaccatatttagaaatgtaagacttttcaattaaaagctagattacagccttatcgttttgtgtaagaaaagcagcaatgcatcagtagcataatttaaaactttctctag

SEQ ID NO: 934843 - DNA, 556 bp, Homo sapiens
ttgagtagctggcattaaagttgtgcaccaccgcgcctggctaatttttgtatttttcatgaagctggggtttcaccatgttggccaggctggtcttgaacttatggcctcaagtaacctgcatgcctcagcctcccagagtgctgcgattacaggcatgagtgatcactcttggcccttgggtgtcatttttaatttcsattgtggtaaaaatacataacataaaatttagaatctttaatattttttcttatacagttcagtcatgttaagtgtatttacattgttaagcaacatatttgtaaaattttttcttttgcaaaactaaaactcagtacacatgaaatgacaactacccattgtccttaccacctggctcctgataaaaatcattctattttctggttctaagtttcaatactttagatattacatataagtagaatcatagagtatctgttttattgtgactaattttacttagcattatgttctcaagattcctctttattgtggatggtacaagattttctgcctttaaaagctgagtaatatt

SEQ ID NO: 934844 - DNA, 543 bp, Homo sapiens
gaataattatgtagcaatggtggttaggagcaatagacactcaaagtattacataaatattttttttcttattctcccacacaagcgttttgcctttcctcttaaactgagaacggagtggtttgctatgatgtttttaaattctcayagacaagcattattctttgctgccttttagtaaaggttagttttaaccaaattaaagaagattgaatggattttcttgatcataatggttgagtgcaatatctcataccttctattagttttcagtataactgaaataacagagtgtcaatactccatggaggggtgctccgcttgctaaggctccctcctctgggctaggccttctacaccatggctgtcctgctgtggctggagctggaatttggattgacctctgtgtgtcttcctagcacacaataggtgtccaattagcatgggcagaatcaagctcctccctctcaccatttatttctccatttgtcccttgttgggaatggagagtcctgccactgagttcagcccagggttgaagtt

SEQ ID NO: 934845 - DNA, 543 bp, Homo sapiens
gaataattatgtagcaatggtggttaggagcaatagacactcaaagtattacataaatattttttttcttattctcccacacaagcgttttgcctttcctcttaaactgagaacggagtggtttgctatgatgtttttaaattctcacagacaagcattattctttgctgccttttagtaaaggttagttttaaccaaattaaagaagattgaatggattttcttgatcataatggttgagtgcaatatctcataccttctattagttttcagtataactgaaataacagagtgtcaatactccatggaggggtgctccgcttgctaaggctccctcctctgggctwggccttctacaccatggctgtcctgctgtggctggagctggaatttggattgacctctgtgtgtcttcctagcacacaataggtgtccaattagcatgggcagaatcaagctcctccctctcaccatttatttctccatttgtcccttgttgggaatggagagtcctgccactgagttcagcccagggttgaagtt

SEQ ID NO: 934846 - DNA, 622 bp, Homo sapiens
ttttgtcacacatattttattctggcccgaatgaaaaaaggtaattttcttttatgatgcgacttggccccagcatggtggtgcagcaagctgagtcactagggccgctcagggaaagggaacccagaagcctggcatgctggcaaaaggataagaatttcttaccagtcagatttctggcttctctctctatgtgcaaatggttagatgaatggtaaaagtcactgtttatttccatcttgttttttgtccttgggagcctgaccttgtaaccacgtggtagtactttctcttggtctctgccttccagggaacaggaattttagggtttatgtcacagttagctctgaaaattgtcttgagtagttaaaagcctttgcaagctcaaaattgattactccagattccttctgggcagagcaatggaggctgcycagtgctgtaggtcagtggctaaggtttttgcccatttacactggcacgctgggtttgattctctgcttaggaagtaagtcctttttggtttaatatctgcatgactttgtctagtctattttcctccacaaaatctcttacattttcctttctctgagcacctgggaggttaccattggaaaagttc

SEQ ID NO: 934847 - DNA, 569 bp, Homo sapiens
cgtggctcagagggtcctatgcccacagagtctcgctcattgctaacacagcagtccaagatcaaactgcaaggaggcagcgaggctgggggaggggcgcctgccattgccgagttagttgtttgattgattaggtaaacaaagcagccrggaagctcgaactgggtggagcccaccacagctcaaggaggcctgcctgcctctgtaggctccacctctgggggcagggcacagaaaaacaaaaagacagcagtaacctctgcagacttaaatgtccttctctgacagctttgaagagagtagtggttctcccagcatgcagcttgagatctgagaaccagcagactacctcctcaagtgggtccctgacccctgagcagcctaactgggaggcatcccccagtaggggcagactgacaccgcacacggccaggtgctcctctgagacaaaacatccagaggaacaatcaggcagcagcatctgtggttcatcaatatccactgttctgcagccactgctgctgatacccaggcaaacagggtctggagtggacctctagaaactccaa

SEQ ID NO: 934848 - DNA, 767 bp, Homo sapiens
cattgttcactttgcatgcatgtgtggtagagtcagaattgctagctggtacctcttgggaaacaagtttatcagctagagcacagtgcttatagacaggatcttttcctttcagttttacaggctctgctcgtttccagagctatgtaggtcagcactttttctcctgccccgttggtgtcagtggcttcacacatctgtgatgctgcaggattctgtcatcaccgtctgcatggcattctgtcccgggatctgaagcatccttgattttttttgttaaacttgcataaattaaggctcctctttgtgctgtgaagttcagtgggctttgataaatgcatgtcatttatccacagttacagtaacayagaaatagcctcactgccctaaaaaaatcatctatttcacatactcacatctcccttcctctcccggaatccttgacaaccactgatcttttaaatgtctctatagttttgccttttccaggattttcagactggctgctttcacttagcaatgtgcatgtgggaaccctggctctttccggcctctgtgagaacaacccgtttgtacccaaggagctgtgagcatgctgcctcccaccgtgtcttgcactggtgcccaggggtgtgcggggacatgacgcttagccggaaacatgggtgaagctgatgtgtgcgattgtgtgagaggcaaagctgtgcggccagggttgcctggagaagtttccattttccaagcaaggcacagagcatgtctacaga

SEQ ID NO: 934849 - DNA, 550 bp, Homo sapiens
tttccagtcactggttttagtctcctttctcctttttaccttgtaagctacaccaaatgcagtattcccatggttgtgcaggtctcatacatcaatgcagtaaatagtcccaagtagtcaccatgtcctaggtgttgtcatagccaccagggtctagaagtccatcacaagaggcactgctgtggggagtgccaccttcccctcccctgcccagacagttaggagctcattagggcagagtgggctttggagatactaaccactacttaccatttatatttacatataaaacatagatattgggacttttcaggaagatgaactatttcctcttccttctgctaagtgcaaataaatcccagcactttggraggccaaggcaggaggagcatttgagcccaggagtttgacaccaacctgagcaacatggcaaaaccctatctctaccaaaaatacaaaaatgagcagggcgatgtggcatgtgcctggcatcccagctacttaggaggctgaagcaggaggatcgcttgaacctgagaagcagaggttg

SEQ ID NO: 934850 - DNA, 591 bp, Homo sapiens
aagtccccactgtgtccggaattggttcctgctgggttcttgctccggctgacttcaggaaggaagccgggaccctcgcggtgagtgttacagttcttaaagatggtgtgtccgggatttgttccttcagatgtgtctggagtttcttccctctggtgagttcgtggtctcgctgctgacttcaggagtgaagctgcagaccttcgcagtgaacgttacagctcttaaaggtggtccgaagttgttcattcctcccggtgggttagcggtctcactgacttcaagagtaaaaccggagaccttagaagtgagtgttacagctcttaaacgtggcgcgtcgggagttgtttgttcttccaaggggtctggtggtctcgctggcttcaggagtgaaactgcagaccttcagagtgagtgctcataatagtgtggacccaaaragcgaccaacagcaagatttattgaaaacagcaaaacaacaaagctcccaaagggtggaaaatgacccaaatgggttggcgttgctggctagggttggcctgcttttattcccttatttggccccacccacatcctgctgattggcccatt

SEQ ID NO: 934851 - DNA, 638 bp, Homo sapiens
gggtacactcattcctcagcaggtccactcaggtgttacgggcgctgacacggaactagcaacaagcagagaaattcagtgctggctgttcggtgaagctgagaaggaatgaatgggttctcacagcttgacctcctttcccatgtttatttatatctctttccaaatgtaatgaccttttgaaatatgtttatatgtgaggtctaagtttcctttcccctgtggatcctctagaaatttctggaaaattctgaagcttggggttagggcatgaattaaattccaaagacgtttctggaaagttctgcatcttggggatttgaattggattccaagaaaayttctgaaaatgtctgtgagtccagggtctgaatcttgtgcatgcacacattttgttttgtttcttaatctggtaattttgatgtgctagggaacttgacatgagtttctctgcccctggatggtgagcatttcgcgtcttctttgcttttaaattttgaattcattctctttcccatcacacacacacacacccacacccacacacagacacagacacacacacacacacacacacagcacagcacacccaacacttctcatgtgttggaaaaccttccctcctcctctctgattct

SEQ ID NO: 934852 - DNA, 638 bp, Homo sapiens
gggtacactcattcctcagcaggtccactcaggtgttacgggcgctgacacggaactagcaacaagcagagaaattcagtgctggctgttcggtgaagctgagaaggaatgaatgggttctcacagcttgacctcctttcccatgtttatttatatctctttccaaatgtaatgaccttttgaaatatgtttatatgtgaggtctaagtttcctttcccctgtggatcctctagaaatttctggaaaattctgaagcttggggttagggcatgaattaaattccaaagacgtttctggaaagttctgcatcttggggatttgaattggattccaagaaaacttctgaaaatgtctgtgagtccagggtctgaatcttgtgcatgcacacattttgttttgtttcttaatctggtaattttgatgtgctagggaacttgacatgagtttctctgcccctggatggtgagcatttcgcktcttctttgcttttaaattttgaattcattctctttcccatcacacacacacacacccacacccacacacagacacagacacacacacacacacacacacagcacagcacacccaacacttctcatgtgttggaaaaccttccctcctcctctctgattct

SEQ ID NO: 934853 - DNA, 567 bp, Homo sapiens
ctgcggtaggtattcttaacatccccattttactgatgataaaagtgcgtgtcagggaccagctctgccaggtgcccagcaaccctgcacatctccaccgggctcgacggcaacctgacctgcgtcttggtggaacaccctgcaactcctcatggagcaaggggcgttaagtggccctgtgcatcgctgccgtgagtggtctcacctgcctccccaccctttyggaactgctgcaaggccatttctcatcgatcttcctagtttctgttgagcgcagcgctttcctcctctctccccactcccacaagttacgtctgcaggtgcctgctaagtctgtagagtgctcggttgcagttgagagctggctgctgcacagcagggcaacccactgtccatgccatctggtgtcccaaccttccagccttgtgtcctcctgtgggacgagggacacaaggagcgacatgtcatgctgatttagcttttgctgtctgcgtatgtaacaacctgtccaaatccatgtggctcaatgtctccctacagacaaatctatggaagtgtggctggcca

SEQ ID NO: 934854 - DNA, 727 bp, Homo sapiens
tcttcgcaagctgctgccagttggctccagaacaccactgactatagggataggaaagcagggctgatataaaagatattgcagagggagaattagcaagacttcggattatatgggaaattacagaaattgtaatctgacagatgaaaataaatttttatttatctatgtgacttcatttttctgctttgagtttcagaggggaaaactgaagcattctataaccagtgcatttcccagaaagtacgyagagagacacaatactgctttggagagagagaaagtgttttttacaagttcccaagtgagtattataaattagttttattgccaacatattgtacggagagacaataaaacaaggccataataaagttggtgcctatggtgatcccggtgaagggcaaggtgaacttacaagatatcgcagtatgatagaagctgcatcaagcaaaacccaggaagctaacactgggggtggtgtgggtagaagcacaaagtgagagaacagcaggctggactggtgggagttaatggctagttagggccaaacaaattgaagaagcaataaaattattaattgatctattgctttctccattcattcaaccacaatatattaagcatctgctaagtactgggtcctatgctaggtacttgatcaggataaacaatatggattcttttttttttttgagatggagtctcactctgttgcccaggctgg

SEQ ID NO: 934855 - DNA, 593 bp, Homo sapiens
ttacagtactgaacctatactctgcttcagagaggctgcagcactcactgccttggttttgagatttctggtccctaaatatgtcccttctcccctctttctacaggcaaaagagccataaggtagagttggctcagaaaagaaaagcagggcttttgctctctcacctcctacctctgtccattctgcatacacctgagccttgggtactgctctcaggtagaattagtcagcatcctataagagcrttccttaaagaggggaatttccagccatccctgcaattatgtcctcatcgatgttgtggctggaggcaggtgacagctccaggcccatgtgtttcctggccctagttcttttttcataaaacccacctgcttttgtcctccttctgcattttatgcttagtccacaagaagttggtggggcctcacagtccaacagaagaatgaagcagtcacagcagcccctcctggggcaccagcttgaggccgtgggatcccgtactcccactgagcccctctctgtgaatgcagggccagcttttctgattgatgctctgcttcccttgcactttcaccaacagattagtc

SEQ ID NO: 934856 - DNA, 564 bp, Homo sapiens
gtttctagcacattgggcagtgagccttttttgcttggtaacacctagagtagtcacgctcttagggacagatagtagaagggtagttgccagggggtgggaagaatgaagaatagcaagttgtttaatgggtatagcacttcagttttgcaagatgaaaagagttctggagatggatagtggtggtagcacaacaaygttaatgcacttaatactactgaatttttttacttaaaatatttaagatggtattacggactgaattgtgtccccctcccaagttcatatattgatattctaacccctattaccttagaatgtgactgtatttggagttaagaactttgaagaggtaattaagattaaataagatcataaaggtggaacttataagaaggaggtagagacagcagggatgtgcacatagataaaaggctatgtggggaaataacaaaaagatgtctgctttcaacaacgcagggaggcctcaggagaaacttagaccccactgtcaccttaagctttcacttccagccttcagaacttgagaaaataaattgctgc

SEQ ID NO: 934857 - DNA, 619 bp, Homo sapiens
ttccttcatttcaaccttggtgaatctgacaattacgtgtcttggggttgctcttctcaaggagtagttttgatgtgttctctgtatttcctgaatttgagtgttggcctgccttgctaggttgacgaagttctcctgggtaatatcctgcagagtgttttccaacttggttccattctccccatcactttcaggtacaccaatcaaatgtaggtttggtcttttcacatagtcccatatgtcttggaggctttgttcattccttttcatttattttttctctaatcttgtcttcacactttatttcaytgagttgatcttcaatctctgatagcctttcttctgcttgatcgattcagctgttgatacttgtatatgcttcacgaagttctcatgctatgtttttcagctccatcaggtcatttatgttcttctctaaactggttattctagttagcaattcatctaaccttttttcaaggttcttagcttccttacattgggttagaacatgctcctttagctcagaagagtttgttattacctaccttctgaaggtaggtaatatcaaaattcatcaaactccttctccatccagttttgttcccttcctgcgagg

SEQ ID NO: 934858 - DNA, 414 bp, Homo sapiens
cctttactctcctaccccaggggtatatcaactctcaggctttgtgtcataatcttatttggaaagaccttgatcacttttcccttccacaagatatcacactggtccattacattgatgacattatgctgattggatccagtgaggaagaagtagaagacacactgaacttatttatgaggcatttgcatgccagaggatgggaaataaatccaactaaaattcagggaccttctacctcagtaaaatttctaggggtcaaatcgtgtggggcttgtcgagatattccttctgcagtgaagaataagttgctgcatttggcccctcctgyaaccaaaaaaaaggcacaatgcctggtggacctatctggattttggaggcaacacatttctcatttggttgtgttactctgac

SEQ ID NO: 934859 - DNA, 749 bp, Homo sapiens
tctacctcagtaaaatttctaggggtcaaatcgtgtggggcttgtcgagatattccttctgcagtgaagaataagttgctgcatttggcccctcctgcaaccaaaaaaaaggcacaatgcctggtggacctatctggattttggaggcaacacatttctcatttggttgtgttactctgacccatttatctagtaacccgaaaggctaccagctttgagtggagtccaaaacagaagaaggctctgcaacaggtccaggctgctgtgcaagccgctctgccacttgggccgtatgacccagcagatccaatgatgcttgaggtgtcagtggcagatagggatgccatttggagtttttggtaggcccccattgattagtcacaaaaaagggctctagaattatggagcaagcccctgccatcttctgcagataactactctccttttgagagacmgcttttggactgttactggggtttggtagaaaatgaacatttgactatgggttatcaagtcaccacgcgacctgaactacctataatgaaatgcatgctttcggacccatctagccataaagtgggtcatgcacagcagcattccatcaccaaatgaaagtggtatatatgtgattgggctcaagcaggtcctgaaggcacaagtaagttacacgaggaagtggctcaaatgcccatggtctccactcttgccaccctgccttctctcccccaacctgcactgatggcctcatg

SEQ ID NO: 934860 - DNA, 721 bp, Homo sapiens
taagagaattctcctgcctgactgcctttcaattagggcattgacttatttctggatcttgagcctgctggcctttagatacactacaccaccagcactccctccatttggtgtccagcctgccaactcacccctcaaatcttgggactagtcagcctccataatcacatgaaccgatttcttataataaatctctttatgtacatgcactgtacatgtacttcaattttttgcctcaaaataaactcatactaatttgttacagcatgtctgaacaggatgtactttgagacactaagaaacataagacatcagtttgaaaatagcccttattagagcaacaygaattctactaaaattaaagcaagaacaaatgtcaaatttatgataaatcttgggtgaaagcacagtgaaatcattgatgctctacgaaaagtttggacgattcaccaaagaaatcagcagtttacaaatggataactcattttaagaagagatgagagcatgctgaagatgaagcccacagcagcagaccatccacaccaatttgcaaggaaaaaattaatcttgtttgtgtcctaattgaagaggacagatgattaatagcagaaacaaaagccaacaccatagacatctcaattgtttcagcttatacaattctgactgaaaaataaaaactgagcaaactttccacttgacatttgctacaactgttggaccc

SEQ ID NO: 934861 - DNA, 635 bp, Homo sapiens
acaagagcagagctttcaatagaaattttaaacacgtgggatccagatcctgaagcatttcttttaagaattgtaacaaaagattaaaacatggctttacaagtatgatcctgaagacaaagcacaatcaaagcaatggccaccaagaggtggaagtggtccagtcaaagcagaagtgaataggtcaagagcaaaggtcatggaaacagtattttgggatgctcatgcattttgtttgtagactttctggagggcaaaagaattataacrtctgcttattacaaacatgttttgagaaagttagccacagctttagcagaaaaacaccaagggagaatttaccagagagtccttctccaccatgaaaatgttccttcttattcgtctcatcaaataagggcaattttgtaagagtttctatagagaatcatgaggcatctaccttacaatcctgaactggctccttccgactcctttttgtttgttaatcttaaaaaaaattttaaagctcacccacttttcttcagttaataaagtaaaagagactgcattgacacggttaaattcccaggactctcatttctgtaaggatgaactaaatagctggtatcatcacttacaagtgtcttaaactg

SEQ ID NO: 934862 - DNA, 587 bp, Homo sapiens
caagagtttatgtcttttgtgaatggctactggggtggggagagaaataccaacaagtcggggaagtgttaggtgagtctgggctcagactgtcctttgacggtatttgctgcagccactgttggggatgtgagcatagttctggggccaactgggttatgttccatagggttttgtggtgcgtttgtygtcaagaaagtgggggaaagcagtagtgataggcctcatccagctcccacatagttggtgaggctggtctagctctagccatgcgtagagcttatctccaggcagcttgtgccttggactccgacctagccccaggctatacgtttccttaagaaacaagcaagcatggcttccaggccatgccccttcctgtcttcccacactttctggggctcctgctctcctttctgcagcagttcctgttcgtctctctattctgcccgaaagtttacacccagtgaaaatcattacaaagttcatttggaagctcctttcaccttgtgacccctcccaaattctgacagtggccttctccaagagtccctctgtatgatatagtcagggatggcttccctgag

SEQ ID NO: 934863 - DNA, 587 bp, Homo sapiens
caagagtttatgtcttttgtgaatggctactggggtggggagagaaataccaacaagtcggggaagtgttaggtgagtctgggctcagactgtcctttgacggtatttgctgcagccactgttggggatgtgagcatagttctggggccaactgggttatgttccatagggttttgtggtgcgtttgttgtcaagaaagtgggggaaagcagtagtgataggcctcatccagctcccacatagttggtgaggctggtctagctctagccatgcgtagagcttatctccaggcagcttgtgccttggactccgacctagccccaggctataygtttccttaagaaacaagcaagcatggcttccaggccatgccccttcctgtcttcccacactttctggggctcctgctctcctttctgcagcagttcctgttcgtctctctattctgcccgaaagtttacacccagtgaaaatcattacaaagttcatttggaagctcctttcaccttgtgacccctcccaaattctgacagtggccttctccaagagtccctctgtatgatatagtcagggatggcttccctgag

SEQ ID NO: 934864 - DNA, 633 bp, Homo sapiens
catgccactgcactccagcctgggtgacagagtgagaccctgtctctaaaaataacaacaaaaaacccaaaaaggagcagaggatgtggctgcccccaccacaggagtgtctaacctagttgagctgatgaaacaagaatacaggccaatgcagtcctaagtaatggggccgactccaggagatgggacttcatagaagagatgggacttgagccgagctcttaagaaaggtaggatgtggatggaaaatctataggtttttgagcaggagagtgttaagaaaaacatttgaacagtggcacatggcaagaaatgggtaaggcggaattgggggcaggcagaaggatatcagttggaacaggcctggggtgatgacagttgcatctacactagtggtggmatggttatagaaggaagggatccaagagagatctctacagaataacgaggtctggcaacatcctgaatagagagaggaaggagagagtctggggggctgccagatctttggcttctagggcctggagggttggttgtgtgtctctatcagaaatgaagtctgggaaaggtgtcccgtgagggtggggtgggcaatgatgagtcagttatggacgcgtctcaaggacagtgaaa

SEQ ID NO: 934865 - DNA, 633 bp, Homo sapiens
gatcattataatcactttctagcatgcaggtcttcctctgtcatgcttgtatggcaaaacctcaatattcaattaacccaactctcctcccattctgtgtttgcactcaagcagctaaattaggctggataaaaatatacaaccacactgagttttctcactttattttttaatttgtgtttttattattattattattattttgatatagagttttgctctggttgcccaggctggagtgcaatggcacgatcttggctcactgcaacctctgcctcccgggttcaagtgattcttctgcctcagcctcctgagtagctggattacaggcatgtgccaccacgcccagctaattttgtatttttagtagagacagggtttcttcatgttggtcaggctggtctcgaactcccgacctcaggtgatccacctgccttggcctcccaaaatgttgggattacaggygtaagccactgcacccagcctttctcacttaaaattcatgactttgaacctcaaaagtgcctttagcactacccgggatgcctggtatatttctttagttagcatctcctactctcctagatgactgttttcattctttttccttaatactgccatccccagcctcac

SEQ ID NO: 934866 - DNA, 546 bp, Homo sapiens
aggcaaataaatcattttaccaaaaagacacctgcactcaaatgtttatgacagtactattcacaatagcaaagacatagggtaaactcaggtgtccattaatagtgagttggattaagaaactgtggtacatatacaccatagaatactacacagccataaaaaagagcaaaataatgtcctttgcagcaacacagacgccgctggaggccattatcctaaggaaattaacaaattaagccaaccaaatatgctcacttataagtgggagccaaacattggctatacayggacataaagatgggaacaatagacaccagtgactccaaaaggagagaggagggagggggacaaaaggcaaaaaattacctattggatactatgttcactgcccgggtgacaggttcaagtgaagctcacagcatcatgcaatatatccatgtgacacacctgcacatgtaccccctgaatctaaaataaaaataaataaataaataaaaatgttttcttttcattctttttggtttgttttgatcacatcaaaat

SEQ ID NO: 934867 - DNA, 546 bp, Homo sapiens
aggcaaataaatcattttaccaaaaagacacctgcactcaaatgtttatgacagtactattcacaatagcaaagacatagggtaaactcaggtgtccattaatagtgagttggattaagaaactgtggtacatatacaccatagaatactacacagccataaaaaagagcaaaataatgtcctttgcagcaacacagacgccgctggaggccattatcctaaggaaattaacaaattaagccaaccaaatatgctcacttataagtgggagccaaacattggctatacacggacataaagatgggaacaatagacaccagtgactccaaaaggagagaggasggagggggacaaaaggcaaaaaattacctattggatactatgttcactgcccgggtgacaggttcaagtgaagctcacagcatcatgcaatatatccatgtgacacacctgcacatgtaccccctgaatctaaaataaaaataaataaataaataaaaatgttttcttttcattctttttggtttgttttgatcacatcaaaat

SEQ ID NO: 934868 - DNA, 617 bp, Homo sapiens
tttctcagtaaattaaactagatcatcaatgtttcacccttatttttttctttatactcaaagaaatattaacagcctaataaatctcaggtaggtagctaaatacctaaaaattttccagagaaagagtaagaccaaatttactcttgatgtcttgcccctaatcttagcaccagtgactattgtactagatgtttcctcaaagtttttattccaggggtccagctcagtatacccaagggaaagcagacttgggtatactcttttcagagaagtctaacakttgagcctggaaccaaggctagaattcctaagaagaaaggcttactcatcagattttcacaaaacagctcaatgcttttcatttttccatttatttttcattttcattttcatttttccattcattcactttttcaggaaatatttattgtgcatctagtgtgtgcaaggttctgtagtaagggccagaggtataaatgatgataaagcatcaacataacaaaaaaccataagaattgtccccccagaaagctagagcatgaggatttctaagaaaagggaagagtgagaaatcacagaaatcaaaaatttaggattatgatttttttaacatt

SEQ ID NO: 934869 - DNA, 737 bp, Homo sapiens
ggtggagtcacttaatgccaccacctcccagttatcctcccacagccttttgtagtgtgcccaggttaacccattctcgccacttcccctcataacagaggagctgtaaggaaatatatatggctgggcatggctcacatctgtaatctcagcactttgggaggtaaagtaggaggatccttgagtccaggagtttggaaccagcctgggcaacacagggagacctggtctctacaaaaataaaaaaaaaattagccagatatggtggtaggcacctgtggccaaggattctgtcaccttcacctttgctgarttgggaggatcgcttgagcctgggaggcagaggtttcagtgagcggtgctcgtgccactgcactccagcagagtgaaaccttgtctcaaaacaaagcaaaaaataaaagcaaagaaaaagaaaaacatatataggcattactctcgtacaaattacctcaggaggaaaaaaataaaatcttttcttggaggagtggaaaaactctttttaatttttattttatttaatagagatggggtctcattatgttgctcaggctagtctcaaattcctgggctcaagcaatccatctgtctcatctcctaaagtgctgggattacaggcatgagccaccgcacctggccaataaagccctttatatgatatgtgttgttgctcttgtccacaaccacagtcatgttcatctccgtgatgtctaggaacc

SEQ ID NO: 934870 - DNA, 623 bp, Homo sapiens
agctccaggcattacatccacctgccaaggagagagatcagtaaaggggagatggtgagtgcaaccttgtctggaaagacagggcctcccagggttccccctcatcatcagagggtgtttattaaggtgtcattgattgacactggagggcatgcacccctcgtcatcagggcagtgtaggtggtccgcacctggcctgctggttaagggcccaggttcttggtrggagctggactaacccaggggcctttgggaaacctgaaggtcattttacatgtggcatccgcacacctgagaccttcatggacttcaaatccacaacattttactataaattatttctatttttctgttataccacagtttggggacttatatatttgggggccttagatattttttccctaaaattatatgtgaagcttttaagaactgaatttcattttctagatagaaaagaaagcatcataaaatatttaccatgaaggcttcagaccgactgcctcacactgaccccaattccttccttcctgggtggtctcggggctgctcggagctgaacagggtccccttcgacagggttcggggggatggatgtggccttgctgaacacagcagcaaac

SEQ ID NO: 934871 - DNA, 731 bp, Homo sapiens
agccaccctcctccctccctgaccacacggcctcttcccgacggtgacgctcaagctcctaccccacgccctgtgacttgccgacttgcccacctccccacctcccgcccacttccccattttcacacatgagggttctcccatcctcaggcctcagctcagatgtcctttccatggggcctgtgggaagcagccacctgcggccactctccctctcccagggcactggtcacttcctgaaacccgctcctggccctcgcccgtctccctccccaggctggaagttcccaggtcccaggccttgaatttccccaacagcccctgtggccctgcccacaacaggaaaccgcgggaaggcagcagagcccagggtgctcctgtgggatgcctgcctgacatcggggctcaggcagggaccctgataggctgcagcccctcagcagcctgcgtcctctgggcctgggggagccacgggtgtcaggagcctgcgggtggactctggacaggaacctggaattccctagttcctgggaggcagccaccagatgacagcgtaggcacgtccttgcccgscccctccagcacagcccccaaccccgagaggactgggcagatggccaagaaggggaaggtgccctcccccatcctgagcaggcggccatgaggccttggcagacctcccaccctggaactgggccgctggagcctggggtaagacatgtggaagggcc

SEQ ID NO: 934872 - DNA, 606 bp, Homo sapiens
ctggagcttcctcacctctctcagcctccacagaattgaggagagttacagccttggtctggatccggctgtggcttgaggagacgtcgtggctggtttgatcttctatccgaccgccaccacgttttccacattggcaacagccttttcgcttccttcccaatcgtgtgtccactggagtagcacttacactttccttcaaggacttttcctttatactcaaaacttggctaactcttttgcacaagaggcctggctttccgyctgtccagattttggcatgcccttctcaccaggcttagccattcctaacttctgatttgaaggagagacctgcaacccttcctaccatttgaacatccgaggccactggagggtatcacgtggcctgacttcagtgctctgtgtctcagggactagacaggcctgaggagagggagagggatggggaagctgctggtcggtggagcagtcggaacacacaacatggatggattaagcttcctgtcttatatggggacagtttgtggtgccccaaaacaatgatcatactaatatcaaaactcactgatcacagatcaccgaacagatataataaagatggaa

SEQ ID NO: 934873 - DNA, 536 bp, Homo sapiens
gtgggtaggctctatgcaaataccaggccactttataccagggccttgggaacctgctgatttcaggatccaagggcggtcctgaaaccaatcccgaggatatcgagggatgactatactgcaagtggattaaacrcttaagtgtgaaaagtgaaactgtaaaaaaaaaaatttaattgaacatttactatgtaccagacacagttctaagcactttcaaagcaacagtgaacacagcacatgctctctgccctcctggggcccccggaggttggtggggagatatgagccgcggtcatcacaggtaaacacatcactcaaataagtcaaggggaagtggggtgccgggaggggcaggctgcatttacgccttacctaaaatatgcttgccgcagggaaggtgacatttcagcagacttgaaggaactagagatatcgatggaggtttcatcctgaaacccgaaactagaatgcaagaaaatatgttttgtttatttatgaaactgggtagtgttaattacaacacttcattttta

SEQ ID NO: 934874 - DNA, 735 bp, Homo sapiens
agatcaacgcagaaggtgggtgatttctgcatttccaactgaggtactcggttcatctcactgagaatggttggacagtgggtgcagcccacggagggtgagccgaagcagagtgggacatcacctcaccctggaagtgcaaggcgtcrgagaattttctccccaacccaagtgaaaccatgagggactgagcctgaggaactctggcacagaaactgtgcttgtcctatgattttcacaacccacaaaccaggagattccctccggtgcctaccccaccagggccctgggtttcaagcacaaaactgggtagccatttgggcagacaccgaactagctgtaggagttttttccataccccagtggcgcctggaatgccagcaagacagaaccattcactcccctggaaaggggtgctgaagccagggagccaagtggtctgtctcagcaggtcccacccccatggagccaacacactaagatccactggcttgaaattctcactgccagcacagcagcagtctgagatccaaatgggatgctctagcttggtgggaggagggacgtccgccattgctgaggcttgagtaggtggttttacactcacagtgtaaacaaagccactgggaagtttgaactaggtgtagcccactgctgctcagcaaggctgctctggccagactgccagatttctcctctctgggcagggcatctctgaaaaaaaggcagcagcct

SEQ ID NO: 934875 - DNA, 573 bp, Homo sapiens
  misc_feature 82: n = A,T,C or G
ccaaaccaagaatgcaatcccatttacaataaccacaaaaacaaacaataaaatacctaggaacacatctaacgaaggtggntgaaagatctctataaggagacttacaaaacactgctaaaagaaataatagatgacacaaacaaatggaaaaacattccatgctcattaattggaagaatgaacatcattaaaacggccatactgcccaaagcaatctacggattcaagttattcctatcaaactatcaatgtcatttttttcacacaactaaaaatactatcctaaayttcatgtggaaattaaaaagagcctggatagccaaagcaatcctaagcaaaaacaacaaagccagaggcatcacattacccaatgtcaaactatactataaggctacagtaatcaaaacagcatggtattgatacaaaaacagacacatagaccagtggaacagaatagagaactagaaataaagctgcaaacctacagtcatctgattttcaacaaagttgacaaaaataagcaatggagaaaggacaccctcttcaataagttgtgctggaatagctggc

SEQ ID NO: 934876 - DNA, 785 bp, Homo sapiens
tctcatcctcccccttctcaggctaaaatcacactcagtgtttctgtgggatcatctgatctggacattgtcagaaaaaattgtaccagacaagttaaaccttcaaggaaggactcagtcaggactactgcaatacggaagagagaaggagcttaactttgttgaaacaaaaggctggagagtttttaagtgccggggtgagatgctgagaaggaactggagacatcaggaagaggttaggaaatgctgtaaagctatctgcgttggctcattggaatttttcaaaactaggaatmtgcccttctacaaaaactgagacacagatgtatcatctccttcaataattgcattttaaagggatggctctgaagtcttgagaaaggcattcctgggttgcaaaactaggaagaggctagaagaaaatttgggagaagatttgcatctcaaagagatagagaaagaactcacaattgcaagtttcctaaaataaatcctccgtgaaaaaaggaggcctgatggatggaactggaggtcattatgttaagtgaaataagccaggcacagaagaaaaatactgcatgttctcactcacatgtgggagcttaaaacctggatctcatggagatagagagtagattggtggctaccagaggctgggaagggagcagagaagggagataaaaatagtttgattaatggatgcaaatatcttaggtttttttggttttttgttttgtttttttggagacaggattctgctctgttgccagactgaagtacagtgg

SEQ ID NO: 934877 - DNA, 572 bp, Homo sapiens
acctgtctggactttaaagatgccttctttagcatcagaatagctcctgagagccagaagctgtttgcctttcagtgggaagatccggagtcaggtgtcactactcagtacacttggacccagcttccccaagggttccaggactcccctgctagctttggggaggccctggctcgagacctgcaaaagtttcctgctaaagacctgggctgcgtcttgctcctgtacgtggacaaccttctgctgggacactccayggcagttgggtgcgcaaaacggacggatgccctgcttcagcacctgaaggactgtgggtataaggtgtccaagaagaaagctcagatctgcagacagcaggtaagctacttgggattcactattcagaaagggaagcgcagcctggggtcagaaagaaagcaggtcatctgcagcctaccagaacctagaaccagaaggcaagtaagggaattcctaggagctgtggggttttgcagattatggattccaaactttgcagtgctagccaaacctttgtacaaggttacaaagggggatgaccgagagcctctatg

SEQ ID NO: 934878 - DNA, 572 bp, Homo sapiens
acctgtctggactttaaagatgccttctttagcatcagaatagctcctgagagccagaagctgtttgcctttcagtgggaagatccggagtcaggtgtcactactcagtacacttggacccagcttccccaagggttccaggactcccctgctagctttggggaggccctggctcgagacctgcaaaagtttcctgctaaagacctgggctgcgtcttgctcctgtacgtggacaaccttctgctgggacactccacggcagttgggtgcgcaaaacggacggatgccctgcttcagcacctgaaggactgtgggtataaggtgtccaagaagaaagctcagatctgcagacagcaggtaagctacttgggattcactattcagaaagggragcgcagcctggggtcagaaagaaagcaggtcatctgcagcctaccagaacctagaaccagaaggcaagtaagggaattcctaggagctgtggggttttgcagattatggattccaaactttgcagtgctagccaaacctttgtacaaggttacaaagggggatgaccgagagcctctatg

SEQ ID NO: 934879 - DNA, 633 bp, Homo sapiens
ttcaggtggtgcctgcatatcgtgcagaaccatctgtgaagcatgtcctagttttctctttctctgtcaactgatcttagggaacttcccataaggccactggtgcaggcttggggagagaaggcagggtggccggagtacagaccatgggcatttgagccacttcctcatgtaacttccttgtgccttcaggacctgttcaagcctgatcacatatataccacttctatttaatgatggaatgctgctgcacacaacccactttatgrctagatgggtcagaaagcacccagttcatgataggcagtacaggtggcatggtgccttgatgacccgtaggcaaacattcagtttccaccaaagcccagtaacaggtctagagctgtctctcaaaaggagaatagttatctgcagaagatggcatggccttgctctaaaatcctagaggactctgctctgatccacctatgggggcctgccaaaggctccagtaagcctccctatctgccactgacacctcaagcaccatgggatctgctggatgatatggcccaagtggcagagcagcttgcacagcagcctagatctgttgcggagccttctccgcctggattccactccaaactggcagcc

SEQ ID NO: 934880 - DNA, 817 bp, Homo sapiens
tggctttggcaaaagttgacatgttcttcccaaatttaatatgaaagtacaagtgacttggaatagccaaaacaatcttaaaaagaacaaaattaaaggatttatgtatactgattttgaaactttctacaaagcgtggcaatcatgatagtctgatctcaccataaggatacacctaaacatcaagagattattggaataaaattgagagcccaagaataatctctaatatttatgatcaattgatttttgacaaagctgtcagaaatagtcaatggaaaaggaatagtctttttcacaaatagtgcggggacaactacctcacactgtatataaacattaattcaaaagggktcacaaacttaaatgtaagagctagaaattttctttgtcttataagaaaacataggagtaaatcatcacgatgttgggttaggcaattattttgtagttatgacacaaaaagtacaagtcgtaaaaggaaaagttgataaataggacttcatcaacaataaatgcttttgtacagcaagacatcccatgaagaaagtgaaaagacaactcacagcctggaagaaaaatacatgccaatcatatatcccataaggaatttatatctagcatatagaaagaactcctacaactaaaaataaaatgacaatctaatttttaaaatgagtaaagggatttgtataaacatttctccaaagaaattatcacacagtccacaagcacatgaaaagaaaatgctcaacatcattagtttttagggaaatgcaaataaaacaaccatgaaatgccacttcataaccctgga

SEQ ID NO: 934881 - DNA, 594 bp, Homo sapiens
aagacctggcatatgggagtgtgtgagtaaaaccacgtggtcacatttgttgcagggagcaccatctgttgaacagctcattttgccatcaattccatctcagtatgataaataatgttctctaagatcacagccacagtaaaactgtcactaagatgccaacaattccacagaggttgttaaaccttgttgccacaaaaacgataccgttacataattattcttatgtacatcacttcaatagygacacagtgagctggctgggcaaggcaagggttggaaaaccacctaggccggcttgctgtgacccagttgactggccctgactactttgcctcttctgctttgactctcgcccaggaaatactttaggtacatctggaaatgcagtgaaaatacttggcgtgaacaccgtgtgaaaaatcaacggaaacacccgaggccaggcgggactggggctccggtgggagggggtgagccttgctgactttcctcatgctcctgctcactctccctttatttaaagagaccttcattgttcccgttgtcccatcccacaatcccaggttctctatgtaagggatacagattgaa

SEQ ID NO: 934882 - DNA, 601 bp, Homo sapiens
ggctccactatataaaggagctgatgtcattatcatgggagtggtttagttattgagggcatggtctcctgataagaggataagtttggtccagtttctccccatcttgtgtgccacttctgctttttgttttccaccacgggataaccctcaccagatgccggtgccatattcttggacgtcccagcttccagaaccatgaaccaaatttattgtttataagttaccctgactgtggtattctgttatagcagcagaaaatggactaagacagttgtcacttaggaatcagaattaaatcctctaaagtgataaaactagcttttcaaatgatcttcatatccaactcccaccaagttacaaatactcaccttttatatagcaaaagataacactggctgacatggtattctacttccacatgaagatgtgaatgkcagggcaagagctagacagcctggagagacacagtccagaggaccagcttagagcccagtcatagtttgggatcctatgtaacaggccatgaatcccagcaggggaaaaattctctcaggcttggtgttttcagggctcatctactgtcaccatgacagcagca

SEQ ID NO: 934883 - DNA, 552 bp, Homo sapiens
cccagcggcttgcactgctggctcagacagcctgcttttatcctcttatctggccccacccacgtcctgctgattggtagagccaagtggtctgttttgacagggcgctgattggtgcgtttacaatccctgaactagacacaaaggttctccacgtccccatcagattagttagatatagagtatagacacaaaggttctccaaggccccaccagagcagctagataaagagtatggattggtacactcataaactttgagctaaacacagggttggtgtttttacaaamcttgattggtgtgtttacaaaccttgacctagatacagagtgcggattggtgtatttacaatccctgagctagacataaaggttctcccaggccccaccagaccagctagatacagtgtggattggtgcactcacaaaccctgagccagacacagggtgctgactggtgtgtttacaaaacttgagctagatacagaatgccgattggtgtatttacaatccctgagctagacataaagattctccaagtccacaccagac

SEQ ID NO: 934884 - DNA, 552 bp, Homo sapiens
cccagcggcttgcactgctggctcagacagcctgcttttatcctcttatctggccccacccacgtcctgctgattggtagagccaagtggtctgttttgacagggcgctgattggtgcgtttacaatccctgaactagacacaaaggttctccacgtccccatcagattagttagatatagagtatagacacaaaggttctccaaggccccaccagagcagctagataaagagtatggattggtacactcataaactttgagctaaacacagggttggtgtttttacaaaacttgattggtgtgtttacaaaccttgacctagatacagagtgcggattggtgtatttacaatccctgagctagacataaaggttctccmaggccccaccagaccagctagatacagtgtggattggtgcactcacaaaccctgagccagacacagggtgctgactggtgtgtttacaaaacttgagctagatacagaatgccgattggtgtatttacaatccctgagctagacataaagattctccaagtccacaccagac

SEQ ID NO: 934885 - DNA, 609 bp, Homo sapiens
atggctctagggacagtaagagttctgctgtaatgaccatctcccactgctaggttcccaaacctcacctgcagcacaagctattcttctcccataattgtccatcttatttttcttgtcttcttggagaatgtcaactgagtctctcaggactccactcaaatgtcrctcctccttcatgcccccatggcctcttgtttgtatttctgattgctgtcagaattgcaatacatgtgtgtctctgtcaataacttgaaaggtttctggaaaggtttgcactgacttctgttcctcatctttgcatcttggatacctacaattggcacttggcacataaaggtgctcattacatgcctgttgtgtgcatcactgagacagaaacaactcctttgatgccacatacaacaagaagtctagacacttcaccatcctggctatttttctttggatttggcaaagtttgccacgagtctacagaaattagagcttggagttggggaagacagccaggaggtgttctgacctgtgttgaggacagagaggttctgagctcgtgccttctccatgttgtgtctttattacagtccccttgccttcacagatggagat

SEQ ID NO: 934886 - DNA, 617 bp, Homo sapiens
gaatgttctggaaatgtctgttacatctatttagtcagattaactaagaaaaaaagtagagaaaactagaataaataaaatcagagacaaaaaaggaaatgctataaccgataccatagaaatacaaaggattgtaagaggctattgtgaacaattatatgccaacaaattggataaactagaaaaaatggatacatttctggacacatataacctaccatgaagaaacagaaaacctgaagaatcaataacaagtaataatattaaatcagtaaaaagtctcccatcaaagaaaagcccaggagctgatagcttcattactaaattctatgaaacatttaaagaataactaacaccaattctactaaaactattatttaaaaattgaagagaagggaatacattcaaaygcattctacaaggcaagcattacgatgataccaaaatcagacaaggacacaatgaaaaaagaaaactacaggccaatattcctgatatatataaatgcaaaatccctcaacaaaatactagcaatctgagttcaacagcacattaaaaagttttttcaccattatcaagtgggatttaatccaggaatgtgaggatgtttcaacata

SEQ ID NO: 934887 - DNA, 608 bp, Homo sapiens
ctacaatcatggctgaaactgctagatttcagaagatgtatggaaactcctggatgtcgaggtagaagtttgctgcaggggaagggctctcatagacaccatctgctagggcagtatggaagagaaatgtggggtgggaacccccctccacagagtccctactggggcaccacctagtggagctgtgagaagagggccaccatccaccagaccttagaatggtagacccagtgacggcttgcaccatgtcgctggaaaagtagcagacactcaaagccagcctgtgaaagcagccaggaaggaggctgtaccctgagaagccacatggacagagctgcccaagaccatgggaacccacctcttgcatcccastgtgacttggatgtaagagaaggggtcataaaagatcattttggagctttgtctgccccactggatttcagacatgcatgggacctgtagcccctttgttttggccaatttctccatttggaatgactgtatatacccaatgtttgtacccccactctatttaggaagtaagctaacctgcttttggtttcacatgctcataggtggaagggacttgccttgtctcagatgagaca

SEQ ID NO: 934888 - DNA, 736 bp, Homo sapiens
gcttgaacctggggcggaggttgcattgagccgagatcgcgccactgcactgcagcctgagcgacagagtaagactcggactaaaaaaataaaaaataaaaataaaaaaacaatttaaaaaattacttttaggtgtaggacccttttttgagggttttttttttttgtaatttttgtatgtgctgtgagacagtggtccagttttattctcttgtatgtgaatatacattggcaccaccactgctcattaaaaagactgttcttttcctctgttgaattctgttggcactcttgttgaaaattgattggccataaatgtaaagatttatttctggacttccaattttattacattaacctattagtctgttcttatgscaataacacactgtcttgattactgcaggtttgtagtacgtttttatatcaggaactgtgcgtcttccaactttgttctttttcaagactgttttgactatcctgggttcctagcattttcaaataaatttcaggattagatcgacaagttctgcaaagagctagatatcattttaatagggattttgttaaatctgtggatcaatttgggtcatattgtcatcttaataacattaaatcttttgattcatgaaaatgaggtgtcagaagactacatagagatatttagatattcttttttctgtcaacaatatttttaattttcagtgtataagatttgcccttcttataaggataa

SEQ ID NO: 934889 - DNA, 785 bp, Homo sapiens
tatgtaccagagtaggaagtttagaaataaacccaaatacataccagaattcagtgcaacataagagtggattctcaaattactggagaaaagacagagcatctgtattagtcaattttcacacttctataaagaaatacccaagactggtattttatttatttttatttttttcagtgtgtctttttaaaaattattattatactttaagttctagggtacatgtgcacatggtgcaggtttgttacataggtatacatgtgccatgtttgtttgctgcacccatcaactcatcatttacattaggtatttctcctaatgctatccctcccccagtcccccaccctcgacaggccccagtgtgtgatgttccccgccctgcatccaaatrttctcattgttcagttcccacctatgagtgagaacatgtggtgtttggttttctgtccttgtgatagcttgctgaaaatgatggtttccagcttcatccatgtccctgcaagggacatgaactcatccttttatatggttgcataatattccgtggtgtatatgtgccacaatatcttaatccagtctatcattgatggacatttgggttggttccaagacttttctattgtgaatagtgccataataaacatacatgtgcatgtgtctttatagtagcatgatttataatcctttgggtatatacccagtaatgggattgctgggtcaggtggtatttctagttctagatccttgaggaattgccacaccatcttccacaatggttgaactag

SEQ ID NO: 934890 - DNA, 785 bp, Homo sapiens
tatgtaccagagtaggaagtttagaaataaacccaaatacataccagaattcagtgcaacataagagtggattctcaaattactggagaaaagacagagcatctgtattagtcaattttcacacttctataaagaaatacccaagactggtattttatttatttttatttttttcagtgtgtctttttaaaaattattattatactttaagttctagggtacatgtgcacatggtgcaggtttgttacataggtatacatgtgccatgtttgtttgctgcacccatcaactcatcatttacattaggtatttctcctaatgctatccctcccccagtcccccaccctcgacaggccccagtgtgtgatgttccccgccctgcatccaaatgttctcattgttcagttcccacctatgagtgagaacatgtggtgtttggttttctgtccttgtgatagcttgctgaaaatgatggtttccagcttcatccatgtccctgcaagggacatgaactcatccttttatatggttgcataatattccrtggtgtatatgtgccacaatatcttaatccagtctatcattgatggacatttgggttggttccaagacttttctattgtgaatagtgccataataaacatacatgtgcatgtgtctttatagtagcatgatttataatcctttgggtatatacccagtaatgggattgctgggtcaggtggtatttctagttctagatccttgaggaattgccacaccatcttccacaatggttgaactag

SEQ ID NO: 934891 - DNA, 627 bp, Homo sapiens
attttttattgcatctgtttgattcttctctctattgcaattcttttttttttttctttttgagactgagtctcgctctgtcccccaggctggagtgcagtggcgtgatctcggctcactgcaagctccgcctcccaggttcatgccattctcctgcctcagcctcctgagtagttgggactacaggtgcccaccaccgtgcctggctaattttttgtatttttagtagagacagggtttcattgtgttagccaggatggtctcaatctcctgatctcgtgatccgcccgcctcggcctcccaaagctctatttcaaattttatacattgtgggtgggaataaaaaatggtatagccagtctggaaaagtttggcaatttcttataaagctaacgtgtttgtcttataacccagaaaccccacttcctagagaartgaaaacttatgcttacataaaaacctttatataaatgttctgttgataattctgtgattatctgatgttctattcataattgctccaagcaaatgtccttcaacaggtgactgaacaggttaatgcatgaagaagttgtggtatatccatacaatgaaatactactcagcagtagaaaggaatgaactgtt

SEQ ID NO: 934892 - DNA, 751 bp, Homo sapiens
gctcatgctctaggagaaactcttttctattgctggaggaaacaataaagaggtttttctcatgcaattcggacaccagttcagtcacaataggacagggcaccaggtagagttttgaggcccccatcccaggccctagctcccagatgacatttctagacataccttaggccagaaggaaacccactgccttaaagggaaaaaccaagtcctgggagaattcattatttgctgactaaagagccactgggccctgaataagcagcaacagcaaccaggtatagtacacgctgtgggccttcagtgagactctgagatgtgctggcttcaggtgtcacccagcatgttggcagttgtggtagctatgaggagagactctgagtgcttgagaaaagcagagggaagacttaataggactttgtcttgcagcttaggtatcagctcagccacagkggggtagaacactaagcaggcttccagagttcctgattccaggccttggctcctggatggaatttctagacttgccctgagccacagggaagcacacactgccctgaagggagagtcccaggcctggaatcattcaccacaagcatattgaagagctcttgggccttgagtggacaccagtggtagccatgcagaactcactgcagacctggggcagtggtggccataggaagagatacctctgcttatgagaagaggagggaagagtgggaaggactttgtcttgtggctggggtgc

SEQ ID NO: 934893 - DNA, 557 bp, Homo sapiens
gtagaatagagtacaaggtagattcctaaggtctccaactccaggccctggctcccagatggcatctctggacacaccgcagggtcagggggatctctctgccctgaaaggaaggtcacaagcctggctggctttactacctgctgattgtagagccctagrgctttgaacaaacaaaggcaatagccaggcagtgtttactgcaggccttggatgagacccagtgctgtgctgacttcaggtctgacccaaaacaatcacagtgatggtggccacagggttgattgtggcacccctcaactctatttgtttggaagaaaggaaggaaaacaatgggtctctgcctggtaattcagaaaatttttccagattttacccaagataaccaaggtgatacctctacaagtttgaaagagccacagcattactgagtttggagtgtcccctaatgcagacgtggctgcagtcaccaaaaagtactctgtgcttgtttgtttatgcaattagtgttaagttgtcatcagtttaaaataatgggttataacttattagttgca

SEQ ID NO: 934894 - DNA, 662 bp, Homo sapiens
aaatttcttcagtgcaaagcacactcagatttggtttttatttccatttcctgttttcttttacttaaaagtctatagaattaacataaaggttgagttctcagtgaaagaaaccaggctgggcatggtggctcatgcctgtaattccagcaatttgagaggctgaagcatgcgcatcagttgagctcatgagttcaagaccagcctggaccgcatggcaaaaccccatctctacaaaaaatacagaaattagccaggcatggttgcacgcgtgtagtcctagctactcaggaggctgaggtggaagggtggtttgagcccgagaggtggaggttgcagtgagccaagatmactccactgcactccagcttagacgatagagacagaccttctctcaaaaagaaaaaagcgagacacaaaagatctataagtgattgattcggtttacatggcgtctcagaaaaggccagtctgtagagatagaaggagaagcggttgcgtcggtgtggaaaggaaaatttcaggtgggcatgaggaatctttcaggggtggcagaaacgttctaaaccagattctggtgatggttgcgcgctgggttttttttactagaaatcactgaagtgtatccctaaaaacaggtagattttatgatatgtaaatta

SEQ ID NO: 934895 - DNA, 682 bp, Homo sapiens
ccagctggtcagagacggaaaatccggtagttgcacgggacgggttccctcggggatctcggaggggagacccccacccgggaggactggaggcagcgctctcccgccccgggcgcgcacgctatttccctctttccaaggggccaatccccaccgcggcccgcagggcgctttcaaggcaaggtcccgcggcgagaacggtgcccagtgggagcgaagggcgaggcagcccttggtccttggccggcagttcgggtcccgcctccaaattcgcccccctcccccccsccatctccagcggtgttcaaaactctgatggcatgggggggttgagggggtggccctggggagacggatgtcgggggcaagcaagaggtctaggtgcacgcgttgcctatccctggcccacgagaatgtagctaaggttttgcacacatatttaaagtaaaataatcaaaaatgacagaaaaggcttctccctgggaaggccgtgcctggcgccctggcatgccagacttggtgctgagagcagacgacagagggaggactctccagggccagacacggcctccgcacctccgtctcggttcgtgcaatggggatggcgctgcgccacccagtagaggcgctgcgagctctcccttcccaggagaggcgtcgtatgttgtgaaatgtcacactg

SEQ ID NO: 934896 - DNA, 605 bp, Homo sapiens
tggaaaatcctaaggaacccataagaaacatgttaagcaaaattgaaggatacaagatcaatgtgcaaaactcttagctgccatggtggcacagttctgtagtcccagctactcaagaggctcaggcaggaggattgcttgagcccaggatttcaaggctgcagtgggccacaatcgcaccaccactttccagcctggggaacagagcaagactctgactcttaaaaaatcaaaaaggccaggtgcagtggctcataccttaaatcccaatgttttgggaggctgaggctggaggattacttgaagctaggagttcaagaccagcctgggcaaaataacaagaccgtatctttaaaaaaaaaaaaaattctattgtatttctttctgtacactagcartggacaatcaaaataaaattaaggacagttccatttacaaatagcatcaaaaagagtaatatacttagaaataaattacctgtacactgaaaactacaaagcatcatcgaaagaaattaaagaagacctaagtaaatgaaaagacatcatgttcacggattggaatatggcagtactcttcaaatcgatgtacagagtcggcaaaat

SEQ ID NO: 934897 - DNA, 636 bp, Homo sapiens
catgttgcctaggctggtctggaacttccggtctcaggtgatccgcccacctcggcctcccaaagtactgagatgacaggcgtgagccaccgtgctcggccatctatatgcacttaaatggcattgattcctcctaaaagcacctttccttgtgctttttcttcttccgcatttcttagaagacaagtcagcccagtacccttgtgcatgaggcctgtgggtgtcctgtgacggcaggtgaccaggtctctgtgctgggtgaggggctgccctsgctgtggcctcacattccatgttgtggccgtccacgaggcattttgtggcactatgggctcccacaccatgggaaaacttcaacaaaaaatgtcactaatgtgtcatgagatcacgaggttctctatttcttgaatggaagagtagggggaagaggacacccctgtatttgcagagaagactgtctggaaggcattcccaaaattagtggtggcatttttttttttgagatggagtcttgtctgtcgcccagactggagtgcagtggcatggtcttgacttgctgcaacctccgcctcctgggttcaagtgattctcctgcctcggcctccggagtagctgggattacaggcatgtcccacc

SEQ ID NO: 934898 - DNA, 636 bp, Homo sapiens
catgttgcctaggctggtctggaacttccggtctcaggtgatccgcccacctcggcctcccaaagtactgagatgacaggcgtgagccaccgtgctcggccatctatatgcacttaaatggcattgattcctcctaaaagcacctttccttgtgctttttcttcttccgcatttcttagaagacaagtcagcccagtacccttgtgcatgaggcctgtgggtgtcctgtgacggcaggtgaccaggtctctgtgctgggtgaggggctgccctcsctgtggcctcacattccatgttgtggccgtccacgaggcattttgtggcactatgggctcccacaccatgggaaaacttcaacaaaaaatgtcactaatgtgtcatgagatcacgaggttctctatttcttgaatggaagagtagggggaagaggacacccctgtatttgcagagaagactgtctggaaggcattcccaaaattagtggtggcatttttttttttgagatggagtcttgtctgtcgcccagactggagtgcagtggcatggtcttgacttgctgcaacctccgcctcctgggttcaagtgattctcctgcctcggcctccggagtagctgggattacaggcatgtcccacc

SEQ ID NO: 934899 - DNA, 747 bp, Homo sapiens
cattgtatttgtagattgcttttgacagtatggttattttcaatattgattctacccatccatgagcatgggatgtgtttccatttgtttgtgtcatctatgatttctttcagcagagttttgtagttttccttatagatgtctttcacctccttggttaggtatattcctaagtattttattttaattttttgcagctattgtaaaaggggttgagttattgatttgattcttkgcttggttgctgttggtgtatagaagagctactgatttgtgtacattaatcttgtatctggaaactttgctgaattcttttatcagttctaggagctgaaagtgtttataatactttcaaattgcatctaattgatatccaggctgtaagttttgtgcaagaagagaacccagagtatacctcctgagcccattgtggttaggtgaggtgacagccacagagacttaagtggggatttactctgagactcagagttataaacccctaaactgtaccctgctgtgacaatctgagcaaattctactcttctctgccttgtacttttaaagtttgtagccagatacacataacttaatgtatcatcttaacgatttttgaaaatacagttcagtaatgttaagtacatttacattattgtgcaactccaatttccaaaactctttatcttgcaaaactaaaactctatgcccattaaacatcaactgtccattctctcttcccttcaggtcttg

SEQ ID NO: 934900 - DNA, 610 bp, Homo sapiens
ggtggggcaacagaaccaagcactcaaggctgctgaaccaaggagaggtgcctgaccatgaagtagagactctctggacccagatctctgcacaggaagggtgggatggctcaagctgccaatttgggtgagcaggtgctatgatttcctggagatgtgcctgggcttggagcaaagagaggccccctgcaccaagatctctgcacagaaggggtggggtgactcaggctgctaaaccaggaaagcaggtgctttgaatgactagagatctgcctgggtatgaagcagagagggacctcctcctgcacaggaagagtggggcaactcaggctgctggtccatgctagcaggtgctccaaatgcctagagatctgcctatgtttggggtagagagtgcccccattctaccacagtctatgcacaggaagggtggggtggctcaggctgctgatycagcaagtgagtgctctgaattcccgaatttcttcctggagatgcagcagagaggtccttgctgtgccataatcttggaggagcaggctggggcacttaaaaatgaaacacacagactggctccaggtcaccactctggccctggctgcaagtcttg

SEQ ID NO: 934901 - DNA, 774 bp, Homo sapiens
aagtgtcattcaggagcaggttgttcaatttccatgtagttgtgtggttttgagtgaatttcttaatcttgagttctaatttgattgcactgtggtctgaaagactgttatgatttcatttcttctgcatttgttgaggagtgttttacttccgattatgtgatcaatattaaagaaagtgctgtgtggtgatgagaagaatatatattcagttgtttgtgggtggagagttctgtaggtatctatcaggtctgcttgatccagaactgagttcaggtcttgactatctttgttaattttctgtctcgatgatctgtctaatattttcagtggagtgttaaagctcctactattattgtgagggagtctaagtctctttataggtctctaagaacttgctttatgaatctgggtgctcctgtattgggtgcatatatatttaggatagttagctattcttgttgacttgaaccattttccattatgtaaagctcttctttgtctttttttattgttgttggtttaargcctgttttgtcagaaactaggattacaacctctgctttttctgttttccatttgcttggaaattttcctccatccctttattttgaccctatgtgtgtctttgcacaggagataggtcttttgaagacagcatactgatgggtcttgactctatccagcttgccattctgtgtcatttaattggggcatttagccatttacatttaaagttagcattgttatgtgtgaatttgatcctatcattgt

SEQ ID NO: 934902 - DNA, 561 bp, Homo sapiens
attaggttagacccttttggtccagtcctatttctacatggctgtccatactttgttgaacctaagcataaaaatggtcaacttcccctgtatctttgggtcttcattctaaaggctcctgggtacacattaataaatttgtatgttttttttttctattagtctgccccttgtcagtgatttttttcagtaaagcttcagagggcaaagggaaaatattttcttagccctttgttacrgtttggctgtgttcccacccaaactttatcttgaattgtaacttccacaatccccacatgtcacaggagggacctggtgggaagtaattgaattatgggggcaggtttttcccatgctgttctcatgatagtgaataagtctcatgagagctgatggttttataaagggcagttcccctgtacatgctctcttgcctgccaccatgtaagatgagcctttgctcctccttcaccttctgccatgattgtaagggaccatatggaaccatgagtccattaaacctctttttctttataaattacccagtcttggatatttctt

SEQ ID NO: 934903 - DNA, 673 bp, Homo sapiens
tgtatagttatgtttcctatattctctagcacagagttctgtggagcactgagcccagagtattgtgcccatagctctgacaacttgcaacttcaggtcttcgaataacatctttctttgacatcgcttgattataacctcaatgagaaaaaaaaaaaatcacttcccggcggggtccaatgcctgtgtggagtttgcatgttctctctagtctgcatgggttttctctgagtactgtggtttcctcccacatctcaaagttgtgcacgtcaggttcattggcaagtctacatggtcccaatgtgagtgagtgtgagtgtgccctgcaatggaatggcatcctggccaggttcttgcctcgctccctgagctgcctggatagactctggccacccatgaccctaaactggaatcactgggtagatagtcttacctgtwttattgaatctttcttaaacattgtatagttcacatgtattccaaggtttaatattagaagtgtcttggtctttatttagaagtttggtgatgttttgtgatcagaaatatgccataggaacttaactctttttttttttttttcctgagactgagtctcactctgtcgcccaggctggagtgcaggggtgctatcttgggtcactgcaacttctgcctcctgggttcaagcagt

SEQ ID NO: 934904 - DNA, 596 bp, Homo sapiens
ctagttcttttggttgggatgttaggttattaacttgagatctttctagctttttgatgtgggcatttagtgccctcttaacactgttttagctgcatcctagagatttgggtatgttttctctttgttctcattagtttcagagaacttcttgatttctgccttaatttcattatttacccaagagtcattcaggagcaggttcttcagtttccgtgtagttgtgtggttttgagtggatttcttaatcttgagttctaattttattgcactgtggtctgagaaactgtttgttattattttagttcttttgcatttgctgaggagtgtcttcctattatgtagtcmattttagagtaagtattgtgtggcaatgagaagaatgtatattctgttggttttggctggagagttctatacatatctatcaggtccagttgattcagagctgagttcaggtcctgaatatctttgttaagtttctgtctcagtgatccaagttgcttgcctatttagttccaatgtgagaacctggatatctcagttgaaggtgttgaattcacttgcctgtttttgttccctctctgtgagtgcag

SEQ ID NO: 934905 - DNA, 596 bp, Homo sapiens
ctagttcttttggttgggatgttaggttattaacttgagatctttctagctttttgatgtgggcatttagtgccctcttaacactgttttagctgcatcctagagatttgggtatgttttctctttgttctcattagtttcagagaacttcttgatttctgccttaatttcattatttacccaagagtcattcaggagcaggttcttcagtttccgtgtagttgtgtggttttgagtggatttcttaatcttgagttctaattttattgcactgtggtctgagaaactgtttgttattattttagttcttttgcatttgctgaggagtgtcttcctattatgtagtcaattttagagtaagtattgtgtggcaatgagaagaatgtatattctgttggttttggctggagagttctatacatatctatcaggtccrgttgattcagagctgagttcaggtcctgaatatctttgttaagtttctgtctcagtgatccaagttgcttgcctatttagttccaatgtgagaacctggatatctcagttgaaggtgttgaattcacttgcctgtttttgttccctctctgtgagtgcag

SEQ ID NO: 934906 - DNA, 667 bp, Homo sapiens
  misc_feature 104, 136: n = A,T,C or G
ggtgcccagtgagaacctggagcccctgccccatgctgtgagcaggcatggcgtgtgctgctgcatgctccatggacaggcaggagctccagcctccaggtgcnagactcaggcatctctgcactctgcactctcnggtgcccaggagggctttgcccccacaggcttgggagtgtcgactctcatggcctggctctccctgctcacagagcctgctccaatcctgaagtaggaatggggccaagcctggtcactgtcactgcccagccaggtgtgtgcacattcagggcagtgctaacataacagccccctgccaccttggccccctctagactttgggcactgacaagcatacagggggaatctgarggagggctgagggcagcttggcactggcctgcaggtgccccttggcatgagcagcctggacatcatggatggtggcatgaggcagataggctcctgggcggaaacaggtgggtccccagtaaggccccaccttcaggtttgcgctgctagtcccaagaaacctgggatgggaaccggagtgggaacttgtggtaccttttcctgacccgctcctggtggcccaaggaccagtcagtgtgcactttctcccttcttaggtctataaaagccttggctcagccagagctaaacagatgac

SEQ ID NO: 934907 - DNA, 728 bp, Homo sapiens
aaaatgaaactagacccttatctctcaatatattcaaaaatcaaatccaaatggattaaagactttctaatacctcaaatcatgaaattactagaagaaaccactgtggaaatgcttaaagcgttggtctgagtaaagatttttttgtgtacgacatcaaaagtacaagcaacaaaagcaaaaatagataaatggggttatatcagctagaaagcttttgtacagcaaagaaaacaatcaacagagtgaagagacaacctacagtatgagagaaaatatctgtaaactatccatgggacaaaggattaataactagaatacagaagaaactcaaacaagttaatagcagaaaataatccaatttgaaaatggacawattatctgataagtcatttctcaaaaaagacatacaaatggccaaacaggcatataaaaaacaaaaaggtcaacatgattaatcctctgggaatacaaatcaaaactgcaacaagatatcatccatctcaccccagttaaaatagctattatcaaaaagaaaacaatcacagatgctggcaaggatgtagagaaagggcatgcttgtatactactagtaagaatgtaaattagtatagcaactatgaaaaacagtatggaggttcctcagaaaagtaaaaatagatctaccaaatgacccagcaatccaagtgctgggtatatattcaaaagaaaagaaatcagtatattga

SEQ ID NO: 934908 - DNA, 822 bp, Homo sapiens
gtcagaataaggactagaatccaggtttctgactttttgttggggttctttctaatacagtgtgccagtcagcttttctttaggataattagacatgatcattcagtttcgagcttcggtgtacatttaagcaggggccctctgtccaccaggactggtgtcttgacgatcctatagggtcaagaggatggaatgaagcattttaggactgctgaggccgtcccttttctagtccccagtctgaccctgtagaccattgctcaaattaaactgatgcttcacacttctcactaagagcttgtgtcatttgggggtgggggttctggggaagatcccaaaaggaccagttcttagaaaaattgcctgctmtcattagaggagcaccacgccggcactcagtggtgtgtctgctgcaggaggaagtgtgggagaggatgtcagctctgggaaggcttgtctcataattaaggatgagtctgttgcctcttaatggggatccttttttttcccaccctcatgctttcacggagactgtggagcagcttggcaggctcaaattgttttgaggacaaaaggttattgtcaccaggaccttcataatgcagttggcctcttccctggctcccccacctccccttccccctctcctcagatagtttgcacagtggctagatttacaaagccattctcttcgcagtgcccccagtgctgagttcattcctgatggagtcttcccttgctctccctatcacccccttggctctcacctcctgcgcatggtgtcattggtcccggtgccagaatccccaagctggggcccat

SEQ ID NO: 934909 - DNA, 822 bp, Homo sapiens
gtcagaataaggactagaatccaggtttctgactttttgttggggttctttctaatacagtgtgccagtcagcttttctttaggataattagacatgatcattcagtttcgagcttcggtgtacatttaagcaggggccctctgtccaccaggactggtgtcttgacgatcctatagggtcaagaggatggaatgaagcattttaggactgctgaggccgtcccttttctagtccccagtctgaccctgtagaccattgctcaaattaaactgatgcttcacacttctcactaagagcttgtgtcatttgggggtgggggttctggggaagatcccaaaaggaccagttcttagaaaaattgcctgctctcattagaggagcamcacgccggcactcagtggtgtgtctgctgcaggaggaagtgtgggagaggatgtcagctctgggaaggcttgtctcataattaaggatgagtctgttgcctcttaatggggatccttttttttcccaccctcatgctttcacggagactgtggagcagcttggcaggctcaaattgttttgaggacaaaaggttattgtcaccaggaccttcataatgcagttggcctcttccctggctcccccacctccccttccccctctcctcagatagtttgcacagtggctagatttacaaagccattctcttcgcagtgcccccagtgctgagttcattcctgatggagtcttcccttgctctccctatcacccccttggctctcacctcctgcgcatggtgtcattggtcccggtgccagaatccccaagctggggcccat

SEQ ID NO: 934910 - DNA, 822 bp, Homo sapiens
gtcagaataaggactagaatccaggtttctgactttttgttggggttctttctaatacagtgtgccagtcagcttttctttaggataattagacatgatcattcagtttcgagcttcggtgtacatttaagcaggggccctctgtccaccaggactggtgtcttgacgatcctatagggtcaagaggatggaatgaagcattttaggactgctgaggccgtcccttttctagtccccagtctgaccctgtagaccattgctcaaattaaactgatgcttcacacttctcactaagagcttgtgtcatttgggggtgggggttctggggaagatcccaaaaggaccagttcttagaaaaattgcctgctctcattagaggagcaccacgccggcactcmgtggtgtgtctgctgcaggaggaagtgtgggagaggatgtcagctctgggaaggcttgtctcataattaaggatgagtctgttgcctcttaatggggatccttttttttcccaccctcatgctttcacggagactgtggagcagcttggcaggctcaaattgttttgaggacaaaaggttattgtcaccaggaccttcataatgcagttggcctcttccctggctcccccacctccccttccccctctcctcagatagtttgcacagtggctagatttacaaagccattctcttcgcagtgcccccagtgctgagttcattcctgatggagtcttcccttgctctccctatcacccccttggctctcacctcctgcgcatggtgtcattggtcccggtgccagaatccccaagctggggcccat

SEQ ID NO: 934911 - DNA, 604 bp, Homo sapiens
cagatgagaggaagaggagggagaaagaaaaggggagggagagaggagaccaaaaggaaggagagaatgagcagatgaaaactgagaatgtcctatactggaaagaagaaagaagagaataaggctgcctcccttgccacacacacatacactccttactgccagaggcagatagaccctgaatctaatgaagtttaagttttaggacacctcacttacccaaatcccctttcaaacccaaagaaaaggcctgagctccacactctcacagtagtatgatttgttaaatttgcactcctaagaycttttaaccacagttaatcaagaccactggctctttctattccctcttcctccccagtcaatagcactgaaaggactatgcacattttgggatcaaactaagaggaagataagttaggaatacttttggcgtggattcaatggggtccacaatcacagaaacattaggagcagggccaaatttcacattgccatatggatatgtctcatggtgtcagcaccagaaaggtgtggctgtgggaggagagatgatgtttaatataaacaaagctagaagctagctttggagaaattcttccaa

SEQ ID NO: 934912 - DNA, 599 bp, Homo sapiens
gaggtcactcctgggataggaaaataggaccctgtattggcataaacaggatgtttgttttctttgtgctctatcagtaggccattatctcggtcatgtagaagttataccaaattgctcaggtgcagattcagaaagggggaggatgtggcacggcctagttttgtgctgtttaaaatagaaaatggaaaatggatgaatctgaaatccatttctgctcaatatgattctcagggtggtattttaataaggtcctaaaagaacattcaaaaagtcttagattggttttgaaatcatattgcatggcccataaagaattcctgtttatggggtcaaaaactaatatagtcaataaatcaayacatagttattatggccctactacctgtccctcctgcccaccttcccccccacctctgggcataatgggtgatttaaagacaggcagagctcttgactcaagttatttataatatgcttcagggttttcaaatgttgtcttcatcagaatcatctctgaagcttgtcaaagacagagctatctgggccccactacagactcactgaatcaaaaatctcagggagtgagctgggtttct

SEQ ID NO: 934913 - DNA, 658 bp, Homo sapiens
aaaccacacagtgataatacaagggacccagaatggccaaacagtattgaaaaagaagatcaaagttggaggactcatattttccaatttcaaacttactttaaagctactataatcaagatgctgtggtactggcataaagaaagacatatatrttggtggaatagaattgagaatctagaaatctttacatttaatagtcaattgattttccagaagaatgctattaagacggttaaactgggtaagaatagtcttgtcagcaaattgtgctgggacaactggatatctacaagaaaagaatgtttagatccctacctcacagcatatgcagaaattaactcaaagtgcattatagctaaaactatgaaactctcagaggaaaacattggagtaaatcttcattaccttgggttaggcagttgtttcttagacattacactaaaagcacaaacaacagaaggaaaaaaaaaaaaccatacttggctggtgggggatgtaaaatggtgcaaccactttggaaaacagcctggcagttcctgaaaatgttaaaatacaattaatatatgacctagcaattctactcctagttatgtacccaagaaaaatgaaaacataaatccctgcaaaaactagtttccaaatgtaatggagatag

SEQ ID NO: 934914 - DNA, 705 bp, Homo sapiens
aaccacacagtgataatacaagggacccagaatggccaaacagtattgaaaaagaagatcaaagttggaggactcatattttccaatttcaaacttactttaaagctactataatcaagatgctgtggtactggcataaagaaagacatatatgttggtggaatagaattgagaatctagaaatctttacatttaatagtcaattgattttccagaagaatgctattaagacgrttaaactgggtaagaatagtcttgtcagcaaattgtgctgggacaactggatatctacaagaaaagaatgtttagatccctacctcacagcatatgcagaaattaactcaaagtgcattatagctaaaactatgaaactctcagaggaaaacattggagtaaatcttcattaccttgggttaggcagttgtttcttagacattacactaaaagcacaaacaacagaaggaaaaaaaaaaaaccatacttggctggtgggggatgtaaaatggtgcaaccactttggaaaacagcctggcagttcctgaaaatgttaaaatacaattaatatatgacctagcaattctactcctagttatgtacccaagaaaaatgaaaacataaatccctgcaaaaactagtttccaaatgtaatggagataggcagtcagtaaacaaaatatataaaatgcccagtggtgatacaactcc

SEQ ID NO: 934915 - DNA, 706 bp, Homo sapiens
catggtgaagatataaaaatagtgattccttgacagtttcatgtaaattccttgaaatattttaaatactcctttaaagtcctttattatagatatacgaatgatggctttcaacataaaaatttatatgatcttggactcttttcttgccagagccttatggaaacaactttaaaagcaagtttggtccaagtgataccagtgtcacagactgcaccatgcttgtgtcagacccaaaatagctgcatgtgaatgtgcattctccctgcattcataagcaattcactgtgttctctgacttccccatagcacatatcatagcagatgtccatcaaccttgaccagccttccttaaagtcttcttcttagattcagagtcacttctctctctggttctttaactgcgccttttcartcttgttgaaggattatttttcttccacttgccccttaaatgaaggttcccagcaacccaggcctcttctttttttgtttttgagatgaagtatcactctttcacccagactgcagtaaagtggggcaatttcggccactgcaacctctgcctcccaggttcaagcgattctcctgtctcggcctcccgaatagctgagattacaggcgactgcaaccatgtctggctaatttttgtatttttagtagtgatggggtttcgtcatgttggccaggctggtcttgaactcct

SEQ ID NO: 934916 - DNA, 706 bp, Homo sapiens
catggtgaagatataaaaatagtgattccttgacagtttcatgtaaattccttgaaatattttaaatactcctttaaagtcctttattatagatatacgaatgatggctttcaacataaaaatttatatgatcttggactcttttcttgccagagccttatggaaacaactttaaaagcaagtttggtccaagtgataccagtgtcacagactgcaccatgcttgtgtcagacccaaaatagctgcatgtgaatgtgcattctccctgcattcataagcaattcactgtgttctctgacttccccatagcacatatcatagcagatgtccatcaaccttgaccagccttccttaaagtcttcttcttagattcagagtcacttctctctctggttctttaactgcgccttttcagtcttgttgaaggattmtttttcttccacttgccccttaaatgaaggttcccagcaacccaggcctcttctttttttgtttttgagatgaagtatcactctttcacccagactgcagtaaagtggggcaatttcggccactgcaacctctgcctcccaggttcaagcgattctcctgtctcggcctcccgaatagctgagattacaggcgactgcaaccatgtctggctaatttttgtatttttagtagtgatggggtttcgtcatgttggccaggctggtcttgaactcct

SEQ ID NO: 934917 - DNA, 615 bp, Homo sapiens
ctgggaaaagcttcagtctttctggtcttcagttttcttagattggacaaagctatctctatgttttttcctacttctagctttctgtgattaggtcaaaccatacatgtctacagaatgtggtaccttctagactgtgagtaaacatgcaatataatttatgagttaacatatataaagataagctcttgctgcagccttcctattaacattgggaggcacgatccatccttcggactagttttttgtttgtttgtttgtttttacatttttatatgcacaagaactatgcatgttaaaagcacaaacccttctgaacttgcccttctcccaacaacctgtcttcattctgattcactgaattggggctggggcacagatatgaatgtttagtctgggctgggccaagaatctcaatatttaagatcttaggtgattccgatgcctgtgggttrtggacgacaatgcagaaacactaaagtaagggattaatcctgaccttgggtcatttctcaagctgaagactttcagggactttaggaaaatctcaaatcaatctctttggaatgcttcagattagagacaaatcccttaggtctgtttgatccagtctta

SEQ ID NO: 934918 - DNA, 691 bp, Homo sapiens
gtgtctttagggttttctaggtataacaatcatatcatcagcaaacagcatcactttgacttcctctttactgatttggatggtttatgtcattctcttgtctgattattctggttaggacttccagtactatgttgaatagaaatgctgagagygggcatccttttcttattctagttctcagagagaatgctttcaatttttcctcattcagtattatattggctatgggtttgtcatagatggattttattacattaaggtgtgtctcttctatgttgattttgctgagattttaatcataaaggattctagattctgtcaaatgctttttgtgcatcaattgagatggtcatatgaattttgtttttaattctgtttatgtgaactatcacatgtattgacttgtgcatgcgaaaccatccctgtatccttggtatgaaacccacttgatcatggtggattatctttttgatatgctgttggattcagttagctagtattttcttagggatttttgcatctatattcatcagggatattggtctgtagtgtgttttgttatgtgcttttctggttttggttttagggtgatgctggcttcatagaatgatttagggaggattccctctttatcttctgaaataatgtcaatgggattcgtaccaattctcttttgaacgtctgatag

SEQ ID NO: 934919 - DNA, 691 bp, Homo sapiens
gtgtctttagggttttctaggtataacaatcatatcatcagcaaacagcatcactttgacttcctctttactgatttggatggtttatgtcattctcttgtctgattattctggttaggacttccagtactatgttgaatagaaatgctgagagtgggcatccttttcttattctagttctcagagagaatgctttcaatttttcctcattcagtattatattggctatgggtttgtcatagatggattttattacattaaggtgtgtctcttctatgttgattttgctgagattttaatcataaaggattctagattctgtcaaatgckttttgtgcatcaattgagatggtcatatgaattttgtttttaattctgtttatgtgaactatcacatgtattgacttgtgcatgcgaaaccatccctgtatccttggtatgaaacccacttgatcatggtggattatctttttgatatgctgttggattcagttagctagtattttcttagggatttttgcatctatattcatcagggatattggtctgtagtgtgttttgttatgtgcttttctggttttggttttagggtgatgctggcttcatagaatgatttagggaggattccctctttatcttctgaaataatgtcaatgggattcgtaccaattctcttttgaacgtctgatag

SEQ ID NO: 934920 - DNA, 744 bp, Homo sapiens
gatcgactctactcaatgagggagaggcctatacagtggtatgaggaccatgaggtgaggatcactggggggccatcctagaagctggctaccaagggctcaggtgtcatgctctgtatgtaagtatgaattcagaggagggaacagtctctgggataactaggattggtttaatgaaagaggttgacttgctctgtatcctgaaggtaagagcaactggagagttgtccatggatgaaggacatcagkccaggagggagcacagcatgagcaaaggcatagaggcagcaacgagcatcgtgaattgtgaatcagagaggagagtggaatggctggagcagcaagtgcacgtagtaaagtaaaggtaataacacaatggagttgggtgacatcaaagttaagaggcatttggaagccaggcagtggcgttcagttttgatgggttgttaaggatcaatgatgagtgctacaatggtcatgatgatgaaagtggtgcttcaggaagcataatctagggacagcatatagacacctcagcctggggagagactaaaggcagaggcaggagccttgaccttatgagaagctgaattaagatactggaattaagaatggaaaaggagtggggcgtggtggctcatgcctgtaatcccagcacttcgggaggccaaggcgggctggtcactcaaggccaggaattcaagaccagcctggccaacatgttgaaatcccatctctactaaa

SEQ ID NO: 934921 - DNA, 593 bp, Homo sapiens
tatcccgcacacattaaagaaaaattcattctctggctgggtgtggtggctcacacctgtaatcccagcacttcgggaggccaaggcgggcggatcacctgaggtcaggagttcaagaccagcctggccaatgtggcgaaaccccatctctactaaacacacacacacacacacacacacacacacacacacacacaaattagcccgcatggtggtgtatgcctgtagtaccagctactgaggaggctgaggtggaggatcacttgagcccaggaattcgaggctgcmgtgagtgatgatcatgccactgcactccagcgtgggcaacagtgaggccatgtctctaaaaaataaaaaaagagagagaaacaagagagagctggcttccccctcctctgccatgtaagcaacgtaatcaggatgaagcgcctcaccaggcaccgaatctgtcaacaccttgactttgaactccctggcctcgagaactgaaagacactctctatgggttaagccacccagtgcatggtatcttgttataactgcccgagctgactgagacggacgttcaggacagagagcgtgaatgcatagtg

SEQ ID NO: 934922 - DNA, 593 bp, Homo sapiens
tatcccgcacacattaaagaaaaattcattctctggctgggtgtggtggctcacacctgtaatcccagcacttcgggaggccaaggcgggcggatcacctgaggtcaggagttcaagaccagcctggccaatgtggcgaaaccccatctctactaaacacacacacacacacacacacacacacacacacacacacaaattagcccgcatggtggtgtatgcctgtagtaccagctactgaggaggctgaggtggaggatcacttgagcccaggaattcgaggctgccgtgagtgatgatcatgccactgcactccagcgtgggcaacagtgaggccatgtctctaaaaaataaaaaaagagagagaaacaagagagagctggyttccccctcctctgccatgtaagcaacgtaatcaggatgaagcgcctcaccaggcaccgaatctgtcaacaccttgactttgaactccctggcctcgagaactgaaagacactctctatgggttaagccacccagtgcatggtatcttgttataactgcccgagctgactgagacggacgttcaggacagagagcgtgaatgcatagtg

SEQ ID NO: 934923 - DNA, 593 bp, Homo sapiens
tatcccgcacacattaaagaaaaattcattctctggctgggtgtggtggctcacacctgtaatcccagcacttcgggaggccaaggcgggcggatcacctgaggtcaggagttcaagaccagcctggccaatgtggcgaaaccccatctctactaaacacacacacacacacacacacacacacacacacacacacaaattagcccgcatggtggtgtatgcctgtagtaccagctactgaggaggctgaggtggaggatcacttgagcccaggaattcgaggctgccgtgagtgatgatcatgccactgcactccagcgtgggcaacagtgaggccatgtctctaaaaaataaaaaaagagagagaaacaagagagagctggcttccccctcctctgccatgtaagcaacgtaatcaggatgaagcgcctcaccaggcaccgaatctgtcaacaccytgactttgaactccctggcctcgagaactgaaagacactctctatgggttaagccacccagtgcatggtatcttgttataactgcccgagctgactgagacggacgttcaggacagagagcgtgaatgcatagtg

SEQ ID NO: 934924 - DNA, 749 bp, Homo sapiens
ttcgattccaaataaaaattcaccctgttaagggtcccatactatcctcttacagaggctttttttttttttttttggagacagagccttgctctgtcacccaggctggagtgcagtggcgtgatctcagctcactgcaacctctgcctcccgggttcaagtgattctcctgactcagcctcccgagtagctgggactacagacacgtgccaccacgcccagctaattttttgtatttttagtggagacggggtttcaccgcgttagccaggatggcctcgatctcctgaccttgtgatccacccacctcagcctcccaaagtgctgggattacaggcgtgagccaccacacctggccttagaggcctttcatgtgacagcaaggaacgtctgtacccagtctgtacccaggtgtgccacacatgtccctcgyggctttcctcacatctgttacaagtggccttagagagtcccagcaatgccaacttccgattagcagtcctggcattcaagaaacactcgaataaggaataggttggcatcatgaacaggttacctggcttggctgtgagattctacaacccctctttattagtgttcaaatttgaatcaggccgggcacgatggctcactcctgtaatcccagcacttttaggaggcctgaggtcgggagttcaagaccagcctggccaacatggtgaaatccagtttctactaaaaatacaaaaaattagccgggtgtggtggcg

SEQ ID NO: 934925 - DNA, 607 bp, Homo sapiens
cagagccagactggagtggcctttcgtaatggccctggccagagcttccgggggaagccttccggataggcagcttgtcagcaagagtgggaaaccctgggctgcgcctccccacaaaccaccagcattgcccaacttcctctcttcatgccctctaccaccctctcgttgccccagctttctttctttcattttttttcttgagacacagtttcactgtcacccaggctggagtrcagtggtgtgatctcggctcactgctacctacctccacctcctgggttcaagcgattctcacaccttagcctcccgagtggctgggattacaggcacatgccaccaactctggctaattttatatttttagtagaaacagggtttcaccacgttggtcaagctggtctcaaactcctgacctcaagtgtttcatctgcctcagcctcccaaagtgctgggattacaggtgtgagctaccacacgtggctaatttttgtattttcagtagagatgggggtttcaccatgttggccaggctggtcttgaactcctgaccccaggtgacctgccctcctcagtctcccaaagtgccgggattacaggcatgaac

SEQ ID NO: 934926 - DNA, 775 bp, Homo sapiens
caaaaggcaggagggaaggagggggagaaaggctgaaaaactacctattaatattgggtattatatgggcgatgggatcatttgaagcccaaaccttagcatcacacaatatatccatgcgacaaacctgcacatgtaccccctgaatctagaatttaaatacacacacacacacgcacatacacatttaaatgaagaaaaataaaattaggatgcttttgtactaagaaatactatgcagtagttaaaaagaatgtggttgatctaaaaataccaacagagaaaaatttcaaaaatttcaaaaacaaactctacaccctgggacactccaaaakgatttacttgctggcttaccaacctcttcctcatattttttttagacagaatcttgctctgtcgcccaggctggagtgcagtgttgtgatctcggctcactgcagccttcacctcccgacttcaagcgattctcctgcctccccagtagctgggattacacgcatctgccatcacacccagctagtttttgtatttttagtagagatggggtttcaccatgttggccaggctggtctcaaattcctgacctcaggtgataccccccaaccttggcctcccaaagtgttgggattacaggcgtgagccactgtatccggcctcttcttcattttttgaaggaattctggagggtggagaacaaatctgcccagcttcaggactagtttgtggaggtcatctgaagagctgccagaattgagaaaaggattggaatgtcctc

SEQ ID NO: 934927 - DNA, 775 bp, Homo sapiens
caaaaggcaggagggaaggagggggagaaaggctgaaaaactacctattaatattgggtattatatgggcgatgggatcatttgaagcccaaaccttagcatcacacaatatatccatgcgacaaacctgcacatgtaccccctgaatctagaatttaaatacacacacacacacgcacatacacatttaaatgaagaaaaataaaattaggatgcttttgtactaagaaatactatgcagtagttaaaaagaatgtggttgatctaaaaataccaacagagaaaaatttcaaaaatttcaaaaacaaactctacaccctgggacactccaaaatgatttacttgctggcttaccaacctcttcctcatattttttttagacagaatcttgctctgtcgcccaggctggagtgcagtgttgtgatctcgkctcactgcagccttcacctcccgacttcaagcgattctcctgcctccccagtagctgggattacacgcatctgccatcacacccagctagtttttgtatttttagtagagatggggtttcaccatgttggccaggctggtctcaaattcctgacctcaggtgataccccccaaccttggcctcccaaagtgttgggattacaggcgtgagccactgtatccggcctcttcttcattttttgaaggaattctggagggtggagaacaaatctgcccagcttcaggactagtttgtggaggtcatctgaagagctgccagaattgagaaaaggattggaatgtcctc

SEQ ID NO: 934928 - DNA, 584 bp, Homo sapiens
acaaaaaaagaaaaaagcaaacaatgacaaaaaaccaacaataccgccaaagcaacaaagaacccccttcatcctcaaagccctcagcaccctctctccatctctttgtttattattatagataatggggaaagcataaagagggaagaggaccaaagacatagcatcggggaaggcctgcatttagggygggaagagcagtcactgcaggcagcaaaaaaaatcaagagacaccaagtagccggcgtggtggctcacgcctgtaatgctaacactttggaaggccgaggcgggaggatcacttgagcccaggagttcaagactagcccgggcaacatggcaaaatcccgtctctaccaaaaatgcaaaaattaggtggtgtggggatgccctcctatagtcccagctactcaggaggttgagaagggaggatcacttgagcctgggaggtcaaggctgcagtgagccatctttgcatcactgcactccagcctaggtgacaaaatgagaccctgttaaaaaaaaaaaaaaggccaggtacaatggctcaggtctgtaatcccagtacttcgggaagccaaggc

SEQ ID NO: 934929 - DNA, 639 bp, Homo sapiens
agcctcagctccagacccaggtatccctgtgctctcaggggcccaggaagacacccctgtccccacaggcttggaaatgcctgctcccactgctccccagctcccagtaatccctctgattttggagcaaagttgtggtcaaacctgggcgctgtcatgactcagctaggagtttgcacactcagggcagtgctgaaacaccagccttctgctgccttgsgcccctccagactttgggcaccaacaagaacaggaaggatgctgaggacagcttagtgtgggcccgcagcacccctcagcatgagcagccaggcaccatggacaaaatgttgatggcagcaggaggcagacaggttcctgggtagaaaggggtgggtacctggtgagcaccaccttcaagccagagatggcctaaagcctgggggcagggctgctagttctgggtggaatccacggcccagagagaaaacgtatggtgctttttccaggcctgccatggcgctccatggctgcccatggaccagtcagcacacaccacctcccttctgagcccataaaaaccctggacccagccagactaacacagacatcaggactaccagcttcaggaaggatctatccactatggtctcctcaact

SEQ ID NO: 934930 - DNA, 639 bp, Homo sapiens
agcctcagctccagacccaggtatccctgtgctctcaggggcccaggaagacacccctgtccccacaggcttggaaatgcctgctcccactgctccccagctcccagtaatccctctgattttggagcaaagttgtggtcaaacctgggcgctgtcatgactcagctaggagtttgcacactcagggcagtgctgaaacaccagccttctgctgccttgcscccctccagactttgggcaccaacaagaacaggaaggatgctgaggacagcttagtgtgggcccgcagcacccctcagcatgagcagccaggcaccatggacaaaatgttgatggcagcaggaggcagacaggttcctgggtagaaaggggtgggtacctggtgagcaccaccttcaagccagagatggcctaaagcctgggggcagggctgctagttctgggtggaatccacggcccagagagaaaacgtatggtgctttttccaggcctgccatggcgctccatggctgcccatggaccagtcagcacacaccacctcccttctgagcccataaaaaccctggacccagccagactaacacagacatcaggactaccagcttcaggaaggatctatccactatggtctcctcaact

SEQ ID NO: 934931 - DNA, 556 bp, Homo sapiens
gtctcacaaagatagcttcctcaactctgtaggacagggagaaggcacacaaacttgagcattatagaacacaaccttagggaaaacagggggctctcatcatctgacctggttttgtggggtttggagaagacaagatttctcctcaagagggaacaagaggtgtggattgtgyacattcatagaaaaggtttaagacagtttaagaattcctaactgagctgactggtgaaagtattcactttccaaaaccagtcagtaaacactagagaaagtgactgcctcttcagatgcaaagagagcaacacaagactttaaagaacatgaaaaatcaaagaaacatgacaccaccaaagaatacaataatgatctagtatacaaatccaaggatatgcagatttatgaatcgcctgagaattcaaaatgatcattttaaggaagctcagcaagttacaagagaaaacagacaaatgaataaagtcagaataaacagtacatgaacaaaatgagaagttctatatagagacagaaatcgtaaaaaagaatcatatagaaa

SEQ ID NO: 934932 - DNA, 418 bp, Homo sapiens
aaggggagggagagcattaggacaaatacctaatgcatgtacggcctaaaacctagatgatgggttaataggtgcagcaaaccaccatggcacatgcatacctatgtaacaaacctgcatattctgcacatgtatcccagaacttaaaataaaatttaaaaaaagagaaaaaaaatgtagcatatccatacmgcgaaatattactcagtttttaaaagaaaggaaattctgatatgtgctacaacatgaaataacttagaagacattatgctaagtgaaataagccaatcacaaaagggtaaacattctaggattcttcttaaatgtgttagccctctagagtagctaaattcatggggatagaaagtagactggtagttagttaccaggggctgggggagaagggaatggggagtta

SEQ ID NO: 934933 - DNA, 418 bp, Homo sapiens
aaggggagggagagcattaggacaaatacctaatgcatgtacggcctaaaacctagatgatgggttaataggtgcagcaaaccaccatggcacatgcatacctatgtaacaaacctgcatattctgcacatgtatcccagaacttaaaataaaatttaaaaaaagagaaaaaaaatgtagcatatccatacagcgaaatattactcagtttttaaaagaaaggaaattctgatatgtgctacaacatgaaatracttagaagacattatgctaagtgaaataagccaatcacaaaagggtaaacattctaggattcttcttaaatgtgttagccctctagagtagctaaattcatggggatagaaagtagactggtagttagttaccaggggctgggggagaagggaatggggagtta

SEQ ID NO: 934934 - DNA, 713 bp, Homo sapiens
aggcaggctaccaatttataattcaactgttgggatgtttatcattgaaatgttcaacttcctggagcaaacattgactattttgccagtaataggagccaaaatgctattatattcaacttagcggtcacaaaaagataaaaggctaaacaactcatcttacacaaacccacatttgtccacaaggggcttcataatgaggtagccacttgcaagtaaaagtgatgtgctctgatttggaatactaagacttagtttattcccacagccaagaggcctggattttctttaactaaaatcattattttagcttaaggtgtcattctctacaatgcgttttctaaaatgtgtgacttagtattattcatgctgaaccaatttaaaaggtattgacttgctatcactcagcaaagcaggaactggacaggtgttkttagaaggcagcttgtttataaattttcagagttcagaatgctaaaggggagagcactgggtgacaattgttactactgggtccttgtgcagtcaaaggggatcaggagaatatatagttcttcttggagcaaggagacactgtaagtaaacgatttttaaaaattagagagctgagcacagtggctcacacctgtaatcctggcaactcagggggctgaatccggaggatcacttgaggccaggaggtcaacactaacctgaacgacatagagagaccc

SEQ ID NO: 934935 - DNA, 572 bp, Homo sapiens
gttagaaggaaaactaacaaacagaaaggacatcgacaccaaaaccccatctgtacgtcaccatcatcaaagaccaaaggtagataaaaccacaaagatggggaaaaaacagagaagaaaaactggaaactctaaaaatcagagcgcctctcctcctccaaaggaacgcagctcctcaccagcaatggaacaaagctggatggagaatgactttaacaagttgagagaaggcttcagacaatcaaattactccaagctaaaggaggaagttcraaccatcacaaagaagttaaaaacctggaaaaagattagatgaatggctaactagaataaccaatgcagagaagtccttaaaggacctgatggagctgaaaaccatggcaggagaactatgtgatgaatgcacaagccttagtagtggatttgatcaactggaagaaagggtgtcagtcatggaagatcaaatgaatgaaatgaagtgagaagagaagtttagagaaaaaagaatgaaaagaaacaaacaaagcctccaaaaaacatgagattatgtgaaaagaccaaatctacatctg

SEQ ID NO: 934936 - DNA, 572 bp, Homo sapiens
gttagaaggaaaactaacaaacagaaaggacatcgacaccaaaaccccatctgtacgtcaccatcatcaaagaccaaaggtagataaaaccacaaagatggggaaaaaacagagaagaaaaactggaaactctaaaaatcagagcgcctctcctcctccaaaggaacgcagctcctcaccagcaatggaacaaagctggatggagaatgactttaacaagttgagagaaggcttcagacaatcaaattactccaagctaaaggaggaagttcgaaccatcrcaaagaagttaaaaacctggaaaaagattagatgaatggctaactagaataaccaatgcagagaagtccttaaaggacctgatggagctgaaaaccatggcaggagaactatgtgatgaatgcacaagccttagtagtggatttgatcaactggaagaaagggtgtcagtcatggaagatcaaatgaatgaaatgaagtgagaagagaagtttagagaaaaaagaatgaaaagaaacaaacaaagcctccaaaaaacatgagattatgtgaaaagaccaaatctacatctg

SEQ ID NO: 934937 - DNA, 477 bp, Homo sapiens
ggaagctgaggcaggggaatctcttgaaccagggaggtggaggttgcagtgaactgagatcatgccactgcactccagcctggcgacagagtgagactccatctcaaaacaaaaacaaaaaacaaacaaaaaacaaattaaaccaaaagttagtaataataaggatataatagatatctcagtataaatcaatgaaatagaaaacaaaaaaattgatgagccataaaaatgaaaagctgctttttgaratcaataaaaatgataaacctcgagatggattgatagacaaaataagagagaagacaaattatccatatcaggagtgggagaagggacatcactagagatcctacagatattaacaggataagaggaatattatgaataaattaataccaataaattctacaacttagattaagtggacaattttatttcaagacataaatttccaagctcactaaaaaaagacagctt

SEQ ID NO: 934938 - DNA, 821 bp, Homo sapiens
cattcattagagtaaaaagtgaagacagttagggctctatgtccttccagtcctggaagaggtggcaaagattctgaagttacatctataagagaaaaaactttttggagggtggaacaggatcttgctatgttacctaggctggacttgaactcctgggctcaaggatcctcccacctcaacctactaagtgctgcaggtacatgccattgtgcctggtttataagaaaaaacatttttaatgaygacttccccccacatgcccaacttgcaaggcatcttggcaggagagtttgagtcactctcctgcctgtgtggttacagcccacacagggagacttgcagaggcaggtgtgggatagagtctttcccatacattctatgagggtacaggctctaacagggagattgaatgaagggacccagcactccagccagaggggcctgcctgggcaggcagaagtagaaagcagcagggcaggaggagtgggagacatggggcctggatttaagagccgttcacttgcagtcaaacgctactcacttaaatgaaccagatgacctctgagtggcaagtagctgtcacaaagcccatgcatttgattgcaaagagagacaggcactcacccagaacaactgtgtgcagaagggcttatcttataagcaacagaacagaacaccttgatagccacaagaagtgacaactaacaacagaaaatgaccactcatttgatcaacattgcatgcatttcttcctgtgtgagttctcatgtgatccactaactcaggagccaatgtgcattacatggagccccagcaag

SEQ ID NO: 934939 - DNA, 821 bp, Homo sapiens
cattcattagagtaaaaagtgaagacagttagggctctatgtccttccagtcctggaagaggtggcaaagattctgaagttacatctataagagaaaaaactttttggagggtggaacaggatcttgctatgttacctaggctggacttgaactcctgggctcaaggatcctcccacctcaacctactaagtgctgcaggtacatgccattgtgcctggtttataagaaaaaacatttttaatgatgacttccccccacatgcccaacttgcaaggcatcttggcaggagagtttgagtcactctcctgcctgtgtggttacagcccacacagggagacttgcagaggcaggtgtgggatagagtctttcccatacattctatgagggtacaggctctaacagggagattgaatgaagggacccagcactccagccagaggggcctgcctgggcaggcagargtagaaagcagcagggcaggaggagtgggagacatggggcctggatttaagagccgttcacttgcagtcaaacgctactcacttaaatgaaccagatgacctctgagtggcaagtagctgtcacaaagcccatgcatttgattgcaaagagagacaggcactcacccagaacaactgtgtgcagaagggcttatcttataagcaacagaacagaacaccttgatagccacaagaagtgacaactaacaacagaaaatgaccactcatttgatcaacattgcatgcatttcttcctgtgtgagttctcatgtgatccactaactcaggagccaatgtgcattacatggagccccagcaag

SEQ ID NO: 934940 - DNA, 585 bp, Homo sapiens
agactccgtgggcgtaggacccttggagccaggtgcgggatataatctcgtggtgcgccgttttttaagcccgtcggaaaagcgcagtattcgggtgggagtgacccgattttccaggtgccgtccatcacccctttctttgactcagaaagggaactccctgaccccttgcgcttccgaagtgagcaatcctcgccctgcttcggcttttgcacgtgcgctgcacccactgacctgcgcccactgtctggcactccctagtgagatgaacccggtacctcacatggaaatggagaaattacccgtcttctgcgccgcacgctgggagctgtagaccrgagctgttcctatttggccatcttgccatttttccccataatctgttttttggtacttaagatggtaggataataccatcttctcatattgataaatatttctataaggtgtttttagtgtttgcttacatctgttgtgcacatagtttatttaactaaccctcctctgtttggcaatgtggattatttccaacttttatttgtaataaaaaactgcactgcagtgatcttccttatgattaaattt

SEQ ID NO: 934941 - DNA, 788 bp, Homo sapiens
gtcactgtttaccaattttcgatttttcttcctgttgttgatttttaattttataacagtgtggtcagaaaagatacttgatatgatttcaagcttcttaaatttgttaggatttgttttgtggctcaacatatgctctatcctagagaatattttttaaattctcttcaacttttattttaagttccagggtacacgtgcacaatgtgcaggtttgttacataggtaaacatgtgtcacggtggtctgcagcacagatcagcccatcacctaggattaagcccagcatccattagctattcttcctgatgctctctctccccttgacccccaatgacaggccccagtgtgtgttgttcctaaacatgtatcyatgtgttcttatcattcacctcccacttataagtaaaaacatgcagtgtttggctttctgttcctgcattagtttcatgaggataatggcttccaactccatccatgtccctgcaaagaacaggatctcattcctttttatagctgcatagtattccatggtatatatgtaccacatttccttcatccagtctatcattgatgaacatttgggttgattcaatatctttgctattgtgaatagtgctgcaataaacatatgcatgcatgtatctttataatagaatgatttatattcctttggctatgtactgagtaatgggattgctgggtcaaatgatatctctgcttctagatcagtgagaaatcaccacactgtatccacaatggttgaactaatttacacttccaccaat

SEQ ID NO: 934942 - DNA, 640 bp, Homo sapiens
aagatcaccccagagctgctgcatgcagcccgggagtgccaagccaagatctgcagccagcactcaagagaaagaggagtccacaatttcagagccctcagagggagcatggctgcaaacatgaggaaatacagaggagctacatgactgaggaagagactacctactgatcattatgcttaagcaccacctactagttcacatcccaaacttcaacatcaaaaatgttttgctatcataccccccctgtgaaaccaaaagcaaaaattcagctacaaataaaggtcttgcacaaagcatcagccctctgaaaacatccagaatataagtttactgactgtactcaatttatatcaaagttamacacacacacacacacacacacacacacacacacacacacgagaaagaactgaaagaaccagcgtaagaactctggtaactcaaatggcagagtatattctttcttccaaatgaatgcactagtttcccagaaatgattcttaaatgggctgaggttcctgaaatgacagacgtagaattaagaatatggacaggaatgaagatcatcgagattcaggtgaatattgaaacacaatccaaagaagttgtggattataagaaaacaatacaggagctg

SEQ ID NO: 934943 - DNA, 548 bp, Homo sapiens
cagaagtccaaataagagctgttactgatcctactgaaactattcaaaaaaactgatgaggaggggcttctccctaactcattctacaaagccagcatcactatgatatcaaaacctggcaaagactcatgggaaaaggaaaaccacaggctaatatccctgmtgaacacagatgtaaaaattctcaacaatatactagcaaaccaaatccagtagcatgtcaaaaagttaattcaccatgataacatggcttcattcctggaatataaggttgggatgcaaataaaaaattgtgattcaccatataagcagaattaaaaactaaaattaaaaattatcatctccatagatgcataaaaagctctcattaaaatccaaaatccctccatgataaaaaccctaaagaaactaggcattgaaagaacatacctcaaaatattaataataagagccatctgtgacaaatgcacagccagtatatttaatgggcataagctggtagcatttcccttgagaactggaacaaaacaaggatgcccactctcacc

SEQ ID NO: 934944 - DNA, 583 bp, Homo sapiens
tattcaataaatattgctgcagtaactgaccaaccatatgcagaagaaagaggctggatcccttttttatcgccatatacaaaaattagcttaagatggattaaagacttaaatataagacctcaaactatgaaaatcctagaagaaaacctagaacacaccattctggaaattggccttggaaaacaaatcatgaataagttgctcaaaagcaattgttctaaagcatttacaagaaaaacaaaaattgayctgtgggacctaattaaactgaagagcttttgcatagcaaaaagtacagagtatacaacctatagaatgggagaaaatatttgcaaacgatgtatccaaaaaaggtatgatatccagatctataaggaacttaaagaaatcaataagtaaaaacaaaccctattaaaaagtgaacaaatgacatggacagacacttctcaacagtagacatacaaatggccaacaaacgtggaaaattctcaacatcactcgtcatcagagaatgcaaataaaaaccacaataaaacaccatcttttgtcagtcagaatggttattattaaaaagtcaaaa

SEQ ID NO: 934945 - DNA, 661 bp, Homo sapiens
tcaacttcatttcctgctgtctaaaataaataagaaatatgcaaaagctcattaggctgtgtgttaaccaatgaaagctaatcactgaatgtcagctatcaaggaaaacagcaatttgtttagtaactgcagaaaaggataaagctaatctgctgtgttgttttatgtgtgtctgtgtgtgtctgtgtgtgtgtgtgatatttgaaaaygaaaaccaccaaagaagaattcccactgcatatactgaaataatctggcattcattccatgtatcttatcttctcacgccattttttgtgggtgttttgactcaatcaagtttactctggatcagtgctttcaacagaaatatggcacaagccatgctatgagccatgttattttaaattttctagaagccatgttaacaaatgtaaaaagaaagaagtgaaattaattttagttatatattttatttcacctaatatatccaatatattattgatatcccatgatatcgtttcaacatgtaatcaatataaaaattgagatattttgcattttttgtactaagtcttcagaacaagatgtgcacactctacttaaaacattccaattcagattcactaccatttaaatgctgtacagacacatgtggctactgactactataacggataac

SEQ ID NO: 934946 - DNA, 767 bp, Homo sapiens
taaaaactgccaattcaacagataaaagatagtcattttgatcttgtcaataattactttaagacagtggcaggtacctgatttagttaacattcagtgaacagagtccctgaacctgtgctaggaatcccagtccaataaaaccttgctcctgccttcaaagagctcacagttagtttagagagtgtgctaaggggataggccacggggccaggcaagattcacggggccacggtgaggaagattcaggtttatgatgcgggtgtgaaataacttacttgggatcaatgaatcattgaagaattctgttttttatattctccccacccaggcaagagtgcagtggcrcaatctttgcttactgcaacatctgtctcttgggttcaagggattctcctgcctcagcctcccaggtagctgggactacagatgcccgccaccacgccgggctaatttttgtgttttcagtaaaggcagtgtttcactgggttggccaggctgatctgaaactcctgacctcaagtgattcacccgccttggcctcaaaatgctgggattacatacgcctggtgtggaattctttaatgcagtgagaggagatgaaggccactttagctaagcctttaggttcattgaagaggccattcaaaaagatgaaaggtttgacatatacttccctatatcaagccatgcctgatttttcagaaataaggtagaagtttaatggatgtcatagtctaaaaatttgtaaggtaatcactataaat

SEQ ID NO: 934947 - DNA, 743 bp, Homo sapiens
cagctcaataacccttaggggactgagagttgtggaaggaggccagattcaacatcaaggatggcgagagaggtggcggctaggctggctggcagcaggaccatgaagaacttcatggtggagctgtagcaggatcagtttttcctgggggaggctgcttagagttgctgaagaggcagcctggcaggggctttatttattttggggtagggatggactctggggaaactggacctgggaacatactaggtttcccctcctgagtttcccattctgaataggtttgtttttgggaactggagtttctgggaaaccggttaactggaaagtaaggcccccagccttccccctggctcggaccatgctgaaggtgtgtcggctccagcttttacccccagaagtccatggaataaggacatgggtgtgagtttccctctttcatggtactcattactgtgtaattttactttcattagtatgatcatttaattaacatctatctcctccagaagaatgaaacttccaaaatggctgggattatatctgttttgcttgccattgtttttccagtacctagcaggtatstggcacatagtagagttctaggaaatattagtggagtgaatgaatcaaggaacggtcaggctgtcctctagggcagcggtccccatcctttttagcaccagggaccagtttcatggaagacaatttttccacagccagggggaggatggggatagttt

SEQ ID NO: 934948 - DNA, 601 bp, Homo sapiens
tcacctctggccccttttgtaatttctttcactttttgaggacactcattcatttacaaaacaagtatttattgagtgcttaccacctgccaggcactggtctgcacaccagttagtttagttttcctgtctcctgttgcctaggagaaccttagtcctctccagcaaagaccattcagaggtgctcaggatgtatttgtaagaaaaaaaaaagacagaaagaaagaaaaacaaagacaaagccccccaaaaaacaaaataatgaaaaacatctgtccctggatgaaagctgtcaatctyctacatgacaggaggtctgtagtcagttatttttgtcatggttttttaaagtctctagagtctataattaagatggaggtactaggggtagtgagagagagagagagagtgtgtgtgtgtgtgtgtgtgtgtgtaaggactgggagaataggcagggtcccactgaagggtgaggtgattccctggtagtggtcgatagcatttgttcatagcaagatctgaaactgaccgtaggctcccgtcctcatctctccccagcccctggtgtgctcttagccctctggctgactgcctgcccagg

SEQ ID NO: 934949 - DNA, 561 bp, Homo sapiens
cccagctcttgtgacctctaccataatccttcactttgggccttcttgcctagtgagaaagctgaggaaggtattcaaatatcagggaaagggtaggtattggacgggttgaaagctgaaagtgaacagaaaccaatagagatggagaaatgtaaaatctgagatagagagataggattcaaaaaccaaaaccaagagagcaagcagtcataggggcagagggacagagrgattgagaagcagtgccagaggcagacacagagcagagcagaggccaaggctggcaggagcactggtccagaggctgggtcgagttgcccaggctgccagatacaagtcctggcaggagacccttaggggaaaccaagagagccaagagcggtgtggaggtcttggaggcaagagacctagggatgaatgaggcagagctgacggcaggaggactgcccaggcccttagctatgaccaccccattacacagggcaaacttcccctcatatcagggggaacagaagcactgtgtccagaactgggacccggtagagcagactctgaattcag

SEQ ID NO: 934950 - DNA, 692 bp, Homo sapiens
gggggcttttaaaaaagcagatgggtgatttgggacaggaagtggagtagcagagtgagggggagagtcatggcaggaaaaaaacattgactctgggcactcttattctgagcctttcagcccgaagtggggcaggggactggagaacagaagggacagggttgacaggatattattgacagggtattattctggaaagtgaggagtcctggaggaaagagactgaaaggacttgtagtcccctcccccagactaagataaaggctagaatcctgaaaagtgatctcatcacacagagcctgagcttggggaagaggtgggcagggggtcactgccttccctttctagagtcccttcctctacttccacaggggaatctgggaagaatggggtcctggctttccgctcccattgtttttttggtttttggtttttggattttttttttttttttttttttggatacagtcktgctctgtcacccaggctagagtgcagtggtgcaatcgcggctcattgcagtctctgcctcctgggttcaagtaattatcctgcctcagcttcccgagtagctgggattacaggtgcggaccaccacatctggataatttttgtatttttagtggagatgggttttgccatgttggccaggctggtcttgaactcctggcctcaggtgatctgctcacctc

SEQ ID NO: 934951 - DNA, 515 bp, Homo sapiens
ctttacctctccaagcccaacttcctcatcagtaaaataaggacaatgaaaacatctctaaagctgtattaaacaagacaatgccaggagcaatggctcatgcctgtaatactaacactttgggaggttgaagcgggagcatcgcttgagctcaggcattcaagaccagccggggcaacatactgagaccttgtctctacaaagagtttaaaaattaaccaggtgtggtggcatgtgcctgtagtcccagctasttgtgaggctgaggtgggaggatcgcttaagcccaagaagtcaaggctgcagtgagctatgatcatgccactgcactcctgcctggaagacagtgagaccctgtctcaagaaaaacaaaacaaaaaaagaaaaaccaacatattgtttctaaagcacctggcatagcatgtatcaggcactcaagaagagacagtcattattatgagtctagtaatgttgataacggggttattacaagcaagaattcttgacagtcatgg

SEQ ID NO: 934952 - DNA, 792 bp, Homo sapiens
tgagttatggtgtagggactccgtccttgatattctcatagagatgccctcgtcctcctggatttcagggtggaaggaatgggaatggtaggtcaagtctgagacattgaggtctgacgctgtcttcctgttcagatggtagcttgttttggggacctttcagcggagtgtctgtccttagtgcctcatgggctgccatgcactgggttttaactgcaaactgttttagaataatctggtcttaatgtctgggagttctaatatgtgcatcccaatgaggttcttagacctcagggccagatctcacactgactctctttgaccrtgctgcattccacaggcaatgtggaatgttgcttacctcaaggaacataaaccttacattgtggaatagaggtatttgcaaatatcttctcctctcccattgccagggtggctcagtgtctgctaaaattgaatccatatgggtacaccgagcagaaggggagggcggaatgggtgggaaagtacattgcagtatttgtttgtgatgacattcatttaaccagagctaacctcggagttataaaccagggcattatttcctaaacagtatcatgtattcatttgtggcagtatagaagatttaatttatacatgtatttatgcatagacatatgaaagagatcataactctggattcaatgtgataaaaagcagattcattctagagtcccatatacagtggattgtgaagaacaatcctttttattatataacatttactttcctctaggacatctgttagttcag

SEQ ID NO: 934953 - DNA, 599 bp, Homo sapiens
gctaactatatcatttcactcctagccccttccaaatttcatgtcgttttcacattttaaaacccatcatgccttcccaaaaatccctcaaagtcttaattcattccagcattaacccaaaagtctacatccaaagtctcatctgagacaaggcaaatctcttccagctataagcctgtaaaatcaaaagcaagttagttccttcctagatacaactggggtgcagaaattgggtaaatatgcccattctaaatgtagaaattggcaaaaaataaagggactacaggctccacacacatcctaaatccaatacggcagtcattaaatcttaaagttccaaaatgatmtcctttgattacatgtcccaaatccaggacatgctgatgcaagagggggttcccgtggccttgggcagctctatccctgtggctttacagggtacaaacctcctcccagctgctttcacaggctggagttgagtgcctgtggcttttccaggttcacagtgcaagctgttggtggatctacctattctgcagtctgaaggatggtggccctcttctcatagctccactagatggtgccccagtggggactct

SEQ ID NO: 934954 - DNA, 612 bp, Homo sapiens
aaagtttgttcctcctgacaccacatttacaaacacactgggtaaggtttctcaaagtgctccaaggtataaagggcactttgataccaactgcataagaatctttgaggataggcttaggattgacttggcgatgcgggctctttttgggttccatatgaactttaaagtagttttttccaattctgtgaagaaagtcatyggtagcttgatggggatggcattgaatctataaattaccttgggcagtatggccattttcatgatattgattcttcctacccatgagcatggaatgttcttccatttctttgtatcctcttttatttcattgagcagtggtttgtagttctccttgaagaggtccttcacgtcccttgtaaattggattcctaggtattttattttctttgaagcaattgtgaaagggagttcacacatgatttggctctctgtttgtctgttattggtgtataagaatgcttgtgatttttgtaccttgattttgtatcctgagactttgctgaagttgcttatcagcttaaggagattttgggctgagacattggggttttctagatatacaatcatgtcatctgcaaacagggacaa

SEQ ID NO: 934955 - DNA, 594 bp, Homo sapiens
ggtggcttatttttcattggacaatcttttttaaagtgtccttgtaaaccacactgataacaagccctaccaggtgattggcctgctcaattttctttcctctctgaaccaccaaggtttgtttgagggccttgactaaggctgtggcctttctctgatctcgcttttccttttgggcctgttcctcttggtccctattatagaacaccgaggttgccaggattaataatgcctccagattttgttcagggcccagggcttgcttttggaccttcctcctgttatctgtggctgattgggtaataaactcatcttttaggatcagttgacccccaagggagttgggtgacaggagagtatatttccttaagacctcccgtagctgctcgagraaggcagaaggattttcttcctttccctgagttatggtggacatcattgaataactcatgggctttttcctaattcttcttagtccttccagaacacaggtcagcagatgtttacaactccagtccccatgatcttgagtctagatcccagtgggcatccatactggggatggcttgctgaccggtagggaatttgtccctt

SEQ ID NO: 934956 - DNA, 739 bp, Homo sapiens
agagagtcagcctgtcctttgaagctttgaagccaggcactgacttctctttagatggtatcttccaacagaaggctgcttgatctacatggaaaatttgttgtttagtgtggccacgttcatcaatgatcttagctagatcttctggataacttgctgcaacttgtacatcagcatttaatgcttcaccttgcacttttatgtgatggagctggcttcttttcttaaacctcatgaatcgatcccttttagctttcagctattctgcagcttcctcccctctctcagccttcacagaattaaagagagtcagggccttgctctggattagactttggcttaagagaatggtatggcaaggccaggcgtggtggctcacgcctgtagtcccagcactttgggaggctgaggcaggtggatcacctaaggtcaggagttcgaaaccaacctggccaacgtggtgaaaccccrtctctactaaaaatacaaaaattgggtgtggtggtgtgcacctataatctcagttactcaggaggctgaggcacaagaatcgcttgaacctggaaggcagagattgcagtgagccaagaccacgccattgcactccagcctgggcatcaagcgaaactccatctcaaaaaaaaaaaaaaaaaaagagaatgccgtggctgcttagctcttccatccagaccactaaagctttatccctatcagcaataaggctgtattccttctttac

SEQ ID NO: 934957 - DNA, 642 bp, Homo sapiens
tgaaaatttgagattactctggagattgtgaattaaatattgatacccactattaccaattttattgaatgttgtaaagaagaccaggacagtgcaataaggcaagaaaaaaagaaagaaagaaaataaataaaactatcaagataccaacatcatcttttttttttttttcagatggagtctcattctgtggcccaggctggagtgcagtggcatgatcttggctcactgaaacctccgcctcccaggttcaagcaatccttgtgcctcatcttcccgagtagctaggattacaagcatgtgccatgatgccctgctaatttttatattttyagtagagacagggttttgccttgttggccaggctggtctcaaacacttgacctcaagtgatttacctgccttggcctctcaaactgctgggattatagtcatgataaatatcaaaatacttaaggataaatataataaaagatacacacaaatgttgtttttaaaagtataaaataatattgataaaaattaaaaatcaaagcaaataaaaacatttgactcaacaattccactcttagacatatattcaagagaaatgaaaacaagtgttcatgttatcatggacttacacatagatatatatcttgg

SEQ ID NO: 934958 - DNA, 741 bp, Homo sapiens
atagtgatgctgatggtcaggaagcattatgtggatgatggagttggggagatttttttccagactgaggaagtagcaaatgtgaagaccctggcacaagagggaacttggagtatctgaagagtagaaagcagggctagagtgatcctgaatgagagaaattatggcaggtgatgaggttgggtaagtagtcgggggccaagatcaagtaggaaccagcaattcagagtaagtagtatgaattttattctaagaacaatgacaagcagccagacagatcaaaagcaggagagtagcatgagttgattttcatttctgaaacagcagactggccgctgtgcacagaatgatccattccagggtggatcagaagtgcaggtrcagaagcgcaggtaaggcatgaaggcacaggtaacatgatgtcattgaagatggagagatatggatgggttcaaggcaccttaagaggtaaaacccacagatttagtgttggactgaatatggggagaaatatggcaaggtcaaaaaagttaaccaggctttttgacatgcactattgactggatggtgatgctattcagtgaaggaaaatggctctggaggaaaaccagatttaggagtgagatcatgagtttggtcattgctacgttgagtatgaggtgcctttggatggtggaggtccagagtaggtcatggcctgtatgggcatggagcttagaggaaggactggagacatgacct

SEQ ID NO: 934959 - DNA, 625 bp, Homo sapiens
aaaaaacacttggtagacttctaaggtttgtttactctaatccctcactcctagatggcacctctggatccacccagggcctgagagacgctccagtgcaatcagccatgatgggagggacacaggcctggctgctttcgcaccggctgattgtagagcaccagggcctaaagcaaacataagcagtagccagggagtgggtaaarcaggccttgggcaagacccagcgctgtgctggcttcaggtctgacccagcagtcctagtggtcatggccaaagtggtgcctgtgtcactccaccatcagctttaggtggctcagaacagacagacagactctgtttgtttgggagaaagtaagggaagagaacaagtctctgcctgatatctagagaattctcccagatattgtccaagatcatcaaggtggtacctctacaggtctgcaagaaccacagcattactgggcttagggtgccccctaaagcagatacagctttgatcgaaacactcaaatcctttggaaggccttcccaagaaggacaagtacaaataagtccagagagtgaagactacaataaatacctaacttttaaatgcccagacactgaagaacatctactagca

SEQ ID NO: 934960 - DNA, 614 bp, Homo sapiens
cctttaccattatataatggccttctttgtctcttttgatctttgtttgtataaagtctgttttatcagagactaggattagaacccctgcttttttttgctttccatttgcttggtagatcttcctccatccctgtattttgagcctatgtgtgtctctgcacatgataccggtctcctgaatacagcacaccgatgagtcctgactctttatccaatttgccagtctgtgtcttttagttggggcatgtagcccatttacatttaaggttaatatagttatgtgtgaatttcatcctgtaattaagatgttagctggttattttgcccattaattgatgcagtttttcatagcatcaatatataatttggcatgtttttgcagtggctgttactggttgttccttyccatgtttagtgcttccttcaggagctcttgtaaggcaggcctggtggtgacaaaatctctcagcatttgcttgactgtaaaggattttatttcttcttaacttatgaagcttagtttggctggatatgaaattatggtttgaaaattcttttctgtatgaatgttgaattttgggccccactctcatctggcttgtagggtttct

SEQ ID NO: 934961 - DNA, 585 bp, Homo sapiens
cttcaccaagaaattaaggtgacctactgagaacagagaggagtgagataggacaatggcctgagagtggcatggagccaggggaggccccccaccacagagaaaaggtgaggaagtgagagtccccaaggacccacacttctgccttgaacctttgcaaccttgagctaaagagatccctcatgagctcctcagtggggccttcagactgacatggagagctgtgtggtctcggcagagctgccattcaggcacacaaggagttccaggagccatggatccctgagcaccatggcaccagtggctacagctctagcaaggggtgaggccaggctccttcacatgcccccagaataggggccatatccacagggctagacaatagatggactgtgggcctagtcttcactgaacctcatcaratggtgcccactgcactggcaccctagcacaaccaccccaggtccacctgagctctctggccaggagcagctttgcacttccctggtatggagctcccagggaagtgggagtaggcaggtcaccatttctcctgctttgcagccctagctcctattgtcctca

SEQ ID NO: 934962 - DNA, 583 bp, Homo sapiens
gtatgtttataaactgtatactaaaaattacacagcattgatgagaggaattaaagatggcctaaatagataactattttgtaaagattgcaaaggatctagaataatagaaacaattttgaaaaagaacaatgttggaagacttacttcacttgaattcatgacataaagttacagtaatgaaaatatgatattggtgtatggatagcttcgattaagggaacagaatagagagcagaagtaaactcacaaatatatggacaattgatttttgacaacattgtcaaagtaayttcatagagaaaaaattcttgttaataaactgtgctagatcaattaaatatccttatgaagaaaataaatgaatcccaacctttattgcacactgtataaaaaataactggaaattgaatatggacctaaaaataagcaataacacaaaaaacttcaagataacttgattagcatatgtcttaaagaaaataaattgataattaattactttctcagaaggaaaactcctggttcagatggtttaattggtgaattctatcaaacaaattttaaggaagaagcagaagca

SEQ ID NO: 934963 - DNA, 724 bp, Homo sapiens
cctcctgtcccaggcttgcaattagggagagtgtgcaattccagccatactgctaaggtgctttccacaattatggctttggaggtccctactctcctcaagagcaagccctctagtctttggcttgagaataaaatgcctgcagagccacacttctgggtcatcaaagaatgactgactttatatgcacccagattaaaactggcatgatgttcttggtcccagttctgggaaaatgcctgcagcttttcccggtgtctttccctcacagcatctccaagactctccccaaattacctcaagggcttgggagaarcaaagtgctatccctaggcctgggttgcttggatctccaatagaatggtgagtcacagagggaggctctctgcctctctcacatactgaggcttcactcacttttatcacctagatgccaccacagggctaactgcccacatactcctccctgggatctgggatgtccttaatgattctggtggattcccatattccttcttgaattaaagctcacagagagatttggaatgagtagatggagcaagatgaccaaatcatccagcaatcatccctcccacaagaacaccaaattgaacagctatgcacacaaaaaagcaccttcataagaatcaaaacaccaggtgagcaatcacagtgcctggttttaacatcatattaaggaaagatgcactgagagggtaggaaa

SEQ ID NO: 934964 - DNA, 565 bp, Homo sapiens
gtatacctagaaatccctaaacactctgccaaaaggctggtgactaataaacaacttcagtaaagtttcaggatacaaaattaacgtacaaaaatcagtagcatttttatacaccaataatattcaagctgacagctaaagagtgtgatcccatgtacaacagctacacacacacacacacacacacacactacctgggaacacatctgtccaaagaggtgaaagatctctacgaggaggctgggtgcagtggctcatgcctgtaatcccagcactttgggaggccaacatgggcggatcacgaggtcaggakatcgagacaatcctggccaacatggtgaaacccgtctctactaaaaatacaaaaattagctgggcataatggtgcgtgcctatagtcccagctactcgggtggttgaggcaggagattcgcttgaacctgggaggcggaagttgcagtgagccaagatcgggccaatgctccagcctggcgacagagagaaattctgtcaaaacaaacaaacaaacaaacaaacctctacaaggagaactacaaaacactga

SEQ ID NO: 934965 - DNA, 578 bp, Homo sapiens
aaatttatgagccatatacctaatattaacagatacatgaaataattttagctcttctaaactctgtgtattacttttcacatggctataaagatacagcctgagactgggtaacttatgaagaaaataggtttaattgactcacagttccacatggctgggaaggcctcaggaaacttagaatcatggtgaaggctaagggaaagcaaggcatgacttacatgacaggaagagagagcgagaggagaaagggaaactgccacttttaaaccatcagattttgtaagaactccctcactatcatgagaacagcatgggaatgacctctctcatgatccaatcatcttctgccaggtttctcccttgacagatgaagattacaatttgtgatgagacttggatgaggacacagagccaagccatatcattctgcccctggmccctctcaaattttattgcttttcacatttcaaaaccaatcatgccttctaaacaggcccccaaagtcttaactcattccagcattaacccaaaagtacaagtccaaagtctcatctgagacaaggcaagtcacttct

SEQ ID NO: 934966 - DNA, 599 bp, Homo sapiens
caggagaatcactggaacccaggaggtggaggttggagtgagccgagattgcactccatcctgggcaacagagggagaccccatctcaaaaaaacaaacaaacaaaagaaaatgccaggcgtggtggctcaggcctgtaatcccagcactttgggaggccaaggcaggtggatcatgaggtcaggagttcaagaccaccctggccaatatggtgaaaccccatctctactaaaaataaaaaattagtcaggtgtggtggtgcacgcctgtagtcccagctactcggkaggctaaggcaggagaattgctagaacttaggaggcagaggttgcagtgagcgaagattgtgccactgcactccagcctgggcgacagagcaagactcagtctccaaaaaaaaaaaaaaaaaaaaaaaattgcccaaggaagactaattatcaagggcatgatattaaactcactagctgaacatttaagattcctcaggtacaatgttgtgtgtatacacaaacatacacacatcctttaatgtaaatctttgtgagtgtgatggctatggctgtatgccactcagaactccttcaagaggaactgaggct

SEQ ID NO: 934967 - DNA, 577 bp, Homo sapiens; identical to SEQ ID NO: 932838

SEQ ID NO: 934968 - DNA, 577 bp, Homo sapiens; identical to SEQ ID NO: 932839

SEQ ID NO: 934969 - DNA, 579 bp, Homo sapiens
cagggtgttggagtttgctggaggtccacatcagaccctgtttgcttgggtatcaccagtcgaggctcagttggaaatgcagaaatcacccgtcttctgtgtcagtcacactgggagatgcagactggagctgttcctattcagccatcttggaacggctctcaaattagtttatttttttttctaattctgygaagaatgtcattggtagtttgataggaatagcactggatctgtaaattgctttgggcagtaaagtcattttaatgatattgattctacctatccatgagctttgaatgtttttccatttgtttgtgtcatctctgatttctttgagcagtgttttgtaattcctgttgtagagatcttttacctctctgttagctgtattcccaggtgttttattctttttgtggcttttgtgaatgggattgtgttgcttatttggctctcagcttggatgtcgttggtgtatggaaatattactgatttgtatactttagttttgtatcgtgaaactttgctgaaattgtttctcagatctaggagcttttgggcagactattgggtttccag

SEQ ID NO: 934970 - DNA, 572 bp, Homo sapiens
acacctatgtttggagggaggaagcgacttcccgcccaacacagcatagcatcctctccaggatcctctgccccagccagagcctgctctggcactggaggccaaggccgctttcttggtccaaaaaaaaaaaaacaccatttttttcaccagtgacaggttcaccttcagaaaggaaaccagaaaacccaaaagcccctctttctcttcttcctcaaatgctatcagcctgagtggggtgtggaaatactacttctccccaaaacaggctrtgatgctggtggacgaacatgacagatgccctgctggcagtcctgctgaaaagcgatggcttggagaatcgcccaggctggggaagatgcccagggtcttagatggttacccctgcccaaccctcaggcaggacaggaactggctgtctcctctctgagtcttgaaatctacactgcacacacctggcaaatgtgcacctgcagctcaggcacagccctgcaatccacactgcacacacctggtaaatgtgcacctgcagcccaggcacagccctgccatccacactgcacacacctggt

SEQ ID NO: 934971 - DNA, 594 bp, Homo sapiens
gatggtgcatctattaactgagatgggaagaagtctggataaagaagggacatcaggagtacatttttggcctggttaagtttgagatatatattagatacccaactagagatgctagaaagcaattgtatatacaagtccagagagctcaaaagggaacacagactacaaagaaaaaaaattgggagttgtcagcatataaactatgtttaaaccatgtcactaggtgtgattagcaagagggtgggtgaacagagaagaggcccartaattgagtttggaggcacttcaaaattaagaaattggaaagataaaaaggaataagaaaaagatactgagcataagcagcctgtaatgtaggaaggaagccatagggtttggtgtcatgataggtacataaataaatctgtttccaggatagggaaaacatcgactgtggcaagatgagggctgagcattgactactggattttgcaatgtggccatcattgccaatgtgacaagagcagtttttgtgaaagagatgcaagcctttttggaaagagtttaggagaaaatggagagtaactgaaaatactaaacatagaaatcttt

SEQ ID NO: 934972 - DNA, 590 bp, Homo sapiens
gaattgtactcccataattcccatgtgttgtgggaggtaatttgaatcatgggggtggtttcccccatactgttctcatggtagtgaataaatctcaggagatctgatggttttattaggggtttccactttgtatcctcrttttattttgctgccaccatataagaagtgccttttgcctcccgccatcattctgaggcccctcagccatgtggaactgtaaatccaattaaaccttcttttcgtcccagttttgggtatgtttttatcagcacgatgaaaatggactaatacagtaaattggtaccagtagagtggggcgttactgaaaagatacctgaaaatgtggaagtgactttggaactgggtatcaggcagaggttggaacagtttggagggctcagaagaagacaggaaaatgtcggaaagtttggaacttgccagagacttgttgaatggctgtcacaaaaatgctgatagtgatatgaacattaaggtccaggctgaggtggtctcagatggagatgaagaacttgttggtaactggagcagaggtgactcctgttacaacaaagagactggtggcattt

SEQ ID NO: 934973 - DNA, 556 bp, Homo sapiens
tttattcgtttctttttactcttttttctccaaccttgtcttctcgttttatttcattaatttaatcttcaatcaccaataccctttcttccacttgattgaatcggctattgaagcttgtgcatgcatcacaaagttcycgtgccatggttttcagctccatcaggtcatttatgttcttctctacactgtttattctagttagccattcgtctaacttttttcaaggtttttagcttcctcgtgatgggtttgaacatgctcctttagcttggagaagtttgttcttaccaaccttctgaagcctacttctgtcaactcgtcgaagtcattctccgtccagctttgttccacttctggcgaggagctgcgatcctttggaggagaagaggcgctctggtttttagaattttcagcttttctgttctgatttctcctcatctctgtggttttatctacctttggtctttgatgttggtgacctacagatggggttttggtgtagatgccctttttgttgatgttcaattcctttctgttagttagttttccttct

SEQ ID NO: 934974 - DNA, 556 bp, Homo sapiens
tttattcgtttctttttactcttttttctccaaccttgtcttctcgttttatttcattaatttaatcttcaatcaccaataccctttcttccacttgattgaatcggctattgaagcttgtgcatgcatcacaaagttctcgtgccatggttttcagctccatcaggtcatttatgttcttctctacactgtttattctagttagccattcgtctaacttttttcaaggtttttagcttcctcgtgatgggtttgaacatgctcctttagcttggagaagtttgttmttaccaaccttctgaagcctacttctgtcaactcgtcgaagtcattctccgtccagctttgttccacttctggcgaggagctgcgatcctttggaggagaagaggcgctctggtttttagaattttcagcttttctgttctgatttctcctcatctctgtggttttatctacctttggtctttgatgttggtgacctacagatggggttttggtgtagatgccctttttgttgatgttcaattcctttctgttagttagttttccttct

SEQ ID NO: 934975 - DNA, 608 bp, Homo sapiens
ctttaccgccagcctcagttcctcttgaaggagttctgagtggcatacagccatagccatcacactcacaaagatttacattaaaggatgtgtgtatgtttgtgtatacacacaacattgtacctgaggaatcttaaatgttcagctagtgagtttaatatcatgcccttgataattagtcttccttgggcaattttttttttttttttttttttttggagactgagtcttgctctgtcgcccaggctggagtgcagtggcacaatcttcgctcactgcaacctctgcctcctaagttctagcaattctcctgccttagcctmccgagtagctgggactacaggcgtgcaccaccacacctgactaattttttatttttagtagagatggggtttcaccatattggccagggtggtcttgaactcctgacctcatgatccacctgccttggcctcccaaagtgctgggattacaggcctgagccaccacgcctggcattttcttttgtttgtttgtttttttgagatggggtctccctctgttgcccaggatggagtgcaatctcggctcactccaacctccacctcctgggttccagtgattctcct

SEQ ID NO: 934976 - DNA, 596 bp, Homo sapiens
ctggccttaagcgatcctcccattttggcctcccaaagcactgggattacaagtgtaagccgctgtgcccaacccaatttactttttattgaaatataatttcagacttaggaaaaagttgcaagaacaatacaaagaattcccatgtacctgtcacccagatttcccaaatgttaccacattaccactttgctgtatccttcccccaccccccacccctgtctctgtagatacagctataaagaggagaaaaatgcttgttttctcagacatmacacctctgtgaaatacttcactctgaatttcctaaaaacaagcaacattgtcttacaaaaccacaatacaatgatcaaacgtagggaatgaacactgacacagcgttattgtctcatctgaaaactttctccaggtctccccatttgtactgatgatgtcctttgtcaccaaaggaagctccagatgtcatatggcatttcgttgtcctctcttttgctttctttagtctgaagcagttcctgtgtctttttatatctttcataacactgacatttttcaagagcacacgtcagagattttattgaacatccctcaatttg

SEQ ID NO: 934977 - DNA, 596 bp, Homo sapiens
ctggccttaagcgatcctcccattttggcctcccaaagcactgggattacaagtgtaagccgctgtgcccaacccaatttactttttattgaaatataatttcagacttaggaaaaagttgcaagaacaatacaaagaattcccatgtacctgtcacccagatttcccaaatgttaccacattaccactttgctgtatccttcccccaccccccacccctgtctctgtagatacagctataaagaggagaaaaatgcttgttttctcagacatcacacctctgtgaaatacttcactctgaatttcctaaaaacaagcaacattgtcttacaaaaccacaatacaatgatcaaacgtagggaatgaacactgacacagcgttattgtctcatctgaaaactttctccaggtctccccatttgtactgatgatgtcctttgtcaccaaaggaagctccaratgtcatatggcatttcgttgtcctctcttttgctttctttagtctgaagcagttcctgtgtctttttatatctttcataacactgacatttttcaagagcacacgtcagagattttattgaacatccctcaatttg

SEQ ID NO: 934978 - DNA, 443 bp, Homo sapiens
aaccactgctctcttcaaagctgtcagacatggacatttaagtctgcagaggttactgctgtctttttgtttgtctgtgccctgcccccagaggtggagcctacagaggcaggcaggcctccttgagctgtggtgggctccacccagttcaagcttccaggctgctttgtttacctaagcaagtctgggcaatggcaggcacccctcccccagccttgctgccaccttgcagtttgatctcggactgctgtgctagcaatcagygagactccgtgggtgtaggaccctccgagccaggtgcaggatataatctcctggtgtgccattttttaagcccttcagaaaagcgcagtattagggtgggagtgacccgattttccaggtgccatctgtcacccctttctttgactaggaaagggaactccctgaccccttgcacttcc

SEQ ID NO: 934979 - DNA, 443 bp, Homo sapiens
aaccactgctctcttcaaagctgtcagacatggacatttaagtctgcagaggttactgctgtctttttgtttgtctgtgccctgcccccagaggtggagcctacagaggcaggcaggcctccttgagctgtggtgggctccacccagttcaagcttccaggctgctttgtttacctaagcaagtctgggcaatggcaggcacccctcccccagccttgctgccaccttgcagtttgatctcggactgctgtgctagcaatcagcgagactccgtgggygtaggaccctccgagccaggtgcaggatataatctcctggtgtgccattttttaagcccttcagaaaagcgcagtattagggtgggagtgacccgattttccaggtgccatctgtcacccctttctttgactaggaaagggaactccctgaccccttgcacttcc

SEQ ID NO: 934980 - DNA, 727 bp, Homo sapiens
tgtaatcccagcactttagggaggccaaggtgggcgtatcaggaggtcaggagctcgagaccagcctggccagtatgatgaaaccccgtctactaaaagtacaaaaagtagctgggcgtagtggcgagtgcttgtaatcccagctatttgggaggctgaagcaggagaatcgcttgaacccgggaagcagaggttgcagtgagccaagattgtgccactgcattccagcctgggtgacagcgagactccatctgaaaacaaaaaattwaaaaaaaaaatttttttaaataaaaataggccagacgcggtggctcacacctgtaatcccagcactttgggagagtgaggcgggtggatcacgaggtcaggagatcaagaccatcctggctaacacggtgaaaccccgtctctactaaaaatacaaaaaattagccgggcgtggtggcaggcgcctgtaatcccagctacttgggagtttgaggcagaattgcttgaacccaggaggcggaggttgcagtgacccaagattgcaccactgcactccagcctgggtgacagagcaagactccattacacacacacacacaaataaataaacaaataaataaataaataaaaataaaagaaagtaaaaatggacaggcacggtggctcacgcctgtaagtccagcactttaggaggctgaggcgggtgaatcacctgaggtcaagagttcgagaccagccc

SEQ ID NO: 934981 - DNA, 646 bp, Homo sapiens
ggctgaggcatgagagttgcttgaacccaggaggcagaggttgtagtgagtggagattgtgccactgcactgcagcctgggtgacagagtgagactctgtctcaagacaacaataataaaaaaacatgatcgaagttaggctaatttaggtcttcctctaggactccatctcctctcaactctccactgactttcgttttgaaaagttttagattgaaaataaaaaaagcaaaggaaaatggggtaaatgggggatagaaaatgaggtcactgggaatggaatggggataaagtaaaacgaggagtggagatagcccccccaactttcaggtctctgtcttccaaggccttgaatrataactaggccttccttaccccttaaccaacaggagaaataggcacactgaaaaaatccaggaagctggagagggggaagaattcaccaagaatgagatggaaataactagaattgaacacttcccacacatggtatcaaggtaaatttctaggatgtcaggccagaagtcatcgtttccagggggctcagaccttccttgttctcacctggtcacctttttcccgctttcagaaaatgtgtaagaagcacatgcttcccccattcaactagtgggagaaattctcaatt

SEQ ID NO: 934982 - DNA, 681 bp, Homo sapiens
ggaagagagggaccaggtgatttgcccagagtctcacagcaggtaggtgggccaagactcacacacggcacttttgtctcttaccagcccaggccatttgtcttctctcctcctccttgtgccaaatccattcaacagaataggtgctctcagtgagtctctagtggagaagttttcaagtagccacacagcaattacgcagtgccagcaattgtcatatcagccctaagaaaggttttgaaagctgcagtgaaaggactccrcgtctccaagtctcgtgctcagagagttcagaaaccaaataggaagtgaaaccacaggaccatctgcaagagaaaaaaataaagaaatgaggaagccaggagggggaagcatggaaatgaaccctgaccagggtactgatgacagttaaataagggcaagacttgatgaacgatgggaagtcttggttgtattaagaaccaaaggttacttcaacaagcatttacggagtgactttcctgtgccaaatcctatgcgaggtgctgaggatataaagattaattagacctccagctcattgctgagtccagagactatagtatttcacagattcaatcacagatatctgtacaaggcacagaacccattaggaagaaagagtgatttcatagctcatgggtgaatgaaggcatagctcat

SEQ ID NO: 934983 - DNA, 681 bp, Homo sapiens
ggaagagagggaccaggtgatttgcccagagtctcacagcaggtaggtgggccaagactcacacacggcacttttgtctcttaccagcccaggccatttgtcttctctcctcctccttgtgccaaatccattcaacagaataggtgctctcagtgagtctctagtggagaagttttcaagtagccacacagcaattacgcagtgccagcaattgtcatatcagccctaagaaaggttttgaaagctgcagtgaaaggactccacgtctccaagtctcgtgctcagagagttcagaaaccaaataggaagtgaaaccacaggaccatctgcaagagaaaaaaataaagaaatgaggaagccaggagggggaagcatggaaatgaaccctgaccagggtactgatgacagttaaatamgggcaagacttgatgaacgatgggaagtcttggttgtattaagaaccaaaggttacttcaacaagcatttacggagtgactttcctgtgccaaatcctatgcgaggtgctgaggatataaagattaattagacctccagctcattgctgagtccagagactatagtatttcacagattcaatcacagatatctgtacaaggcacagaacccattaggaagaaagagtgatttcatagctcatgggtgaatgaaggcatagctcat

SEQ ID NO: 934984 - DNA, 681 bp, Homo sapiens
ggaagagagggaccaggtgatttgcccagagtctcacagcaggtaggtgggccaagactcacacacggcacttttgtctcttaccagcccaggccatttgtcttctctcctcctccttgtgccaaatccattcaacagaataggtgctctcagtgagtctctagtggagaagttttcaagtagccacacagcaattacgcagtgccagcaattgtcatatcagccctaagaaaggttttgaaagctgcagtgaaaggactccacgtctccaagtctcgtgctcagagagttcagaaaccaaataggaagtgaaaccacaggaccatctgcaagagaaaaaaataaagaaatgaggaagccaggagggggaagcatggaaatgaaccctgaccagggtactgatgacagttaaataaggscaagacttgatgaacgatgggaagtcttggttgtattaagaaccaaaggttacttcaacaagcatttacggagtgactttcctgtgccaaatcctatgcgaggtgctgaggatataaagattaattagacctccagctcattgctgagtccagagactatagtatttcacagattcaatcacagatatctgtacaaggcacagaacccattaggaagaaagagtgatttcatagctcatgggtgaatgaaggcatagctcat

SEQ ID NO: 934985 - DNA, 681 bp, Homo sapiens
ggaagagagggaccaggtgatttgcccagagtctcacagcaggtaggtgggccaagactcacacacggcacttttgtctcttaccagcccaggccatttgtcttctctcctcctccttgtgccaaatccattcaacagaataggtgctctcagtgagtctctagtggagaagttttcaagtagccacacagcaattacgcagtgccagcaattgtcatatcagccctaagaaaggttttgaaagctgcagtgaaaggactccacgtctccaagtctcgtgctcagagagttcagaaaccaaataggaagtgaaaccacaggaccatctgcaagagaaaaaaataaagaaatgaggaagccaggagggggaagcatggaaatgaaccctgaccagggtactgatgacagttaaataagggcaagacttgatgaacgatgggaagtcttggttgtattaagaaccaaaggttacttcaacaagcatttackgagtgactttcctgtgccaaatcctatgcgaggtgctgaggatataaagattaattagacctccagctcattgctgagtccagagactatagtatttcacagattcaatcacagatatctgtacaaggcacagaacccattaggaagaaagagtgatttcatagctcatgggtgaatgaaggcatagctcat

SEQ ID NO: 934986 - DNA, 788 bp, Homo sapiens
aaattctcatcatcagcaaatgaaatacttttcagaattggccatattgtttctgttaggacaataaacaagtctcaaaaaaattttaaaaatatcaaaattatgtcaagtaccctataataccataatggaataaacctagaaatcaataacaagagaaacatttgaaagcatacactacatggaaattaaacagcacatttctgaataatcaatgggtaaagaggaaattaagaataaaatttaaatctttcttaaatgaaaatgaaaacacaaaataccaaaacctatgggatgagcaaaagcagaattaagaggcaagtttatatcagtaaacccctatatgaaaaaacaagaaagatttcccagcctcaaataaaccaattaasactgcaactcaaggaactaaaaaaggaagaacaaaccaaaccaaaaattagtagaagacaaaaataataaatatcagagcagaaataaatgaaattaacactaaaataataacacaagagatcaatgaaataaaaagttgcttttctgaaatgataagccaaatgaacaaaccattagctagactaagaaaaaatgggagaataaccaaataaataaaatcagaaatgaaaaacatacacaatgacagtagcagtagtagtaacattacaatgtttactaaaaaaatacaaaggatcattaaagattgctatgaacaagtatacaccaataaatttgaaaacctggataaagtcctagacaaatacaacccaccaagattgaaccaagaataaatagaa

SEQ ID NO: 934987 - DNA, 566 bp, Homo sapiens
gcatgttttttcttcttttacagtagaattgaaaaggccaacaacctgctctacatcaaccctgaggccttccagaaccttcccaaccttcaatatctgtaagaactcatgtagtttggtacccccactatgattaaatagtgcaagcctattttactaaaaggccyacttgatactctggggagcaattacttttgatcaaggatggtggtggggggcagaagtggaggtggagagatacttggtgatggattttagtttaatgagcaaattctactaacataattgtatcttgttttcatttgcaaaaacagacataagaaatgccatttgcattaatgggacggtcacatggacctcgtacagaactcagtcataatttagtgttaatgagatacagccaaaatttctgctagcatttagcttgtgaccttgacttcaaagccattgtctctcttattctgcatatatgcatttttcccttgataaatatcagcattttattttgtttattttgtatgttttcgttaataacacacatggtattttatcagcagagattccta

SEQ ID NO: 934988 - DNA, 566 bp, Homo sapiens
gcatgttttttcttcttttacagtagaattgaaaaggccaacaacctgctctacatcaaccctgaggccttccagaaccttcccaaccttcaatatctgtaagaactcatgtagtttggtacccccactatgattaaatagtgcaagcctattttactaaaaggcctacttgatactctggggagcaattacttttgatcaaggatggtggtggggggcagaagtggaggtggagagatacttggtgatggattttagtttaatgagcaaattctactaacataattgtatcttgttttcatttgcaaaaacagacataagaaatgccatttgcattawtgggacggtcacatggacctcgtacagaactcagtcataatttagtgttaatgagatacagccaaaatttctgctagcatttagcttgtgaccttgacttcaaagccattgtctctcttattctgcatatatgcatttttcccttgataaatatcagcattttattttgtttattttgtatgttttcgttaataacacacatggtattttatcagcagagattccta

SEQ ID NO: 934989 - DNA, 721 bp, Homo sapiens
aacaaataccaagagcagtttgttagctcacatgacaaggaattcagaggcaggtgattctgtgacacgttcagtagatgcgcagtctcagggctctggattctgcatgtgtcttctcactacttcctctccgggttgcagaatggctgccgtagctgccrccaccactgtgttctcaggagacaagagtgttcaaggcagcaaaggaaaggatgggacatacgaggtcactgcttctcatactttcccctctttttatcagaacagtttttccattttgtttcattagaactggggtcacgggctttagaggtcacttgccatgttgtttgtctgtccagtgccctttgaacatcacggctatgtctgaagaatttccagcctcatgaatcctatccctttagggttgaatgcatgagatttactcttccagtcttttttttttttttttttttttgagatggagtcttgctctgtcgcccaggctggagtgcagtggcacaatctcggcccactgcaagctccacctcccgggttcacgccattctcctgcctcagcctcctaagtagctgggactacaggcaccgctaccacacccggctaatttttgtatttttagtagagacagggtttcaccatgttggccagtctggtctcgaactcctggcctcaggtgatccacccacttcagcctcctaaagtgctgggattagaggtgtg

SEQ ID NO: 934990 - DNA, 789 bp, Homo sapiens
tctagcctctccacagagctactgggctctgggctggtactgggaagtgtctgcacagagtcttgtgacgcaattcatcttcaggtctctcagcaatggataccagcacctgcttcagtgaaggtaacaagggagtaaagtggactctgtgagggtccttggttacagttttttttagcgtgctgattcttgaatgcttgttgtgctagcagtgaagctgtcttgtggacagacgcaagacctctggttagccaggatgttacaggcggtggaattaactgttgttttctctcttcttggagcaggtttattcttgtattaattgctgtaatgacttgagttggttggcctccagtcaggaggtggcactttcaagagcgcattagtggtagtataggggtatgggagctagctctaagatcaccmgaataaatatttgaatttctcagatgatgggcagggccatagaactcccaagagattatgtcttgtgtcttcagctaccagagcgggtagagaaagaccattaggtgggggcagggttaggtgtgtttgagctcagactctccttgggtgaggcttgctgcagccactgtgggggatgagggtgtggttctcagcctaatggagttatgttcctggggggattatggctgcctctcctgcatcatagagatcaccagggaagtaggtgaaagctggcagtgacaggactcactcagttcccatgtagccagcaaggccagtctcactcccaccatacccaccaacagcactgagtttatatcc

SEQ ID NO: 934991 - DNA, 593 bp, Homo sapiens
gctctgtaggcagcagagaaattcagaaatgagcaatgtgtctcccgtagtaggtctaaaagaaaagagaaaatagggaaggtgaagaaataatggaaactccattcccaaaaggaaggaaagcagttcctcttgacaactctaattggggccctaatgatgctacagatgaatggaaaaggaaacattttttaatgtgcatatttaaggtcacacctgcaactatgggcagcacattcaacaagtgccaggacccagatctagtgccagaaaaacttggactaaacctcttaattactctaaactgttcatgatagatcaaaagccagatgagaatcctmtagccttcttggaaagactgagagaggcactaataaagcacaacaataatccataaactctttagcctcagtagtaatacagaatagacaggccctagatgtccttacagccaaaggagggggacctgggagtcttaaatgaaaaatgctgcttccagatcaacacctctagtcaagtagaagaaaacctacagttgcttaaagatcaagttaaaatcaattacagattaaaagaaaatgcaggctccagcc

SEQ ID NO: 934992 - DNA, 770 bp, Homo sapiens
gtaaacgcagatttggttcttggtgagggctctcttcctggcttgcagatggcctcattcttgctatatcctcacatgacagagagagggagagcttgtgtctcttcctctcctataaggaccctgatcccattataagagtttcaccttcattacctcaaataaacctgattacctccgaaaggcctcatctccaaatagcatcacaatgaggcttggggcttcaaaatatgaatttcagcgggggacaaaacttggtttataacacatggtgatccactgttaaattctgtcctagaagacaaaacaaggactaagaggtctctagatttgtgcttccctcagagccacgaatactggaggtacattttcgcccattaactgaactgctcatgtagcatttgtagttccaagagatatgaatcattgttagacgcttgaagtgcctttggagcaaacgttccataaattttcaaactgcggttttattcaaaatgacatgtcttacatgtattatgaactttatacttcctggaatygctctacaaaggttatttaatttgatcctccgaatagctttatccacagtcagcagataagaaaattgaggccaggcatgatggttcacacctgtaatcccagcactttgggaggctgaggcaggaggactgcttgaggctagaagttagagaccagcctgggcaacataatgagacctgtctctacaaaaaaatgaaagaaaattagccaggcatgatggcacacacctg

SEQ ID NO: 934993 - DNA, 710 bp, Homo sapiens
cctgagtctagtagggacttggagaacctttatgtctagctaagggttgtaaatacaccaatcagcacactctatctagctcaaggtttgtaaacacaccaatcagcaccttgtgtctagctcagggtttgtggatgcaccaatcggcactctgtatctagctaatctggtggggacttggaaaatctttatgtctagccragggattgtaaatacattaatcggcactctgtatctagctcaaggtttgtaaatgcaccaatcagcactctgtgtctagctcagggtttgtaactacaccaatcagcactctgtatctggctaatctagtggggagggggagaacttttgtgtctagctcagggattgtaaacacacctatcagcaccctgtcaaaacggaccaatcagctctctgtaaaacagaccaattggctctctgtaaaatggaccaatcagcaggatgtgggtggggccagataagagaataaaagcaggctgcccctgccagcagtggcaacctgcttgggtccccttctacactgtgaaggctttgttttttcactctttgcaataaatcttgttgctgctcactctttgggtccacactgcctttaggagctgtaacactcatcatgaaggtttacagcttcacttctgaagccagcaagaccatgaacccaccagaaggaaaaaactccgaacacaccc

SEQ ID NO: 934994 - DNA, 710 bp, Homo sapiens
cctgagtctagtagggacttggagaacctttatgtctagctaagggttgtaaatacaccaatcagcacactctatctagctcaaggtttgtaaacacaccaatcagcaccttgtgtctagctcagggtttgtggatgcaccaatcggcactctgtatctagctaatctggtggggacttggaaaatctttatgtctagccgagggattgtaaatacattaatcggcactctgtatctagctcaaggtttgtaaatgcaccaatcagcactctgtgtctagctcagggtttgtaactacaccaatcagcactctgtatctrgctaatctagtggggagggggagaacttttgtgtctagctcagggattgtaaacacacctatcagcaccctgtcaaaacggaccaatcagctctctgtaaaacagaccaattggctctctgtaaaatggaccaatcagcaggatgtgggtggggccagataagagaataaaagcaggctgcccctgccagcagtggcaacctgcttgggtccccttctacactgtgaaggctttgttttttcactctttgcaataaatcttgttgctgctcactctttgggtccacactgcctttaggagctgtaacactcatcatgaaggtttacagcttcacttctgaagccagcaagaccatgaacccaccagaaggaaaaaactccgaacacaccc

SEQ ID NO: 934995 - DNA, 718 bp, Homo sapiens
ttcaacatacaccaagtttaaaatgttgcctcaggcagggtgttggtggctcacgcctgtaatcctagcacttggaaggccaagggcaaggcgggaggatcacttgagcccaggagttcacgaccagcctgggcaacatggctggcaacatgaccccgtgtctattaaaaaaaaataagtaaataaaggccgaggcgggtggatcacttgaggtcaggaattcgaaatctgcctgaccaacatggtgaaaycccatctctacttaaaacacaaaaattagcccggagtggtggcacgctcctgtaatcccagctactcgggaggctgaggcaggagaatcgcttgaacctgggaggcagaggttgcagtgagccgagagcgccccactgcacttcagcctgggcaacagagcgagactgagtctcaaacaaaacaaaaagaaaaaaaaaaattagccgggcgtggtggcgggcgcctgcaatcccagctactcgggaggctgaggctgagaatcgcttgaagccgggaggcacaggttgcagtgagctgagatctcgccactgcactccagcctgggcgacagaggcagatcttgtctcaaaaaaattaaaataaaataaaatgttgcctttaaactttttagaaacggatgccacaataaccgctcctgcaggcagaatttagctctggacccctggcctgggtgccagttgtgtgt

SEQ ID NO: 934996 - DNA, 744 bp, Homo sapiens
ctcttcccttaaattaggttcccatcccagtgattgccatcttattaaatgacatcaccattcacccagttgctcaggtccaaatccatcagcaaaccccactaagtctattgtaaaaatactacttgaatttgactacatctcattaccttcattcctgtcatcctaatcccttgtactatatcaataatatctatcacataaactgaaaaaaataatatatatatatatagctttctaactgttgggcatgattttgttatctccctctcccctatatattctccacatagtagcccaactatccatttaaattttaagttagatcacattgctgtcttgaccaaaaccctaaatggtttcccagcaatcttaaaacaaaacacaaacttattgctatgctctgccatgccctgtatgatttggctcttggctatctctctgactatatcttttgccgttctccctctgtcctgccttctcagacacaatggcgtccttattattccaaaaaatattcaaaatttggcttgtatctcaaggcctttgcccatgcttttcctgcttcttagggtgctyatttctagatgtcctcatccattttgtgttgctataaaggatgacctgaggctcggtaataaaaattaaataaagaaaaaaaaggtttatttggtgcagaattctgaggccagaaagttcaagattggacttctgcatctgagcagggccttaggctgcccccac

SEQ ID NO: 934997 - DNA, 633 bp, Homo sapiens
cttgaggtccacaaaaactcacccccatggactaaagggctgtgggcttctaaataaacttgaaatgtagtgtagtctgaaggactcttaggcgagtcttagtgccgaactggcccagagacagtggactgctggctacgtgacccacaaagacaccagttggggtcggtaagggagtgctggcatcactcctsccctaacaacgctgtccagctcatggctccaaaagagactctttcctttccattgaggagaggagagggatgaggaaagaggacttttgatatagtttggctgtgtccccacccaaatctcatcttgaattataactcccacaattcccacatgtcattggaagaacccagtgagaggtgattgaattttgggggtgggtctttcctgtgatagttcttgtgatagtgaatgagtctgatgagatctgatggttttaaaaagaggagttcccctgcataagttcgctttgcctgccaccatccatgtaagatgtgacttgctcttccctgccttctgccagggttgtgaggcttccccagccatgtggaactgtaagtccaattaaacctttttattttgtaaattgcccagtcttgggtatgtctttatcagcagtgt

SEQ ID NO: 934998 - DNA, 633 bp, Homo sapiens
cttgaggtccacaaaaactcacccccatggactaaagggctgtgggcttctaaataaacttgaaatgtagtgtagtctgaaggactcttaggcgagtcttagtgccgaactggcccagagacagtggactgctggctacgtgacccacaaagacaccagttggggtcggtaagggagtgctggcatcactcctcccctaacaasgctgtccagctcatggctccaaaagagactctttcctttccattgaggagaggagagggatgaggaaagaggacttttgatatagtttggctgtgtccccacccaaatctcatcttgaattataactcccacaattcccacatgtcattggaagaacccagtgagaggtgattgaattttgggggtgggtctttcctgtgatagttcttgtgatagtgaatgagtctgatgagatctgatggttttaaaaagaggagttcccctgcataagttcgctttgcctgccaccatccatgtaagatgtgacttgctcttccctgccttctgccagggttgtgaggcttccccagccatgtggaactgtaagtccaattaaacctttttattttgtaaattgcccagtcttgggtatgtctttatcagcagtgt

SEQ ID NO: 934999 - DNA, 536 bp, Homo sapiens
ccacgcccagctaatttttttatttttatttttattttttatttatttattttttttagagacagggtcttgccattttgcccaggctggtctcgaactcctgggctcaagcaatcctcccacttcagcctctcaaagtgctgkaattatctcaaaggcacacgagcccctgtgcccggccaatactttcttttctatactattttattccatatttttaaatgctggtcatggtccactaaattgaattagccacccactaatggactgcaactgaaaaatagtggtctataactctgtgagcagtacctgcttgtcttgatatttcatttctatccagagagttttcaggtaggcaatttgtttgggatcttacactttgattattttgagcctcctatatctaagatccaagacacatagctattttgttgggactattgggattgagttattgctattattactagtagtagtgtttcagttataaataggcccatgagagatttctggttacaaagtcaatggggatacaa

SEQ ID NO: 935000 - DNA, 684 bp, Homo sapiens
actaactggtcgtggccatatgactaatcttaccaattgaatgcattactctgggatagagttttatataaaaggatgtcctcttttttctctctttctgcatttgagaaatgatgcagattactaagaagcccccaggcatggtrgaattacaagacagaagggtctccttggtctccaaatcaccactaagaagaaagatattctctgatcaggttcacgtgcacttggttaataggaaagcaaaaacaacccattgaaatgcaagagtttgtttgttacagcagctatcatgagatccccttactagcatgacattcatttactagtgcagtgacatcagtgtaacaaaagcatgctttacagctctttctcaaaactcttctgggcaaactcagacaccccaactagttctctcgaagttatggcctagttggatcattctataatagtcctgggtcagacccaaaacacaaatgctgacagggctgagcttgaggtgggaggcttgctaccaaatgaccttgcctttgagaaacctctggatagagagagaaagggagtgggggaaggacactgggacagcaagcatttgaagatgtttctgttgccttttgatcccgttgagcacagtttgaatttgtcatttaatgtttactgccaacgtaataaagagtgttaata

SEQ ID NO: 935001 - DNA, 665 bp, Homo sapiens
ccatgttgccactctatcacccaaattaaatcactgttagttctgagagcagcttgactggattaattccctgtcaatgcattccccacccatttgctggagggcttaaaaaatgtaaatttgggcctgcaaggtagctcatgcctgtaatcccaaaacttttggaggccgaggtgggcggatcacctgaggtcaggggttcgagaccagcctggccaacatggtgaaaccccgtttctactaaaaatacaaaacatgagccgggcatggtggtgcgtgcctgtaatcccagctacttggggggctgaggcaggagaatagcttgaacccaggaggcagaggttgcagtgagccgagattgcgccactgcactccagcaggggcaacaagggtgaaaatccgtctcaaataaataaatatataaataaataaataaataaataawtaattaaataagcaaatttgattgtgtcactcccttgcttgaaaggctcccttggctagacaggtgcttggctatatatcctagaggtttctcagagtaattcttaataacaccctcttgctctctccaatgtgtctccattaggaatataaagttatatggtcaccctacttaaggggctcagagtgatcttaccacttcccctcctgaccccatcaca

SEQ ID NO: 935002 - DNA, 581 bp, Homo sapiens
aatacattaacaatacatcttaaataattagaaaagcaagagcaaaccaaatccaaaattagtggaaaaaaaaataaagatcagagcataaataaacaaaagtgaaactaaaaaaaaaaaaaaaaaacacaggctgggcatggtggcttatgcctgtaatcctagcactttgggaggccaatgagggctgaccacttcagctcaggagttcragaccagcctggccaatatggtgaaacacaatctctactaaaaacacaaaaattagctgggcatggtgatgtgcacctgtaatcccagttatttaagaggcagaggcatgagaatcacttgaaccccgaaggcagaggttagagtgagctgagattgtgccattgcactccagcctgggtgacagagacagagcaagtctctgtctcaaaaaaaaaaaaaaaaaaaagaataaatgaacaaataaatgaaatgaaaaactgattttttttgaaaagataaacaaactgagaaacttttatcctgctaagaaaaaagggagaaaactaaaataaatgaaatcagagattttaaaaagagatgttacaact

SEQ ID NO: 935003 - DNA, 581 bp, Homo sapiens
aatacattaacaatacatcttaaataattagaaaagcaagagcaaaccaaatccaaaattagtggaaaaaaaaataaagatcagagcataaataaacaaaagtgaaactaaaaaaaaaaaaaaaaaacacaggctgggcatggtggcttatgcctgtaatcctagcactttgggaggccaatgagggctgaccacttcagctcaggagttcaagaccagcctggccaatatggtgaaacacaatctctactaaaaacacaaaaattagctgggcatggtgatgtgcacctgtaatcccagttatttaagaggcagaggcatgagaatcacttgraccccgaaggcagaggttagagtgagctgagattgtgccattgcactccagcctgggtgacagagacagagcaagtctctgtctcaaaaaaaaaaaaaaaaaaaagaataaatgaacaaataaatgaaatgaaaaactgattttttttgaaaagataaacaaactgagaaacttttatcctgctaagaaaaaagggagaaaactaaaataaatgaaatcagagattttaaaaagagatgttacaact

SEQ ID NO: 935004 - DNA, 756 bp, Homo sapiens; identical to SEQ ID NO: 927903

SEQ ID NO: 935005 - DNA, 706 bp, Homo sapiens
gagtggggacttgaagaacttttctgtctagctaagggattgtaaacacaccaatcagtgctctgtgtctagctaaaggtgtgtaaatgcaccaatcagcactctgtaaaaatgcaccaatcagtgctctgtgtctagctaaaggtttgtaaacgcaccaatcagaactctgtaaaatggaccaattagtgctctgtaaaatgggccaatcaacaggacgtgggtggggccaaataagggaataaaagctggccacccgagccagcagcggcaacctgcttcggtccccttccatgctgtggaagctttgttcttttgctcttcrcaataaatcttgctgctgctcactctttgggttcgcactacctttatgaagccgcgagggtctgcggcttcagtcctgaagtcagcgagaccatgaacccaccgggagaaacaaacaactctggatgtgccacctttaagagctgtgacactcactgtgaaggtctgtagcttcactcctgaagtcagcaagaccacaaacccactggaaggaaggaactctggacacatctgaacatctgaaggaacaaactccagatacaccatctttaagagctgtaacactcactgcgaacatctgcagcttcattcttgaagtcagcgagaccaagaatccaccggaaggaataaattctggacacattgtgagagtagaggagaa

SEQ ID NO: 935006 - DNA, 589 bp, Homo sapiens
atttctatgtttagtattttcagttactctccattttctcctaaactctttccaaaaaggcttgcatctctttcacagaaactgctcttgtcacattggcaatgatggccacattgcaaaatccagtagtcaatgctcagtcttcatcttgtcacagttgattttttccctatcctggaaacagatttatttatgtacctatcatgacaccaaaccctcatggcttccttcctacattacaggctgcttatgctcagtatctttttcttattcctttttatctttccaatttcttaattttgaagtgcctccaaactcaattaytgggcctcttctctgttcacccaccctcttgctaatcacacctagtgacatggtttaaacatagtttatatgctgacaactcccaattttttttctttgtagtctgtgttcccttttgagctctctggacttgtatatacaattgctttctagcatctctagttgggtatctaatatatatctcaaacttaaccaggccaaaaatgtactcctgatgtcccttctttatccagacttcttcccatctcagttaatagatgcacca

SEQ ID NO: 935007 - DNA, 778 bp, Homo sapiens
  misc_feature 512: n = A,T,C or G
gcatgatatgctgcatgcattatgcattcattttaagacttacaatatagtagcatggatttatgaatgacatggatagcaaattatttccaatctaaattgctctgttcatttttgggcaaaataattacttgctaaagcaatatttttctgacatgttacaagcctgggagtggtttggaaggctttgaatgaatgctaagtataaagatttttggtacaacttgattttactgcttctttccagagactgccagtggattagtttgatcctatgtgaggaaaaaagctgctttgtgaaaccagtaattccataagaactagtggtttaaagataattttaaatttggggcttagcccgaagatctaggcattgaaaaccccttcccttctgtaataatgaatttaaaatatgttggtgatttaaagtttagtttgtacattgaattctgtttgggcttctttaacttttgtgtgaatattagaatccagtgagtttgttaaaaaatatntgcttattctatcttttcatatgacatatactagtagaagacagctattattttgaaagcagcakatatatttaacattcttatgattgtacagatgtggactggcatgagtattttggatcagaaaaggcatttgtcaaatgtagatttttagttcattatgaaaacatactgttttattggtgcaattaacaaaagtagttcagagaaaagattcaaagcatttctgaaatgatgaagcttctgttcttgagacagtcctttat

SEQ ID NO: 935008 - DNA, 624 bp, Homo sapiens
gatgtagctacttctagatcatgccagtacatgataccattccattaaaaaccaaaacaaaacaaaaaaaacaaaaacacatgcttggtaacagccatttttagacctgggctaaaaagctaaaaatgttgattgtaagataataggcagaaagcatagttgttcatttcagaattcattagaccactacattggatattttggtttaaactttttaaagtaagtagttcaagagaaacagactttccctccatgatatctcattgtgaattgcatttgcctgatgatctcgctctcactgaggagaggaaactctcaccaccactggctcctatcacycagcttgtccgggtcttgcctgactgactcctgttacttttggtaaagtcacggctttgctttctcgatttccacagtacacagttttttgttccttttggtgagatggaagggaatggctctctgaagtacccgagatgggaagcacatttctctgtggtgcatggtcttgaactgtgtccatctggttacccccgtgtggtcatgttccttgttcataaccctcttgaagtgcaatgccctgggcactctgcctctcctgctgttgtctaagaaggcattagt

SEQ ID NO: 935009 - DNA, 624 bp, Homo sapiens
gatgtagctacttctagatcatgccagtacatgataccattccattaaaaaccaaaacaaaacaaaaaaaacaaaaacacatgcttggtaacagccatttttagacctgggctaaaaagctaaaaatgttgattgtaagataataggcagaaagcatagttgttcatttcagaattcattagaccactacattggatattttggtttaaactttttaaagtaagtagttcaagagaaacagactttccctccatgatatctcattgtgaattgcatttgcctgatgatctcgctctcactgaggagaggaaactctcaccaccactggctcctatcacccagcttgtccgggtcttgcctgactgactcctgttacttttggtaaagtcacrgctttgctttctcgatttccacagtacacagttttttgttccttttggtgagatggaagggaatggctctctgaagtacccgagatgggaagcacatttctctgtggtgcatggtcttgaactgtgtccatctggttacccccgtgtggtcatgttccttgttcataaccctcttgaagtgcaatgccctgggcactctgcctctcctgctgttgtctaagaaggcattagt

SEQ ID NO: 935010 - DNA, 624 bp, Homo sapiens
gatgtagctacttctagatcatgccagtacatgataccattccattaaaaaccaaaacaaaacaaaaaaaacaaaaacacatgcttggtaacagccatttttagacctgggctaaaaagctaaaaatgttgattgtaagataataggcagaaagcatagttgttcatttcagaattcattagaccactacattggatattttggtttaaactttttaaagtaagtagttcaagagaaacagactttccctccatgatatctcattgtgaattgcatttgcctgatgatctcgctctcactgaggagaggaaactctcaccaccactggctcctatcacccagcttgtccgggtcttgcctgactgactcctgttacttttggtaaagtcacggctttgctttctcgatttccacagtacacagttttytgttccttttggtgagatggaagggaatggctctctgaagtacccgagatgggaagcacatttctctgtggtgcatggtcttgaactgtgtccatctggttacccccgtgtggtcatgttccttgttcataaccctcttgaagtgcaatgccctgggcactctgcctctcctgctgttgtctaagaaggcattagt

SEQ ID NO: 935011 - DNA, 581 bp, Homo sapiens
tcttttgggtctgtcttttgcttaggataatgttttcaaatttcatccatatagtagcatgcatcagtcctttatcatattacccaataatagtgtggatataacacattttatctatcctttcatcagttgatagacatttgagttgtttccacttttttctttaatttttagttgacacgtaataattgtacatatttatgggatgcagagtagtatttccatatgtgtataccatgtataataattcaggggaattagcacatccatcacctcaaacttggatcatttctttgtgttgtgaacattaaaaatcctctcttctagctttttgaaaatgtacaataaattctggttaaccacatcccccctgtgatgctgcagaacgcctgaactcattcctcttatccaacggyaattccgtaattgttaatcagcatctccccatcctccctgccccgccacccttccccgcctctaatacccacgattgtactctactttttcttagctctctcatgcatgagaacatgtggtatttatcattctgtgcttctcttattttatttaacatcatgtcc

SEQ ID NO: 935012 - DNA, 568 bp, Homo sapiens
atatccatacaacggaatatagtttagcaataaaaagaaataagctatcaaaccataaaagaacaagaagaatcttaaatgcatatcgccaggtgaaagaggccaatctaaaatcgctgtatactgtatgattccaagcacctgacatcctggaaaaggcaaaactttggagacagaaaaagaacagtggttgyagaggttttggggagggagggaggaatgaaaaggtggaacacagcagatttttagggtagtaaaaaactattctctgacactataatggtggttacatgtcattacacattggtcaaaatccatagaatgtacagtgtaaagagtgaagcctaatgtaaactatggactttaattaatgtctcaatattggctcataagttacaacaaatataccacaccaacacaagattttaatgataggagaaattgtgtgtatgtggtgggtggagaggaagtatatgggaagtctccgatctttttttttctttttttttaagttctgggatacatgaatacacgtgctgagcgtgcaggtttgttacataggtataca

SEQ ID NO: 935013 - DNA, 645 bp, Homo sapiens
ttatatataaacatttttactgacattgaatttttcaaagggaaatttagtttttagaacagttgtagatctacaaaaatattgcaaagggaatacaaaagttgccatatcccccatactcagtttcacctattattaacatcttacactactayggcacatttgttatagttaatgaaacagtattaatacattattaaagtccatagcttattcagatttccccagttttttcctactgtctttttttctgtgaatcttattaaaatactacgatatttagttgtcatgtctccttaagttcctcttggctgttacagtttctcagattttccttgtttttgacaaccttgacagttttaagaagtactggttaagtattttgtagaatgtccttcgatggggatttgtttgatgctttttttatgaatagactgattttatcaggataatttttactattactgaaagacttttggacttctggcatattagttcgtgggggaacagcttatagtctgtaattaatgaagaaaaaatcatttatttagggcaggggagtgttgaagattggactgatatgtggataggtcccagtgatttggcaggtatgtaagacaaaaatttcagaattcgttctgaaaa

SEQ ID NO: 935014 - DNA, 521 bp, Homo sapiens
atcaaaaattccttccatccataaaattgcctaagaaaggaagttttaagaaagaaaaggacagggccaccagttaacgggatatgtgattacttaaacacacttgacaaaagagaataatgaattttttttaagtaaaaaattagagagattaaaaaagtatttttagccttatgtttacacmcacacacacacacacacacacacacacacactttaaattgtggtgatttctgagcactaataaattccctttaaaaattctgttaggttatgttcaaggaaataatgtttttttctgaaattgtaactgatgaatattgtttgagaatttcctcagtgaggcaatcatttaaatggaaaacatttgtgataggtcctggggaaaacccattctttccccctaaaactacctgagattggctgttaatcatttattttgctgtccatacttatgagtaataaggaagaataaaatgtcatgtttgaaaaaggaacaggtattcgttttctttaaaata

SEQ ID NO: 935015 - DNA, 654 bp, Homo sapiens
aacatcgaaggatgtttttgtctttaaaatgttatcaagacatgcattagttatttttgatttagtgctttggatttcttcaggacaatgtgcttttcctttgtcactaaagtactttgatccagtaatcttgagaccatgatagagtacatgcatgacaatggcatacgtgattcaatcctttgggaagaagatgtagtcatatcccaagtgagtgtgaaattgtattcctccctctctcactttagtatgagacaaatatgcttgctgcctcatttttaattgaaaacttttagaatatctagcaaatgttttgaaagagaatgcatagagacccctaaataaaatttggagagtctgtagagggaaaatgttatacagtacaacgttgtggggatttggaaaagccctaagacctttcttttcttattccttttcagtttagaaggctttattctctcttttaggacaaytgagtgaaaaaaacttacggatgattttaacaggtcacaaatatgtttcctggttttgaacaagggcgtctatattatctcaaaattgtgttaaagatggagcatttagcaaccaggaagacaatgagtgtaaaacacaaaattaactcatcaagttactgtaattttctctcttcttgtc

SEQ ID NO: 935016 - DNA, 555 bp, Homo sapiens
aggggcaaaggtaaagttcacatcattacatcagagggtacaagccccaagcttcagtggcttccaggttgtgttgaacctgcattcacagaaggcaagagtttgggatcctccacttagatttcagtggatgtatgaaaacgtttggatgtccaggcagaagtctgctgcaggactggagccctcatggagaamctctactaggtcagggcagtgggagaatgtggggttggagctcccacacagagtccccactggggcactccctagtggagctatgagaagattaccaccatcctccagacgccagaatggaagatctaccaacagcttgcaccatgcacctggaaaaggcataggcattcaacaacaacccatgaaagcaactgtggggctgtaccatgaagagccacaagggcagagctgccaaggctgtaggagcccaccccttgtatcagcatgccctagatgcaagacatggagtcaaaggaaatcatttcagaattttaggattaagtgactgccctgtggggtttctaactcgtatggggcctg

SEQ ID NO: 935017 - DNA, 617 bp, Homo sapiens
gtatttttagtagatatggagtttctccatgttggtcaggctggtcttgaactcccgatctcaggtaatccgcccgcctcagcctctcaaagtgctcggattacaattaatatttttaatagccattaaaatgtctcattaaggctttttagcttccttagttccaaaacattcaaaggccacagaaaaaattaaggattatttgactgcaggtaaaagcataagtctaggggacatggaaaattataatctccaaacatgccacaattgtaaaaatattaataytctaaaacccacttttaaagatttaatgccaaaggacttgtctaaatacagcactaaacacagtgtctcacccataattggctttcagtaaatatttgtaaatttttctctgcctgaaaaaaactcttaaaatagccttttttccttacaggagtaactctaaaatgcaagtaaagcttatgaatagatcaagcaatttagaccaccacgttaatttctttctagtgaaatatttttaaatctttggtttaaaagtgataaacagtaatttaattgtggatatgacaagaagtggacaggacttcctctaatatctcaactcccaaagcaca

SEQ ID NO: 935018 - DNA, 596 bp, Homo sapiens
cagggatgattaaaaaaaaaaaaaaagaactttgctcagtgaatagcacagtactaaataagataaagtttttactttaccctaagagatgcagcatagcataatggttaaatttacgggcttaaggcaaaaactactgtcatggtttgaatatttgtcccctctgaaactcatgttaaaaacttaattaccaatgtggcgatgttaaaaggtgatgcctttgagaggtgattgggtcataagagctctgctttcgtaagtggattaatccatttatggattaacggattaataggttaatggattaatgggttatcacaggagtgggactggtgactttattagaagagraaaagagaccagagttagtgttcagcccccttaccatctgatgccctgtgccacctcaggactctgcagcgagtcctcattggcaagagggccctcaccagattcaccccccgaccttggacttcacagttttcattcagaactgtaagaaatacattttgtttctttataaccagtttcaggaattctattaaaagcaacagaaaatgaactaagataactatttttattaaaaacctggttct

SEQ ID NO: 935019 - DNA, 624 bp, Homo sapiens
ggatctaagccttgttcaatattctaacatcaaccaatgtattctacaatattaacaggtaaaaataaaaatcacatgaccagctaaattcacacacacaataaaattcaacacctattataataaaaataaaacaacagaaaattaaaaatcatgagaaacatcgtccacttgatgaagtacaactacaaaatctttaagttaaataatcgcacttaatggtgatagactgaatgcttttccattagaataggaagatggtaaatatgtctgcactccccgctactattcatcttagtactggaaatcctaggcacccaaataaagcaagaaagggaataaaaggcatagagatttgcaagaaagatacawaactgtccttacttctcaggtgatgtgatagtctatgcaggatatctcaaagaacctaccaaaacaaactctcaaactgataagtgagttcaacaaagtcaaagtgttcataataaacatacaaaaataaaccagagttatgtatactaccaattaacatacacagaatgaaattttaaaagtacaccaaaatttagaatcactaagaaaataaaatgcttaggaaaaaaactaacaaagaatgtacagaat

SEQ ID NO: 935020 - DNA, 721 bp, Homo sapiens
caaaaaaaataataatatagagagagcctctgtacgatttaccaagttcccttcaatggtaacatttggcaaaagtatagtagtatgtcaaaaccagaatacaatctactgatcttattactatttctccagttttacttgtagtcatttgtttgggtgtgtgcatttagttctgtacaattttatcataattataggattttgtatccaccaccacagtcragatgttaaaccattcaattgcctcgagattcctttgcacggctcatttatcaccaagcacaccttcctcatgctcaccttgctgcctcccctaagccctagacataacgtatctattcctcatttttttaaatgctgtcacttcacaaagttaaataaagagaatcacacagtatgtaacatttttgatttggcatttttgtactcagaaaaatttcatggagattcatccagttgttggatgtatcagtagtctattcctttttactgctgatcagtatttaatggtatacatgtaacagtttgtttaaccattggcctgtttaagagcatcttgactttccagttcttggtgacaacaaataaaactgctatgaacattcacatactgtttttgtgtgtgcataagtttttatttcattttattctcaagagagctactgctgggttgtgtgttaattgcatgattaattttataagaaattgagaaaccattttt

SEQ ID NO: 935021 - DNA, 625 bp, Homo sapiens
tggtatactattgtggtcttcatttgcatttccttaatggctagtgatactggacatcgtttcaggtgctcattagtcatctgaatatccccttaggtgaaatgtctctacatatcttttgcctattttctaactggattatttctttaatattgagtttcttcctataaccttgatctgactcctttgctacatatgtggcttgcaaatattttcacttagttggtagctggtcttcatcctcttagcagggttgtttgaagaaaaaaaaaattttttttttttgagacggagtcttgctgtgtcgcccaggctggagtgcagtggcgcratctcggctcactgcaagctctgcctcccaggttcatgccattctcctgccttagcctcccgagtagctgggactacaggtgcccaccaccacgcccggctttttgtaattttagtagagatggggtttcaccgtgttagccaggatgttctcgatctcctgacttcgtgatccacccgcctcggcctcctaaagtgctgggtttacaggcttgagccaccgcacctagcctaaaaagttttaattttaataaatttcaattaatatgaacacagatatctcttcattttttaa

SEQ ID NO: 935022 - DNA, 730 bp, Homo sapiens
tttctgatggctgtgagttgtggggtgaaagtcctggggaggggagcggttctctaattccagctactcgggtggctgaggcaggagaatcgcttgaacccaggaggtggaggttgcggtgagcggagatcgcaccactgcactccagcctgggcaacaagagcgaaactcagtctcaaaaaaaaaaaaaaaaaaaaaagttaagatccataagatccagccattctactcctagaggaaaaaatatagatgtccatgtcagggaggggaacaacacacactgggcctgttgtgggggcaggaggagggagagccttaggacaaatagctaatgcatgcgggtcttaaaacctagatgacgggttgataggtgcagcaaaccaccatggcacatgtttacctgtgtaacaaacctgcacatcctgcacatgtatcctggaacttaaaattaaattaaattaaatgttaacaatgtatagatagatgtccatgtaaagacttstgcatagatgttcagaagagctgtatttgtaatagacccaagttggaaacagcccagatgtccttcagcaggtgaaagaatgaacacactggcatatccacaccagggaataccactcggcaaggaaaaagagggaatggcggacacagtcaacaacatggatcacactcagaggtataatctaagtgaaagaggtcagatacaaaaggctgttgtatgattgccttt

SEQ ID NO: 935023 - DNA, 517 bp, Homo sapiens
gatcacgctcctgtgcaaacatctgattggctgcaaaaagcaaccaatcagaggctaagatgaagttgcaaagttgcatttctatgcaaaggaagactcagcggcccggcaatcagtctgactggttgcggaaaaccaatttcccatctgtggtgcagaaaaggtgggggttttgcacagggagtagcctctggtccttttgttacttagtcctggaaagttaggtktttcctttcaattcagttctaggaagtcggcttgaaacggccttaggttccccgcctccaaaccctattctcctgcctcaccagcacctcagaaggtgaccttcactggaaacaggtttgctgaagatgtgattagttaaaataagatgtcctgctgcactagggtgtgcccttaatccagtgtgactgtgtccttaggagagagacacacagagacacatgaggacagaagcaagcctgaggtgccacggatgccacagacgtcacagacgccatggactgtcagccac

SEQ ID NO: 935024 - DNA, 517 bp, Homo sapiens
gatcacgctcctgtgcaaacatctgattggctgcaaaaagcaaccaatcagaggctaagatgaagttgcaaagttgcatttctatgcaaaggaagactcagcggcccggcaatcagtctgactggttgcggaaaaccaatttcccatctgtggtgcagaaaaggtgggggttttgcacagggagtagcctctggtccttttgttacttagtcctggaaagttaggtgtttcctttcaattyagttctaggaagtcggcttgaaacggccttaggttccccgcctccaaaccctattctcctgcctcaccagcacctcagaaggtgaccttcactggaaacaggtttgctgaagatgtgattagttaaaataagatgtcctgctgcactagggtgtgcccttaatccagtgtgactgtgtccttaggagagagacacacagagacacatgaggacagaagcaagcctgaggtgccacggatgccacagacgtcacagacgccatggactgtcagccac

SEQ ID NO: 935025 - DNA, 517 bp, Homo sapiens
gatcacgctcctgtgcaaacatctgattggctgcaaaaagcaaccaatcagaggctaagatgaagttgcaaagttgcatttctatgcaaaggaagactcagcggcccggcaatcagtctgactggttgcggaaaaccaatttcccatctgtggtgcagaaaaggtgggggttttgcacagggagtagcctctggtccttttgttacttagtcctggaaagttaggtgtttcctttcaattcagttctaggaagtcggcttgaaacggccttaggttcccygcctccaaaccctattctcctgcctcaccagcacctcagaaggtgaccttcactggaaacaggtttgctgaagatgtgattagttaaaataagatgtcctgctgcactagggtgtgcccttaatccagtgtgactgtgtccttaggagagagacacacagagacacatgaggacagaagcaagcctgaggtgccacggatgccacagacgtcacagacgccatggactgtcagccac

SEQ ID NO: 935026 - DNA, 517 bp, Homo sapiens
gatcacgctcctgtgcaaacatctgattggctgcaaaaagcaaccaatcagaggctaagatgaagttgcaaagttgcatttctatgcaaaggaagactcagcggcccggcaatcagtctgactggttgcggaaaaccaatttcccatctgtggtgcagaaaaggtgggggttttgcacagggagtagcctctggtccttttgttacttagtcctggaaagttaggtgtttcctttcaattcagttctaggaagtcggcttgaaacggccttaggttccccgcctccaaaccctattctcctgcctcaccagcacctcagaaggtgaccttcactggaaacaggtttgctgaagatgtrattagttaaaataagatgtcctgctgcactagggtgtgcccttaatccagtgtgactgtgtccttaggagagagacacacagagacacatgaggacagaagcaagcctgaggtgccacggatgccacagacgtcacagacgccatggactgtcagccac

SEQ ID NO: 935027 - DNA, 626 bp, Homo sapiens
atactttctgctttaaagtgttttttttgttaaggtcctgatgggctgtgggccagggagcttgacagggcagagataaagatgctgcagttaatggggcattgctcttactctctggtgggctcagctccatttgccctcagagggaaaggtgagatagaataggagtgggacatggcttcttcttcacactctttttctttctgctttttttcttctcttcacgaaacccacaccaccacctctctgacactatacttgctaaccccaaggctttagtcacacacaaaaaaatagccatttttctgtgctctcataatgcttcaccatgccttctacttaaagaattccagaaactggccttaggaaatctaaacattgaattaagattgcagagtatcccaccttgggaatgaatgctgaacaagtgatttgcagccctgttaccactggccagaccaccaggtggcccaacsacaaggtgccccattactcaagataaccatggcaaccaaataatgctgacccacataccttacccctcaagtgttttgcccaacccagcctgtatatcttacctctgatgccaattcccgcacttttcctaatagaaaaaatccctacca

SEQ ID NO: 935028 - DNA, 710 bp, Homo sapiens
ctgagtgtttggcatgggcctagtgcacccgagtagctgaatttttattcaatatatttgattattaacagctttgttgagatgcacttcacattccatacgattgatacaccagtggcttttagtgtattcagagccgtgcagctatcagcattggttcatcttagaacatttcattacccccaaaatgaatgccacaccttttagccatgacccccaacctccccctgccctagacacccactagaatactttttgtctatgaatgtgcctattctaggamtatcatgtaaatgaaattctataatatatgactttttgtgactggtatctttcacttacaacttaccatggattttttgtttgtttgtttgtttgttgttgtttttgagacagagtctcactctgttgcccaggctggagtgcagtggcacaatcttggctcactgcaacctccgcctcctggttcaagcgattctcctgcctccctagtagctgggattacaggtacacgccaccacatccagctactttttgtatttttagtagagatgcggtttcacgatgttgaccaggttggtctcaaactcctgacctcaggtgatccacccatctcagcctcccaaagcgctgggcttacaggcgtgcagccgcgcctggccacttaacgtttttaacgttcatcggtgcatggcatgtgtcagtacttc

SEQ ID NO: 935029 - DNA, 571 bp, Homo sapiens
tatatctttcctgttgactaccaaatttaggtctgcaacctgacctttttccactgtgctttaaatatgattctccatctgcatactgatctcaattcctggctctctaacaaggattttaaaattcaaacacggcaaaatagaacaattgactctaccatatcgttgcaaatctgaccttactccagtcttccatatcttaacatggaattctttcagttaaaaytctttgagttaaaatcaaagtattaaatttttatcttaatgttttattctaacaaaaatgcataacataaagtttaccatagtaactatttctgaggtacggttctgtagtattaagtatattcactttgttgcacaactaatctccagaacattttcatctttcagaactgaaactctatacctcttaaacaactccccaagaggaaagatttattgacatatgtaacaatacagatgaatttctaaattatactgagagaagctaaacaaaaaagtacatactatatgacttcatttatataagattctaaaaatgcaaacttatccatagtgacagaaagca

SEQ ID NO: 935030 - DNA, 615 bp, Homo sapiens
tttaatttctttctcttgtctgattgctctggctaggacttccagtattctgttgaatagaagtgaatgtaggtgtccttgtcttattttagttcttagggggaatgctttcaactttttcccattcagtatgatgttggctttatgcttgtcatacagagtttttattactttgaggtatgttctttctgtgcctagtttgttraggtttttttttttatcatgaatggatgatggcttttatcaaatgctttttctgaatctagtgagatggtcatatagtttggttttaattctgtttttgtgatatattgcatttattgacttgtgtatgttaaaacatccctgcatccctgggatgaaacgtgcttgattatggtatattatctttttaatgtgatgttggattcgatgtgttagtattgtgttgagaatttttgtaccgatgttcatcagggaaattggtctatagctttctttttttttgtaatgtcctttcctagttttggtatcagagtgacactgacttgatagacttagttagggaggattccctttttctcactcttttggagtagtttcagtgggattggtactaattctcccttcaatatc

SEQ ID NO: 935031 - DNA, 615 bp, Homo sapiens
tttaatttctttctcttgtctgattgctctggctaggacttccagtattctgttgaatagaagtgaatgtaggtgtccttgtcttattttagttcttagggggaatgctttcaactttttcccattcagtatgatgttggctttatgcttgtcatacagagtttttattactttgaggtatgttctttctgtgcctagtttgttgaggtttttttttttatcatgaatggatgatggcttttatcaaatgctttttctgaatctagtgagatggtcatatagtttggttttaattctgtttttgtgatatattgcatttattgacttgtgtatgttaaaacatccctgcatccctgggatgaaacgtgcttgattatggtatattatctttttaatgtgatgttggattygatgtgttagtattgtgttgagaatttttgtaccgatgttcatcagggaaattggtctatagctttctttttttttgtaatgtcctttcctagttttggtatcagagtgacactgacttgatagacttagttagggaggattccctttttctcactcttttggagtagtttcagtgggattggtactaattctcccttcaatatc

SEQ ID NO: 935032 - DNA, 592 bp, Homo sapiens
acttcctggaaggcactgaccacattttcttttcctcttaaagcaaataaatgaattaaatggtttaaacacattttgccagcaaatagaaagattatttaatacttttgggtaaaaaaattttgtcctctaaatttagcagctttgcctgtatttctcmgacactcagaaggggttgcggggaagaagcctccaagaatatacttcagaaacatttttttccaaatgtattttgcctgaagtctcgggctaaaagaatcttcctcttcaagaaagggtcagtgtggaagcactctgctgctcacaggttcccaccttgatgatagaaggttctatagccacaaagctctccaagagaggccttgactcactgccattggagaggacaacaggaagtgtgcagccttttgcttttctaagaagataaacacagatagaacctctttgggtggcaagatagtttcattatgaaacttaccttctccataaagctgttgtagtaaattaatatgcatccattttaaaatgacataggaagtacttaacacttgtttgctaataactttagtgacgagagcagtatcatcattct

SEQ ID NO: 935033 - DNA, 592 bp, Homo sapiens
acttcctggaaggcactgaccacattttcttttcctcttaaagcaaataaatgaattaaatggtttaaacacattttgccagcaaatagaaagattatttaatacttttgggtaaaaaaattttgtcctctaaatttagcagctttgcctgtatttctcagacactmagaaggggttgcggggaagaagcctccaagaatatacttcagaaacatttttttccaaatgtattttgcctgaagtctcgggctaaaagaatcttcctcttcaagaaagggtcagtgtggaagcactctgctgctcacaggttcccaccttgatgatagaaggttctatagccacaaagctctccaagagaggccttgactcactgccattggagaggacaacaggaagtgtgcagccttttgcttttctaagaagataaacacagatagaacctctttgggtggcaagatagtttcattatgaaacttaccttctccataaagctgttgtagtaaattaatatgcatccattttaaaatgacataggaagtacttaacacttgtttgctaataactttagtgacgagagcagtatcatcattct

SEQ ID NO: 935034 - DNA, 592 bp, Homo sapiens
acttcctggaaggcactgaccacattttcttttcctcttaaagcaaataaatgaattaaatggtttaaacacattttgccagcaaatagaaagattatttaatacttttgggtaaaaaaattttgtcctctaaatttagcagctttgcctgtatttctcagacactcagaaggggttgcggggaagaagcctccaagaatatacttmagaaacatttttttccaaatgtattttgcctgaagtctcgggctaaaagaatcttcctcttcaagaaagggtcagtgtggaagcactctgctgctcacaggttcccaccttgatgatagaaggttctatagccacaaagctctccaagagaggccttgactcactgccattggagaggacaacaggaagtgtgcagccttttgcttttctaagaagataaacacagatagaacctctttgggtggcaagatagtttcattatgaaacttaccttctccataaagctgttgtagtaaattaatatgcatccattttaaaatgacataggaagtacttaacacttgtttgctaataactttagtgacgagagcagtatcatcattct

SEQ ID NO: 935035 - DNA, 788 bp, Homo sapiens
cactgcttcccagaacctgcctgcccttgtccggggctggggaagcacaggacatggctgaagtctagacttcagcaaaaggtagaactgagaaggaattgagagtctatgggatcccctgagcacacgcaaacgcacacagcaacaggccttcgaagcggggtcctagggcacatgcgctgggtgtgtctgtggcccagggtgacacagctcagcactctgggcaccccacccttccagctcagggcgcctgctgggggtgcctgcactgactctcccagtagtcgctcaggaacagttactaaaatggatcagcccctcagctttgtggaggtagggggacatcccctgacccctttttggtaggctctggccccaagctcagagaggtgtctccttctgtttctgcctctcttgccgggaagagaagctgcccactggcaagtgaggtccaggctgtccaggccccacctggaggagctgcccacccctcatttgaagtccttcatcaaacttctggaaagtgccccatggcaggagctcaggggtcagcatggagcagtgggtgtcgccttcctggggaccacaccgacagcaggagactcgctcaccatgagygaaaaacgaaagaagctctgcgtgagttagacaagggtctacccagcaaggaggcctcatcgcccgcgcccacacccacagcccgctgcagggccccgagttctgtgcacggatggcttttgacgttcacccagattttcactccacatcctacctgcacatggcagata

SEQ ID NO: 935036 - DNA, 683 bp, Homo sapiens
aaataggaccacagcttaagtgtgaaatgtcttagaaaagagcgtggtgttggaatgaccaccatacgtgacctgaagaaacagaaggacagactgttgaagttttatgacaaaagtgatgagcaaaagctagtgacaaatgggaaaacactacgtaaagctaaaaataaagatcgggtttgtgtattgaaagagaggatctgtcaacatcacaatgaacacacatgccacttaatgccatgctgattatgaaacaagcagagacctgtcacaatgaactgaaattaaagggaactgtccaacagttacrttgcagaaatttaagaaaagacacagcgctattttattttcatttttattttttgaggcagggtctcactcttgccaggctggagtgcagtggcgtgatctcggctcactgcaacctttgcctcctgggttcaagcaattcttctgcctcagcctcccaagtagctgggattacaggcacctgccaccatgcctggctaatttttgtatttttagtagagacgggtttcaccatgttggccagtctggtctggaactcctgaccttgtgatccacctgccacggcctcccaaagtgctgggattacatggtgtgaaccaccacgtccggccacagtgctaaatttttaaaggtttatggtgataaatcatctg

SEQ ID NO: 935037 - DNA, 612 bp, Homo sapiens
gaggcaggagaatcgcttgaacccgggaggtggaggttgcagtgagctgagatggcacaattgcactccagcctgggcaacagagtgagactctgtatcaaaaaaaaaaaaaaagccaaaaacaaacaaacaaactgtttctgcttattaaaatgaactgaagtatgatatctgataagatagggaatttataagttgtttctctaactcctttcttctttagacatagtaacaacaaaataattataaatgctgctttctttgcaaggtgaataaaatgttcggtcaagggagtattttacaaatcctggggtattattaaatattgccagctctggtacccaaactaaattacagctcagacaagggacggaaaggtcatgtttattattcactttastaaaaatgtaaccacaacacgtgtttctacatcagggagtattataaccatcatcataactaataataacaatgaaaataatacagctacattgtattttgcatttttcagtaaacagtagggcttatggttaataatcattcatatttacactgtagctttttatggaggagttcagagtggtttctgaatagtacctcattaatcatttc

SEQ ID NO: 935038 - DNA, 599 bp, Homo sapiens
gcagtgagccatgattgcaccactgcactacagcatgggtgacagagtaaaatcttgtctcaaaaaaaagaaaaaaaaatcaaggatattttaagacaacatggtgagaaaagtttattctcttaaatttttattttttacaaaataaaaaagccttcactgcaagacttagaatatgaaaaacaacaatgagaaatataatggtgaagtctctaataatgacttattaaacaaataacaaattatttgttgtttaataaatctaagcctgttttgggccaataaaaaatttcgctacacttaataaataaaattattacaaaataacattataaattatgaaactgataaactgaaataagcaggactgatagaaacaagaatatttataaatatttatgttatcaataaatttttataattaaaaatatatttaaawtcaccaagagtttagaaaatggaatttttctaaaaccccttaaaagaatcaagatgaacacaggttaaaaataaactaacaaagtgcaaacaaagaaattacagataaaaaattcttcaaaaatgccccaaattaatttcataacagcacaacatttaaa

SEQ ID NO: 935039 - DNA, 599 bp, Homo sapiens
gcagtgagccatgattgcaccactgcactacagcatgggtgacagagtaaaatcttgtctcaaaaaaaagaaaaaaaaatcaaggatattttaagacaacatggtgagaaaagtttattctcttaaatttttattttttacaaaataaaaaagccttcactgcaagacttagaatatgaaaaacaacaatgagaaatataatggtgaagtctctaataatgacttattaaacaaataacaaattatttgttgtttaataaatctaagcctgttttgggccaataaaaaatttcgctacacttaataaataaaattattacaaaataacattataaattatgaaactgataaactgaaataagcaggactgatagaaacaagaatatttataaatatttatgttatcaataaatttttataattaaaaatatatttaaattcaccmagagtttagaaaatggaatttttctaaaaccccttaaaagaatcaagatgaacacaggttaaaaataaactaacaaagtgcaaacaaagaaattacagataaaaaattcttcaaaaatgccccaaattaatttcataacagcacaacatttaaa

SEQ ID NO: 935040 - DNA, 558 bp, Homo sapiens
taggagcaaaatgatcatacctttttgccatgtatcacaagggtcatggttaacacttctataacataagacagattataagagaaaaaatatttttaacagttttacctgacatggtagtctttagaaatgaagattaaaagacccaaggaaaactgtattttatgcttagttcaatgaagaatgggcatcatatagaaatataattgcacaaaaaagggtattatcttggttgggtgtgatggttcacatcagtaatcccagtgctttgggaggcccaggaggaaggaytgcttgaggccaggagtttgaggacaactgggcaacataggaagaccctgtctctaccaaaaaaaaaaaaaaatggggaagaggtataatctaatggtaataaattgaggaggataactcaacaagacctatctgttcagattattcttggcttctcctgaagcattccttcctctggatataggagaggacacctgtctctggaggatcttcagaggagaagggacaaagtcagggagtgacatttctagattttacaacttagtt

SEQ ID NO: 935041 - DNA, 505 bp, Homo sapiens
  misc_feature 1, 2, 3: n = A,T,C or G
nnntcagagagctgatcctcgacacccgtgctttccctcctacacctcccagcctttgatatcccctactctggaaggtggccccagtaggccagcactcccagagccaactctagccagcaggagggctggctgccggggcaccttgcaggcagatctgacactgcccctgctaccaggccagcacgccatgagcctggaaacgggctgaggggactgcatggttagcaagcccaagtgccaccrtgaatactcactcaggcagctcccacggggaccacacagggaatcaatgcatgatgtggcccagggaatggcacctcccagggtgggcagcctgtgcagactagaaagtgtgtatccccccattccaacagagtgttttaatacagtgcactcaaagcaccggaacaaagagcagaattacaggacagaggcatcttcgtttcccagtcacaaatgtctgctctgtatgtttttggggtgtcatggggtgggggaaaag

SEQ ID NO: 935042 - DNA, 505 bp, Homo sapiens
  misc_feature 1, 2, 3: n = A,T,C or G
nnntcagagagctgatcctcgacacccgtgctttccctcctacacctcccagcctttgatatcccctactctggaaggtggccccagtaggccagcactcccagagccaactctagccagcaggagggctggctgccggggcaccttgcaggcagatctgacactgcccctgctaccaggccagcacgccatgagcctggaaacgggctgaggggactgcatggttagcaagcccaagtgccaccgtgaatactcactcaggcagctcccacggggaccacacagggaatcaatgcatgatgtggcccagggaatggmacctcccagggtgggcagcctgtgcagactagaaagtgtgtatccccccattccaacagagtgttttaatacagtgcactcaaagcaccggaacaaagagcagaattacaggacagaggcatcttcgtttcccagtcacaaatgtctgctctgtatgtttttggggtgtcatggggtgggggaaaag

SEQ ID NO: 935043 - DNA, 644 bp, Homo sapiens
catcacgctacttgacttcaaactatattacaaggctacagtaaccaaaacagcatggttactgtagcaaaacagagatatagaccaatggaacagaaaagagccctcagaaataataccacacatctacaaccatctgatctttgacaaacctgacaaaaagaagaaatgggggaaggattccctatttaataaatggtgctgggaaaactggctagccatatgtagaaagctgaaactggatcccttccttacactgtatacaaaaattaattcaagatggattaaagacttaaatgttagacctgaaaccataaaaaccctagaagaaaacctaggcaataccattcaggacataggcatgggcaaggacttcatatctaaaacaccaaaagcaatggcaatgaaagccacaattgacaaatgggatctaattaaactaaagagcctctgcacarcaaaagaaactaccatcagagtgaacaggcaacctacagaatgggagaaaatttttgcaatctactcatctgacaaagggctaatatccagaatctacaatgaactcaaacaaatttacaagaaaaaaacaaccccatcaaaaagtgggcaaaggatatgaacagacacttcgcaaaagaagacat

SEQ ID NO: 935044 - DNA, 682 bp, Homo sapiens
agtgcagtggcaggatcatgactcacttgcagcctcgacctcctgggctcaagctgttctcccacctcagcctcctgagtagtggggactacacgtgtgtgccactatgccccactaattaaaattttttttgtagagatggggtcccgctgtgttgcccaggctggtctcaaactcctgggctcaagcaatcctcctgcctcgactgggattacaggtgtgagccactgtgcctggcctatttatttgtatttatttatttatttatttattttgagacacagtctcactctgtcacccaggctggagtgcagtggcactatctygactcactgcaagctccaccttccgggttcacgccattctcctgcctcagcctcccgagtaactgggactacaggtgcccgccaccatgcctggctaatttttgcacttttagtagagacagggtttcaccgtgttagccaggatggtctcgatctcctgagctcgtgatctgcccacctcagcctcccaaagtgctgggattacaggcatgagccactgtgcccagcctatttatttatttttaaataaagacagggtcttgctctgtcacccaggctggagtgcagtggagtcattatagctcactgcagtctgaaactctgggctcaatttatcctcctgcctcagcctccca

SEQ ID NO: 935045 - DNA, 560 bp, Homo sapiens
ctcctcacttctcagacggggcggctgccgggcggaggggctcctcacttctcagatgggacggccaggcagagacgctcctcacctcccagacagggtcgcggccgggtagaggcgctcctcacatcccagacggggtggcggggcagaggcgctccccgcatctcagacgatgggcggccgggcagagacgctcctcacttyctagacggaatggcagccgggaagaggcgctcctcacttcccagattgggcagccgagcagaggggctcctcacatcccagacgatgggcggccaggcagagacgctcctcacttcccagacggggtggcggccgggcagaggctgcaatctcggcactttgggaggccaaggcaggcggctgggaggtggaggttgtagctagccaagatcgcgccactgcactccagcctgggaaacattgagcactgagtaaacgagactccgtctgcaatcccggcacctcgggaggccgaggctggcggaccactcgcggttaggagctggagaccagcccggccaacacagcgaaaccct

SEQ ID NO: 935046 - DNA, 577 bp, Homo sapiens
gcctcgaggctgagggaacagcatgagcacagacacagagctaatgggggcatttacaaagcatttatcaccaatttatttatttatttattggagacggagtttcactcttgttgcccaggctggagtgcaatggtgcaatcttggctcactgaaacctctgcctactgggttcaagcgattctcctgtctcagcctcccgagtagctgggattacaggtatgcaccaccacatccggctaattttgtattttttagtagagacaggktttctccatgttagtcagactggtctcgaactcccgacctcaggtgatctgcccgcctcagcatcccaaagtcctggggttattggcatgagccactgtgcccagtatttatttgagacagagtctcgctctgtcacccagattgtagtgcagtggcatgatctcggctcactgcaacccccgcctcctgggctctggtgatccccccacctcagtctctagagtagctgggactaggcgcatgccaccacattcagctaatttctgtattatttgtagagacaaggtctcactatattgcccaggct

SEQ ID NO: 935047 - DNA, 738 bp, Homo sapiens
taagaagacaggcttatttacaatgaagaaacacatgtacatttaagatagttctcatataaaacatttaaaaaataaaacatatcccacaatgggcaccactgtttacagcaatattaaaggggagaaaacaacactcatttwatggtgagcattaaatgtaaaggtacagcatcagtggaataaattcacaaaactatattacagcttgttaatccatttaagaattgttccaaatatatcatatatttggccctcagaggttcattcctacagatttcaactactgtaaatttctagctactgagaggtagaaaatggttattatcatgattataatgattattagaaacacacacacacacacacacacacacacacacacaaactcaccaaggagttacaaaatctatggagaccagaggccaactatcatcacctcatgtctgctctcaccaacagccttgcatttttcagagaactatctaaaaaaatagtcagacaccagtgtgatcactatctcctatgccaaacctattgggaatgaaacaagcagtattaccataaatgagaacattgaggcttacctttcaaggcttattctggtctcagaaattaattagatacgattattttctattgaaatgaattttagctaacataaaagactagtcctttactagctggtcttagggtaaaggtcgtacacatgagtcttaacctactctctgtcatagc

SEQ ID NO: 935048 - DNA, 595 bp, Homo sapiens
tgattcttcctatccatgaacatgaaatgtttttccatttgtttgtgtcctctcttatttccttgagcagtggtttgtagttctccttgaagaggtccttcacgtcccttgtaagttgtgttcttaggtatttcattctctttgtagcagttgtgaataggagttcactcatgatttggctattattagtgtataggaatgcttgtgatttttgcaccttgattttgtatcctgagactttgctgaagttgcttctcagcttaaggagattttgggctgagacgatggggttttctaaatataaaatcatgtcatctgcaaacagagacaatttgacttcctctcttcctatttgaataccctttatttctttctcttgcctgatttccctggccagaacttccaatactatgttgaacaggagtrgtgagagagggcatccctgtcttgtgccggttttcaaagggaatgcttccagtttttgcctattcagtatgatattggctgtgggtttgtcataaagagctcttattattttgaggtacgttccatcaatacctagcgagatcaacgcagaaggcgagtgatttctgca

SEQ ID NO: 935049 - DNA, 559 bp, Homo sapiens
ggagggagtgtgcgaataggtgtgggtcacagacatcaagtactttacaaggtaatagaatatcacaaggcaagtggaggcagggtgagatcacaggaccacaggaccgaggtgaaattaaaattgctgatgaagtttcgggcaccattgtcattgataacatcttatcaggagacagggttttgagatcaaccggtctgaccaaaatttattaggcgggaatttcctcttcctaataagcctgggagcgctatgggagactggagtctatttcacctctgcagtctcgaccataaaagacaggtgcacttagggggctgtttataagcctatacctccrggcgcgtattctctttctcagggatgttccatgctgagaaaaagaattcagtgatatttctcccatttgcttttgaaagaagagaaatatggctcagttccccccggctcaccgcggtcagtttaaggttatctctcttattccctgaacaattgctgttatcctgttcttttttcaaggtgcccacatttcatattgctcaaacacacatgctgtaca

SEQ ID NO: 935050 - DNA, 559 bp, Homo sapiens
ggagggagtgtgcgaataggtgtgggtcacagacatcaagtactttacaaggtaatagaatatcacaaggcaagtggaggcagggtgagatcacaggaccacaggaccgaggtgaaattaaaattgctgatgaagtttcgggcaccattgtcattgataacatcttatcaggagacagggttttgagatcaaccggtctgaccaaaatttattaggcgggaatttcctcttcctaataagcctgggagcgctatgggagactggagtctatttcacctctgcagtctcgaccataaaagacaggtgcacttagggggctgtttataagcctatacctccaggcgcgtrttctctttctcagggatgttccatgctgagaaaaagaattcagtgatatttctcccatttgcttttgaaagaagagaaatatggctcagttccccccggctcaccgcggtcagtttaaggttatctctcttattccctgaacaattgctgttatcctgttcttttttcaaggtgcccacatttcatattgctcaaacacacatgctgtaca

SEQ ID NO: 935051 - DNA, 559 bp, Homo sapiens
ggagggagtgtgcgaataggtgtgggtcacagacatcaagtactttacaaggtaatagaatatcacaaggcaagtggaggcagggtgagatcacaggaccacaggaccgaggtgaaattaaaattgctgatgaagtttcgggcaccattgtcattgataacatcttatcaggagacagggttttgagatcaaccggtctgaccaaaatttattaggcgggaatttcctcttcctaataagcctgggagcgctatgggagactggagtctatttcacctctgcagtctcgaccataaaagacaggtgcacttagggggctgtttataagcctatacctccaggcgcgtattctctttctcagggatgttccatgctgagaaaaagaattcagygatatttctcccatttgcttttgaaagaagagaaatatggctcagttccccccggctcaccgcggtcagtttaaggttatctctcttattccctgaacaattgctgttatcctgttcttttttcaaggtgcccacatttcatattgctcaaacacacatgctgtaca

SEQ ID NO: 935052 - DNA, 614 bp, Homo sapiens
aagacatgagactccttagtcagagacaaaggattttgttacttatggcacagcaaacagcctaaacattagtaagttcacttcagttgctctttccttaagtccccaaaagatgatacagtgagtgctgatgagtagtttgcatgcagtggtgctgtgtcatagatgaggaactctgagcctgggaaatttatagcaacagtaaacagtaagccagcttgctctttgtcgtacagggagtcattaactcatcccttaaggttgattgctgcaagcctaactctgaaaagtggtcctggtagggwggtcatggctttacactattggcatacccagcaggtcatgtaggggtacaagagactcatagtggactgtctttcaacactatccactccatggtcttatgtcatgttagctgctggaaatttttcttatgagtattccactccatcagtcattctgattaatttgactagagaggtagagagtaaacgcatagaatttgtcttacacaagatttaattaaggctactgtcagtagaactctaagcatgaagaggagaccaacctgcaatagcaacctcaatcatgcctcataggatcctagattctcc

SEQ ID NO: 935053 - DNA, 586 bp, Homo sapiens
gtgcctgggggtgggtctatagacggcccccttgggtgtggccatcttctatagtcaaaactgtaggggtgaaataaatcccagtctcccatagcactcccaggcttattaggaagaggaaattcccacctaataaattttggtcagactggctgctctcaaaaccctgtctcctgataagatgttatcaatgacaatggtgcccgaaacttcattagcaattttaatttcgccccagtcctgtggtcctgtgatctcgccctgcctccatttgccttgtgatattctattaccttgtgaagtacrtgatctctgtgacccacacctattcatacactccctccccttttgaaaatcagtaataaaaacttgctggttttgcggcttgtggggcatcacggaacctaccgacatgtgatttctcccccggactcccagctttaaaatttctctcttttgtactctgtccctttatttctcaagccagccaaaacttagggaaaatagaaaagaacctatgtgactatcggggcaggttccccaatacggcaacaccttctctcttctggcatgtccagtcccccgg

SEQ ID NO: 935054 - DNA, 586 bp, Homo sapiens
gtgcctgggggtgggtctatagacggcccccttgggtgtggccatcttctatagtcaaaactgtaggggtgaaataaatcccagtctcccatagcactcccaggcttattaggaagaggaaattcccacctaataaattttggtcagactggctgctctcaaaaccctgtctcctgataagatgttatcaatgacaatggtgcccgaaacttcattagcaattttaatttcgccccagtcctgtggtcctgtgatctcgccctgcctccatttgccttgtgatattctattaccttgtgaagtacatgatctctgtgacccacacctattcatacactccctccccttttgaaaatcagtaataaaaacttgctggttttgcggcttgtggggcatcayggaacctaccgacatgtgatttctcccccggactcccagctttaaaatttctctcttttgtactctgtccctttatttctcaagccagccaaaacttagggaaaatagaaaagaacctatgtgactatcggggcaggttccccaatacggcaacaccttctctcttctggcatgtccagtcccccgg

SEQ ID NO: 935055 - DNA, 567 bp, Homo sapiens
ttatggagtgctttttctgtatctattgagatgatcacatgggttttggttttaattctgcttatgtggtgaatcgcatttactgatttgtgtgtgttgaaacaactttggatcccaggaatgaagcctacttgatcccaggaatgaagattagctttttgctgtgctgctggattcaggatgctagtttttgttgagaatttttgtgtctatgtgcatcagggatttgatctttagttttcttttatcattgtgtctttaacagatttttggtatcaggataatactggatttgtagaacratttagggaagaatctcttcttgattttttggaatagtttcagcatgattggtatcagttctttgtatgtctggtagaagtcggctgtgaatccgtctggtatgtggcttttttattggtacattttttattactgataagctgcacttcactaaaatttaaaagttacgctcttatgaaatgcaatgtcaagaaaatgggagacaaaatgcaaactgagtaatccattgcacttgaacaaatctttcttgatattttagtttct

SEQ ID NO: 935056 - DNA, 555 bp, Homo sapiens
attgcgatatctaatttctctggtgattaatgatgttgagcagattttcatataacttcagccatttgtatgtcttctctggagaaatatctactcaaatcctttgccaatgttttaatcaagttattaaaacattgatagttataggagttccctatatattttgaagattagccccttatcagacatatagtttgcaaatatttctttcactctacatgttggctttttttcctattgattattttctttgatgggcagaatcttttaaattttataaagtcctgcttatctacgtttggttttgttgccaktgcctgtggtgtcacatacaagaattggctgttgcttagaccacatgtcatggagagtttcccatatatttttccaatagttttacagttttgggttttacgtttttaattaatattgagttgatttatatgtattatgttagctagaagtccaatttcattctcttgcaagtggatattcagtttccacagcacaatttgttgaagaactactctttccccattatgtatccttgatgcc

SEQ ID NO: 935057 - DNA, 629 bp, Homo sapiens
gcagaactaatagccctcactcgggtactagaatcaggagaaggaaaaagggtaaatatatatacagactctaagtgtgcttacctagtcctccatgcccatgcagcaatatggagagaaagggaattcctaacttccgagggaacacctatcaaacatcaggaagccattaggaaattattattggctgtacagaaacctaaagaggtggcagttttacactgccggggtcatcagaaaggaaaggaaagggaaatacaagggagccaccaagttgatattgaagtcaaaagagccacaaggctggaccctccattagaaatgcttataggaggacccctagtatggggtaatcccctcygggaagccaagccccagtactcagcaggagaaatagaatagggaacttcatgaggacatacttccctcccctccagatggctagccaccaataaaggaaaaatacttttgcctgcagctaaccaatagaaattacttaaaacccttcatcaaaccttccacttaggcattgatagcacccatgagatggccaaattattatttactggaccaggccttttcaaaactatcaagcagatagtcagggcctgtaaagtctgccaaagaaa

SEQ ID NO: 935058 - DNA, 752 bp, Homo sapiens
ttttcttgtgggacatttggacttggacaacttttcttactatttttcttcaatgctcaaaacaaacctaacataaagaatatttattcttgtttgaaatgatattcagcatcagcagaaatagttaacatgctatcagaacttataaaatcaacatttagtattataagaaaatgaatctctctgcagatcattccagccagaatagtgatgtttattgctttgtacatcattgaagtcactgattccaaaatcagctatttcaaagcagttgtggattacatttagggtgattgtgtcccacatagcatagcaacaagattcttcactgctatcaaaaatattccattaaaaaatctatactagaaatattycttcttattttacataatatactaagtgcataaaacttttaggtaattaattatgccttcatctaaaaaccgcatatatattatggtactagaggacaaaaaaagatattgcaaatactgaaataagtccccagttcctttgggcagcacgtttatcaaaacagattttatctattttggcaagctattctcctctctaattgtaggaaccatctcccaaacaatcttccaacatcagtggatttaactttaaatatacatataggagatatgtgtatatataggggattttcaaatttttctacaaatggtcttacttattagtctcagcattgtagcacagtcagacttcctcttaatgaatgtatatatgtacat

SEQ ID NO: 935059 - DNA, 603 bp, Homo sapiens
gtcagggacccacttgaggaggcagtctgtccattctcagatctcaaactctgtgctgggagaaccactattctcttcaaagctgtcagacagggacatttaagtctgcagaggtttctgctgccttttgttcagctaggccctgcctcccaaggtggagtctacagaggcaggcaggcctccttgaccttcggtgggctccacccagttcgagcttcccggctactttgtttacctactcaagcctcagcaatggtgggtgcccttcccccagcctcgctgccgccttgcagttccatctcagactgctgtgctggcaatgagcgaggctccgtgggtgtgggtccctccaagccaggcacagratataacctcctggtatgccctttgctaagaccattggaaaagtgcagtattagggtggaagtgtcccgattttccaggtgccatctgacacagctttgcttggctaggaaagggaatttgctgacctcttgcacttcccggatgaggcgatgcctcgccctgcttcacctcatgctcagtgcgctgcacctactgtcctgcacccactgtccaacaagccccagtgagatgaaccca

SEQ ID NO: 935060 - DNA, 583 bp, Homo sapiens
cttcctcattccagatctgcaagattgtaagacagcctgtgctccctcgctccttcctctgcattgcccctcttctccctctccaaacagagggaactctcctacccccaaggaggtgaaagctgctaccacctctgtgcccccccggcaatgcaccaactggatcctacmcgaatttatgattaagattgctgaagagctgccaaacactgctgccaccccctctgttcccttattgctgcttgtcactgcctgacattcacggcagaggcaaggctgctgcagctccgctggctgtgcacattccctcctgctccccagagactgcctccgccatcccacagatgatggatcttcagtgggttctcttgggctctaggtcccggagaatgttgtgaggggtttatttttttttaatagtgttcataaagaaagacatagtattcttcttctcaagacgtggggggaaattatctcattatcgaggccctgctatgctgtgtgtctgggcgtgttgtatgtcctgctgccgatgccttcattaaaatgatttggaagagcagagactgtgcctctgtttgac

SEQ ID NO: 935061 - DNA, 586 bp, Homo sapiens
  misc_feature 475, 521, 547, 558: n = A,T,C or G
tgctcacagagaacctctactagggcagtatggagggggaaatgtggggttggagctcccacacagatccccgctggggcattgcctagtggagctatgagaagaaggctaccgttctctagactccagaaaggtagatccatccacagattgcaccgtgcacctgaaaaagccacaggcactcaatggcagcccatgagagcagccgcaggtgctgaatcctgcaaagccacctgagtggggctgaccaagaccttggtagcccacccctcacaccagtgtaccctggatgtgggacattaggtcaaagagatttttttggagctttaaaatttaatgacttccctgctatgtttcaaacatgcatggggcctataraccctttgtcctggccaatttctcccttttgaaatggaaatatttacctaatgtctatacccccattgtatcttggaagtaactaacttattttatnttttacaggctcataggtggaagggacttaacttgtctcagatganactttggacatttgagttaatactanaatgagttaanacttttgggcactgctgggaaggcatgg

SEQ ID NO: 935062 - DNA, 581 bp, Homo sapiens
  misc_feature 319: n = A,T,C or G
acagacatcaagtactttacaaggtaatagaatatcacaaggcaagtggaggcagggtgagatcacaggaccccaggaccgaggcgaaattaaaattgctaatgaagtttcgggcaccattgtcattgataacatcttatcaggagacagggtttttaggatcaactggtctgaccaaaatttattaggcgggaatttcctcttcctaataagcctgggagcgctgtgggagactggrgtctatttcacccctgcagtctcgaccataagagacaggcgcacctggaggggggctgtttataagcctatacctcctggntcgtattctctttctcagggatgttccatgctgagaaaaagaattcagcgatatttctcccatttgcttttgaaagaagagaaatatggctctgttctgcctggctcaccagcagtcagagtttaaggttatctctcttattccctgaacaattgctgttatcctgttcttttttcaaggtgtccacatttcatgttgctcaaacacacatgctgtacaatttgtgcagttaatgcaattattacagggtcctgaggcaata

SEQ ID NO: 935063 - DNA, 581 bp, Homo sapiens
  misc_feature 319: n = A,T,C or G
acagacatcaagtactttacaaggtaatagaatatcacaaggcaagtggaggcagggtgagatcacaggaccccaggaccgaggcgaaattaaaattgctaatgaagtttcgggcaccattgtcattgataacatcttatcaggagacagggtttttaggatcaactggtctgaccaaaatttattaggcgggaatttcctcttcctaataagcctgggagcgctgtgggagactggggtctatttcacccctgcagtctcgaccataagagacaggcgcacctggaggggggctgtttataagcctatacctcctggntcgtattctctttctcagggatgttccatgctgagaaaaagaattcagygatatttctcccatttgcttttgaaagaagagaaatatggctctgttctgcctggctcaccagcagtcagagtttaaggttatctctcttattccctgaacaattgctgttatcctgttcttttttcaaggtgtccacatttcatgttgctcaaacacacatgctgtacaatttgtgcagttaatgcaattattacagggtcctgaggcaata

SEQ ID NO: 935064 - DNA, 589 bp, Homo sapiens
ctgcgggggccgcttccaccctcagcggatgataatctcaagacaccttccgagcgtcagctcactccccttccaccctcagctccaccctcagcagatgataatatcaagacacctgccgagcgtctgcgggggccgcttccaccctcagcggatgataatctcaagacaccttccgagcgtcagctcactccccttccaccctcagctccaccctcagcagatgataatatcaagacacctgccgagcgtctgcgggggccgcttccaccctcagcggatgataatctcaagacaccttcygagcgtcagctcactgcccttccaccctcagctccaccctcagcagatgataatatcaagacacctgccgagcgtctgcgggggccgcttccaccctcagccgatgataatctcaagacacctcccttagctactcaggaggctgaggcagaaaaaccacgcaaacccaagaggcagagggcggctgagatggaaccacctcccgaacccaagaggcggagggtcggtgacgtggaaccgtcacgcaaacccaagaggcggagggccgctgacgtggaaccatcat

SEQ ID NO: 935065 - DNA, 615 bp, Homo sapiens
tctgtaattttcttgtaattgctttgtcaggttttggtatcagagtaaagctggcttcatagaatgaattgagaattattctcttccttagttttccgggatagcttatttcttacttaaatatctggtagagtttaccagtgaagctgcttggactttgcgtttcttttgtgcgaaggtttttaactacaaatttaatttatttagtagttatatgactgtttagactgtggttttcttttgggtaagctttggtagtttatgtctttccaggattttgtccatttaatccaagttgtcaaatgattgtcataaagtcatttgtcatatttccttactctttaatatctgtagaatttgcagtgacatctttctcatttctgatattattaatgtgcatgtcttctcttttttgtttttctcatctggctagaggtttattgattttattgatcttctcmaagagtcagcttttggttttattattttctttgttttctgtttcattgatttccactctgatctttattatttcctttcttctgcttactttgggtttaattcactctttttgtagcttttgaggtggaaactgtggtcatttatttgagattt

SEQ ID NO: 935066 - DNA, 658 bp, Homo sapiens
gttgcccaggctggtgtgcaatggtgcgatctcggctcactgcaacctctgcctcccgggttcaagcgattctcctgcctcagcctccagagtagctgggattacaggcgcccaccaccacaccccgctaatttttgtattttcagagacggggkttcgccatgttggccaggctggtttttaactcctgacctcaggcgatccacccggctcggcctcccaaagttctgaaattacaggtgtgagccactgcattcagcccccttcctcattcttgaaacactctcttcattgggcttctataagaccgtacctcctgttttttgtcttacttctctggctcctctagctctgtctcctcatatctgccaatccttaaggtgttcactggggtgttcactgggtctgtgtcctagtccccattctcttctcacctgacacatcctcctgaacactgtcacctacttccacagcttctaatgccatctatagactgataactccccaaatctgtatttatggcatggtcttttctctttttcagatccctatacccaacttcctaactcaacatctagacttgaatgtctcatgggtacaaacatgcctgaagctgaactcatcctccttctttgatctcagaagatagcaccgccat

SEQ ID NO: 935067 - DNA, 599 bp, Homo sapiens
gggaaaattctgggagtcaacctctattccttctttctcccacttcacattcagtcagtcatcaagtcctgccaattaaatctcctaaaaatttttgaaatccattcacttctctccatcctcattgcaactgccattcttacttcaggcccccaagttcagaccaacttactgaactcactgcctctgatcttgccaccctgtctcatctccagttcagttggtcacattgcaaaagaatgccattgatttttttccatacagatctgatcttatcacctttgtttaaaacacttcaaagaccttcaagaaaaaaattaaactctttaacatgattttcaaggcccttcataatcagatcttgctttgacagtgctgtgtaatgattagacttgagcargactggctgggttcaaatctcagctttaacacttttagtagctgtgtaactttgagcaagttaacctccctgtacttgagttttctcagctataaaacggagtaattacaatgcctaccttccagggttattgttttttttttgtttgtttttttctttacagcgtctcactctgtcacccaggctggagtgcagcgac

SEQ ID NO: 935068 - DNA, 818 bp, Homo sapiens
cccttcccctcctgctctcctgccctcctgcctggggggtggggagaggcattgggtcccaaatgcggggccagtgggcatgaggaggaagcccttgtccttgccccaggaagcctactgccagtgtgagtgacagagacaagcagggatagaatctgccggggtgttggggcggatctgtctaggcctccccatccaccactccacgytcccttcctatacacacccaatggcccccagtgctgctcagaatgcccaaaaaggaaggaatgagggatggcagggctgcatgtcacatggatgcattctaggcactgcgtggcttctttctgctggacaagctgtgataaaggtcgtgctggtgggaaatattatggggtgactgtcaagggcgcccctccaccatttcaaagcaagtcctcaagctgtggaggggcgcacatgtgtcccttaggagaactagggtggggaatgtgaagagaaaacagcattgatatcaggcagtctggcctcggccaacatttatttatttatttatttatttatttttctacagatggagtctccctatgttgcccaggctggtctcaaactcctgggctcaaggaatcctcccacctcagcctcccaaagtgtgggattacaggtgtgagccaccacacaggacctcagccaccacttaagtgggtgaccttggtcaagtaactgacgccctttgggtctcatttttgacctccgtcaaatattttggcctttgtggccccagaggtgccttttagcaccggcattcagtgattacgagtgactttcctatcttc

SEQ ID NO: 935069 - DNA, 612 bp, Homo sapiens
ggaccaaattctgcttccagttgcctgtttttgtaaggttttagtgggacacatggaacatagccacacttgatatttacatattgtttatgaatgcttttgtgctttgatggtagagttgagtagttgtgaaagagacgatttaatgtagcttgcaaagtttaaaatatttactacctggccctttacagaaaatatttggctgggcacggtggctcacgcctgtaatcccagcactttaggaggccgaggcaggcagatcacgaggtcgggagatcgagaccatcaccaacacggtgaaaccccgtatctactaaaaatacaaaaaaattagctgggcgtagtcccagctactcgggaggctgaggaaggagaatggcgtgaacccgggaggcggagcttgcagtgagctgagattgcaccactgcactccaccctgggtgacagagygagactctatctcaaaaaaaaaaaaaaagaaaaagaaaaagaaaatatttgccaagctgatattttccagatgagaaaattaaatatccaagttcaatatcttgcccaacttcatactactatgaatgtggtagggttgagaaatggatgcaagtcacctgg

SEQ ID NO: 935070 - DNA, 611 bp, Homo sapiens
agactgttaagagtcttctgactccaaactcagtgctccctccagtgccacaagcaaactccataaaggtatcctgtgctgaatagagactgtagagtggtacaaagtaagacagacattatattaagtcttagctttgtgacttcgaatgacttacctaatctagctaaatttcagttttaccatgtgtaaatcrggaagagtaatagaacaaaccttgaagggtcccaatggtgattaaatgaggtgatgtacataacatgcatcactcataataagtgctctttaaatattagtcactattattagccatctctgattagatttgacaataggaacattaggaaagatatagtacattcaggattttgttagaaagagatgaagaaattcccttccttcctgccctaggtcatctaggagttgtcatggttcattgttgacaaattaattttcccaaatttttcactttgctcagaaagtctacatcgaagcacccaagactgtacaatctagtccatctttttccacttaactcatactgtgctctccctttctcaaagcaaactgtttgctattccttgaatacactctgagttttctgcctttgc

SEQ ID NO: 935071 - DNA, 656 bp, Homo sapiens
tttaccagagacggggtttcaccatgttggccaggatggtctctatcttttgaccttgtgatctgcccacctcagccttccaaagtgctgggattacaggcatgagccactgctgccggctgaacccatttattacttttaatattttttggtggagtctttagggttttctmtatataagatcatgtaatctataaacagagacaacttaacctcttctcttacaatatgaatgccttaagttttgtttttgacattaaagtcttaaatccatctagattttttttactgtatggtgtgaggtgggacccaattttttccatattggtaaccaatttttttttagctccagttattgaagtctcaaatgccttcatatctacctttttgaatttgctgggttttttttgagtcttatagtaaacattcctctccaagaatgtccactttgtcctagctaagttaaggaaagtagggttttccacacctagaaggtcattttatgaagaataggaagtggttgggttagttaatgagtacaaaagaaacagaaagaatgaataagacctagtatttgatagcacaatagggtgactatagtcaataatgacttaattgtacattttaaaataacttagagtgtaattggactgttt

SEQ ID NO: 935072 - DNA, 692 bp, Homo sapiens
agagttcagctttggggccgggcgcggtggctcccgcctgtaatcccagcactttgggaggccgaggtgggtggagcacgaggtcaggagatcgagaccatcctggctaacacggtgaaaccccgtctctactaaaaatacaaaaaattagcaggacttggtggcgggcgcytgtagtcccagctactcgggaggctgaggcaggagaatggcgtgagcccgggaggtggaggttgcagtgagccgagattgtgccactgcagtccggcctggttgacagagcgagactccgtttccaaaaaaaaaaaaaaaaaaaaaaaaaaaaaaaaaaaagttcagctttgcctaaagagttggttagtcgaaagaaattcttgagtttacataaccggggctgtggaagccaaggggcttgttatgcagatgaggcctccaggtggcaggctggagacaaggatgataaaaaaaaatctctcttttccacccttaaaaagggctcttagttaaatgtctgttctataggaaaagacctagaaagggaaggagattctctccagaatgcaaatttccctaataagagacagttgtgcaaggccatttcaaaatatgccaaataaatatattttgaggctgtgcatggtggctcacaccagcactttgggaggatgaggcaggtggatcacttgagccca

SEQ ID NO: 935073 - DNA, 692 bp, Homo sapiens
agagttcagctttggggccgggcgcggtggctcccgcctgtaatcccagcactttgggaggccgaggtgggtggagcacgaggtcaggagatcgagaccatcctggctaacacggtgaaaccccgtctctactaaaaatacaaaaaattagcaggacttggtggcgggcgcttgtagtcccagctactcgggaggctgaggcaggagaatggcgtgagcccgggaggtggaggttgcagtgagccgagatygtgccactgcagtccggcctggttgacagagcgagactccgtttccaaaaaaaaaaaaaaaaaaaaaaaaaaaaaaaaaaaagttcagctttgcctaaagagttggttagtcgaaagaaattcttgagtttacataaccggggctgtggaagccaaggggcttgttatgcagatgaggcctccaggtggcaggctggagacaaggatgataaaaaaaaatctctcttttccacccttaaaaagggctcttagttaaatgtctgttctataggaaaagacctagaaagggaaggagattctctccagaatgcaaatttccctaataagagacagttgtgcaaggccatttcaaaatatgccaaataaatatattttgaggctgtgcatggtggctcacaccagcactttgggaggatgaggcaggtggatcacttgagccca

SEQ ID NO: 935074 - DNA, 692 bp, Homo sapiens
agagttcagctttggggccgggcgcggtggctcccgcctgtaatcccagcactttgggaggccgaggtgggtggagcacgaggtcaggagatcgagaccatcctggctaacacggtgaaaccccgtctctactaaaaatacaaaaaattagcaggacttggtggcgggcgcttgtagtcccagctactcgggaggctgaggcaggagaatggcgtgagcccgggaggtggaggttgcagtgagccgagattgygccactgcagtccggcctggttgacagagcgagactccgtttccaaaaaaaaaaaaaaaaaaaaaaaaaaaaaaaaaaaagttcagctttgcctaaagagttggttagtcgaaagaaattcttgagtttacataaccggggctgtggaagccaaggggcttgttatgcagatgaggcctccaggtggcaggctggagacaaggatgataaaaaaaaatctctcttttccacccttaaaaagggctcttagttaaatgtctgttctataggaaaagacctagaaagggaaggagattctctccagaatgcaaatttccctaataagagacagttgtgcaaggccatttcaaaatatgccaaataaatatattttgaggctgtgcatggtggctcacaccagcactttgggaggatgaggcaggtggatcacttgagccca

SEQ ID NO: 935075 - DNA, 544 bp, Homo sapiens
gggatttatgtagcatagaagaaatgaaagaaaccaaacaatgtgtaagaaaatagaaactagggaggggcaaggaagcaatcatgatgaatgagggcccccacatctcattgtctggatgtggtgatctgctgagtttcagttctttgatactttttttttttttttttttggaggcagagtctcgctttgttacccagacaaatacaatgttgcgatctcagctcacwgcaacctctgcctcccaggctcaaggcattctcatgcctcagcctccagagtagttgggattacaggcatgcgccaccacgcctggctaatttttatattttcagtagagacagggtttcgccatgttggccaggctggtcttgaactcctggcctcaagtgatccatctgctttggcctctgaaagtgctgaggttacaggcatgagccaccgtgcctggccctttgatacttctttgagaggcctgaaggtcattttctgaagaaggaactcagataaaacaaatgtaagtttccagctttaagaccagaac

SEQ ID NO: 935076 - DNA, 717 bp, Homo sapiens
ggaacacaccccaagctctggcctcgggaggagtgtgctgagcttgttgcggagcaaagacagaagcccagtgaacaaaagatggcgaggagacaccagtgcagggaggctaagggtgcagaggccgagtggggctgtgctcaaaagagaggcggtgctggagggacagggagaggtggcctgggtgttgggaggtgggggtgaggtgggggctgagggcaggrgggtcagggtgagggataggaaaggccgcaggagaggagaggatgaagagctgtgctggaggcgctgtgggcagcatcgtcctgctcttgggcactttgtgttttgtgacacatcctttctatgctgaactgagaacccagggacctcactctccccacacgtgtctgtccagctccagaggatgaagcagagaccacccaagcagtgcccaccacaacccctgagccccccaacaagcctcgcctcggggagctgaccgtgacagatgccacccctgactccctcagcctgtcctggatggtccccgagggccagtttgaccacttcctggtccagtacaggaatggggatgggcagcccaaggtggtgcgggtgccggggcacgaggacggggtcaccatctcaggcctggagccagaccacaagtacaagatgaacctgtacggcttccacggtggccagcgcgtgggccccatctctgtcattggggtg

SEQ ID NO: 935077 - DNA, 752 bp, Homo sapiens
ccagctgcatttttcagctccagaatctctgcttgattctttatatctccctctcttcattagatttgtctaatacaactctgaactccttctctgtgttatcttggattccactgagcttcttcaaaacagctattttgaattccctttctgaaagctcacatatctctctctctctccaggattggctacaggtgacttagtttggtgaggtcatgttttcctggaaggtcttgatgctttgggtgtttgtcagtgtctgggttttgaagagttaggtattcactgtagtcttttcagtctgggcttgtttctgcctatmcttgggaaggctttccaggtatttgaagggacatgggtgtagtcatctaagtttttggtcactttacccgtttctactttaggggtgccccaagcccaataacactgtggctactgcagacttgtacagataccaccgtggtgtcatggtaacttccagaagaattccctggattaccaggcagagactcttgttctcatcccttacttccctccaaacagatgaaatctgtctctgtctctctgtctctctcccctctcccctctcctctctctttctttctctctctctctctctccagagctgcctgaagctgtgggaggggtgacacaagcactcctgtggccaccgccactggggactatattgggtcagaaatgaagccagcctaacactgggtctcacccaaggcctacaacaattactgcct

SEQ ID NO: 935078 - DNA, 752 bp, Homo sapiens
ccagctgcatttttcagctccagaatctctgcttgattctttatatctccctctcttcattagatttgtctaatacaactctgaactccttctctgtgttatcttggattccactgagcttcttcaaaacagctattttgaattccctttctgaaagctcacatatctctctctctctccaggattggctacaggtgacttagtttggtgaggtcatgttttcctggaaggtcttgatgctttgggtgtttgtcagtgtctgggttttgaagagttaggtattcactgtagtcttttcagtctgggcttgtttctgcctatacttgggaaggctttccaggtatttgaagggacatgggtgtagtcatctaagtttttggtcactttacccgtttctactttaggggtgccccaagcccaataacactgtggctactgcagrcttgtacagataccaccgtggtgtcatggtaacttccagaagaattccctggattaccaggcagagactcttgttctcatcccttacttccctccaaacagatgaaatctgtctctgtctctctgtctctctcccctctcccctctcctctctctttctttctctctctctctctctccagagctgcctgaagctgtgggaggggtgacacaagcactcctgtggccaccgccactggggactatattgggtcagaaatgaagccagcctaacactgggtctcacccaaggcctacaacaattactgcct

SEQ ID NO: 935079 - DNA, 463 bp, Homo sapiens
ccagtgctggtccctctcaaatctcatgtcctttgcacatttcaaaaggcaatcatgccttcccaacagttccccaaagtcttaactcattctagcattaacacaaaagttcacatccaaaatctcatctaagacaaggcaagtcccttccacttaggaactgtaaatcaaaaacaagttagttacttacaagatacaatggggatatacaggcattgggtaartgttcccattacaaatgagagaaattggccaaaactaaggggacacaggtcccatgcaaatccgaaacccagtgaggcagtcattaaatcttaaagctccaaaatgatctcctctgactccatgggatcaaatccagggccatgctcatgcaggaagagggatcccagggccttgggcagctctacctctctgactctgcagggtacacccctctcccccaactccccaacggctgctt

SEQ ID NO: 935080 - DNA, 483 bp, Homo sapiens
cctgctccctgtgggcctgagtcctctcctcttcgtccctccaggtcaccacacaggccctggggacaggtacagctcacagctaggaagtcatgatcccaggattcaaaccccatctttgtgtaactgcacagccagtgccctaatactctccagttttacccgagagtttcagtggcaagscttgggcctcaattgtgtttccaccaaggtggaaaattttctgctggaaacagttatgagtacagttaagagtcccccacctgaccacgtgggacaggtcaggtgatacaaagttgtcctttatgtgggaccaaaatgtacttcccttcagtctctgttgagggaggaggaatgagtctaattcctgtatcctgtgactgtcccttcaaatatttcaagactgtcatcttcctccccagtcttctcttccacagaccaaacaaccttcagctcctatgcggcacctggcatgaatgcttc

SEQ ID NO: 935081 - DNA, 595 bp, Homo sapiens
tgcagcctggaccttttgctgttttggttcctattcaaaactggcagccttttgggtcccttgccatgtgggtgtgatcaatattcccaattgtggaattaatatttccagaatccaaagagtgttgtgttacattctttgttttaggggagtaaaatgtagaatttattctttactttggccaagttatcctggcatgctgcagatcctggacttttaaaagtgtactaatgtggcaggcccctgaagcttcatagaacttttcctgcctctttatttattttatgagtctgacttacaaaggtcccagcacacttgccacttcttgttcattgggtctggtttacaagtgtcatcaccacgatgatgttctgcagaggtccaagtggcccaggtgtcctcagacaatatgatgacatggtagggagagttaayatagccctgggtcagtgctctaagtgaatactgttgtgtgttctgagtgactgtgaactgtttctgatcctcctttctgatagagatgaaaagaacacagtccccagatcaaaggctgcacagcatgtacctggggcctgtgctttagtgaagatacaac

SEQ ID NO: 935082 - DNA, 777 bp, Homo sapiens
ctgctacttgtttgagtttacaggagtctgtcatcctccaggacctgtctggtttctgcagggaccaaattaattaaatggtgatatgagaggggacatacccctgcacccttaaggtctttaaggatagttctaagctttaagatccaaacctcccctaacccctaccccagaatgtgctgttatttttgatttactgttttggctggggtggacagttttagaaactctcccttgtcctttctcactgatagctcttatctcacacaccaagaaatctgtggaggtggagarttgcaaacaccctctattagtctgttttcatgctactgataaagacatacctgagtctgggtaatttataaagaaaaagaagtttaatgtactcacagttccacgtggctggggaggcctcacaatcatggtggaaggtgaaaggcacgtcttatgtggtggcaagcaagagaagaagtgccagcaggggaaatgccagacgcttgtaaaaccatcagatctcgtgagaactcactcactatcatgagaacagtataggggtaaccacctccatgattcaattatctccacctggtcttgcccttgatacatggggattattgcaattcaaggtgagatttgggtggggacacagaaccaaaccatgtcattctgccccggcccctcccaaatctcatgtcctcacattttaaaaccaatcatgccttcccaacagtcccccaaagtcttaactcattcctgcattaacccaaaagtccaagt

SEQ ID NO: 935083 - DNA, 637 bp, Homo sapiens
tctattcactacttctatgagatcaactttttaacattctgctataaatgggaacatgtaatatttgtccttctgtcactggcttatttcacttaatttcattcagattcatccatgttgttgtgaatgacaggattttattcttttttatggctgaatagtattccgttgtatatatacatcacattttctttttccatttgtctgttattgaacactgaagttaattccatatcttggctattatgaatagtgccgcaacaaacatgggagtgaagatatctctttgacatacagattttattttcttcagatatatacccactaacaggattactggatcaaactaaagagcttctgcacagcaaagaaaacaatcaacaaagtatagaaacaacctacaaaatgggagaaaatatttgmaaactatacatatgacaaggggtgaatatccagaatatataagaaactcaaacaactcaatagcaaaaaaaaaaaaaaaatcttatttaaaaatgggcaaaataccttaataggcatttctccaaataaaacacacaaatgaccaacaggtataggaaaaactactcaatatcactaatcatcagaaaaatgcagatcaaaactacaatgagat

SEQ ID NO: 935084 - DNA, 753 bp, Homo sapiens
ttgtaaaaatattggtgtgtaaaattatgagcaccatagcaacaatcaagacagtggtatgaggccaggctcagtgactcacgcctgtaatcccagtactttgggaggccgaggcgggcagatcacttgggtcaggaattcaagaccagcctggccaacatggcgaaaccccgtctctactaaaaatacaaaaattagccgggcgtgatggtgcatgtctgtagtcccagctactcaggagtctgaggcatgagaatcacttgaatccgggaggcggatgttgcagtgagctgaggttgcaccactacacttcaacctaggtgacagagkgagactctgtctcaaaaaaaaaaaaaaaaaaaagacagtgctgttaaacacaactagtagtcactgcattttttccgccatccatgtacagttaaaaaaaatcagtttcattaaattatgtcctccatgaagcaataaaaaaattaatgctattaaatctcatcccttgagtacacatctttttaatattttatataaccagacaggaagtatgcataaaccacctctgctacatactggaccacagtggttgtctgaagaagcagaagcaagttgtgagtattctgaactagcctctttttcataaaacaccactcttatttgaaaaataactgacgtacaaactatagttattcaaacgtaggtgttatggagatattttcttgaaaatgattaaagcaagcctgtcacttcaagaaaaac

SEQ ID NO: 935085 - DNA, 753 bp, Homo sapiens
ttgtaaaaatattggtgtgtaaaattatgagcaccatagcaacaatcaagacagtggtatgaggccaggctcagtgactcacgcctgtaatcccagtactttgggaggccgaggcgggcagatcacttgggtcaggaattcaagaccagcctggccaacatggcgaaaccccgtctctactaaaaatacaaaaattagccgggcgtgatggtgcatgtctgtagtcccagctactcaggagtctgaggcatgagaatcacttgaatccgggaggcggatgttgcagtgagctgaggttgcaccactacacttcaacctaggtgacagagggagactctgtctcaaaaaaaaaaaaaaaaaaaagacagtgctgttaaacacaactagtagtcactgcattttttccgccatccaygtacagttaaaaaaaatcagtttcattaaattatgtcctccatgaagcaataaaaaaattaatgctattaaatctcatcccttgagtacacatctttttaatattttatataaccagacaggaagtatgcataaaccacctctgctacatactggaccacagtggttgtctgaagaagcagaagcaagttgtgagtattctgaactagcctctttttcataaaacaccactcttatttgaaaaataactgacgtacaaactatagttattcaaacgtaggtgttatggagatattttcttgaaaatgattaaagcaagcctgtcacttcaagaaaaac

SEQ ID NO: 935086 - DNA, 753 bp, Homo sapiens
ttgtaaaaatattggtgtgtaaaattatgagcaccatagcaacaatcaagacagtggtatgaggccaggctcagtgactcacgcctgtaatcccagtactttgggaggccgaggcgggcagatcacttgggtcaggaattcaagaccagcctggccaacatggcgaaaccccgtctctactaaaaatacaaaaattagccgggcgtgatggtgcatgtctgtagtcccagctactcaggagtctgaggcatgagaatcacttgaatccgggaggcggatgttgcagtgagctgaggttgcaccactacacttcaacctaggtgacagagggagactctgtctcaaaaaaaaaaaaaaaaaaaagacagtgctgttaaacacaactagtagtcactgcattttttccgccatccatgtacagttaaaaaaaatcagtttcattaaattatgtcctccatgaagcaataaaaaaattaatgctattaaatctcatcccttgagtacacatctttttaatattttatataaccaracaggaagtatgcataaaccacctctgctacatactggaccacagtggttgtctgaagaagcagaagcaagttgtgagtattctgaactagcctctttttcataaaacaccactcttatttgaaaaataactgacgtacaaactatagttattcaaacgtaggtgttatggagatattttcttgaaaatgattaaagcaagcctgtcacttcaagaaaaac

SEQ ID NO: 935087 - DNA, 618 bp, Homo sapiens
actaaagaaaaacattaccaaaaaaaatctcaaaatgttttaagaaagtttacgaatttgtgttgggccgcatttaaagctgtcctgggctgcatgcagcccggggccatgggttggacaggcttgagagtccagcaagtacaatagacaagaaaaagaaataaaaaccyatacttggaaaggaagaaaaacatcatcatacacagatgatgtgatttttctttgtagaaaaatccaaaaaaatctacaggtaatttttagaattaataagcataaggttcctgaatacagaagcaatatcccaaattcatttgtattactctatatcaggaccaagtggaaaattttagagagattattgcatttacaaaagccataaacaatataaaggatctagaaataaatctaagaaaagacatttaaggacattggggaaaatataaacatttgttcaaaatattatagaagatgtaaataaatcaagacatgactatgctagtgagatgtgagactcaatagcatgtcagttctcttgtgttcttgtgtgtaaattgccaagttaattctaaagtatttataggaataaaaagggtaagtttagtgtaagactcttttgta

SEQ ID NO: 935088 - DNA, 618 bp, Homo sapiens
actaaagaaaaacattaccaaaaaaaatctcaaaatgttttaagaaagtttacgaatttgtgttgggccgcatttaaagctgtcctgggctgcatgcagcccggggccatgggttggacaggcttgagagtccagcaagtacaatagacaagaaaaagaaataaaaacctatacttggaaaggaagaaaaacatcatcatacacagatgatgtgatttttctttgtagaaaaatccaaaaaaatctacaggtaatttttagaattaataagcataaggttcctgaatacagaagcaatatcccaaattcatttgtattactctatatcaggaccaagtggaaaattttagagagattattgcatttacaaaagccataaacaatataaaggatctagaaataaatctaasaaaagacatttaaggacattggggaaaatataaacatttgttcaaaatattatagaagatgtaaataaatcaagacatgactatgctagtgagatgtgagactcaatagcatgtcagttctcttgtgttcttgtgtgtaaattgccaagttaattctaaagtatttataggaataaaaagggtaagtttagtgtaagactcttttgta

SEQ ID NO: 935089 - DNA, 645 bp, Homo sapiens
tgcagaagcagtgggtgcaggaacatgtctaagacccacccgccccggagtctggggctcgagaacctttatgttccaggccaggcccaggggccatgggtgggctgcaggggtggccttgaggcgaacgggcagctcaccgtgtctccacctggccaggtgctctacaagctggcatggagcgagagcatggagagggactgtgccaccttctgcgccaagaagtgaggacccccacttgggccccccctcagccccacagcgagctcccagcacccccgcaacacccccgagttcctgcctcatgtcccccactccttagccctccatcacagccccccattctggccctccccctaccccwactcccggtatccactacctcctagcccccaccccatcacatggtacacaccccccttccccaacacacacactcggcctcagcaaagcttcccgtgtcccccaggttcgctgaccacctgcacaagttccacgagaatgacaacggggctgcggctggtgacttgtggcagtgataccccggggcctcccccgtgacaatgacggctgcgcctccacccgactgctcaatgcatctaatcacttagactcccctgaagaatcccccatggaaactgccct

SEQ ID NO: 935090 - DNA, 546 bp, Homo sapiens
gtagtattcgtctttctgcgtttggcttattttacttaacatgtcttccaggtccatccatgttgtggcaaatggcagatgtcctcttttaaggctgaataaaatattcccttgtatatatacactacggtttctttattttgtctgtcwacatacacgtaggttgttttcaaatcttggctattgtgaataatgctgcaatgaacatggaagtgcagatatttttacgaggtagtgatttcatctcctttgcttatattccagaagagagattgctgggctgtgtggtagttctatttttaatttctttaggaactgttttccataatggctgtaccagtctacatttccagtcacaatgtagtagggtttctttttctccacacttttacaaacatttgttatcacttgcctttttgataatagctgtccttagaagtgtgaggttatatctcatagtggttttgatttgcatttccctgatgatttagtgatgttgagcacattttcatttatctcttggccatttttatgtctttggagaaa

SEQ ID NO: 935091 - DNA, 780 bp, Homo sapiens; identical to SEQ ID NO: 921767

SEQ ID NO: 935092 - DNA, 610 bp, Homo sapiens
ctcatgcctgtaatccctgcactttgggaggccgagttggatagatcacttgaggccaggagttcgagaccagcctggccaacatggtgaaaccctgtctctactaaaaatacaaaaattacttgggcgtggtggcacgtgcctgtggttccagctaccccggaggctgaggcaggagaatcgcttgaacccaggaggcggaggttgtagtgagccgagatcgccccattgcactccagcctgggcaacagagtgagactctgtctcaagagaaaaaaaaagaaagaacatgggttscttcttgaatgctccccttattcctcccaccaaaggtaacgttctgggggagaaggaggcctgggtgcagctactagcatctgggggagaggcagttggtaactgtacccagggtcccttgcttctccatttctggagatccatccttgccctcctctccgagatcctcctagaaggctgtagctccattgttctcagcttctgggaagccgagaggacgttctgggaagaagaaagtgatgtataggccattgttttctcacgggaacctctgtccccaaatcctccagacctccacatccaggcacctggt

SEQ ID NO: 935093 - DNA, 588 bp, Homo sapiens
aacttgattgccttacaaatgacctgcttcaaggatgtggaaattcctaatttcttctgggaaccttctcaactcccccatcttgcatgttgtgacatcttcaccaggaacatcaacctgtatttccctgctgccatatttggttttcttcccatctcggggacgcttttctcttactataaaattgtttccttcattctgagggtttcatcatcaggtgggaagtataaaccttctccgcctgtgggtctcatctgtcagttgtttactgaktttatggaacaggctttggagggtacctcagttcagatgtgtcatcttccccgagaaagggtgcagtggcctcagtgatgtacacggtggtcacccccatgctgaaccccttcatctacagcctgagaaacggggatattaaaagtgtcctgcggcagccgcacggcagcacagtctaatctcaatatcttcttatctgttccattccttttgtagtgtgggttaaaaaaggcagcaaggtcaaataagaatgatatcacagggtgagcacccactgtgacattacgagtaatacctccctaggatataaaaaat

SEQ ID NO: 935094 - DNA, 588 bp, Homo sapiens
aacttgattgccttacaaatgacctgcttcaaggatgtggaaattcctaatttcttctgggaaccttctcaactcccccatcttgcatgttgtgacatcttcaccaggaacatcaacctgtatttccctgctgccatatttggttttcttcccatctcggggacgcttttctcttactataaaattgtttccttcattctgagggtttcatcatcaggtgggaagtataaaccttctccgcctgtgggtctcatctgtcagttgtttactgagtttmtggaacaggctttggagggtacctcagttcagatgtgtcatcttccccgagaaagggtgcagtggcctcagtgatgtacacggtggtcacccccatgctgaaccccttcatctacagcctgagaaacggggatattaaaagtgtcctgcggcagccgcacggcagcacagtctaatctcaatatcttcttatctgttccattccttttgtagtgtgggttaaaaaaggcagcaaggtcaaataagaatgatatcacagggtgagcacccactgtgacattacgagtaatacctccctaggatataaaaaat

SEQ ID NO: 935095 - DNA, 630 bp, Homo sapiens
ctccccaaagaggcaagggaaggggggccctgggaaagaaactcagcttggctgtcagagtttgcagcgtaaccagtgtgctcatggtaaagaaataggacagtggaagaacaaatgccctcagctcaaaagaaaacaaggtgactcagagcaggaggccccggacaaggaggaaggggccctgctcaacctgcagaagggttcttggactgagggagactgggctcaagcgtccccaaagagcctctggtcagaatgacagtcgggggtggagacattgactttcttgtagatagcggtgcgcaacagtcgctagtaacagccccrgtcgccctcttatccaaaaagactattgacgtcattggagccacaggggtttcagcaaagcaagctttctgcttgcctcggacttgtactgtaggaggacataaagtcattcatcagttttggtacatgcctgactgtcccttgacctttttgggaagggacttgctcagcaagctgggagccactatctctttgacagagaatggctcttctctgctaaagttacccggaacgggagtcattatgacccttatggtcccctgagaggaggaatggagacttttcttaaatgagccgggccaa

SEQ ID NO: 935096 - DNA, 571 bp, Homo sapiens
actcagcttggctgtcagagtttgcagcgtaaccagtgtgctcatggtaaagaaataggacagtggaagaacaaatgccctcagctcaaaagaaaacaaggtgactcagagcaggaggccccggacaaggaggaaggggccctgctcaacctgcagaagggttcttggactgagggagactgggctcaagcgtccccaaagagcctctggtcagaatgacagtcgggggtggagacattgactttcttgtagatagcggtgcgcaacagtcgctagtaacagccccagtcgccctcttatccaaaaagactattgacgtcattggagccacaggggtttcagcaargcaagctttctgcttgcctcggacttgtactgtaggaggacataaagtcattcatcagttttggtacatgcctgactgtcccttgacctttttgggaagggacttgctcagcaagctgggagccactatctctttgacagagaatggctcttctctgctaaagttacccggaacgggagtcattatgacccttatggtcccctgagaggaggaatggagactttt

SEQ ID NO: 935097 - DNA, 630 bp, Homo sapiens
ccccagtcgccctcttatccaaaaagactattgacgtcattggagccacaggggtttcagcaaagcaagctttctgcttgcctcggacttgtactgtaggaggacataaagtcattcatcagttttggtacatgcctgactgtcccttgacctttttgggaagggacttgctcagcaagctgggagccactatctctttgacagagaatggctcttctctgctaaagttacccggaacgggagtcattatgacccttatggtcccctgagaggaggaatggagacttttcttaamtgagccgggccaagagagaagaccagctctggctaagccgtggccaaaagtacgggcagaagacaaccttccaggattggccagttaagactggggcccagccggtgaggcaaaaacaggagccggtccccagagaagcccttcaaggtatccaggtctgtctcaagcacctaagaacttatggaattattgttccttgtcagtgtccatggaacactcccctcctgcctgttcccaagccacagaccaaggactaccggccggtacaggatttgcgctttcttcttcaagctacactgactttacatccaacagtacctaacccgtccacattg

SEQ ID NO: 935098 - DNA, 588 bp, Homo sapiens
ccacccaaaggcaagtaacagagcccaagttcaagccctcatcttttgacttaaatcagatgctcttccattccttatggctctgcatggggagtttctcccaagtgcacagggaactggaaggacctgggaaaccacactagagcctccagcctgcagcctttgcctctttttcttccccaaagtccagcctcttcattcctttcagaggccactgccctggccttggctttgtccccacctgagaagaagcaagtcagtagagtttcctgagggtacgtggcaggcctgccagagacctcgctcctccagtgacctagacctagagcagggtgcctttcgaggggaacractggatggctgggagggagccgggggtctggtgtacaagggcagaggggtgggcagatcctgcttgtccctgctagggttgtgaggcaggtatgggtgggtagtttctgcctctcttcccttcctagctcttgtctactgtgccaaaaggggaaatgacaaaaagtcaggtcaaaattccagctggaatacttgaaacacttgatacttgccaggaaattagttctttaaactgat

SEQ ID NO: 935099 - DNA, 597 bp, Homo sapiens
acttgggtttgtatcccatctctgccattagtagtttactggctttggataaattacttagccttactgaaccaactttggatttttatagagatactgtaatgaaaggaataaggtatcagtcttagcagagcatccagagtgttcctattaaaacctaaatcatatcctgtcattgctctgccccaaaccattcaatggcttcccaactcaaagttaaaaactcatctttccagtggcctgcaagagcctatgctatccggtgtctgacctcatctgttgttcctttctccctccctttcttggctccagacgcactctggtctccttgctgttccttgaatacaccaggcacactctyttcacctgaaacactttaccccagatatcttagcttactctctgcctccctcaattcattgatgaaatgtctcagtgaagtcttctctctctcctctgtaaaagtatactctctgttccccttctttactgttctagctactattgctgtgtaacaaatcactccccaaatttaatgagtgaaaacatcagccatcatcttatttctcacggtttctgagggtcaggaattctgga

SEQ ID NO: 935100 - DNA, 597 bp, Homo sapiens
acttgggtttgtatcccatctctgccattagtagtttactggctttggataaattacttagccttactgaaccaactttggatttttatagagatactgtaatgaaaggaataaggtatcagtcttagcagagcatccagagtgttcctattaaaacctaaatcatatcctgtcattgctctgccccaaaccattcaatggcttcccaactcaaagttaaaaactcatctttccagtggcctgcaagagcctatgctatccggtgtctgacctcatctgttgttcctttctccctccctttcttggctccagacgcactctggtctccttgctgttccttgaatacaccaggcacactcttttcrcctgaaacactttaccccagatatcttagcttactctctgcctccctcaattcattgatgaaatgtctcagtgaagtcttctctctctcctctgtaaaagtatactctctgttccccttctttactgttctagctactattgctgtgtaacaaatcactccccaaatttaatgagtgaaaacatcagccatcatcttatttctcacggtttctgagggtcaggaattctgga

SEQ ID NO: 935101 - DNA, 575 bp, Homo sapiens
tgtatttcattatatctattggctttttagttatacctcttaaaatttttttttctgttttatgtaggatttataatatacatctttaacttatcacagattaccttcaaatagtattttaccagctcaagtgtaatgtagaaaccttacaagagtatattttcatttctgtctcctaatttttatgctattgtctataatacattaggtttgttgttgtttgtttttaccttattgctgttggctggggtcagcaaacattttctgtaaagggctagatagtacaggcataccttggagatactgtgggtttggttccataccaccacaataatacaaatatgcaagaagtggatatcacaataaagtgagtcacacaagtcttttggcttcccagtgcatataaaagttttgcttatactacactgtagtctgttmagtgtgcaatagtgttatgtctaaaaaaacacataccttaattttaaaatgctttattactaaaaaatgctaacaatcatttgagcattcagtgagttgtaatctttttgctggtggaaggtcttttcttattgatg

SEQ ID NO: 935102 - DNA, 628 bp, Homo sapiens
aattgatcttgtatcctgcaatcttgctcaaattgttagttttaatagtttttagtggattcctcagtgttttctatatacaagatcatttcatttgccaataaatagttttacttcttccttttcaatctgaatgtcttttatttcttttcttgcccaattacctggataattttttttcttttttacaattttgactagaagtggtaagagcagacatccttactgtgttcttgatcttgaggggaaaatattcagtctttcactattaaatattatgttagctgtggggttttgtagatttcctttatcagattgagaaagttcctttctattcctcacttgctgagtagtcttatcataaaagggcattggcttttgtcaaatgttttgtccacatctattgaaawgatctcaaaaatcgtattctttattgtattaatacgtgttgtaagcattgatttttcagatgctaaacaaccttgcattcctaggataagtgctatttggtcatgatgtacaattcttttgtgtattgctgaattgggtttctagtattttaaatctacttttataaggcatattatgaaattcatccactacagattctgtctgtaattttcttgtg

SEQ ID NO: 935103 - DNA, 628 bp, Homo sapiens
aattgatcttgtatcctgcaatcttgctcaaattgttagttttaatagtttttagtggattcctcagtgttttctatatacaagatcatttcatttgccaataaatagttttacttcttccttttcaatctgaatgtcttttatttcttttcttgcccaattacctggataattttttttcttttttacaattttgactagaagtggtaagagcagacatccttactgtgttcttgatcttgaggggaaaatattcagtctttcactattaaatattatgttagctgtggggttttgtagatttcctttatcagattgagaaagttcctttctattcctcacttgctgagtagtcttatcataaaagggcattggcttttgtcaaatgttttgtccacatctattgaaaagatctcaaaaatcgtattctttattgtattaatacgtgttgtaagcattgatttttcagatgctaaacaaccttgcattccyaggataagtgctatttggtcatgatgtacaattcttttgtgtattgctgaattgggtttctagtattttaaatctacttttataaggcatattatgaaattcatccactacagattctgtctgtaattttcttgtg

SEQ ID NO: 935104 - DNA, 599 bp, Homo sapiens
agatcttctgagaacatgctcactatcaaggacagcaccaaggggttggcattaaaccattcatgagaaatctgccttcatgaacccatcacctttcaccaggccccacctccaacactggggattcaattcaacatgagattcagagggaacaacctctaaactacatcattccactcctggcccctcaaatctcatgttcttcttccactgagaaatataatcatccccagccagtagtttcccaaaagtctgaattcattttagcatcactcaaaagtccaaagtcccaagtccaaagtcccatctggagttgagtscctaccacctatgagtctggaaaatcagaacaaattacttgcttttaagatacaatgggggtacaggcattggttaaacattcacattccaaaagggataaatcagccaaaaagacaggggctatttacatgtacagcccccacacaagtgcaaaaccaagcagggcagtcattaaatcttcaagttccaaagcagtctccttcaactccacgtcctgcatccagggaacacaggtgcaagggttgggttcccaaagccatggcagctctgcttctagg

SEQ ID NO: 935105 - DNA, 728 bp, Homo sapiens
agtgcacatactatttagagtggtgatatagcttggatatttttccctgcccaaatctcatgtccagttgtaattcccagtgctggaggtggggcctggtgggagacgtttggatcacggcttggcgccatccattaggagggawccttcatggcgtggcgctgtgcttcatgatagggagttctcttaagatctggtcatctaaaagtgtgtggcacctcccccacctactccctgtctctcttgttcctgctttcaccctatgacctgcctactcccctctcaccttccttcatgagtgtaagcttcttgaggctttcttagaagctgagtagatgccagcaccaggcttcctgtaaagcctgcagaactgtgagccaatgaaaccgcctttctttataaattacccagtctctggtatttctttatagcaatgcaagaatgacctaacacaaatggccatgcttatctggaaaactggaaatgtaagttatggggagagttaagaggagccagatagcaaacatggctttcttaagcttttctgaaggaagatgtgggaaaaaatgtggcaatatgagaacaatttgggagtctcagggttggtttgttttcatcccagcatttctggaatctcagctcattcctgagatgagaggctcagtcacgaaaacattgccaagcacttgtggcctctcccatgcaactaagcacctggtcatccccac

SEQ ID NO: 935106 - DNA, 728 bp, Homo sapiens
agtgcacatactatttagagtggtgatatagcttggatatttttccctgcccaaatctcatgtccagttgtaattcccagtgctggaggtggggcctggtgggagacgtttggatcacggcttggcgccatccattaggagggatccttcatggcgtggygctgtgcttcatgatagggagttctcttaagatctggtcatctaaaagtgtgtggcacctcccccacctactccctgtctctcttgttcctgctttcaccctatgacctgcctactcccctctcaccttccttcatgagtgtaagcttcttgaggctttcttagaagctgagtagatgccagcaccaggcttcctgtaaagcctgcagaactgtgagccaatgaaaccgcctttctttataaattacccagtctctggtatttctttatagcaatgcaagaatgacctaacacaaatggccatgcttatctggaaaactggaaatgtaagttatggggagagttaagaggagccagatagcaaacatggctttcttaagcttttctgaaggaagatgtgggaaaaaatgtggcaatatgagaacaatttgggagtctcagggttggtttgttttcatcccagcatttctggaatctcagctcattcctgagatgagaggctcagtcacgaaaacattgccaagcacttgtggcctctcccatgcaactaagcacctggtcatccccac

SEQ ID NO: 935107 - DNA, 655 bp, Homo sapiens
tgcgtaatgctgtcacttccccaggatatccatgtctgtattagtctgctttctgttgcttgtaacagaattctagaaatgtgtaatttataaagaaaaggaatatggttcttactgttatggaggctaacaagtccaaggtcaaggggccacatctggtgaaggtcttcttgctggtgaggacmctttgcagagtcctgaggcagcccaggccatcacatggtgaagggctgagtgtgctgctgagatttctctctttctcctgttacgaagccacaaatgccactgctgtgataacccatgaatccatgaatggattaatcccattgtgagggctatgccctcatgaccaaatcacctttaaaggccccacctcttaatactgccacattggggattaagcttcaacattagtttcagagggagtaaacattgatatcataggcttttgcccctggcccccaaaactcatgtccttctcacatacaaatatatgcaatccatccccataaccccaaagtcttaacttatccccacaccaactcggaagtcgaaagtccacagtctcatctgtgagtctgtgaaatcaaaacgggttgtctactttcaaggtacctagaaagactcacagatttctattttcaaagtgataaat

SEQ ID NO: 935108 - DNA, 655 bp, Homo sapiens
tgcgtaatgctgtcacttccccaggatatccatgtctgtattagtctgctttctgttgcttgtaacagaattctagaaatgtgtaatttataaagaaaaggaatatggttcttactgttatggaggctaacaagtccaaggtcaaggggccacatctggtgaaggtcttcttgctggtgaggaccctttgcagagtcctgaggcagcccakgccatcacatggtgaagggctgagtgtgctgctgagatttctctctttctcctgttacgaagccacaaatgccactgctgtgataacccatgaatccatgaatggattaatcccattgtgagggctatgccctcatgaccaaatcacctttaaaggccccacctcttaatactgccacattggggattaagcttcaacattagtttcagagggagtaaacattgatatcataggcttttgcccctggcccccaaaactcatgtccttctcacatacaaatatatgcaatccatccccataaccccaaagtcttaacttatccccacaccaactcggaagtcgaaagtccacagtctcatctgtgagtctgtgaaatcaaaacgggttgtctactttcaaggtacctagaaagactcacagatttctattttcaaagtgataaat

SEQ ID NO: 935109 - DNA, 655 bp, Homo sapiens
tgcgtaatgctgtcacttccccaggatatccatgtctgtattagtctgctttctgttgcttgtaacagaattctagaaatgtgtaatttataaagaaaaggaatatggttcttactgttatggaggctaacaagtccaaggtcaaggggccacatctggtgaaggtcttcttgctggtgaggaccctttgcagagtcctgaggcagcccaggccatcacatggwgaagggctgagtgtgctgctgagatttctctctttctcctgttacgaagccacaaatgccactgctgtgataacccatgaatccatgaatggattaatcccattgtgagggctatgccctcatgaccaaatcacctttaaaggccccacctcttaatactgccacattggggattaagcttcaacattagtttcagagggagtaaacattgatatcataggcttttgcccctggcccccaaaactcatgtccttctcacatacaaatatatgcaatccatccccataaccccaaagtcttaacttatccccacaccaactcggaagtcgaaagtccacagtctcatctgtgagtctgtgaaatcaaaacgggttgtctactttcaaggtacctagaaagactcacagatttctattttcaaagtgataaat

SEQ ID NO: 935110 - DNA, 574 bp, Homo sapiens
gggttgtaggaatgaagtccttgtttccttgctggctgttggccaggggctgccctcagcttctggaggccgcctgccctccctggttcatggcccatctcatcctgacagccagcacccgcgggaagtccctcttgcactgtgactctctcccrcctcttccattctctatggcttgtctgcctccctctttcatctttaagagtgcatgtgagtatattggacctacctgaatcagccaggctaacctccccattttaaggtctgcagccttaattctacctgcaaagtcccttttgccatgtaatgtgccatattcacaggtgtcaggaatcagagggcaggtatattgggggaccattattctgccaactacacagggccttatatggtctggctctgtgtccccattcaaatctcatcttgaattgtaatccgaattgtaacccccacgtgttggggggagggaccttgtgggaggtaattaaatcatgggggcggttaccctcatgctgttcttgtgatagtgagtgagttctcacgagatctgaaggttttgcaaggagcttttccc

SEQ ID NO: 935111 - DNA, 566 bp, Homo sapiens
ggaatgaagtccttgtttccttgctggctgttggccaggggctgccctcagcttctggaggccgcctgccctccctggttcatggcccatctcatcctgacagccagcacccgcgggaagtccctcttgcactgtgactctctcccgyctcttccattctctatggcttgtctgcctccctctttcatctttaagagtgcatgtgagtatattggacctacctgaatcagccaggctaacctccccattttaaggtctgcagccttaattctacctgcaaagtcccttttgccatgtaatgtgccatattcacaggtgtcaggaatcagagggcaggtatattgggggaccattattctgccaactacacagggccttatatggtctggctctgtgtccccattcaaatctcatcttgaattgtaatccgaattgtaacccccacgtgttggggggagggaccttgtgggaggtaattaaatcatgggggcggttaccctcatgctgttcttgtgatagtgagtgagttctcacgagatctgaaggttttgcaaggagcttttccc

SEQ ID NO: 935112 - DNA, 566 bp, Homo sapiens
ggaatgaagtccttgtttccttgctggctgttggccaggggctgccctcagcttctggaggccgcctgccctccctggttcatggcccatctcatcctgacagccagcacccgcgggaagtccctcttgcactgtgactctctcccgcctcttccattctctrtggcttgtctgcctccctctttcatctttaagagtgcatgtgagtatattggacctacctgaatcagccaggctaacctccccattttaaggtctgcagccttaattctacctgcaaagtcccttttgccatgtaatgtgccatattcacaggtgtcaggaatcagagggcaggtatattgggggaccattattctgccaactacacagggccttatatggtctggctctgtgtccccattcaaatctcatcttgaattgtaatccgaattgtaacccccacgtgttggggggagggaccttgtgggaggtaattaaatcatgggggcggttaccctcatgctgttcttgtgatagtgagtgagttctcacgagatctgaaggttttgcaaggagcttttccc

SEQ ID NO: 935113 - DNA, 565 bp, Homo sapiens
ggtagcgctttattctctcacagttctggaaggtagaagtcagaagtcaaggtatcagttagagacatgcttcatattcacttacccacaaactagtggatgacacattttggccatttggaagatctttattataggagtatgtagattttccatagagtgctgttgtgtgacttgaattttagttgtggccctgcctctgactttgtcagtgatttatcctggttccaggaaataagaatagcctttttctcatgatagtctttggtagtttttaaaacatttgtttaactcaacagatgcaccatgtgcctgacwctgctctataccagtgaagaatttacactgtaatggggggaggtaactataaagatgataaacataacatcttaattggagtgagtatgaagatggttgttatcttttcctaaaagaaacaacaacaacaaaacaaaaaaggaagtcaaggtatcaagagggagatgctacctctgagacactggagagaatccttcattgcctcctcctcgcttctggtggtggccgtcaattcgtggtgtttcct

SEQ ID NO: 935114 - DNA, 565 bp, Homo sapiens
ggtagcgctttattctctcacagttctggaaggtagaagtcagaagtcaaggtatcagttagagacatgcttcatattcacttacccacaaactagtggatgacacattttggccatttggaagatctttattataggagtatgtagattttccatagagtgctgttgtgtgacttgaattttagttgtggccctgcctctgactttgtcagtgatttatcctggttccaggaaataagaatagcctttttctcatgatagtctttggtagtttttaaaacatttgtttaactcaacagatgcaccatgtgcctgactctgctctayaccagtgaagaatttacactgtaatggggggaggtaactataaagatgataaacataacatcttaattggagtgagtatgaagatggttgttatcttttcctaaaagaaacaacaacaacaaaacaaaaaaggaagtcaaggtatcaagagggagatgctacctctgagacactggagagaatccttcattgcctcctcctcgcttctggtggtggccgtcaattcgtggtgtttcct

SEQ ID NO: 935115 - DNA, 608 bp, Homo sapiens
ctgccctgtggtccagcatcccccactccccaccctcgtgttcagttctaaacagagacacagcctcggaaggggggcgggtggctgccgcctgggctcagggccttctctgggagggatctgcgcggattgcggggggtgctcttcactggggtctccgccctcttcattttagagccgtggccggcgggcctgggtttcccaacgccccagaagccctgcaaggatccycggcctccccggtgacggcggagagaggagctggtgtccgcaggaggcctcgtccccggcccggcccctctacgcccccaggaacgggatgttcttgaggggcttctccgggaactgcagggcgtacaggcgggccatgtactggagctcaggcatcacaagcctctggcacacgcccagcgtctggttgtccaggcccggccggaggttgtaacccaggatgtcggccttgccggactggtaggggcgcaggcgcgggtctctgatctgcgtgtggttcttgagcgcgccgccgtcctgcaggcacaggctcgcgagttcgcgcctccgggcgcgcagccgctccacctccccgcgcagccgccgcggccccagct

SEQ ID NO: 935116 - DNA, 632 bp, Homo sapiens
ttgggacgcagagattcaaagtcgtgtctgagagcaagtgatgttttactctattatggatcttaaaattagctttcttgaaagatccattaaaaaagaatgccaacttatcttcaaaattccccagggaagaggacttctatttagaatctctttctgagaataaaatttagaacaaagaaggaggcttttagaatatttagaggtcagtattggaaatgagctaaggttttcattatgaactaaaaagkatctttaaaagaatatttttggtctaactaataaaataaaaacacagtggcttaactgtcaccttgtggattgctgagctgcaagtttgtaaaatacactgttttcagtgacttcacattaaaaacgtttacattttcaagaggataaaattgagtatgttttagccattttgccatggcccaaatgtccccgttccatctttaaaattgtatgctactcaaactatgttgaattatgactagaactgttgatattcatatttccccacatagcaaaagagcagctcttaataaatgaagtctgaaagcatgtagtgctgtgggggtggggtggggaatcattcttagcattatcagatattctaggtacaaatccaggtt

SEQ ID NO: 935117 - DNA, 755 bp, Homo sapiens
gggtactcctctctcatcagagaggaggtcctggagaggtggctcctctccgcgggcgtctctccgggtctgtgaagctctcagcgcagagggtagctcctctctgcctgcaggtcgtctctgcagctctcggcggagaggatgttcttctctgcagttagtcatcccattgtctccagctatcagcagagagggtacgtctcattgaagctggtcacccagtcccatgaactctctctactctctgggtcctctggccatactctgcactgctctggctgagcccagggctcttatagacctcagaggggaggaagtgcatggggattggcccatgggtggccatgggcgggcccagagaggcaccatgagttcccactctggtgacggactggccacctggccctcagccttcaggccctccctgtcctgaaggtggagacttactggggacctacccccttccacccaggactctttctgcctcccactgccattcaaggccccgggtcactgccccaaccccacttcaagatcagaaccagcatcagaagcagagagaggccaggcagtgggagcagayacccccgaacctgcgacgggggagggtccttcctgcagccctctagggtgcagggtgcagagacgcccaggtcctgcgcctaggagggtggccgcagccgcacctgggaaggcagatccagcctgctccaggccttccccaagagcacaaggaggctcccatcgagggctgc

SEQ ID NO: 935118 - DNA, 706 bp, Homo sapiens
ggctgaaaattccaaaaaccacaatgcctcttctcctccaaagggtcacaagggatcaaaactggatagagaatgagtttgacaaattgacagaagtaggcttcagaaggtgggtaataacaaattcctctgagctaaaggagcatgttctaacccaatgcaaggaagttaagaacattgataaaaagttacaggaactgctgactagaataaccagtttagagaagaacatatgtgacctggtggagctgaaaaaacacagcacaagaacttcatgaagcatacacaagtatcaatagccaaagtgatcaagtagaagaaaggatatcagagattgaagatcaacttaatgaaatgaarcatggagacaagattagagaaagaagaatgaaaaggaatgaacaaagcctccaaaaaaatgggactatgtgaaaagatcaaacctacgtttgattggtgtacctgaaaatgagagggagaatgagaccaagttggaaaacactcttcaggatattatccaggagaacttccacagcctagcaagacaggccaacattcaaactcaggaaatacagttaatgccacaaagatactcctggaggagagcaaccccaagacacataatcatcagattcaccaaggttgaaatgaaggaaaaaatgttaagggcagccagagggaaaggttgggttacccacaaagggaa

SEQ ID NO: 935119 - DNA, 598 bp, Homo sapiens
taacacccccaaataaacaatgaatatgtacaccaaaagacatgcacaagaatactaacagtagtatcatttgttagaatcccaaatattcatcaacagtagaacagagaaagtattgtatgtttatacaatagttcatagcaattaaattgaataaactacagattttgcaacaatatgggttaagtacacaaacataatattgagataaagaaattggtcacaaaagagtacctattgtgtgagtccattaatgtagaattcaaaatattccaaactaatctctggtattagaaatcaggatattggttaccttttggggggttacaacaggaagcgatctggacaggcttctgggatactagctgcrctttatttctggaactagatgatgattacacaggtgtgctcatttagtgatgactgaactgtacagttattagccacttattggtatgtatgtgttccagttatctattgctttgcaacaaatcatctccattgcagtgacgtgaaacaagaacagtcatttatcatttttatgaatctgcaatttgggctgggcttagtagggacagtttgtctctgttccttgctt

SEQ ID NO: 935120 - DNA, 583 bp, Homo sapiens
ctggcgccactgagagcagcagtttgctcatgtttcttgcctttgagccctttcttcaattgaaaccttacatagatgtaagtggaacctctcacacaggccccaggtcaatccatataggtttgaattttggcttctcaatttttcaattgtatgatcgtagtcaatacctgaataccttgtgcctcagtttcctcatctctaaaatgttagaaacattctacttaactcatttaggtcaatgcacatagagtgtgtgaacagtgcctgccrcatggagcttctggctagagggtagatgagggtgagttcccagcagctcaggcaggttcctgatgtggcttgaatgtttgtcctctccagatctcatgttgcaatatgattcccaatgttggaggtggggtttggtgggaggcgattgggtcatgggggtagatccctcatgaatggcttagcgtcatcctcttgatgatgagtgagttcttgcttagttcacatgagagctggttgtttcaaggaacttagatccccctcctttctctcttgcttcctctctggccatgggataccaaagtgtcccgct

SEQ ID NO: 935121 - DNA, 566 bp, Homo sapiens
ggccagcctaaaacagtaaggtcaagttgtttggacaaagaagctacaggacgcaatcccggtccttgtgtaagaattctgactgcacagccctgcacttcggctgtgtgtaatgaaaagggttgggatgagtcaggaagagctagggtggggacagtctctaaagctgtcttcaaggaatggaaagatgagtggggaaaggatttaggatctatggggtcagctaggtttccttttgtgagtttatgtaatggttttgttaggatggcaaaaccaggtatccaaaggcaaaagtatccaaccatgcccaggaaggaaaggagttgttgttttgtagaaggtgctgtagtttgagagatcagttggacactatcrgcagggagagcacatgtgtttttatgagaattatgccaagataggtaacagatgaggaagaaatttgggcttgactgaagtgatggaggctatctgtgagggcttgcagcagtacagcccaggtaatttgctgagcctgatgggtgtcagggtcagtacaagtgaaagcgaagagaggctgggacgagggg

SEQ ID NO: 935122 - DNA, 702 bp, Homo sapiens
agttgtcccttgtcccctgtggatctggcagcatgaggatgctctctttctttctagtgttgccaaagccagattcatgaataaagctcttacgaatatttggtggccacataggcaagtctactggggagatgggaaagaaagggaggagtgtatggcaccctaagaaatttggagatgacctgggccctgacagcttcagaagcctccttattccctaacccttaggggtcttcaaaagtggtgagccccccgcccagtccaaccatatctcaccaaattaaatatcaaaccaagttctttttttttttttttttttttttgagacagagtcttgctctgtcacccaggctgsagtaccgtggcacgatctcggctcactgcaagctccgcctcccgggttcacgccattctcctgccttagcctcctgagtagctgggactacaggcacccaccaccacgcctggctaattttttgtatttttagtagagatggggtttcactgtgttagccaggatggtctctatctcctgacctcgtgatctgcctgcctcggcctcccaaagtgctgggattacaggcgtgagccaccgtgcccagcctcaaaccaagttcttagagtgaatacagatttacccacttaaatgctagaggcatacattcagaaaaaaatattattagactgcagtttggaccccaa

SEQ ID NO: 935123 - DNA, 726 bp, Homo sapiens
ctgtgtgccctggaagaagcattccctctctgtcaactaggaccttatacccacagcacctggagtgtgtgggcacgagaagtacaaatttcccaagcagatcgcggagagtaatggggagcagggccactctgtcctcccccttttgttcttgtgaccgcttattggagacaaaccaccatatgatggtccttcatgaagggtttaggctgcctcctggaggatggtggttcatctttgcaggttatcacctccaagctgatgcctcagttgcatcttcaaacggtgattccaagccttcactaaattagcagcttccatgtgtagtgttatatgataggaccaagggattgcatgctcaggtatacactgctacacttcttttattgtaaagtgggtctcttgacccacaatatgcaatgttatgtaggctgtttagttggtggataaaaaagtgtgtgtgtgtgtgtgtgtgtgtgtgtgtgtgtgtgtgtrtagttttataaattttatcagactgtgatgccggctaagctttctaggcaagaaaggcaaaaccatactcagaaaatgtgttggtttccattaagatgcattgctgcatcagaaaggggtctgatgtaattaacttgcaaagacgtgtcttgttagtcttctccagggatgattgtatcttggaggctcagaggtagtctctgttgcttgcaaattggacattgggtagta

SEQ ID NO: 935124 - DNA, 599 bp, Homo sapiens
gaaaaagactgacctcccctgagcaagaagaaattctgctgccagattgcttttatttacttgtttgtttgtttgtttgttttttgagacagggtcttgctctgtcccctaggctggagtgcagtggtgtgatcatggctcactggagcctcctaaccttctgggctaaagcgatcctcccacctcagtcccctgagtagctgggactacaggcatgtgccaccaygtccagctaatttttaattttttttgtagagctggggtcttgctatgttgcccaggctggtgtcaaactcctgagctcaagtgaccttcccaccttagccttccaaagtgctggaattacaggcatgagccaccatgcccggcccagactgcctttcaatacaactctttcctgggtctctactcttgatggccaaccctgcagatcttggacttgccagcccctaaaactgtgaatcaatccttaaaatctgtctctctcattcttttcatagcctattgtttctgtttctctggaggacgttggataatacaactagtttgccaaatagaaaactctgggggttttaactgctggaatggggaagttcaca

SEQ ID NO: 935125 - DNA, 563 bp, Homo sapiens
aaaagctccttgcaaaaccttcagatctcgtgagaactcactcactatcacaagaacagcatgagggtaaccgcccccatgatttaattacctcccacaaggtccctccccccaacacgtgggggttacaattcggattacaattcaagatgagatttgaatggggacacagagccagaccatataaggccctgtgtagttggcagaataatggtcccccaatatacctgccctctgattcctgacacctgtgaatatggcacattacatggcaaaagggactttgcaggtagaattaaggctgcagaccttaaaatggggaggttagcctggctgattcaggtaggtccaatatactcacatgcactcttaaagatgaaagagggaggcagacaagccayagagaatggaagaggcgggagagagtcacagtgcaagagggacttcccgcgggtgctggctgtcaggatgagatgggccatgaaccagggagggcaggcggcctccagaagctgagggcagcccctggccaacagccagcaaggaaacaaggacttcattcc

SEQ ID NO: 935126 - DNA, 563 bp, Homo sapiens
aaaagctccttgcaaaaccttcagatctcgtgagaactcactcactatcacaagaacagcatgagggtaaccgcccccatgatttaattacctcccacaaggtccctccccccaacacgtgggggttacaattcggattacaattcaagatgagatttgaatggggacacagagccagaccatataaggccctgtgtagttggcagaataatggtcccccaatatacctgccctctgattcctgacacctgtgaatatggcacattacatggcaaaagggactttgcaggtagaattaaggctgcagaccttaaaatggggaggttagcctggctgattcaggtaggtccaatatactcacatgcactcttaaagatgaaagagggaggcagacaagccatagagaatggaagagrcgggagagagtcacagtgcaagagggacttcccgcgggtgctggctgtcaggatgagatgggccatgaaccagggagggcaggcggcctccagaagctgagggcagcccctggccaacagccagcaaggaaacaaggacttcattcc

SEQ ID NO: 935127 - DNA, 571 bp, Homo sapiens
aaaagctccttgcaaaaccttcagatctcgtgagaactcactcactatcacaagaacagcatgagggtaaccgcccccatgatttaattacctcccacaaggtccctccccccaacacgtgggggttacaattcggattacaattcaagatgagatttgaatggggacacagagccagaccatataaggccctgtgtagttggcagaataatggtcccccaatatacctgccctctgattcctgacacctgtgaatatggcacattacatggcaaaagggactttgcaggtagaattaaggctgcagaccttaaaatggggaggttagcctggctgattcaggtaggtccaatatactcacatgcactcttaaagatgaaagagggaggcagacaagccatagagaatggaagaggygggagagagtcacagtgcaagagggacttcccgcgggtgctggctgtcaggatgagatgggccatgaaccagggagggcaggcggcctccagaagctgagggcagcccctggccaacagccagcaaggaaacaaggacttcattcctacaaccc

SEQ ID NO: 935128 - DNA, 679 bp, Homo sapiens
ccagaccagtcatctggcccaaccagttctgccgtcgcacccaggaacagaggacattaagaaaactccctctgattctacctccggcctgaccaatcagcacttctcacttcccaagcccctctccgccaaattatctttaaaaactctgatccccgagacggatttaagtaatcataaaactccggtctcccgcacagccggctctgagtgaattactctttcgccactgccgttcccctgtcttgataaattggctcttgtctgggcagcgggaaaggtgaactcattgggtggttacagttttctcatgaatggtttagtgccmtcgcccttggttgtgacaatgagcgagttattgtgagatctggttatttagaaagtgtgcggtagctcccccttctctctcttctacctgctctggtcatgtaaaacgtgcacctgcttcttgctctccttctgccatgactgaaaatttcctgaggtctccccagaagctgtcaagcttcctgtacagcctgctgagccatgagccaattaaacctcttttctttataaattacccagtctcggtatttctttatagcaacatgagaatggactaaaacactgctcttttcggttttaaccctatatgccgtgactgatcttaagattttagttaccaatgaaggattca

SEQ ID NO: 935129 - DNA, 636 bp, Homo sapiens
ggtggctcacgcctgtcatctcaacactttgggaagacgaggtgggcagatcacgaggtcaggagatcgagaccatcttggtctctactaaaaatacaaaaaattagccgggcccggtgttgggcgcctgtagtcccagctacttgggaggctgaggcrggagaatggcatgaacccgggaggcagagcttgcagtgagctgagatcgcaccactgcactccagcctgggggacagagtgagactccgtctaaaaaagaaaaaaagaagcaagagacaaaagccaaataagccagactctttttaacaacatactctctcaggaattaattcccgagagaaggggaatgcacacctgagggagggcattaatctattcatgaagtattttaccccgtaaccagaaaaacttccacttggccccacctcccaacactgccacactggggataaaattttagtatgggttttggcagggacaaaccacatccacaccatagcagtaaatattgatatacagttgacccttcaacaacatgggtttgaaccgtgcaggtccacttacatgtggatatttttcagtaaaacttacactgggtgtgcctgcctctcctgcctccccttccaccttctccac

SEQ ID NO: 935130 - DNA, 636 bp, Homo sapiens
ggtggctcacgcctgtcatctcaacactttgggaagacgaggtgggcagatcacgaggtcaggagatcgagaccatcttggtctctactaaaaatacaaaaaattagccgggcccggtgttgggcgcctgtagtcccagctacttgggaggctgaggcaggagaatggcatgaacccgggaggcagagcttgcagtgagctgagatcgcaccactgcactccagcctgggggacagagtgagactccrtctaaaaaagaaaaaaagaagcaagagacaaaagccaaataagccagactctttttaacaacatactctctcaggaattaattcccgagagaaggggaatgcacacctgagggagggcattaatctattcatgaagtattttaccccgtaaccagaaaaacttccacttggccccacctcccaacactgccacactggggataaaattttagtatgggttttggcagggacaaaccacatccacaccatagcagtaaatattgatatacagttgacccttcaacaacatgggtttgaaccgtgcaggtccacttacatgtggatatttttcagtaaaacttacactgggtgtgcctgcctctcctgcctccccttccaccttctccac

SEQ ID NO: 935131 - DNA, 636 bp, Homo sapiens
ggtggctcacgcctgtcatctcaacactttgggaagacgaggtgggcagatcacgaggtcaggagatcgagaccatcttggtctctactaaaaatacaaaaaattagccgggcccggtgttgggcgcctgtagtcccagctacttgggaggctgaggcaggagaatggcatgaacccgggaggcagagcttgcagtgagctgagatcgcaccactgcactccagcctgggggacagagtgagactccgtctaaaaaagaaaaaaagaagcaagagacaaaagccaaataagccagactctttttaacaacatactctctcaggaattaattcccgagagaaggggaatgcacacctgagggagggcattaatctattcatgaagtattttaccccgtaaccagaaaaacttccacttggccccacctcccaacactgccacaytggggataaaattttagtatgggttttggcagggacaaaccacatccacaccatagcagtaaatattgatatacagttgacccttcaacaacatgggtttgaaccgtgcaggtccacttacatgtggatatttttcagtaaaacttacactgggtgtgcctgcctctcctgcctccccttccaccttctccac

SEQ ID NO: 935132 - DNA, 619 bp, Homo sapiens
actaagatgaagtcaatgctcatttaccatttcaataattctaaaattatttcttagaattaattatgacaaatctactttgcctatgctctagaaataaaacaagaaggtctgggtcacagcacatcttcttatagcatgtcatrttgcacaggatagaacctccaggacgatgtagaatagaagtggtgagagcatacactttgatattgttcttcatttgggggtgaaaacatttcatctttgacaagtatgatgttcgctatagcaggattttcgtagttgctttttatcagattgaggaagttcctttctactgatggttttctgagagttcttttaatcattagtggatgttgggtttcatcaatgtttttctgtgtctgttgaaatgatcacatggtttacactgattaattttcaaatgtgaaactcaccttgcattatgaatataagcctttgtggtcataatgtattattccttttatatgttgttggattcaatttgttaaatttttagaatttttacatgtatagtcagaagagatacttgtctttagttttcttatgtcttgtttatgtattagggtaatgctaacttcataaaatgatttgggaa

SEQ ID NO: 935133 - DNA, 619 bp, Homo sapiens
actaagatgaagtcaatgctcatttaccatttcaataattctaaaattatttcttagaattaattatgacaaatctactttgcctatgctctagaaataaaacaagaaggtctgggtcacagcacatcttcttatagcatgtcatgttgcacaggatagaacctccagkacgatgtagaatagaagtggtgagagcatacactttgatattgttcttcatttgggggtgaaaacatttcatctttgacaagtatgatgttcgctatagcaggattttcgtagttgctttttatcagattgaggaagttcctttctactgatggttttctgagagttcttttaatcattagtggatgttgggtttcatcaatgtttttctgtgtctgttgaaatgatcacatggtttacactgattaattttcaaatgtgaaactcaccttgcattatgaatataagcctttgtggtcataatgtattattccttttatatgttgttggattcaatttgttaaatttttagaatttttacatgtatagtcagaagagatacttgtctttagttttcttatgtcttgtttatgtattagggtaatgctaacttcataaaatgatttgggaa

SEQ ID NO: 935134 - DNA, 619 bp, Homo sapiens
actaagatgaagtcaatgctcatttaccatttcaataattctaaaattatttcttagaattaattatgacaaatctactttgcctatgctctagaaataaaacaagaaggtctgggtcacagcacatcttcttatagcatgtcatgttgcacaggatagaacctccaggacgatgtagaatagaagtggtgagagcatacactttgatattgttcttcatttgggggtgaaaacatttcatctttgacaagtatgatgttcgctatagcaggattttcgtagttgctttttatcagattgaggaagttcctttctactgatggttttctgagagttcttttaatcattagtggatgttgggtttcatcaatrtttttctgtgtctgttgaaatgatcacatggtttacactgattaattttcaaatgtgaaactcaccttgcattatgaatataagcctttgtggtcataatgtattattccttttatatgttgttggattcaatttgttaaatttttagaatttttacatgtatagtcagaagagatacttgtctttagttttcttatgtcttgtttatgtattagggtaatgctaacttcataaaatgatttgggaa

SEQ ID NO: 935135 - DNA, 619 bp, Homo sapiens
actaagatgaagtcaatgctcatttaccatttcaataattctaaaattatttcttagaattaattatgacaaatctactttgcctatgctctagaaataaaacaagaaggtctgggtcacagcacatcttcttatagcatgtcatgttgcacaggatagaacctccaggacgatgtagaatagaagtggtgagagcatacactttgatattgttcttcatttgggggtgaaaacatttcatctttgacaagtatgatgttcgctatagcaggattttcgtagttgctttttatcagattgaggaagttcctttctactgatggttttctgagagttcttttaatcattagtggatgttgggtttcatcaatgyttttctgtgtctgttgaaatgatcacatggtttacactgattaattttcaaatgtgaaactcaccttgcattatgaatataagcctttgtggtcataatgtattattccttttatatgttgttggattcaatttgttaaatttttagaatttttacatgtatagtcagaagagatacttgtctttagttttcttatgtcttgtttatgtattagggtaatgctaacttcataaaatgatttgggaa

SEQ ID NO: 935136 - DNA, 416 bp, Homo sapiens
taatgctgtcacttccccaggatatccatgtctgtattagtctgctttctgttgcttgtaacagaattctagaaatgtgtaatttataaagaaaaggaatatggttcttactgttatggaggctaacaagtccaaggtcaaggggccacatctggtgaagrtcttcttgctggtgaggaccctttgcagagtcctgaggcagcccaggccatcacatggtgaagggctgagtgtgctgctgagatttctctctttctcctgttacgaagccacaaatgccactgctgtgataacccatgaatccatgaatggattaatcccattgtgagggctatgccctcatgaccaaatcacctttaaaggccccacctcttaatactgccacattggggattaagcttcaacattagtttcag

SEQ ID NO: 935137 - DNA, 416 bp, Homo sapiens
taatgctgtcacttccccaggatatccatgtctgtattagtctgctttctgttgcttgtaacagaattctagaaatgtgtaatttataaagaaaaggaatatggttcttactgttatggaggctaacaagtccaaggtcaaggggccacatctggtgaaggtcttcttgctggtgaggacmctttgcagagtcctgaggcagcccaggccatcacatggtgaagggctgagtgtgctgctgagatttctctctttctcctgttacgaagccacaaatgccactgctgtgataacccatgaatccatgaatggattaatcccattgtgagggctatgccctcatgaccaaatcacctttaaaggccccacctcttaatactgccacattggggattaagcttcaacattagtttcag

SEQ ID NO: 935138 - DNA, 648 bp, Homo sapiens
tgcgtaatgctgtcacttccccaggatatccatgtctgtattagtctgctttctgttgcttgtaacagaattctagaaatgtgtaatttataaagaaaaggaatatggttcttactgttatggaggctaacaagtccaaggtcaaggggccacatctggtgaaggtcttcttgctggtgaggaccctttgcagagtcctgaggcagcccakgccatcacatggtgaagggctgagtgtgctgctgagatttctctctttctcctgttacgaagccacaaatgccactgctgtgataacccatgaatccatgaatggattaatcccattgtgagggctatgccctcatgaccaaatcacctttaaaggccccacctcttaatactgccacattggggattaagcttcaacattagtttcagagggagtaaacattgatatcataggcttttgcccctggcccccaaaactcatgtccttctcacatacaaatatatgcaatccatccccataaccccaaagtcttaacttatccccacaccaactcggaagtcgaaagtccacagtctcatctgtgagtctgtgaaatcaaaacgggttgtctactttcaaggtacctagaaagactcacagatttctattttcaaagt

SEQ ID NO: 935139 - DNA, 648 bp, Homo sapiens
tgcgtaatgctgtcacttccccaggatatccatgtctgtattagtctgctttctgttgcttgtaacagaattctagaaatgtgtaatttataaagaaaaggaatatggttcttactgttatggaggctaacaagtccaaggtcaaggggccacatctggtgaaggtcttcttgctggtgaggaccctttgcagagtcctgaggcagcccaggccatcacatggwgaagggctgagtgtgctgctgagatttctctctttctcctgttacgaagccacaaatgccactgctgtgataacccatgaatccatgaatggattaatcccattgtgagggctatgccctcatgaccaaatcacctttaaaggccccacctcttaatactgccacattggggattaagcttcaacattagtttcagagggagtaaacattgatatcataggcttttgcccctggcccccaaaactcatgtccttctcacatacaaatatatgcaatccatccccataaccccaaagtcttaacttatccccacaccaactcggaagtcgaaagtccacagtctcatctgtgagtctgtgaaatcaaaacgggttgtctactttcaaggtacctagaaagactcacagatttctattttcaaagt

SEQ ID NO: 935140 - DNA, 634 bp, Homo sapiens
ccttgggacgcagagattcaaagtcgtgtctgagagcaagtgatgttttactctattatggatcttaaaattagctttcttgaaagatccattaaaaaagaatgccaacttatcttcaaaattccccagggaagaggacttctatttagaatctctttctgagaataaaatttagaacaaagaaggaggcttttagaatatttagaggtcagtattggaaatgagctaaggttttcattatgaactaaaaagkatctttaaaagaatatttttggtctaactaataaaataaaaacacagtggcttaactgtcaccttgtggattgctgagctgcaagtttgtaaaatacactgttttcagtgacttcacattaaaaacgtttacattttcaagaggataaaattgagtatgttttagccattttgccatggcccaaatgtccccgttccatctttaaaattgtatgctactcaaactatgttgaattatgactagaactgttgatattcatatttccccacatagcaaaagagcagctcttaataaatgaagtctgaaagcatgtagtgctgtgggggtggggtggggaatcattcttagcattatcagatattctaggtacaaatccaggtt

SEQ ID NO: 935141 - DNA, 477 bp, Homo sapiens
ctgtgatggcttggagaaacagtgtaaaccggcagtgtaaacaagagcagggcatgtagttcagaatggtgaataggagtatgactagacaaaagatagtagggatgacaagtttttttggggcacagtctaagttggtctggtgtcaaaygagactggggcctaataaaaaggagcgtctgtctatacaggagcttaaatgggctgtaccttgtagcattctgaggacaggcctgaattctgggaagcgaaagtgataaaagtattgtccagtcctttttaagttggtggctgagcttggtgaggtgtgtttttaaaagacctttagtccgttctacttttcttgaagacggaggaccgtaaaggatataaaggtttcactgaatactaagagcttgaaaaactgcttggctgatttgactaataaaggctggtctgttatcagactgtatagaggtaggaaggctaaactgagga

SEQ ID NO: 935142 - DNA, 595 bp, Homo sapiens
ccatctgtgaaccaggccctagtcttctcttcctctgtcaactgatcatagggaactccccatgaggccatcagtgcaggctaggggagagaaggcagggtgtcaggagtggagaccatgggcatttcagccacttccccatgtaacttacttgtgccttcacgacctgctcaagcccaatcacatatataccacttccatttgacaaagaagtgcttctgtgcatgccccactttatggctagatgggtcagagagcacccagtttatgataggcagttcaggttgcatggtgacttgatgatccatagtcaacattcagtttctaccaaaacccagtagcagaacaagagctgtctctcaaaatgagagtagttatctgcagaagatggtagggctttgctccaaaatcctagaggcctctgctrtgattcacctataggggcctgtaaaaggctccaaacagcatccctatctgtcactgacacctcaagcaccattggaactgctggatcatatggctcaagtggcagagcagcttgcacagcagcctggacctgttgcagagccttctcctgttctggaccccactcaaa

SEQ ID NO: 935143 - DNA, 620 bp, Homo sapiens
gcccttgctccacggctctggacacctcggaagggccctccagctttagtttccctgggggcccatgaggccactcaccttctccctctgcctcacctgcaggtgtggaccctctcctaggcaccaggctcccttccagagctggttcctggggagcctgccctgtggcatctccctgtggcatcatctccctgcagcatcccattcagatccctgtgtttgagctgggtttctcaaagggtggtctccaaactcactgagagccccacamcggtgaagagttctgcgccacccagacctatggagtcagcttctttgatgatgtgtcctgagtatctatacttttaacaagctcttcaggtaatttgttgcaagctaaattcaagaaccactatttcagaaagtgcagagccaaaaagaccagacgaagaaatgtaacagaactttaatttctatctatggcaccgataaaagatactaggtcctttataaaatgttggctcctaataacatcaggtgagtgctcctcccatttcatgaaggaggtccctaaatcttcaccttgagccctcatttggcatggacaaattcaacacatttctttctcagggcgcatctgt

SEQ ID NO: 935144 - DNA, 628 bp, Homo sapiens
agaagacacgggactgctctctgtcctggcttttgtctcctgatgaatggctgcattttcataaatgattttaggtacagcttggtaaacacatacatccctaacagaaaatgagggctttacttttgcaggaaatactacagatggtgaaataaatgataagacagtgagagagcaacctgccaaaatagcaataaggaacctgtttctcaccgggaagttgcattatgtttttattgkttgttgttttgtttttcaagaagcagcatggtttagtgggaagcctgcttgacctccatcttttttttcccctttcttaagctgcccagttattgtatataaaataatcccagttgctgaaatgataacctacctgaaggtaattattttgattaccttcagtttctccatttgctttagttcctctttagttcccccaaaactcgggatctacttatgcatgactttgacgttttcttaaggggtagttgtgtcacaaaatgctacaccattacgaagatttacatataagtcatctactttttttttaactgtaatcctttgtatcattatagttctcatagcaaacttttgctttctaaaatattctcgagtttgaacttacagt

SEQ ID NO: 935145 - DNA, 626 bp, Homo sapiens
ggggactttgaggacataggcaagtcctgtaggcctcagtgacccacattaagcagagccgacatcatctgccgtaacaacctgcccacaaagccagggctagaggcaaagccttccttgtgagaaagtctaaataccagaaggggtgaggcatcgttgccatgagtatgaagggcctgaggtgtctccttttccgtgtctctccccccatccttctctctcctaggagagccagtttctgagtgccccagaggagaatgctgtagtgaacacagccctgtacagagaagacagcagcttgattcctctcatttctcagtcattagcccctcactcgctctccgggaggataacggggtgtgygcagctcctccccttctttcctgaggaaacctcagtggcttccgtgcccttgccagggtgagtgttctcctgagtccttcctctgctcctacagaatagagaaggggcttctgttgccatcagcttagtaagcctggtgcgatggatgcccctgacagggaaagccatttaggggaagacctgggactacagcccggaggtcctgggttcttttgtggttttccccgtgctcgcctctctcagatgaagcctgctgcctgtta

SEQ ID NO: 935146 - DNA, 595 bp, Homo sapiens
attcctctcatttctcagtcattagcccctcactcgctctccgggaggataacggggtgtgtgcagctcctccccttctttcctgaggaaacctcagtggcttccgtgcccttgccagggtgagtgttctcctgagtccttcctctgctcctacagaatagagaaggggcttctgttgccatcagcttagtaagcctggtgcgatggatgcccctgacagggaaagccatttaggggaagacctggsactacagcccggaggtcctgggttcttttgtggttttccccgtgctcgcctctctcagatgaagcctgctgcctgttagcgtgagtgtgaggagactcgctcagaccagttcactgcccgcacccactgcatcaggcagcggggaaccctcgctccagcgaagtccttgagcctcgtcatgttgggcgcgtgagggatgggctggagttccagagcagggagctgtcacagctcgtaaggggagcctcgagagtggtcgtgcaggagggctccccagtgggcctcgtggggaccctgtcagaccctctgggtgtctcggtgacctgaggtcatcccagaatccccctg

SEQ ID NO: 935147 - DNA, 595 bp, Homo sapiens
attcctctcatttctcagtcattagcccctcactcgctctccgggaggataacggggtgtgtgcagctcctccccttctttcctgaggaaacctcagtggcttccgtgcccttgccagggtgagtgttctcctgagtccttcctctgctcctacagaatagagaaggggcttctgttgccatcagcttagtaagcctggtgcgatggatgcccctgacagggaaagccatttaggggaagacctgggactacagcccggaggtcctgggttcttttgtggttttccccgtgctcgcctctctcagatgaagcctgctgcctgttagcrtgagtgtgaggagactcgctcagaccagttcactgcccgcacccactgcatcaggcagcggggaaccctcgctccagcgaagtccttgagcctcgtcatgttgggcgcgtgagggatgggctggagttccagagcagggagctgtcacagctcgtaaggggagcctcgagagtggtcgtgcaggagggctccccagtgggcctcgtggggaccctgtcagaccctctgggtgtctcggtgacctgaggtcatcccagaatccccctg

SEQ ID NO: 935148 - DNA, 505 bp, Homo sapiens
gagacctagaagcaagggaggagtgcctcacgctggtggtcaactgggagttgggggtaccgtgtggctttcctgtgtgttgtgctcaaggaatgtgtatctgcacatttatccagtgagagagctgcttttgttcccatttcactgatgaggaaatcgaggtttaaagagattcagcatctcacctaagatcacccagccctggctgggtgcggtggctcaygcctgtaatcccagaactttgggaggccgaggtgggtggatcacaaggtcaggagatcaagaccatcctgcccaacatggtgaaaccccgtctctactaaaaatgcaaaaattacctgggtgaggtggcgcatgcctgtaatcccagctactcaggaggctgaggcacgagaatcacttgaacccagcaggtggaggttgcagtgagccgagatcgcaccactgcactccagtctggtgactgagcgagacttcatttcaaaaaaaaaagaaaaaagaaaaa

SEQ ID NO: 935149 - DNA, 811 bp, Homo sapiens
ttgggggatttctatttcagaaagtgttggctgaacatggctattttttactgaggtgaaatttatgcaacataaaattaacccctttaagtgtacaattcactggcattcagtacattcaaatgttgtgcaaccaccggttctgtgtagttccaaaacactttcctcaccccaaaataaaatcctgtgtccagctacccccatccccgcaacctgctagctccggggaaatgccaatttgctttctgtccctgtgattgatccattttggatatttcatacaaatggaatcatataatatcggtctttcactggggcctgtatcagaactttattcctttttatggctgaataatatcccattgcatgaatataaacaatttgttcatccactcatgcactgataaatatttgggttgcttccactctttgactattgwgaagagtgcaccatgcacactcacatattttttgagtcacttatatattttcagttctttggggtacatattaggagtggaattgctggttcatatgacaattgtatagttaacttttgaggaactgccaaactgttttccacagcagccacaccacttcaaactcccaccagcaacgtctaagggctccagtttccccaaattctttccaacactgctattttctgattgtttattattgccatccccatgggtatgaagcggcatttcagtgtgactttgatttgcatttctctaatgactaatggtgttgaacatcttttcatgcgttactggctgtttgcacatcttctgaatgtaaacttttaaca

SEQ ID NO: 935150 - DNA, 602 bp, Homo sapiens
gcagatacatgttgctgctccccatgaaactggttatgtgttatgggtgaataactactagaagaaaaacttatttgttagggcattgtctacttaagaatctgagaaatggaaaaatagagacatgaaatagctcatgcgccaatcagaattttaatttattttattttgtaaagaagataccacaaaatagtgttatatatccaggcacagattagtgaaacctagactgtaacctagggtaactcattgttgagtttaaaattcctgccatctatatagcaatragttttaaagtaacacttccccagatcagttaattttgacataaatgaaaaactggagaatggggactacttgagactggctcggctcaacaggtagaaggttcattccaagggtgaacaagtgtagttacatatgtttgctgttttgtctattaaagtataaagtagaaaagtcatgggtttgatataaaaaaagcctgggtttattatgcccaaacttctgcaaaaaaatggtgttaaaaataatacctgcatgtatgtttgttatgagaaatcatggattaattacaggtgatgtgcttagaagagtacctg

SEQ ID NO: 935151 - DNA, 602 bp, Homo sapiens
gcagatacatgttgctgctccccatgaaactggttatgtgttatgggtgaataactactagaagaaaaacttatttgttagggcattgtctacttaagaatctgagaaatggaaaaatagagacatgaaatagctcatgcgccaatcagaattttaatttattttattttgtaaagaagataccacaaaatagtgttatatatccaggcacagattagtgaaacctagactgtaacctagggtaactcattgttgagtttaaaattcctgccatctatatagcaatgagttttaaagtaacacttccccagatcagttaattttgacataaatgaaaaactggagaatggggactacttgagactggctcggctcaacaggtagaaggttcattccaagggtgaacamgtgtagttacatatgtttgctgttttgtctattaaagtataaagtagaaaagtcatgggtttgatataaaaaaagcctgggtttattatgcccaaacttctgcaaaaaaatggtgttaaaaataatacctgcatgtatgtttgttatgagaaatcatggattaattacaggtgatgtgcttagaagagtacctg

SEQ ID NO: 935152 - DNA, 619 bp, Homo sapiens
tctgattaaatgagatttagattctggaaagatctctgactgtaatgtggtaaatgaattgggagaaaaggcaaatgcttataacaaaaatgtctaaaattgattggattgtggtgatggttacacaagtctatgagtatattaaaagccattgagtagtacactttaaatggggaattatattatttgtgaaytatattcctttttttctatgttagctgagacaaagtctcagtctgtcacccaggctggagcgcgtgttgcgatcttggctcactgcaacctgtgcctccttgtacaagcaattctcttgcctcagcctcctgagtagctggggttacaggtgcccgccaccacacccagccaatttttgtatttttagtagagatggggtttcaccatgttggtcaggctggtcttaaactcctgacctcaggtgatccacccgccttggcctcccaaagtgctgggattgtaggcatgagccaccacgcttggtgtgaattatatttcaataaggttgttttaaaaagaaggtaagtgccaagaactagttaggggactcttatagcagtttatataagaaattgtggtagtctagattagggaggtgaaagta

SEQ ID NO: 935153 - DNA, 619 bp, Homo sapiens
tctgattaaatgagatttagattctggaaagatctctgactgtaatgtggtaaatgaattgggagaaaaggcaaatgcttataacaaaaatgtctaaaattgattggattgtggtgatggttacacaagtctatgagtatattaaaagccattgagtagtacactttaaatggggaattatattatttgtgaactatattcctttttttytatgttagctgagacaaagtctcagtctgtcacccaggctggagcgcgtgttgcgatcttggctcactgcaacctgtgcctccttgtacaagcaattctcttgcctcagcctcctgagtagctggggttacaggtgcccgccaccacacccagccaatttttgtatttttagtagagatggggtttcaccatgttggtcaggctggtcttaaactcctgacctcaggtgatccacccgccttggcctcccaaagtgctgggattgtaggcatgagccaccacgcttggtgtgaattatatttcaataaggttgttttaaaaagaaggtaagtgccaagaactagttaggggactcttatagcagtttatataagaaattgtggtagtctagattagggaggtgaaagta

SEQ ID NO: 935154 - DNA, 619 bp, Homo sapiens
tctgattaaatgagatttagattctggaaagatctctgactgtaatgtggtaaatgaattgggagaaaaggcaaatgcttataacaaaaatgtctaaaattgattggattgtggtgatggttacacaagtctatgagtatattaaaagccattgagtagtacactttaaatggggaattatattatttgtgaactatattcctttttttctatgttagctgagacaaagtctcastctgtcacccaggctggagcgcgtgttgcgatcttggctcactgcaacctgtgcctccttgtacaagcaattctcttgcctcagcctcctgagtagctggggttacaggtgcccgccaccacacccagccaatttttgtatttttagtagagatggggtttcaccatgttggtcaggctggtcttaaactcctgacctcaggtgatccacccgccttggcctcccaaagtgctgggattgtaggcatgagccaccacgcttggtgtgaattatatttcaataaggttgttttaaaaagaaggtaagtgccaagaactagttaggggactcttatagcagtttatataagaaattgtggtagtctagattagggaggtgaaagta

SEQ ID NO: 935155 - DNA, 619 bp, Homo sapiens
tctgattaaatgagatttagattctggaaagatctctgactgtaatgtggtaaatgaattgggagaaaaggcaaatgcttataacaaaaatgtctaaaattgattggattgtggtgatggttacacaagtctatgagtatattaaaagccattgagtagtacactttaaatggggaattatattatttgtgaactatattcctttttttctatgttagctgagacaaagtctcagtctgtcacccaggctggagcgcgtgttgcgatcttggctcactgcaacctgtgcctccttgtacaagcaattctcttgcctcagcctcctgagtagctgggrttacaggtgcccgccaccacacccagccaatttttgtatttttagtagagatggggtttcaccatgttggtcaggctggtcttaaactcctgacctcaggtgatccacccgccttggcctcccaaagtgctgggattgtaggcatgagccaccacgcttggtgtgaattatatttcaataaggttgttttaaaaagaaggtaagtgccaagaactagttaggggactcttatagcagtttatataagaaattgtggtagtctagattagggaggtgaaagta

SEQ ID NO: 935156 - DNA, 561 bp, Homo sapiens
tgttggataggaatggtgagagagggcatccttgtcttgtgccagttttcaaagggaatacttccagcttttgcccattcagtatgatattggctgtgggtttgtcataaatagctcttattattttgagataggttccatcaatacctagtttattgagagtttttagcatgaagagatgttgaattgtatcaaaggccttttctgcatctgttgagataatcatgtggtttttgtcattggttctgtttatatgatggattatgtttattgatttgtgtatgttgaaccatccttgcatgccagggatgaaaccgatttgatagtggtgggtaagctttttgatgtgctgccrgattcactttgccagtattttattgaggatttttgcattgatgttcatcagggatattggcccaaaattttctttttttgttgtatctctgacaggttttggtatcaggatgatgttggcctcataaaatgcattaggaaggaggccctctttttctattttttggaatagtttcagaaggaatggtactagctcctctttctacc

SEQ ID NO: 935157 - DNA, 521 bp, Homo sapiens
gaaaggatgatcacaggaagaacttgtactcattgctgatgggaacattaactgggataattttttttttagaaaagattcatgttacgttccatcgatacctaatttattgagacttttaagcatgaagggttgttgaattttgtcaaaggccttttctgcatctattgagataatcatatggtttttgtcattggttctgtttatatgctggattatgtttattgatttgtgtatgtkgaaccagccttgcatcccagggatgaagcccacttgatcatggtggataagctttttgatgtgctgctggattcagtttgccagtattttattgaggatttttgcatcaatgttcatcagggatattggtctaaaattctctttttttgttgtgtctctgccaggcttgggtatcaggatgatgctggcctcataaaatgaattagggaggattccctctttctctattggttggaatagtttcagaaggaatggtaccagctcctccttgtacctctggt

SEQ ID NO: 935158 - DNA, 561 bp, Homo sapiens
tgttggataggaatggtgagagagggcatccttgtcttgtgccagttttcaaagggaatacttccagcttttgcccattcagtatgatattggctgtgggtttgtcataaatagctcttattattttgagataggttccatcaatacctagtttattgagagtttttagcatgaagagatrttgaattgtatcaaaggccttttctgcatctgttgagataatcatgtggtttttgtcattggttctgtttatatgatggattatgtttattgatttgtgtatgttgaaccatccttgcatgccagggatgaaaccgatttgatagtggtgggtaagctttttgatgtgctgccggattcactttgccagtattttattgaggatttttgcattgatgttcatcagggatattggcccaaaattttctttttttgttgtatctctgacaggttttggtatcaggatgatgttggcctcataaaatgcattaggaaggaggccctctttttctattttttggaatagtttcagaaggaatggtactagctcctctttctacc

SEQ ID NO: 935159 - DNA, 555 bp, Homo sapiens
cacaaaatcctccaggctctagagtccctctatctttgcttcactgtttgaagcctctatttccaagttacctcacagtctaaaaggctgctccaactccagccatcacatctgcttcccagacagcctgaaagagtacaggaggaaggagaaaaggacaaaggctcacgcaggctctctcttaaggagattatttgcggcagctgcccaacacttgtatttacatctcactgatgagaactaagtgatgtagccacagttagctgcaggcagtccaggaaatgtatttttttwtaaaattttgggcagccaggtacccagctgagtcaagttttcaagcattctctcacaatgggagaaggaggggatgaatattggggtactcctgggagtctcggccagattagcaggatccccccacgttgcttccctttattttcttttaggcccccctcccctacatcacggttaacctacaaatgcctggaccctcaaactgcccctggctgtagggtccctcccctccagtggcccctgaaactccaaactcttccc

SEQ ID NO: 935160 - DNA, 555 bp, Homo sapiens
cacaaaatcctccaggctctagagtccctctatctttgcttcactgtttgaagcctctatttccaagttacctcacagtctaaaaggctgctccaactccagccatcacatctgcttcccagacagcctgaaagagtacaggaggaaggagaaaaggacaaaggctcacgcaggctctctcttaaggagattatttgcggcagctgcccaacacttgtatttacatctcactgatgagaactaagtgatgtagccacagttagctgcaggcagtccaggaaatgtattttttttwaaaattttgggcagccaggtacccagctgagtcaagttttcaagcattctctcacaatgggagaaggaggggatgaatattggggtactcctgggagtctcggccagattagcaggatccccccacgttgcttccctttattttcttttaggcccccctcccctacatcacggttaacctacaaatgcctggaccctcaaactgcccctggctgtagggtccctcccctccagtggcccctgaaactccaaactcttccc

SEQ ID NO: 935161 - DNA, 645 bp, Homo sapiens
gggtgggccaggggtcaggccaaagggcctgttggcatcggccaggctttgttcgtgcacaaaggacctcttacctgcaccggcctggagcgtggcgccttgctggggcccagcgagtgtgtgggaacaggtaacctgcaggtcacaggctccccgcagggctggtgccaccctgtcaccgcttggccttggtggcagcgggcctcctgggatggtggcggacttggctttgcatggggccacagggctgctctttcctctgggtccttgcacccggggcctggcagagccgctccacgcatgggtgagcacagcctctccaggagctgccccttgactaaggtcagaccgagaggaatggagtctgactgggagacagggacctggtgggaaggagaaagggggatagsgttgaggacaggaaagccaagggggaggcgcagggccccgagttgtggggagcgctcagagagccaggcccggtggtggggatgctaaggagcgcctgggtcgtagcctttgttcaggctggaggctcagaggatgggctggggtgggggtcctcaggccacctgtgtgagtgagggcagaaaccctcagggctgggtttctgcccatgctcctgggccagccttacctgattcc

SEQ ID NO: 935162 - DNA, 800 bp, Homo sapiens
ctttgtgaccttggattaggtagtggtttcttagattttatgccaaaaataaaagcaacaaaataaaaaaaataaattggacatcttcaaaattaaaaactttggtacttcaaaggacacaaagtaaaaagaaaatccacagaatgagagaaaatgtttgcaaatcgtagatccaataagggacttgtatctagaatatataaagaatgattacagctcaataataagacaaataacccagtagaaaaatgggcaaaagatctcaatattaatttctccaaagaaaatatataaatggcaactaagcacatgaaaaaatgctcaacatcatagccatcaaggaaatacaagtcaaaaaccacaatgagatactactttgcacccactaggatgactatagtgaaaaaaragagataataacaagtattggtgagcatgtggagaagctgtcgtcatgaattgatcgtgggaatgtaaaatgatgcagccactttggaaaacagtctggcagttcctcaaatggctaaacagagttcccatgcgatccagccatttcactcctacatatatttcctttcccaacagaaaggaaaacatgtccacacaaaaacatacatgagagtttacagtggcattattcataatagctccaaagtggaagcagctcaaatgtccatgaattggtgcatgaataaataaaacatggtctatccatacaatggattattatttagccataaaaaggaatgaagaactgatacatgctgtaatatggatgaaccttggaaacattatgctgg

SEQ ID NO: 935163 - DNA, 599 bp, Homo sapiens
ggacatctgagattggagtggagagtggtcagttgagatcagagctggggaggctgcgggggctagaatttgttgggcagtgtacaggagcagggaggtggggtgcgatgagagagctttagagatctgctgaagggtccctttgaactttgggaagggtactgatttctatacgcatgaaaagaaactagcagaggctggggaaaagatccatcagaaagcaataggccaaacaattcctgcactcacatggagctgggaatagtttgtatttttgtccaccaaaatataaagatcttataatatgtgggttatctaacagagtcctcagaaggggactctactcctawcaccttagtagtggagataaatgaaccctagactaaaaattggtctgaacccaccctaaccttaaaagcaagctttgaaaggatcctactgattccaagaacaaagtccaacattacctaaaggaaaacaacaagatatagaaactagcaatgtaaaattaatgtccaacatataattttaaaattccaggcattcaaagaaacaggaaaatatgacgtacaaccaggggaaaagtcagtcaataaaaa

SEQ ID NO: 935164 - DNA, 587 bp, Homo sapiens
aaaatgaagtggccaggcatggtggctcatgcctgtaatcctggcaatttgggaggccaaggtgggtggatcacttgaggtcaggagttcgagaccagcctggccaacatggcaaaaccccatctctactaaaaagaaaacacaaaaaaattagctgggcgtggtggcaggcgcctsaaatctctgctacacaaaaggctgaggcagtgaggcagtgagccgaaattgtgctgctgcactccagcctgggcaacagagggagactctgtctggggggaaaaaaaaaaaaaaaaggaggaggaggaggaagaggaggaagaggaggaaaaggaggaagaggaggagaaggaggagaaggagaagaaggagaataaggaaaaggagaagactagagccggcagtatcaatagactcctggctttcaaatctttatgcatgcatacacacacacacacacacacacacacacacacacacacacacacacacacagatgtgtgtgtatgcatgagttcgcatatatacatacattttctagctctagtcactgagaggtgagaagcagtgatactccttcagcaataaac

SEQ ID NO: 935165 - DNA, 593 bp, Homo sapiens
gtaagacaatggagagggtgccgcaaaagtcaccactggccccactgccctgtagggagagcttagggagaggtgatgaagcatatcagagtgtgccagaccccaggaccttctctggcctcttcctacttctcacaagctctcccctcacgctagtaagaacattcagtaaaccgctattgttttaaaccacttgcaaacctgatacactataaattaggctaygggtttctttaacagcttatgtgtcaccacaatccatttcttacttatgtctgtaacattattttagggagctagtttttgtcaaccagcagagtatgtatgaaatatgacacagtaattatcatcaaaaaaatagaaataaaactgtattcaacatctagctttatcaaaacttaagatttagcttatatgctttagatcttttttccattaaataaaacattaaagttattcattcaatacttattgagtccctgctatgagctaggcatgatctgagcactagaaatacactcctgtgagagaggcagacaacagataagcaaatagatatactgtatcagatcacactgctacaatcagaataa

SEQ ID NO: 935166 - DNA, 581 bp, Homo sapiens
cggagtctcactcaccaggctgaaatgcagtggtgcaatctcagctcactgcaacctccacctcctgggttcaagtgattctcctgcctcagcctcccgagtagctgggactacaggtgcctgccaccacacccggctaattttttatatttttagtacagatggggtttcaccatgttggccaggatggtcttgatctcttgacctcgtgatccaccctcctcggcctcccaaagtgctgggattacaggcgtgagccaccacccctggccctggcctctcactcttaaatgtacttttccctctcatccatcactctttccccactaccccatcaaagcaacagtaatggagaatcagaaattttgccactgactttcaaccttagtggatttattttccccctgaaattcattgaacaaatgagractgaagagaggtcaagaaatcttccctgtgtgaacaagctgcccagcttcccaaagaacctcacaaaaattctctgtccttaccttgcccttccggagacgtcgcactgtatcactggggctccagtcattgctgtaatcctggaatattag

SEQ ID NO: 935167 - DNA, 788 bp, Homo sapiens
gggaggtagggagcccaccccacctaggacctccccttccacagcacccactggaaagcgtgggcagctacagtgggcccacagcctggcagctacgcttctcgcctgccttctctatcatttatttatgttaacaaaatacaagtttgggccgcgtgcagtggctcatgcctgcaatcccaacactttgggaagccaagacaggactgcttgagcccaggagtttgagaccagcctaggcaacatagcaagaccctggctctacaaaaaataaaaatagaaatgatgagttagcaatgtgtggtggcgcacccctgtggtcccagctacttgggaagctgaggtgagaggatcacctgggcccaggagatcgaggctgcagtgagctatggttgcaccactgcactccagcctgggtgacaaagtgagacccctgtctctaaaaaacaaacaaaaaaacagccgggcctggtggctcacgcctgtaattccagcactttgggaggctgaggcgggcagatcacttgaggtcaggagttcaagaccagcctggccaacatggtgaaaccccatctttactaaacacacacacacacacacacacacacacacacacacacacacacacacacayacacacaattagccgggcgtggtggcgggcgcctgtaatcccagctactctagaggctgaggtgggagaattgcttgaacccaggaggcagaggttgcggtgagccactgcactccagcctgggtgacagagtaagactctgtctcaattaaaa

SEQ ID NO: 935168 - DNA, 643 bp, Homo sapiens
acagccacgcatggcatggaccaggcaccagacaaggccaccacgggggaggccaccgggctgtggggcctcgcagggcagtgcgcaggttcacggagcaagcacattgccgcagattgctgaaatggggccgctgcactccagcctgggcgaaagagcgagactgcatataaaaaaaaaaaatggttaagagagatattttatgtgtatttatcacaattgaaatttttttaggcaagrtgcagtccatacgatacgatctgtgcttgtgcttttttttttttttttttgagacaaggtctcactctgtcacccaggcttgagggcggtggcacggtcatagtccacttcagcctcgtcctcctgggatcaagggatcctcccacctcagcctctggagtagctgggactacaggcacgcaccatcgggcccagctaattttttaaaaacttttctgtagagatgagttctccctatgttgcccaggctagtcttgaattcctgtcctcaagtgatcctcctgccttagctcccaaagttctggaattatcggagtgaaccacggcccccagccccattttaaacattcttaagtgtacagtttagtggcattaagtacatccaattgttgtgcaatcatca

SEQ ID NO: 935169 - DNA, 650 bp, Homo sapiens
cgacaagcacagttcaggtatttgtttttattgttatttattcatttttttgacacagattttcgctcttgccgcccaggctggagtacagtggcacgatcttggctcactgcaagctccgcctcctggattcaagcgattctccggcctcagcctcccgagtagccgagattacaggctcccaccaccatgcccagctaatttttgttatttttaatagagatggggtttcaccgtgttggcctggctggtctcaaactcctgacctcaggtgatcctaccacttcggcctcccacatgctgggattacaggcatgagccacagcacctggccttttattttttatgtattttttgagacaaaatctcactctgctgcccaggctggaggccagtggcgctatcacagctcgttacagcctcaacctcctgggctcaagcgattctccctgacctcagcctcccaagkagcagaaactacaggtgtgtaccaccatgcgtggctaatttttttttttttttttgggtagagacagagtctcactgtgttgcctaggctggtctcaaagtcttggactcaagcaatccacccaccttgggctcccaaagcactgggatcacaggcatgagccacgcccaggcgaaagctc

SEQ ID NO: 935170 - DNA, 650 bp, Homo sapiens
cgacaagcacagttcaggtatttgtttttattgttatttattcatttttttgacacagattttcgctcttgccgcccaggctggagtacagtggcacgatcttggctcactgcaagctccgcctcctggattcaagcgattctccggcctcagcctcccgagtagccgagattacaggctcccaccaccatgcccagctaatttttgttatttttaatagagatggggtttcaccgtgttggcctggctggtctcaaactcctgacctcaggtgatcctaccacttcggcctcccacatgctgggattacaggcatgagccacagcacctggccttttattttttatgtattttttgagacaaaatctcactctgctgcccaggctggaggccagtggcgctatcacagctcgttacagcctcaacctcctgggctcaagcgattctccctgacctcagcctcccaagtagcagaaactacaggtgtgtaccaccatgcstggctaatttttttttttttttttgggtagagacagagtctcactgtgttgcctaggctggtctcaaagtcttggactcaagcaatccacccaccttgggctcccaaagcactgggatcacaggcatgagccacgcccaggcgaaagctc

SEQ ID NO: 935171 - DNA, 703 bp, Homo sapiens
ctgtgcctggatggctccttctttgcagcccatggagctggggtggggagagccccctggaggaatccccttgagccagagttggagggtggggcacgagatctgaccctttgccgcctctgggctccttgccaagtccttagggatgtctgcccagtgacctcactccctgacccagagaacaagctgggccacgccccacacccctgtaccccaactgcagggggctgccatgcctgcccacaatcttgtaccccaactgtagaggggctgccatgcctgcccacaatcttgtaccccaactgtagaggggctgccatgcctgcccacaatccctgtaccccaactgtagaggggctgccatgtctgcccacagcccgtaccccaactgtagaggggctgccatgctgcccacaccccgtaccccaactgtagaggggctgccatgcctgcccacacccctgtaccccaactgtagaggggctgccatgcctgcccacaatcccgtaccccaactgtagaggggctgctatgcctgcccacacccctgyaccccaactgtagaggggctgccatgcctccccacaatccctgtaccccaactgtagaggggctgctatgtctgcccacaatcccgtaccccaactgtagaggggctgccatgcctgcccacaatcccgtaccccaactgtagaggggctgc

SEQ ID NO: 935172 - DNA, 573 bp, Homo sapiens
cttttttgtggtgggatagttctggatcttgactggggtggtgataaaggaatctacacatgtgataaaatgacacagaacaatatatatatattggatgaatgctatattactggtttttatattgtattacaattctgtaagatatawccactggcgggaactgaatgaaggatacatgagacctctctgtattatcctcgcaacatcctataaatttataattatcctaaaaagtatttttaaattgtagctgagtatattagattcctggggctgccataacaaaactacacagaatggtttaaacaacagaaatctattgtctggaagctagaagtccaaaatcaaagcaccagcagagttggttccttctgatgactatgagggagaatccattccattcttctcatttagcttctggtagtctagtctgttcaatagcttgcagatagtgttctccctatgtcttcacagtatcttccctctatgcatgcttgtcatgatgtacaaatttcccctcattataaagacactgtcaggattaggtcccatcctaataaccttatccta

SEQ ID NO: 935173 - DNA, 559 bp, Homo sapiens
tatattaaaaataactctttttcctttttttaaaactacatgttagagttgtgagaaaaaaattacttaataataagtcatcatgtgggttttcttttagatgcataacctggaaagacttcaaaatgacatggctacagcaaaactttttacacttgtatctacttatttatgtaagcacagtttctcaggatgtaaaatatgcatattaaaaagaaagaatggaatttatgctgaaccttgtctcattctagcagctagtaatattcatcaaggtaaaattatcctaatttgaaattaaaaaaaatagatccacccatctccttaagggtgcaattccaataaaaatttagcttttgtttctaataactgcatacattttatgtactatacttcttttatgtaccatactycttttatgtaccaatgtattgtttcattgaaaactggagaaagaaactttaacactcagagctttaggatcacaaaatgtcgttttataattcaattaatatggatattattgttacagaaaagtatgatagggtgatcaaaataa

SEQ ID NO: 935174 - DNA, 632 bp, Homo sapiens; identical to SEQ ID NO: 929326

SEQ ID NO: 935175 - DNA, 612 bp, Homo sapiens
cactcaccgagaggtatgaaaaggggcaagtgaattcaacaccttcgactgaaatatccacgttctcacactgggacgaaccaggcaaataaggtgactcatggagaacaaagaaaagcttgcgattggggaaagtgggcccaactgggagcagcacaaagccaaaggagcacccaccccagccccaaggaaatcagtgagtgatagtgcaaccctgcatgggaaaccatacttctcccatggatctttgcaacccacagatcagtagatcccctcatgagcccatgccacggtggccctgggtctgatatgcagagctgtgtggaggcttggcagagcggctgctcaggaacatacagagatccaggagctttacatactctggcccrgggatccccggaagatgggaaatttgtccatacatatccctagaaagggggctgaatccaaggagccaaacagtgttgttccatggatcacacttccatggtacttcacaatttaaaacccactggcttggaatcccagccagccaacaacagtgggttggagtccatctgagacaggtttgagtgcccaggcagaggcatggtcactatctctgcagttcag

SEQ ID NO: 935176 - DNA, 590 bp, Homo sapiens
cggctttggagaatacaggcagttcagatggggaaggatcccctcaatgcagcacacctgctctaccaaaaagcagccagcctacttctttgggtgggtccctgattccattattctttactgggtgagacctcccagtgggggttccagccacatcctagtgcagaccagcaataggccagtaccctcctgggatagagcttgcagaggaagaagctggctgccatctttgttcttttgcaggattcactggtgatatctccaggtacaagagaaatcagtggaactagggtctggagcagacccccagcaaaccacagtagccctagggtagagtggcctgactattaaaagaraaacaaccaaacggaaacaacaacaacaacaacaacaaaaaacagaaaaacctcatcgaaggtcagcaaccctaaagactgaaggtagataagcccacaaagatgagaaagcatcaatgcaaaaacattgaaaactcaaaaagctagattgccttttctcctccaaatcaccacaacacctctccagcaagggcacaaaactgggctgaggttgagatagctgaattgatggaa

SEQ ID NO: 935177 - DNA, 575 bp, Homo sapiens
tgcactatctgctggggactttgccaagatattaaactctatgacttggaagagtcttcccaaactggtaaattcccctctatttaatcttaaattctgcaccctatctttttatagcaccctcagaatccaaacccatgtgacctttgccaactgctgtcagcgggtgttcgttaggtcctacagtttatttgatgcatagcccctttcttcctttacaaggaccaattygtcccatcagaatatgttgtgacttaaccctagttattggcctaacatccaggagaggagttgagggaagatctacatggaggacatgttgtccttctaggaagaagtttcttatcatcttcaagcaataggacagtaggtacttctgcaggatcagaagattcaggggaacatacagattcaaaactttttcatgcatcagctaagatgtatcagaatctcattctttcataaccaggattctggaatggcataaaagatgttcctagttgggagcttatttttggagtttgactactcctacaattaagcaattaaccatgtccgcagctttctctgccata

SEQ ID NO: 935178 - DNA, 590 bp, Homo sapiens
aggcattgggtcaatgttcccatttcatgtgggagaaattggccaaaacaaagaggctacaggccccatataagtccgaaatacagcagggtagtcattaaatcttaaaggtaagaaatgatctcttttaactccacgtctcacatccagggcacgctgacacaggagtgggctccatggccttggacagctccttttctggctgtcatcgagtgcctgtggcttttccaggtgcatggtgcaagctgttggtggacctaccattctggggtctacaggactgcgactctcctctcacagctccactaggctgtgccccactggggactctgtgtgcgggctccgaccccayatttcccttccacactgccctggcatagattctccatgagggctccatccctgtagcagacttctgcctggacatccaggcatttccatacatcctctgaaatctaggcagaggttcccaaacttcaattcttgacttctgtgcacctgcaggcccaacaccacatggaagccaccaaggcttggggcttgcaccctctgaagcaacagccagagctgtaccttggccccttttagtc

SEQ ID NO: 935179 - DNA, 747 bp, Homo sapiens
aaattatgtaggcaaatcccttagtattgcagctaccatagtgagtgcttgataagttttagctacctagttattaactagttatcaaatggtcacaattagtctcttttttctcatcccaaagagcttactggttgctatttgtctgtaccaaatactactactaatttcattgctactcattaaactcaccatgtggatgtagatttgtagctcttctctgaagtacagtgtcacagctctgcaaaaatgtagggtgggaaatggaaggcactgcatccaattgaaaactgcaggcaaacttgagcaagcagaaagtgattactttggcatctccccagttccctgcagagtagaaaattctctgaatccctggtaggaatkgcctagcattttggaagactcctggactcctcctagttattctccaccgtttttgagagaatcacttcactgaaactctagttgtgtggggcacatgccattctgattttttcaaatatttcaacttattttataagaatggttttctgactccttccttatggtagaaagggaaagcgtcaacataatttaagctgaatgttctagaacattgaaagccacccatcttaaagagcatgagatggtcagtttcaggtgttttctctttcttgctagatcttacgagaaaagagcccatgaaaactaaaatgcaaacgataaggttactcaaaaaaaaaaagattggcactcagaaggtagtat

SEQ ID NO: 935180 - DNA, 648 bp, Homo sapiens
cagtctcattgtgcacaaaagaagccatttttcttaacacctttgagccattaatgaaacctaccagttagaggtggtcaaaagacaaaattacaacaaatttagcttaaagatgtattggttttacttgcaattgtagaattgggcaacaccttgttctataaaatagtatgttctgatgagctgggcaaggtgttgtctgactttatggacagaaaaggactgaagaaagcagaaacaaaatgagaagtagacrggttgtttcaacatttccttctttctaggctttaagcagagggtactttcttatgctggatcaggtaaagggccccttctgcttggttgctatgaatctcctgtttaaaaagaaaacaaaaacaccacacaaaaaaacctgacccattatggtttggtctggttggctgaggcctagggccggagtctagtctaaaacaatggcctcccctaaacttgaacagggttacattgtagaataacataacaggaaatgaaaagagaaatgtgatgctcttcaacaattggtttatggggccttttaaaaagtgtgtatagagtcaatgatgaattaagatgcagtgtgaaagaaaatgacacaggacagatattcagagatcatttgttcagttt

SEQ ID NO: 935181 - DNA, 648 bp, Homo sapiens
cagtctcattgtgcacaaaagaagccatttttcttaacacctttgagccattaatgaaacctaccagttagaggtggtcaaaagacaaaattacaacaaatttagcttaaagatgtattggttttacttgcaattgtagaattgggcaacaccttgttctataaaatagtatgttctgatgagctgggcaaggtgttgtctgactttatggacagaaaaggactgaagaaagcagaaacaaaatgagaagtagacaggttgtttcaacatttccttctttctaggctttaagcagagggtactttcttatgctggatcaggtaaagggccccttctgcttggttgctatgaatctcctgtttaaaaagaaaacaaaaacaccacacaaaaaaacctgacccattatggtttggtctggttggctgaggcctagggccggagtctagtctaaaacaatggcctcccctaaacttgaacagggttacattgtagaataacataacaggraatgaaaagagaaatgtgatgctcttcaacaattggtttatggggccttttaaaaagtgtgtatagagtcaatgatgaattaagatgcagtgtgaaagaaaatgacacaggacagatattcagagatcatttgttcagttt

SEQ ID NO: 935182 - DNA, 449 bp, Homo sapiens
ttctattaatgatcttatagtaggagaaatacatcactttctcctctcaaatgatgtgtgcctttgatcccccaggacactattatcatctgcaatcttaaacatggaatttaatattaaaattaattacaccaacatatacacttgtcccaggcatttttcatgtttacagttatctaaaatgttctacctattttcattagaattgctatttgtcataaggacccccgtgtactgcagttgacttcattttaaactaaaggcaatcttcccacttcttgagaagccaggaaagagrggttaggaaagcttctaccactttgttgtctaaaaatcagcataatttgggctcagattttcccaacagagggtatcatttatcatttttatcgctgctaccgagattaataacaaaatggcaaagaaaactagagatcagtagttctgaa

SEQ ID NO: 935183 - DNA, 616 bp, Homo sapiens
gatgcatcgaaacagtgccctctgccttacgctctgtttgtgagcagtgcgtgaccacagacttattttggggtatcctagggtggcttcttaaaatttacagatatccatatgaagcttcctgagaacaacatgttaaaatacacgagatcttccgggcctcatcttcctactctcyaatgcaccacctttaacaaaactgatttatatttttcaactatgaaagtataaaaatgcaatgtttgtgagttctgagaagcatcctttctgaaagtgcttacttaaaaaaattatgggtacatagtagatgtacatatttatggggtacatgagatattttgatacaggcatacaatgtgtaataatcacattagggtaaaccgagtatccatcacctcaagcatttatcatttatttgtgttacaaacatttcgtttatactcttttagttatttttaaatgtgcaataaattgttgttggctgtaatcaccctgttgtgctattaaatattagatcttattcaagtggagaaaaaggaacccttgcatgctgttggtgggaatataaattagtactaaattagaatgtaaattattctccacagccactatgaga

SEQ ID NO: 935184 - DNA, 646 bp, Homo sapiens
tgcatgctggatattttggtgtctctataaatatttttgagttttgtcttggaatgtggttaagttactttgaaacaggttgatcttttcaaagtgtgtttgctggtaccagaacatttagtctagggctaattttccagcactactaagacaaaattcgccatgtattayacatgatgctatatgaattatgtggttctctcctctagctagtgggtatagcctatgtgtgctttgcatatattccctctaatatttgggggtatttctttcactagacttggggagtcttctcacatgccttcactgatttgtacttagttgaatatttgagaggcaccctctgtagataccccaaaacagctctctctttgcagatctcttatctctaacactctcccctgtaaactccagttgtctttgctcctgtagactctcatgtctgcttccttaacccaggaagttcaccagtctctgcatgggtttgcactccatgtaccacctcctggaaaccttcttcaagtagtaatatgaagcattagtggagaatcatctttttttttttgtctcagaatcactgcccttctttgtttgaggtccaatgatttgagaatgattgttgcatatattttgtttgaatttttaa

SEQ ID NO: 935185 - DNA, 684 bp, Homo sapiens
ttaacctctatgaactgaagtcacctgaactgtaaaatagaaataacgataatgtctacagccatgtatagcacaatggcaccagatgtaaggggttgccgttcccatcatgagagaggtggatctttgttaccaaagcttcctagcagatgccaatattgtatcttgttctaataagaatagtttattatgacagttttccaatagatggaagtaaagtggcttgaagaaagggagccttttgctgatccctacacaggctctaaatagacaaggagcaataccaagttcttagctcagggttgttgtaagaattgattgaggccaggtgtggaggctcacgcctgtaatcccagcacgctgggaggccgaggctggcagatcacctgaggtcgcacgtttgagaccagcctgaccaacatggagaaatcccgtctytactaaaaatacaaaattagctgggtgtggtggcgcatgcctgtaatcccagctactcaggaggctgaggcaggagaatttctcaaacctgggaggtgaaggttgcagtgagttgagattgtgtcactgcactccagcttgagcaacaagagtgaaactccatctcaaataaaaaaaaaaaagaattgattgaataaatgtacagaaagtacatggaacagtgttagaacaaatgaaggaaaaaca

SEQ ID NO: 935186 - DNA, 609 bp, Homo sapiens
gggaggccgaggctggcagatcacctgaggtcgcacgtttgagaccagcctgaccaacatggagaaatcccgtctttactaaaaatacaaaattagctgggtgtggtggcgcatgcctgtaatcccagctactcaggaggctgaggcaggagaatttctcaaacctgggaggtgaaggttgcagtgagttgagattgtgtcactgcactccagcttgagcaacragagtgaaactccatctcaaataaaaaaaaaaaagaattgattgaataaatgtacagaaagtacatggaacagtgttagaacaaatgaaggaaaaacaaactaaagtacttggaacattattagaacaaacaaaaaagtggtaataactataatttatctgcattttctggcgtaatatctttgagtcctcatcataactttaaaaaatactatttaaaaaaagctttgtttgttgagggatgattaatatacgacaaactgcacttttttttgtttgtttgtttttgagatgaagtttttccgttgttgcccaggctggagtgcagtggcaagatctcagctcactgcaacttctgcctcctgggttcaagcggttctactgcc

SEQ ID NO: 935187 - DNA, 609 bp, Homo sapiens
gggaggccgaggctggcagatcacctgaggtcgcacgtttgagaccagcctgaccaacatggagaaatcccgtctttactaaaaatacaaaattagctgggtgtggtggcgcatgcctgtaatcccagctactcaggaggctgaggcaggagaatttctcaaacctgggaggtgaaggttgcagtgagttgagattgtgtcactgcactccagcttgagcaacaagagtgaaactccatctcaaakaaaaaaaaaaaagaattgattgaataaatgtacagaaagtacatggaacagtgttagaacaaatgaaggaaaaacaaactaaagtacttggaacattattagaacaaacaaaaaagtggtaataactataatttatctgcattttctggcgtaatatctttgagtcctcatcataactttaaaaaatactatttaaaaaaagctttgtttgttgagggatgattaatatacgacaaactgcacttttttttgtttgtttgtttttgagatgaagtttttccgttgttgcccaggctggagtgcagtggcaagatctcagctcactgcaacttctgcctcctgggttcaagcggttctactgcc

SEQ ID NO: 935188 - DNA, 609 bp, Homo sapiens
gggaggccgaggctggcagatcacctgaggtcgcacgtttgagaccagcctgaccaacatggagaaatcccgtctttactaaaaatacaaaattagctgggtgtggtggcgcatgcctgtaatcccagctactcaggaggctgaggcaggagaatttctcaaacctgggaggtgaaggttgcagtgagttgagattgtgtcactgcactccagcttgagcaacaagagtgaaactccatctcaaataaaaaaaaaaaagaattgattgaataaatgtacagaaagtacatggaacagtgttagracaaatgaaggaaaaacaaactaaagtacttggaacattattagaacaaacaaaaaagtggtaataactataatttatctgcattttctggcgtaatatctttgagtcctcatcataactttaaaaaatactatttaaaaaaagctttgtttgttgagggatgattaatatacgacaaactgcacttttttttgtttgtttgtttttgagatgaagtttttccgttgttgcccaggctggagtgcagtggcaagatctcagctcactgcaacttctgcctcctgggttcaagcggttctactgcc

SEQ ID NO: 935189 - DNA, 609 bp, Homo sapiens
gggaggccgaggctggcagatcacctgaggtcgcacgtttgagaccagcctgaccaacatggagaaatcccgtctttactaaaaatacaaaattagctgggtgtggtggcgcatgcctgtaatcccagctactcaggaggctgaggcaggagaatttctcaaacctgggaggtgaaggttgcagtgagttgagattgtgtcactgcactccagcttgagcaacaagagtgaaactccatctcaaataaaaaaaaaaaagaattgattgaataaatgtacagaaagtacatggaacagtgttagaacaaatgaaggaaaaacaaactaaagtacttggaacattattagaacaaacaaaaaagtggtaataactataatttatctgcattttctggcgtaatatctttgagtcctcatcataactttaaaaaatactatttwaaaaaagctttgtttgttgagggatgattaatatacgacaaactgcacttttttttgtttgtttgtttttgagatgaagtttttccgttgttgcccaggctggagtgcagtggcaagatctcagctcactgcaacttctgcctcctgggttcaagcggttctactgcc

SEQ ID NO: 935190 - DNA, 582 bp, Homo sapiens
cccatccaatatgatttttaaaatttcagctactgtattttttagttctaaaattcccatttgctttccctttatatattctatttatttgctgaaacgttctagtctttgttgagactctatttctttattcgtttccagccaatttgtagttstccttgaagcatctctatgagagcgacgttaaaatcactggaacattgtcatctctatcacctttatgttagcatccattacttctcttttttattctgtcttggattgtcccggttcttggtatgatgtgtgatttgcaattgaaaacgggacatttctgtattgtgttatgagactaccttgttttaaaacttctgggttagctagctctctctgacacccctctggtaaggaataatggggtcattgtctttttatggtcaggtggtgggagaagtccaagttccctacccagtcttctttgacttccaagcaggggggtgattctcgttactcctggggttggagcaggagttttggctccccactagatctacattgataatttcctacactgggctaggaagaaaagctgcctatttgggt

SEQ ID NO: 935191 - DNA, 587 bp, Homo sapiens
atacaaagaaaaggaaatgaccttaatcattaaagtaggttgtataaataaattaccagaaaaacaggccaacagaatactgaatgaattaactcaataagactaggaatgaaaagttgtttcaatgataggaaatatatgaaatatgccatatccatagaaaaaagaaaattcaatgattacccagctgctaaaaaggcatataataaaatgtattgttattcttaataaawactcgttaaaaaggaataaataggcacttaccttgcaatagataatgttgaaacatacctgtttcagtctaaaaaacagtattgttcttaactgagaaatgaaacacaccttcccacggaggcagaaagagaacaaaggtatccgctatggtcactacagatttgttctggcagaactattcaacacaatgagacaagagaaagaaattgatgacacagtaactaaaaagaaagagtgtactgattattaattttgtttggaaaacctaggaataaatttagtatgaaagtgcaaggtcaatatgaagaaagcagtaattttattaataaataaaaatgaagaattgaaaaaat

SEQ ID NO: 935192 - DNA, 585 bp, Homo sapiens
aaatgtgagtcaattaagcctctttataaattacccagtctcaggaagttctttatagcaacatgagaataaactaatacagtactcaaaaaattgcggttaaaaatcccagaaggctaatcatagatattgacacactaatttaaaagtttatatggagtccattccaagatggccgaataggaacagcaccaatctgcagctcccagcatgactgatgcagaagaygggtgatttctgcatttccaactgaggtacctggttcatctcactgggactggtcaaaaagtgggtgcagcccacagagggtgggccaaagcaggatgggtcatcacctcacctgggaagtgcaaggggtcaggggatttccctttcctagccaagggaagttgtgacaggctgcactgggaaaattggggcactgccaccttaacactgtgcttttccaacattcttagtaaacagcacaccaggagattatatcctgcacgtggctcagtgggtcccacgcccatggaggcttgctcacttctagtccaagactgaactgtgaggcagcaagcttggctgggagagaggcatcca

SEQ ID NO: 935193 - DNA, 615 bp, Homo sapiens
gttactgcctgattgttcctttggaagttttgtctcagaagagtacccagctgtgtgaggtgtcagtctgcccctactggggggtgcctcccagttaggctactcgggggtcagggacccacttgaggaggcagtctgtcttttctcagatctccagttgcatgctgggagaaccactactctcttccaagctttcagacagggacatttaagtctgcataggtttctgctgccttttrtttggctatgccctgcccccagaggtggagtctatagaggcaggcaggcctccttgagctgcggtgggcttcacccagtttgaggttcctggccactttgtttacctactcaagcctcggcaacggcacggacccctcccctagcctcgctgccaccttgcagtttgatctcagactgctgtgctagcaatgagcgaggctctgtgggcataggaccctctgagccatgcgtgggatataatctcctggtgtgccatttgctaagaccattggaaaagtgcagtattagggtgggagtgacctggttttccaggtgctgtctgtcacctctttctttgactaggaaagggaattccctgaccccttgcacttcctg

SEQ ID NO: 935194 - DNA, 615 bp, Homo sapiens
gttactgcctgattgttcctttggaagttttgtctcagaagagtacccagctgtgtgaggtgtcagtctgcccctactggggggtgcctcccagttaggctactcgggggtcagggacccacttgaggaggcagtctgtcttttctcagatctccagttgcatgctgggagaaccactactctcttccaagctttcagacagggacatttaagtctgcataggtttctgctgccttttatttggctatgccctgcccccagaggtggagtctatagaggcaggcaggcctccttgagctgcggtgggcttcacccagtttgaggttcctggccactttgtttacctactcaagcctcggcaacrgcacggacccctcccctagcctcgctgccaccttgcagtttgatctcagactgctgtgctagcaatgagcgaggctctgtgggcataggaccctctgagccatgcgtgggatataatctcctggtgtgccatttgctaagaccattggaaaagtgcagtattagggtgggagtgacctggttttccaggtgctgtctgtcacctctttctttgactaggaaagggaattccctgaccccttgcacttcctg

SEQ ID NO: 935195 - DNA, 615 bp, Homo sapiens
gttactgcctgattgttcctttggaagttttgtctcagaagagtacccagctgtgtgaggtgtcagtctgcccctactggggggtgcctcccagttaggctactcgggggtcagggacccacttgaggaggcagtctgtcttttctcagatctccagttgcatgctgggagaaccactactctcttccaagctttcagacagggacatttaagtctgcataggtttctgctgccttttatttggctatgccctgcccccagaggtggagtctatagaggcaggcaggcctccttgagctgcggtgggcttcacccagtttgaggttcctggccactttgtttacctactcaagcctcggcaacggcasggacccctcccctagcctcgctgccaccttgcagtttgatctcagactgctgtgctagcaatgagcgaggctctgtgggcataggaccctctgagccatgcgtgggatataatctcctggtgtgccatttgctaagaccattggaaaagtgcagtattagggtgggagtgacctggttttccaggtgctgtctgtcacctctttctttgactaggaaagggaattccctgaccccttgcacttcctg

SEQ ID NO: 935196 - DNA, 615 bp, Homo sapiens
gttactgcctgattgttcctttggaagttttgtctcagaagagtacccagctgtgtgaggtgtcagtctgcccctactggggggtgcctcccagttaggctactcgggggtcagggacccacttgaggaggcagtctgtcttttctcagatctccagttgcatgctgggagaaccactactctcttccaagctttcagacagggacatttaagtctgcataggtttctgctgccttttatttggctatgccctgcccccagaggtggagtctatagaggcaggcaggcctccttgagctgcggtgggcttcacccagtttgaggttcctggccactttgtttacctactcaagcctcggcaacggcacggacccctcccctagcctcgctgccaccttgcagtttgatctcagactgctgtgctagcaatgagcgaggctctgtgggcataggaccctctragccatgcgtgggatataatctcctggtgtgccatttgctaagaccattggaaaagtgcagtattagggtgggagtgacctggttttccaggtgctgtctgtcacctctttctttgactaggaaagggaattccctgaccccttgcacttcctg

SEQ ID NO: 935197 - DNA, 690 bp, Homo sapiens
tattttgaaccagagttgacataatatgttagaagattgaatatttggtttgagaaaaacctgagtaaaggataactccaaggtttttggcttaagcagccagaagaatgaagtaaccattaactgagatttattattatggaggagtacagttttggaacttattggaaactggaataaaggtgactcttgctatgttttagcaaagagactggtgrcattttgcccctgccctagagttttgtggaactttaaacttgagagaaatgatttagggtatctggcagaagaaatttctaagcagcaaaacatccaagaggtgacttgggtgctgttaaaagtattcagttttaaaagagaagcagagcataaaagttcagaaaatttgcagcctgacaatgagatagaaaagaaaaacccattttctgaggagaaattcaatctagttgcagacatttgcataagttacaagaagccaaatgttaatcaccaggacagtgggagaaatgtctccagggcatgtcagagacttttgagacagcccttatcatcacaggcccaggggcttggaaaaaaaaaaggtttcatgggccgggcccagggtgcccctgctgtgtgcagcctagggactttgtgccctgtgtcccagccactctagccatggccaaaaggggccaaggtacagctcag

SEQ ID NO: 935198 - DNA, 631 bp, Homo sapiens
attttgaaccagagttgacataatatgttagaagattgaatatttggtttgagaaaaacctgagtaaaggataactccaaggtttttggcttaagcagccagaagaatgaagtaaccattaactgagatttattattatggaggagtacagttttggaacttattggaaactggaataaaggtgactcttgctatgttttagcaaagagactggtgacattttgcccctgccctagagttttgtggaactttaaacttgagagaaatgatttagggtatctggmagaagaaatttctaagcagcaaaacatccaagaggtgacttgggtgctgttaaaagtattcagttttaaaagagaagcagagcataaaagttcagaaaatttgcagcctgacaatgagatagaaaagaaaaacccattttctgaggagaaattcaatctagttgcagacatttgcataagttacaagaagccaaatgttaatcaccaggacagtgggagaaatgtctccagggcatgtcagagacttttgagacagcccttatcatcacaggcccaggggcttggaaaaaaaaaaggtttcatgggccgggcccagggtgcccctgctgtgtgcagcctagggactt

SEQ ID NO: 935199 - DNA, 631 bp, Homo sapiens
attttgaaccagagttgacataatatgttagaagattgaatatttggtttgagaaaaacctgagtaaaggataactccaaggtttttggcttaagcagccagaagaatgaagtaaccattaactgagatttattattatggaggagtacagttttggaacttattggaaactggaataaaggtgactcttgctatgttttagcaaagagactggtgacattttgcccctgccctagagttttgtggaactttaaacttgagagaaatgatttagggtatctggcrgaagaaatttctaagcagcaaaacatccaagaggtgacttgggtgctgttaaaagtattcagttttaaaagagaagcagagcataaaagttcagaaaatttgcagcctgacaatgagatagaaaagaaaaacccattttctgaggagaaattcaatctagttgcagacatttgcataagttacaagaagccaaatgttaatcaccaggacagtgggagaaatgtctccagggcatgtcagagacttttgagacagcccttatcatcacaggcccaggggcttggaaaaaaaaaaggtttcatgggccgggcccagggtgcccctgctgtgtgcagcctagggactt

SEQ ID NO: 935200 - DNA, 662 bp, Homo sapiens
aacagcaacaacagcagcaacaacagtaagctttcagtctcctcctctgatgccgtgttttgattaaaagcttattgtatgctgtattttatatttttatgtgagaagaaacatcagaagcatttgaaagaccaggaaatgagtcccctagggataagaggcattctgcyggatggcttttaaaaatgtttcctccagagtcgtctgcctccttaagaatgatttttgtcttagaagcctctctttaattttataaactgacatgatttcttgttctgttataaatacatgctgttttagtccttcaataagcccatcacacattttcacgtattgtctacaggcagtttttctgccgtgttaatgacatcatctttatcatcactctcatcaagatcatcttgattcagaacctttttggctccattggtcaatgactgcacaactactgcctcactattgatgtgtaaaacctcaacatcgctgatcatgagagaaatgcaaatcaaaattacaatgcaataacatgtcacaccagtaagaatagctattactaaaaagtcaaaaaataacaggtgctggtgaggttgtggagaaaaaggaacatttatacactgttggtgggagtgtaaattagttcagcctttgtggaaaacagtgtg

SEQ ID NO: 935201 - DNA, 662 bp, Homo sapiens
aacagcaacaacagcagcaacaacagtaagctttcagtctcctcctctgatgccgtgttttgattaaaagcttattgtatgctgtattttatatttttatgtgagaagaaacatcagaagcatttgaaagaccaggaaatgagtcccctagggataagaggcattctgctggatggcttttaaaaatgtttcctccagagtcgtctgcctccttaagaatgatttttgtcttagaagcctctctttaattttataaactgacatgatttcttgttctgttataaatacatgctgttttagtccttcaataagcccatcacacattttcacgtattgtctacaggcagtttttctgccgtgttaatgacrtcatctttatcatcactctcatcaagatcatcttgattcagaacctttttggctccattggtcaatgactgcacaactactgcctcactattgatgtgtaaaacctcaacatcgctgatcatgagagaaatgcaaatcaaaattacaatgcaataacatgtcacaccagtaagaatagctattactaaaaagtcaaaaaataacaggtgctggtgaggttgtggagaaaaaggaacatttatacactgttggtgggagtgtaaattagttcagcctttgtggaaaacagtgtg

SEQ ID NO: 935202 - DNA, 748 bp, Homo sapiens
gtggacctttgttatagcagccccaggagttgaataggctcacagagtttcatttgtacgtttttcccatctgaaaaatagaatgctgctttaccacaatttatttacctttgggcagataagaaataagcaatggtttgagagattacctgtaaacaaactgaaaaccatcatactaacaaggagaaatcagaaatatatttatttgagttaagtaacatttttcaaaaattatgattgacaaccacccattagtttacaagtsggaattttttcccaccctgtaacacccatcatttatgaagctaaatattagttaagggcctctgaaatttccaataaaactgctagaaagattcttttgatctctaggcagctctgaggacagatacaacttcattcctcctggaaaatgctttgttctttggctccacttaaggaggcagtggaaaagcatataatacatcaggctttctttctttgtagaacaaagttaatccaggtccttatcataggaaactgcacagggatataatcttttagaagacataaataattctccataatacttttggaaatactttgatctttctgtatacttctccattgcaaaagggtactgcaaaccttattttccttgtttagagatttgttaaatgaagttagtcatattagacctttgaagttgtgttttaaatagaagctaccaaaaggatgaagataattttactatgtcctgaaaaattct

SEQ ID NO: 935203 - DNA, 547 bp, Homo sapiens
tggcattattacctttatttgtaaatgtgagaaaacagaggcaaaaagaggttaagtgacccattcggagtcatagagcaagaaagtggctaagtccagatttgagagcaggtctgagcaaagcctgcctgaaatttgcttttagtcatcttgttttgttttgccatttacctttttgtataatttttctattgctctctgttagtcaaattatttttgaaatgtcaaaaaatttctgtgcagaaaataaaaaccctcaaaatagagtgctaggagctcagggggtgggggacgaatatagtcaagtattaagacacagctaggccrggcgcggtggctcacacctgtaatcccagcactttggaaggccgaggcgggtggatcacgaggtcaggagatcaagaccatcctggctaacatggtgaaaccccatctctgctaaaggtacaaaaattagccgggcatggtggtggcaggcacctgtagtcccagctacttggaggctgaggcgggagaatggtgtgaagccgggaggcagagcttgcag

SEQ ID NO: 935204 - DNA, 721 bp, Homo sapiens
agtaggatgtgtgtgacccatgagagatggactggcctcctttccttgggtcaactgcaacttattggagatgtggataaaccacttaggttttctgcctcttcattagtgcaagggtggcaagggcagtagcagagaggctttcagttgcccctgaaggctctgtccagggagttggtgagtttgctgctggctcaatagctctggcagggggcggctggaggcctaggcctggaggacctgsgtggtgaggagatataagaacaaccacccacctaacaatctggctaattttccacagggttgctgcagtatgttgggggcccattccagtctctagtcacctcaaatttttcagtacctggcaatatcaacagtgaggcctacaaaacagcaaagatggcagcctgcccctccttctgggagcttcatcccagggacattcatccctgttgctggcttaaacacacctgtaggagggggctggagacgccagttaggagatctctcctagtaaggaggaacgggattggggacctgcttcaaaaaacagtctggccatgttttagtggagcatctgtgctgtgctgggggtccacttcaacccccagtcaccttgcacactccaaagcctgaagactggaacggctaagtcgcccaaacagcaacaatgatggcctgcccctccctctgggagctctatcccagggaggttacaaat

SEQ ID NO: 935205 - DNA, 651 bp, Homo sapiens
gtggataaaccacttaggttttctgcctcttcattagtgcaagggtggcaagggcagtagcagagaggctttcagttgcccctgaaggctctgtccagggagttggtgagtttgctgctggctcaatagctctggcagggggcggctggaggcctaggcctggaggacctgcgtggtgaggagatataagaacaaccacccacctaacaatctggctaattttccacagggttgctgcagtatgttgggggcccattccagtctctagtcacctcaaatttttcagtacctggcaatatcaacagtgaggcctacaaaacagcaaagatggcagcctgcccctccttctgggagcttcatcccagggacattcatccctgttgctggcttaaacacacctgtaggagggggctggagacgccagttaggagatctctcctagtaaggaggaacgggattggggacctgcttcaaaaarcagtctggccatgttttagtggagcatctgtgctgtgctgggggtccacttcaacccccagtcaccttgcacactccaaagcctgaagactggaacggctaagtcgcccaaacagcaacaatgatggcctgcccctccctctgggagctctatcccagggaggttacaaatct

SEQ ID NO: 935206 - DNA, 641 bp, Homo sapiens
atagaagaccaggttgacttcaaaggttttgactctagttcctgacccccaaatggcatttctgaatccacctggggcctcagagatctcaccacactgaagggaagaacacaggcctggctggaatggccgtctactcatygtaggggccaagggccttgagtcagtacaagaagtagctggggagtggttacagatcttgggcaagaccctgtgctgcgctggcttcaggtctgacccagcacagtcatagtagtgatagccacaggggtgccagtgtcactccccctctagcttttggtagctcagaacacaaagagagactctgtatgtttgggagaaagtaacaaaagagaacaagaatctctgactggtaatccagggagttctcctggattcagtcgaaaataaccaaggaggtgcttctacaagtctgcaagaaccacagtgctactgtgcttggggagtcccctaaagaagattgagcttagatcacaaaactcaagtcctttcaaatatctggaaaggctccccaagaggaacagctacaaataaccccagacagtgaaggctgcaataaatacttaacctccttaatgcccagacactgaaaaacatctactagcatcagcaccatccag

SEQ ID NO: 935207 - DNA, 622 bp, Homo sapiens
agtctcatctaaagccactaagtctcagaggctttcccaaggcccttgatgtagtacctgggtatcactgctggctattcagggcccaagggctcttcggttagcaggtaatgaatactgccaggactgaaccctttccttcagggcagcggtttccttctggcccaaggttgcctagaaatgtcatctgggagctagggcccggaaggggggtacctcatgactcttatcagtgccctattatgctatggctgagctggtaccctcgatgcaagacaaaggcctccctacacttccgtctctcctcaagcagaaggaaggggtctcttttggagcctcaagatatgcagcctagggttaggggcagggtgatgcctgcactcccttggctgccccaaccrgtgtctcagtgtgttacatgccccctcagtctactgtctctgggcttagttcacactgagacacacataggagttgcagtccttgtgttctagactgcctttcaagtttactggagacacagagtgctgcagccctgggcggcaaggtttgcaggcactcaaccttggaccattgggatcagagattcccttctggccagggctcgtttaaatgctccctc

SEQ ID NO: 935208 - DNA, 621 bp, Homo sapiens
ggagacatgtcagcccatcacacttctgaatttacatgtgattcctctatgcagacaactttgcatcccctgaggaaagatagtggtttttcttaagagaaaatgacatttgtaataggaattttaagattttattacttcttctttcatctcctcaaaggaatgaagaaatgktggtgggcagatcttcctttcccatgcagtattttccaattaataatacttctttacctcaagaatattttctctttcagaagatggtaagtttaatatgcattttatttagtatataatatgatacaaactatgaagaacataaaggctatttgtaacatatggtgcccaaatctaaactgggatgaaggcacaagatgtcccagcactgtcctccagtggtgtcctggcctaacaccatcatcctaaatttcagttctaatgccttagcaaatggccagggtgtcaacagaaaagggatggacggcagtgacgacatactgcagtccaagtgaaatttgagtagagagttctaatgtaaatgactattttaaaagacgtttgcagtggccagacatggtggttcacacctataatcacagcattttgggaggccagggcaggatc

SEQ ID NO: 935209 - DNA, 621 bp, Homo sapiens
ggagacatgtcagcccatcacacttctgaatttacatgtgattcctctatgcagacaactttgcatcccctgaggaaagatagtggtttttcttaagagaaaatgacatttgtaataggaattttaagattttattacttcttctttcatctcctcaaaggaatgaagaaatgttggtgggcagatcttcctttcccatgcagtattttccaattaataatacttctttacctcaagaatattttctctttcagaagatggtaagtttaatatgcattttattyagtatataatatgatacaaactatgaagaacataaaggctatttgtaacatatggtgcccaaatctaaactgggatgaaggcacaagatgtcccagcactgtcctccagtggtgtcctggcctaacaccatcatcctaaatttcagttctaatgccttagcaaatggccagggtgtcaacagaaaagggatggacggcagtgacgacatactgcagtccaagtgaaatttgagtagagagttctaatgtaaatgactattttaaaagacgtttgcagtggccagacatggtggttcacacctataatcacagcattttgggaggccagggcaggatc

SEQ ID NO: 935210 - DNA, 589 bp, Homo sapiens
atcacaatgctgatagtgatatggacaatgaagtgcaggctgaggtggtctcaggcggagatgaggaacttgttggaaactggagtaaaggtcactcttcttgtgctgtagcaaagagactggtgacgttttgtccatgtcctctatagatagagatctgtggaattttgaacttgagagagatgayttatagtatctggtggaagaaatttctaagcagtaaagcattctaagaggtgacttgggtgctcttaaaagcattcagttttatgcattcacaaagatatggtttggaattgtttaaaagggaagcagagcataacagtttggaacatttgcagcctgaggatgagacagaaaagaaaaacccatttctgaagagaaattcaagtcaactgcacaaatttgcataagtaatgagccaaatgttaatcaccatgacaatgggaaaatgtctgcaaggatgtcagaggtctttatggcagcccctcccatcaaaggcccagaggcctaggaggaaaaaatggtttcatgggccaggtccagggccttgctgctttgtgcagtttcaggacttggtgccctgcat

SEQ ID NO: 935211 - DNA, 499 bp, Homo sapiens
catcactctggctttctggtatgcggatttgtattagtccattttcatactgagaccaggtaatttatgaaaaaaagaggtttaattgactcatggttccacatggctgggtgggtgtcaggaaacttacaatcatggcggaaggcaaagaggaagcaaggcatgtcttacatggcagcaggggagagacagagagagagagagagagagagggagggagagagagcgagcaaggkaaatgccagacacttatctaacaaccagatctcatgagaactcccgcactatcatgagaacagcatgggggaaactgcccccaggagccaatcacctcccaccaggtccctccctcgacatgtggggattacaattcaagatgagatttgagtggggacacagagccaaaccatatcagaatggtaggagtaacataggggtagcaagattgcatcctcaaactcttgtattctgccttttgaatattgttgacaacggtatt

SEQ ID NO: 935212 - DNA, 586 bp, Homo sapiens
caccaaattaaaactgctgtgtaacccattgttttagaagaaagacctgtattatttcccttcatctttatgcactttttgttttaacaatattgataaaactccggtgcccagcagtgagaccgtgtacaggcagcagtttacatttacgagagattagttgtatatttattcttgaaaattagtacaagaggctgtaattagctgggatgggcacagttacatatacctttttgtgtgtctgttccacccatttttgggtgaaactgacactcatttcaaaccacctttyttaggagtctgcgtggatgtacatgatctttagtgtggtttacaactattattttgaagccttcttcctgtagacatagggatagtggtatctgttggcagcctttgttgtgagtgaagatcaagtttgaacataaacattcccagcactttgttctcagcatgaaacttacccagcaagttgagatcttcctgtacccacctggtgcatgggttaggctgtgatttcataaaccttattaaaagaaaaaaagcaggtttagttaccattattcttgtcagcaaatacaaagaa

SEQ ID NO: 935213 - DNA, 590 bp, Homo sapiens
tagagttcagggcttcaggtccgcttctctgagattttgtgtgtgtgtgtgtgtgtgtgtgtctgtctgtctttcatgctgagattgtgtgtgtgtgtgtgtgtgtgtgtgtctttcatgagaagggttttttctaagtcaccttgtttgcacatagatgtacagttccagacatcatattcaggaaaataaaatgtattttcttgcgtttattagtttaggatccatttattatttttaagatgctcccagcggacatgtgcttgacgagaagtgaaccacatgccatgtgtgaagggattagcataattgtttcaatgaaaacaccactctgaccagtggagtgttgaagggaaaaatacttgactactacacattgctagatcccatgagmgattatataaattaaatataatgtggaaaacctgctcttaagtgctttatagtttacagagagttaaatatatatgtagcatatgaataactctgatataccacaagtagatatggctgacgaagtgtctttcaccttgataggacggcctgtttagtttaaggccttaccagttaggcgggctatcttaacacct

SEQ ID NO: 935214 - DNA, 624 bp, Homo sapiens
tgtccgtgcttgctgcccagcacccagctcacacacacacctcttatttgacagcttccccaaagcgggctttgcagtccaggctccccgagaagcttggggaggagactctgccagtctgaagggcctatccctaaaaaggtgccaccctcaccaggctcatcctggcaatcttggattatctttgctctgaggttttggagtgggggacagggagacagcagacactgcacatcacccatctttccagagagcatcagccctccagamtggggcaggtcagacctccacttgggcgtttttctcactggttgccagttgggggaagcagcatttgtgagcacctgcctgtcttcccaggtcctgttcagaaaccccatctgtgcctttggagagactgccctgagcacacaggcccagcaaccaccatatacgacccccaggacctaatccccctctacatagggttcagtgcatgttagcagacactgggctcgattcctgcctagtccctgccagataccccatgcccacctcgtgaagagaatgaggccacacaaacacacccagaccgtcttggtgatggagtgcctggggtcccacttgcccacccttcattgctgg

SEQ ID NO: 935215 - DNA, 625 bp, Homo sapiens
aaaagaggtaaagaagctgcagaagaaaagtttgaagatagcagaggctgattcatgaggttcaaggagagaagccatctccagaacataaaaggcaaagcaggaagtgcttatatagatgctgcagcaagttatccagaagatctagctaagataactaatgaaggtggctacactaaacagcakatttttttttttttttttgaaacatagtctcactctgtcactagggctggagtgcaatggtgcgatctcagctcactgcaacctctgcctcccgggttcaagcaattctcctgcctcagcctcccaagtacctgggattacaggtgcccaccactacgccctgctaattttttgtatttttagtagagacatggtttccccatgttggctaggctggtctcgaactcctgacctcattatttgcctgcctcggcctcccacaatgctgggattacaggggtaagccaccacacccggccaaaggcagattttcaagagagatgaaacagccctctgttggaagaagatgccatctaggattttcctagctagagaggagaagtcgatacctggcttcaaatcttcaaagaacaggctgattcttttgttagctgctaac

SEQ ID NO: 935216 - DNA, 629 bp, Homo sapiens
acagtatcatgaaaagtgttttggagacgggtgcacaacaatgtgaatgtacttaacacttctcaactgtacacttaaacatgatcaatgataaattttatcattgggccgggcgcggtggctcacacctgttatcccagcactttgggaggccgaggcgagcggatcacgaggtgaggagatcgagaccatcctggttaacatggtgaaaccccgtctctactaaaaatacaaaaaaattagctgggcgtggtggcgggcgcctgtagtcccagctactggggtggctgaggcaggagaatggcgtgaacccgggaggcggagcttgcagtgagccgacatcgcgccacagcactccagcctgggcaatagaacaagacmccgtctccaaaaaaaaaaaaaaaaaaaaaaaaaaaaaaaaaaatatatatatatatatatatatatatatatatatataatgttatatgtatcttaccacaattaagaaacaaaaataaaaataaaaaatacattataaaacaagcacaaccttttatgtaaattacttacttaatcctcataatcagacaaggtaaacagtatgaatattcctattttaaaaattctgacccagtaaggttaattag

SEQ ID NO: 935217 - DNA, 576 bp, Homo sapiens
aaggctcaaagttctgatgcttataccacatagttggttctcctagcaaccagtccccattctgaggctatctaggggccccagccaccagttatcatattagcattaaaaaacactcttatctccagagatttcacaagttttaggaattgtgcacccggaaccaggggcagaggccaaatatgtttattatatcaaaatatcacaaaagtattcgatcttccaacactgtgttgaatagtagcggtgagagtcaccatctttgactttttcccaaccgtaaagaaaagcattcagtctttcaaygttaagtatgttacttttttgcagatattctttatcaatttgaaaacattctcttccttttatagtgttctgtttttatcacaaagtggtattaaatttcaccacatgctttttctgtgggaattgatatgatcatgtcatttttctttcttagcctgctaatgtgtatgaaattagataatttaaacttaaaataagtcaacttaaagctgttagagctttaaatcattctgaaccttgagaggtggctctgcagcctgagtcaagtgg

SEQ ID NO: 935218 - DNA, 576 bp, Homo sapiens
aaggctcaaagttctgatgcttataccacatagttggttctcctagcaaccagtccccattctgaggctatctaggggccccagccaccagttatcatattagcattaaaaaacactcttatctccagagatttcacaagttttaggaattgtgcacccggaaccaggggcagaggccaaatatgtttattatatcaaaatatcacaaaagtattcgatcttccaacactgtgttgaatagtagcggtgagagtcaccatctttgactttttcccaaccgtaaagaaaagcattcagtctttcaatgttaagtatgttacytttttgcagatattctttatcaatttgaaaacattctcttccttttatagtgttctgtttttatcacaaagtggtattaaatttcaccacatgctttttctgtgggaattgatatgatcatgtcatttttctttcttagcctgctaatgtgtatgaaattagataatttaaacttaaaataagtcaacttaaagctgttagagctttaaatcattctgaaccttgagaggtggctctgcagcctgagtcaagtgg

SEQ ID NO: 935219 - DNA, 805 bp, Homo sapiens
tgatgtagtctttcactgatcccagagtattgaacatactgggttttctgttttcgaaattattattattattattatttgagacagtgtctttctctctcacccaggctggagtgcagtggtttgatcttggctcactgtaacctctgcctccaaggttcaagcgattctcctgaatcagcctcctgagtagctgggactacaggtgtgcaccactgcacctggctaattattttgtatttttagtaaagacaggattttgccatgttggccaggttggtctccaactcctggccttaagtgatctgcccgcctcagcctcccaaagtgctgggattacaggcatgagccacagcacctggctgaaaatactctttgttttgagggaacagacatcattttaatcaaggggaggataatgtgatatcctcaaagaaractgactttatgatactgtggcaaggagtcggtaaggagcataaccactgcaaaaggccacactgtggccaagcccagggctcagggctgtgcctgttcttgggctgagaaaagagtgctcagatgggttcataaagatgagcacctgggcttgtttgagcctgggctctgccaccagccggattcctgacagcaggtaaggtacctgcttcctctcaaatctgtcaaaactccctcatcatctcatcacgataagtgaaaataaatgtgaatgtgctttcaaaagttagggcttggaagtaaaaatgttgttttttatacctctatctagtcctctgtttcagcctcaatgaaatccacagctccg

SEQ ID NO: 935220 - DNA, 499 bp, Homo sapiens
gtttatagaaaataccgttgtcaacaatattcaaaaggcagaatacaagagtttgaggatgcaatcttgctacccctatgttactcctaccattctgatatggtttggctctgtgtccccactcaaatctcatcttgaattgtaatccccacatgtcgagggagggacctggtgggaggtgattggctcctgggggcagtttcccccatgctgttctcatgatagtgcgggagttctcatgagatctggttgttagataagtgtctggcatttmccttgctcgctctctctccctccctctctctctctctctctctctgtctctcccctgctgccatgtaagacatgccttgcttcctctttgccttccgccatgattgtaagtttcctgacacccacccagccatgtggaaccatgagtcaattaaacctctttttttcataaattacctggtctcagtatgaaaatggactaatacaaatccgcataccagaaagc

SEQ ID NO: 935221 - DNA, 562 bp, Homo sapiens
gcacggtggctcacacctgtaatcctagccttttgggaggccgaggcgggcggatcatgaggtcaggagatcaagaccagcctggctaacacggtgaaaccccgtttctactaaaaatacaaaaaattagccgggtgtggtggcggacgcctgtagtctcagctacttgggagactgaggcaggagaatggcgtgaacccgggaggtggagcttgcagtgagccgagattgygccactgcactccagcctgggcgacagtgcgagactctatctcaaaaaaaaaaaaaataaaataaaataaacatttcctttgttacagagcaagttttttgagatatgactttccctttaggcctgaaaccagtaactgttcctaccttcacaagggaatatttcaggactactttgtgttgggtcaaaactagaatattctctctgtacctttggaaccaacacacaacaatttttttgtggcactcaatccttttgtttgcccggttgatgagcagtacattattataaatacttcattttctttttgtagataatcccaccgtttct

SEQ ID NO: 935222 - DNA, 777 bp, Homo sapiens
taacaaatatgcaagcaacgttgcaaggaatatctgttaaaaataagaaaaagtgagtggcaggaaaataaaagagccaggagtggcacatgttatgaagatgtaccttgtgagacgtggacgtaagttggactccaggctttgctgcagccgctataccatttcagttgtcctgccaaagcccctgatttctgatgctaagaacaagaaggcagtgcttcaagggtcctcattaagaagccactgaaggatgtggtagagcgcctgtagtcccagctactcaggaggctgaggcgggaggatcgcttgagcccaggagttggagtgatcagtgagctatagttgcaccactgcactacagcctgagctacagagcaagacctgcctctcggaaggccgggcgtggtggctcacgcctgtaatcccaccactttgggaggccgaagcgggtggatcacctgaggtcagaagatcgagaccagcctggccaacatggcgaaaccccatctctacgaaaaatacaaaaaattagccgggtatggttgtgggcacctgtaatcccaaytactcaggaggctgaggcaggagaatcacttgaaccctgggggcggagattgcagtgagccaagatcatgccactgcattccagactggcaacagagtgagattccatctcaaaacatatataataataggaaaccactgcagtctaatgagccagatcctcacggtacctgcaatatgggtggagtattatccagggagcacagaagctgg

SEQ ID NO: 935223 - DNA, 618 bp, Homo sapiens
aattctaccagaagtacaaagaggagctggtaccattccttctgaagctattccgatcagtagaaaaagagggaatcctccctaactcattttatgaggccagcatcatcctgataccaaagtctggcagagacacarcaaaaaaagagaattttaggccaatatctgtgatgaatatcgatgcaaaaatcctcaataaaatactggcaaaccgaatgcagcagcacatcaaaaagcttatccaccacgagcaagttggcttcatccctgggatgcaaggctggttcaacatacgcaaatcaataaacgtaatccatcacataaacagaaccagtgaccaaaaccacatgattatctcaatagatacagaaaaggccttcaacaatatccaacagcctttcatgctaaaaaactttcaataaatgaggtattaatggaatgtacctcaaaataataagagctttatgacaaacccacagctaatgtcatactgaatgggcaaaaactggaagcattcccattgaaagccagcacaagacaaggatgccgtctgtcgccactcctattcaaaatgtattggaagttctggccaggacaatcaagcaagagaaagaaata

SEQ ID NO: 935224 - DNA, 548 bp, Homo sapiens
cttcaaaatgtttgtactctttgaaagaaatgtaaggcggctagattttacataggccatcctctttccaccaattgtttacaatttattttatctaaaattttatttaaaagtccacaattttatttaattaacttgtgtagatatacacacatacacmaaatgtgtgtgtgaatacagacatataatttttattcatatttgtatttttttaaatttattttttaaatgcattccaaatgaaagcagtaattcaaaaataaacagaatggactgattagtatcaaactaacattgaactcaattcacattaaaaacatttaggtacagaaaagtgtgcctgctatataaaagtaataacttttaaagaagtagaaaatcaccattagcagaggtttagttagtcaatctagtgcaggataaaaatgtagtgcaggataaaaaaatagatttgtgtaagtttacaaatttcagaaaatgaccaaattactccacttatctcattaacttgacctctttcaggatttgaccttcctaatagatttgtt

SEQ ID NO: 935225 - DNA, 548 bp, Homo sapiens
cttcaaaatgtttgtactctttgaaagaaatgtaaggcggctagattttacataggccatcctctttccaccaattgtttacaatttattttatctaaaattttatttaaaagtccacaattttatttaattaacttgtgtagatatacacacatacaccaaatgtgtgtgtgaatacagacatataatttttattyatatttgtatttttttaaatttattttttaaatgcattccaaatgaaagcagtaattcaaaaataaacagaatggactgattagtatcaaactaacattgaactcaattcacattaaaaacatttaggtacagaaaagtgtgcctgctatataaaagtaataacttttaaagaagtagaaaatcaccattagcagaggtttagttagtcaatctagtgcaggataaaaatgtagtgcaggataaaaaaatagatttgtgtaagtttacaaatttcagaaaatgaccaaattactccacttatctcattaacttgacctctttcaggatttgaccttcctaatagatttgtt

SEQ ID NO: 935226 - DNA, 548 bp, Homo sapiens
cttcaaaatgtttgtactctttgaaagaaatgtaaggcggctagattttacataggccatcctctttccaccaattgtttacaatttattttatctaaaattttatttaaaagtccacaattttatttaattaacttgtgtagatatacacacatacaccaaatgtgtgtgtgaatacagacatataatttttattcatatttgtattttttwaaatttattttttaaatgcattccaaatgaaagcagtaattcaaaaataaacagaatggactgattagtatcaaactaacattgaactcaattcacattaaaaacatttaggtacagaaaagtgtgcctgctatataaaagtaataacttttaaagaagtagaaaatcaccattagcagaggtttagttagtcaatctagtgcaggataaaaatgtagtgcaggataaaaaaatagatttgtgtaagtttacaaatttcagaaaatgaccaaattactccacttatctcattaacttgacctctttcaggatttgaccttcctaatagatttgtt

SEQ ID NO: 935227 - DNA, 507 bp, Homo sapiens
tggaagtctagagcctggtttaaagcagggtttcttaagctcaactctactgacgtagggctggagaattcttcctttgcagcggggggaagctgtcctatgcattgtaggatgcttggcaaccatccctggcccctatcccctcgatgccatgagcattctytcccaaagttgcgataacaactgtctccgacattgccaagccaaggaaggggtctgcgccatccccggctgacagcgctgatgggcgcgtgcccctccttcaggagccccgatgcctgtggctctcaactattaaatcaagttccagcaaagaactggaaacctttaagctgtgtatggaaccattgtgtgtagcactggaaactgtcccttttctaagtcactgtaaatggtgttttttttggagacagggtctggctctgtctcccaggctggagtgcagtgctacaatcagggctccctgcagccctgacctcctcaggtgcaagcgataaaggttcctcg

SEQ ID NO: 935228 - DNA, 624 bp, Homo sapiens
gtcaatgttcatacaggatattggtttctatttttatttttctgcaatgtctttgcctacagacaatttgatatcctggcaatgctggctttacaacatgaattaggatgtgttttccttctttatgtttttggaaaacttaaaaaaggttagttttcccaactctattagtgcttctttaaatatctgctagaattcatcagtgaagctatgaggtccagggctcttgtttgttgggaratttttggtttctgattcaatctcctcactagtaaataggtcttttcagattttctatttctttgtaatttagtttttgttggcttcatgtttctaggaatttattcatttaatctagattatccaatttgttggcatatgataattcatagtattttaaataattttttcatctggagtaatgaacaatatctccactgtaatttcttattttagtaattcatctttctttttttcttagtccatatagctctagggttgtcaattttattattctttttgaagaagtaatatcgggggaacccacccccaatatttcaatgtaggttctatttttcctaagtgtcagccagtctgagaaataaagagaaatagtacaaagag

SEQ ID NO: 935229 - DNA, 604 bp, Homo sapiens
ggttattctagcatattccttgagggttattgcagtcggcgagggctagattagatgagagtgcggaactggacccccgttctggcggcggtcctttttgaggaggcagggcctggagagtgcttggggggcgggcacgcagcgaaggggcaggcctgaaatgtgagtcacgggggtggagcctatagtcccatgggggcggggcttgagatgtcaggaatgggatgagggttagaggctaattagagggmgtgctatggaaggttcaggagccaaattttggagtagcattctccagggtgggccgaatggtgttgtttgagggatgtgttctgcgtgttattagagggagataggaaggcctggaagattattcacatggctgagcccaggattgtttattaagaaggtggggtcagaacagttaatttgtttgggctgagaacctttaagattacttgaggggatggtgcgtaaatggtgggccagtttgtatatgagctgcaggggcaagacaagtagatgaggctagaatgttaactcagggaacaggtcctaggtagtttccatggcatgtcccccaacagccctctccactgctttt

SEQ ID NO: 935230 - DNA, 629 bp, Homo sapiens
gccacctcactcttgcaaactgggtgaagaggagcaaaggatcaccatgctctccgcaaagacaggacccagggaagccacggctggggcacactcaggcactcgcccttctggaagcgcttgcagactccctccaatggcccccacagggcatccatggtgctgggcgcctccctctggcacagcacaagcagaagctcactcctgcattcgttgcttgtctttctgcccatgattgccctcagagcacccgctgggcaccaggcactgtcccagactctgaggactgcctgagtgggccaggtggggccgctatgctggtggagtccacagtccagggggtgcaaracccacatatatgtgtagagaaatgtgcaaaggaatgagagagcacctgataggaacgggtgccaggaaccaaactttaaaaatgtgctgagagagaagagcccatcggtgagggtcagggaactgggagcattggcttgcttcaaagcgcttgctctatcactcactcctgccatgcctggactccaccacaccctgagcaggcctggagggcaccaccacgacagtcgtggccatgtcctccctgccttccccagatgggcttccccacttggtcacca

SEQ ID NO: 935231 - DNA, 632 bp, Homo sapiens
aaaactgacatattaaacaaagccagtcggccggggtcggtggctcacgcctgtaatcccagcacttagggaggccaagaagggcagatcacttgaggtcaggagttgaagaacagcctggccaacaaggtgaaaccccaactctactaaaatacaaaaaattaggtgggcgtggtggcgggcgcctgtagtcccagctactcgggaggccgaggcaggagaatggtgtgaacccaggaggcggagtttgcagtgagccgagatagggccaccgcagtctggcctgggcgaaagagcgagactccgtctcaaaaaaaaaaaaaaaaaaaaatmcaaaaattatccaggcatgggggcgcacgcctagagtcccagctacttgggaggctgagacaggacaatctcttgaccctgggaggcagaggttgcagcgagccgagatagcaccactgcactccagcctgggcaacagagggagactctgctctaaaaaaaattttaaaaataaataaataaataaataaagctagtcatttggagttattctcctattaaaacattattatagcctgtaaatgtcaggtatccacccgagcaaaaaccttaaatatatgagtattttgccaataact

SEQ ID NO: 935232 - DNA, 856 bp, Homo sapiens
taggattctttaaataattgtttgccaacgattccggattttaccatgtagacacatttaacataacacatgtacatacgcaggaatacgcccaaacacagatacgtacataaacaaagataactttcattttagaattttgattatgggacagtaaaccatacaaactcaccgatttataaaagacgttggatctaaattatatttctgacaaaatggaagaaggctaaactttatttaagatttttctcctcaataggtaatcttatgaaggtggtgacccaaattttgggtaaagcagtttgagtcagttaccaacatgttgaattagacaaagaattgttaactgtaaaaatgtgactgaattatgtgaggaggcccaaaagataagwggtattccaataagctttgtataatgttctcttggtctcaattcctcatccttgaagataagagtgttgtctttccttttagtataggaaggagatcttttacatgggaatttcatcttttgcttttaagaaacactacaaaggtcagtgattttattttatttgtatctgatgtctttcaactgtctttattttaatagtcagtatgccagagtagctgaggagttttggaaaaagagttttgcttaaagaaggataaagaggaagaggtaaacgaaggagaggggaaggtgttggagaagaaaatctcagctagctttagacaatatcttgcagtgaggcagcctttgagtcttgaatgtgttctggagcctcaagataccaactgagataggagtcccatttggactgtattattttagttcagtttgaggaaaacagactgcgtgaatgatccccgtaat

SEQ ID NO: 935233 - DNA, 592 bp, Homo sapiens
ctgactgttagaatgaaaactaacaaacagaaaggacaaccacaccaaaaccccatctgtacatcaccatcaaaaaagaccaaaggtagataaaaccacaaagatgggaagaaaccagagcagaaaaactgaaaattctaaaaaccagagtgcctcttctcctccaaaggaacgcagctccttgccagcaacggaacaaagctggatggagactttgatgagttgagagaagaaggcttcagacaatcggtaataacaaacctctctgagctaaaggaggatgttcaaactcatcgcaaagaagctaaaaaccttgaaaaaacattagacgaatggctaactagaataaacagcatagagaagaccttaaatgatatgatggagctgtaaaccacagcacgagaactacgtgatgcatgcagaagcctcaggagccrattcgatcaagtggaagaaagggtatcagtgattgaagatcaaatgaatgaaatgaagtgagaagagaaggttagagaaaaaagagtaaaaagaaatgaacaaagcctccaagaaatatgggactatgtgaaaagaccaaatctatgtctgattg

SEQ ID NO: 935234 - DNA, 704 bp, Homo sapiens
cagagacaccaaggcagctagagtttgtaggacaaattaccaaggaagagagctgcacagagagagacagctctggtgatcttcagaaggtccccttgaaaactcagcagagtgctgtctggaacatgcgtatgaggatatcacctgagactggggaatcatccaaaaagattgaagagaatagagcccagtgatgctggaaaaagtacctgctgtcaccagccaggatgagaaaatcataattcatgagcactggggtagagtactcagaatgatcttgtctcagcaacaaagaataattagccctagaataaacactacaaatgttaaaagcaagacccaacactatcaattaactgcaccccagaagaagcctcaagaatatttagagaaatacaaaaacattttatggggctaaaagcaccataaaatttgtaatatctgctaatctcattcaaarattagcaggcttggccaggagtggctcatgcctataatcccagcactttgggaggccaaggtgggtggatcacctgaggtcaggaggtggagagcagcctggcaagcatggtgaaaccctctctctactaaaaagacaaaaattagctgggcgtggtggcaggcacctgtagtctcagctactcaggaggctgaggcaggagaactgcttgaaccagggagttggaggttgcagtgagttgaga

SEQ ID NO: 935235 - DNA, 704 bp, Homo sapiens
cagagacaccaaggcagctagagtttgtaggacaaattaccaaggaagagagctgcacagagagagacagctctggtgatcttcagaaggtccccttgaaaactcagcagagtgctgtctggaacatgcgtatgaggatatcacctgagactggggaatcatccaaaaagattgaagagaatagagcccagtgatgctggaaaaagtacctgctgtcaccagccaggatgagaaaatcataattcatgagcactggggtagagtactcagaatgatcttgtctcagcaacaaagaataattagccctagaataaacactacaaatgttaaaagcaagacccaacactatcaattaactgcaccccagaagaagcctcaagaatatttagagaaatacaaaaacattttatggggctaaaagcaccataaaatttgtaatatctgctaatctcattcaaaaattagcaggcttggccaggagtggctcatgcctrtaatcccagcactttgggaggccaaggtgggtggatcacctgaggtcaggaggtggagagcagcctggcaagcatggtgaaaccctctctctactaaaaagacaaaaattagctgggcgtggtggcaggcacctgtagtctcagctactcaggaggctgaggcaggagaactgcttgaaccagggagttggaggttgcagtgagttgaga

SEQ ID NO: 935236 - DNA, 719 bp, Homo sapiens
tgcctttatctataaaactgctaacacccagccttgaagagaaaagataaacatcagcttccagtcttttggttgcacaatacaaaggcctggacagtgagaaccatttttctggataggtttcaccatgctttgtccctgaagtcaggacatacctttctagtaaggggctgccttttgaagctcctttgatattgagcatgccccyggccacccagaaccccagcagttcaacatcaaagacatcaaagtggtttatgtgcccccagacagtgtctctaattcggcctctagatgaggagggcataaggaactttaaggttcattacaatggtactccatggaaggatggttaatgctatggaagagaaccctgatagaacaccatgaaagactggaaggatgacaccactggcactgaagatggggtgactgttacagaaaaagccatagaagccattgaccccaaaacaataaattccttctggagaaaactatatccggatgttgtatatgacttcacagaatttatgacagagccaatcaaggaaatcataaaagagattgtggatatggcaaaaagaaaaaaaaaaaaaaaggtggtggaagcaggagagtaaagatttcaatacatggatcttggagaaattcaagatctcatagacttcacaacagaggaattaacagatgacttgacagagatgagcacttccaaagcc

SEQ ID NO: 935237 - DNA, 719 bp, Homo sapiens
tgcctttatctataaaactgctaacacccagccttgaagagaaaagataaacatcagcttccagtcttttggttgcacaatacaaaggcctggacagtgagaaccatttttctggataggtttcaccatgctttgtccctgaagtcaggacatacctttctagtaaggggctgccttttgaagctcctttgatattgagcatgcccctggccacccagaaccccagcagttcaacatcaaagacatcaaagtggtytatgtgcccccagacagtgtctctaattcggcctctagatgaggagggcataaggaactttaaggttcattacaatggtactccatggaaggatggttaatgctatggaagagaaccctgatagaacaccatgaaagactggaaggatgacaccactggcactgaagatggggtgactgttacagaaaaagccatagaagccattgaccccaaaacaataaattccttctggagaaaactatatccggatgttgtatatgacttcacagaatttatgacagagccaatcaaggaaatcataaaagagattgtggatatggcaaaaagaaaaaaaaaaaaaaaggtggtggaagcaggagagtaaagatttcaatacatggatcttggagaaattcaagatctcatagacttcacaacagaggaattaacagatgacttgacagagatgagcacttccaaagcc

SEQ ID NO: 935238 - DNA, 719 bp, Homo sapiens
tgcctttatctataaaactgctaacacccagccttgaagagaaaagataaacatcagcttccagtcttttggttgcacaatacaaaggcctggacagtgagaaccatttttctggataggtttcaccatgctttgtccctgaagtcaggacatacctttctagtaaggggctgccttttgaagctcctttgatattgagcatgcccctggccacccagaaccccagcagttcaacatcaaagacatcaaagtggtttatgtgcccccagacagtgtctctaattcggcctctagatgaggagggcataaggaactttaaggttcattacaatggtactccatggaaggatggttaatgctatggaagagaaccctgatagaacaccatgaaagactggaaggatgacaccactggcactgaagatggsgtgactgttacagaaaaagccatagaagccattgaccccaaaacaataaattccttctggagaaaactatatccggatgttgtatatgacttcacagaatttatgacagagccaatcaaggaaatcataaaagagattgtggatatggcaaaaagaaaaaaaaaaaaaaaggtggtggaagcaggagagtaaagatttcaatacatggatcttggagaaattcaagatctcatagacttcacaacagaggaattaacagatgacttgacagagatgagcacttccaaagcc

SEQ ID NO: 935239 - DNA, 646 bp, Homo sapiens
atttacattcccaccagcagtgtgtaagcattctcttgtctccgcagccttgcaagcatctgttatttttttttttactttttattaatagccagtctgactgatgcaagatggtatctcattgtggttttgatctacatttcactgatgattagtgatgtggagcattgtttcatatatttgttggccacttgtatacctcattktaagaagtgtctgtttatgtcctttgcccactttttaatagggttatttattttttgtttgttgaattaaattctttacatattctggatattagacctttgtaggatgcatagtctatgaatattttctcccattctgtaggttgtctgtttattctgttgatagtttattttgctgtgcagaagttctttagtttcattatgtctcacttgtcaatttttgtttttgtggcaattgcttttgaaaacttagtcataaactctttgccaaggcttatgtccacaagagtatttccttgattttcttctaccacgtttatagttttaggtcttacatctaagtctttaatctatcttaagttaatttttgtatatgatgataggcagtggtccagtttcattcttctgcatatggctagctagttatcccagcaccattg

SEQ ID NO: 935240 - DNA, 642 bp, Homo sapiens
gggacacagggcacaaagtccctaggctgcacacagcaggggcaccctgggcccggcccatgaaacctttttttcttccaagcccctgggcctgtgatgataagggctgtctcaaaagtctctgacatgccctggagacatttctcccactgtcctggtgattaacatttggcttcttgtaacttatgcaaatgtctgcaactagattgaatttctcctcagaaaatgggtttttcttttctatctcattgtcaggctgcaaattttctgaacttttatgctctgcttctcttttaaaactgaatacttttaacagcacccaagtcacctcttggatgttttgctgcttagaaatttcttcygccagataccctaaatcatttctctcaagtttaaagttccacaaaactctagggcaggggcaaaatgccaccagtctctttgctaaaacatagcaagagtcacctttattccagtttccaataagttccaaaactgtactcctccataataacaaatctcagttaatggttacttcattcttctggctgcttaagccaaaaaccttggagttatcctttactcaggtttttctcaaaccaaatattcaatcttctaacatattatgtcaactctggttca

SEQ ID NO: 935241 - DNA, 642 bp, Homo sapiens
gggacacagggcacaaagtccctaggctgcacacagcaggggcaccctgggcccggcccatgaaacctttttttcttccaagcccctgggcctgtgatgataagggctgtctcaaaagtctctgacatgccctggagacatttctcccactgtcctggtgattaacatttggcttcttgtaacttatgcaaatgtctgcaactagattgaatttctcctcagaaaatgggtttttcttttctatctcattgtcaggctgcaaattttctgaacttttatgctctgcttctcttttaaaactgaatacttttaacagcacccaagtcacctcttggatgttttgctgcttagaaatttcttccgccagataccctaaatcatttctctcaagtttaaagttccacaaaactctagggcaggggcaaaatgycaccagtctctttgctaaaacatagcaagagtcacctttattccagtttccaataagttccaaaactgtactcctccataataacaaatctcagttaatggttacttcattcttctggctgcttaagccaaaaaccttggagttatcctttactcaggtttttctcaaaccaaatattcaatcttctaacatattatgtcaactctggttca

SEQ ID NO: 935242 - DNA, 809 bp, Homo sapiens
gaaatcaagagaaatgttgaaatggatgaatgcaggaaatgcactgaagtgtaaagaggcagggagttcagacaaaaaacattgccagccaggcgcggtggctcacgcctgtaatcccagcactttgggagtccaaggcgggtggatcacaaggtcaggagttcgagactagcctggccaacatagtgaaaccccgtctctactaaaaatacaaaaattagctgggcgtggtggcaggtgcctgtaatagcagctacctgggaggctgaggcaggagaatcrtttgaaccagggaggcaggggttgcagtgagccaagatcatgccattgcactccagcctgggcgacagggtaagactccatctcaaaaaaaaaaatgccatggtccgtttaatattggaggcagaatcagcatagtggtattggtcatggaaaggaatagagagaattaagagacagtcagaggtggaagcataatgtatgaagtgaccaattagatataggagttgagagagggaaggagtcagaaaactttacgggtttccaaattgggcaatgggggaatggaagtacctatagccaacatcttggggagcaactgtgtgagatgagttcaggtgaggttgtacctggaggtcagacatcttggaatattagagaggggtgtctagccaactattcagagttgaagtctagtcttgagaaggaagaggtaaagatgtagatttggaagtcctcggcatataaaggggagttgaatccatgggggtgaatgatgttaactcagaagatgaaaggggcttgaggaa

SEQ ID NO: 935243 - DNA, 534 bp, Homo sapiens
ttaaagttccaaaataatctcctttgactccatgtctcgcatccaggttgcactgattcaagtggattcccatggtctcgggtagctctgcccctgtggctttgcagggtatagcccctctcctggctactttcatgggttgtcattgagtttctgtagcttttctaggcacacggtgcaagcagtctggatctaccattctggggtctagcggayggtggccttcttctcacagctcctctaagcagtgtcccagtaagaactctgtttgaggactcccatcccacatttccctttggcactgccctagcagaggttctccatgagggctctgcccctggaacacaactctacctagacatccaggaatttccatacatcctctgaaatctagacagaggttcccaaactgcatttcttgacctctgtacacctgcaggcccaacatcatgtgtaagccaccaaggcttggggtttgcaccctctgaagccacagcctgagctgtaccttggcctcttctagccatggctgga

SEQ ID NO: 935244 - DNA, 591 bp, Homo sapiens
ttcagctgaaacagcccagaagaagaatcatatgaaataataaattattgttgtttgaaaactactaaccgttagagtggtttctgactcatcagaaactaacatatattatgttcttcatggcaataaggtgaaagaaaagatgcataatttctttaagccaaaattcgaaagcaacttaattcattgaaagatttactttgttccccttcctgtgtccatgtgttctcattgttcaattcccacctatgagtgagaatatgcggtgtttggttttttgttcttgcgatagtttactgagaatgatgatttccaatttcatccatgtccctacaaaggacatgaactcatcattttttatggctgcatagtattccatggaaaagaacgttaaaaaaaaagaargatttactttgattaaagtaaatgttacacaaatgagatacttataattcttctgtattcatttatcaaatattaaatattttaaagaagattttattttattttattttaagttccaggatacatgtgcagaatgtgcaggtttgttacacaggtaaacatgtgccatggtagtttgctgcacct

SEQ ID NO: 935245 - DNA, 844 bp, Homo sapiens
gtgatggcttggagaaacagtgtaaaccggcagtgtaaacaagagcagggcatgtatgagtagttgagaactgtgaataggagcatgactagacagaagatagtagggatgacaagttttttggggcagagtccaagttggtctggtgtctggaatgagactgggtcttaataaaaaggaagcgtccatacaggagctcaaataggctgtaccctgtagcattctgaggacaggcctaaattctgagaaaagaaagaggtaaaaatattgtccagtcctttttaagttggtggctgagcttggtgaggtgtgtttttaaaagaccattagtccgttctacctttcctgaagactgaggactgtaagggatataaaggtttcactgtataccaagagcctgaaaaactgcttggctggwttgactaataaaggccggtgtgctatcggattgtatagaggtgggaaggccaaactgagtaattgtgtctgacagaagggaagaaatgactgtggtgcccttctcagaccctgtgggaaaggcctctagccgtccagtgaaagtgtctacctagaccaagaggtattttagtttcctgactcggggcatgttgagtaaagctaatttgccagtcctgggtgggggcaaatccctgagcttgatgtgtagggaagggagggggcctgaataatccctgaggagtagtagaatagcagatggaacactgagaagttatttccttgaggatagagttccatgatggaaaggaaatgagaggttataagaagcaggctagtggcttctactatagcatagcctgcctttgctggtgtgtggtgattaggc

SEQ ID NO: 935246 - DNA, 844 bp, Homo sapiens
gtgatggcttggagaaacagtgtaaaccggcagtgtaaacaagagcagggcatgtatgagtagttgagaactgtgaataggagcatgactagacagaagatagtagggatgacaagttttttggggcagagtccaagttggtctggtgtctggaatgagactgggtcttaataaaaaggaagcgtccatacaggagctcaaataggctgtaccctgtagcattctgaggacaggcctaaattctgagaaaagaaagaggtaaaaatattgtccagtcctttttaagttggtggctgagcttggtgaggtgtgtttttaaaagaccattagtccgttctacctttcctgaagactgaggactgtaagggatataaaggtttcactgtataccaagagcctgaaaaactgcttggctggattgactaataaaggccggtgtgctatcggattgtatagaggtgggaaggccaaactgagtaattgtgtctgacagaagggaagaaatgacygtggtgcccttctcagaccctgtgggaaaggcctctagccgtccagtgaaagtgtctacctagaccaagaggtattttagtttcctgactcggggcatgttgagtaaagctaatttgccagtcctgggtgggggcaaatccctgagcttgatgtgtagggaagggagggggcctgaataatccctgaggagtagtagaatagcagatggaacactgagaagttatttccttgaggatagagttccatgatggaaaggaaatgagaggttataagaagcaggctagtggcttctactatagcatagcctgcctttgctggtgtgtggtgattaggc

SEQ ID NO: 935247 - DNA, 844 bp, Homo sapiens
gtgatggcttggagaaacagtgtaaaccggcagtgtaaacaagagcagggcatgtatgagtagttgagaactgtgaataggagcatgactagacagaagatagtagggatgacaagttttttggggcagagtccaagttggtctggtgtctggaatgagactgggtcttaataaaaaggaagcgtccatacaggagctcaaataggctgtaccctgtagcattctgaggacaggcctaaattctgagaaaagaaagaggtaaaaatattgtccagtcctttttaagttggtggctgagcttggtgaggtgtgtttttaaaagaccattagtccgttctacctttcctgaagactgaggactgtaagggatataaaggtttcactgtataccaagagcctgaaaaactgcttggctggattgactaataaaggccggtgtgctatcggattgtatagaggtgggaaggccaaactgagtaattgtgtctgacagaagggaagaaatgactgtggtgsccttctcagaccctgtgggaaaggcctctagccgtccagtgaaagtgtctacctagaccaagaggtattttagtttcctgactcggggcatgttgagtaaagctaatttgccagtcctgggtgggggcaaatccctgagcttgatgtgtagggaagggagggggcctgaataatccctgaggagtagtagaatagcagatggaacactgagaagttatttccttgaggatagagttccatgatggaaaggaaatgagaggttataagaagcaggctagtggcttctactatagcatagcctgcctttgctggtgtgtggtgattaggc

SEQ ID NO: 935248 - DNA, 728 bp, Homo sapiens
gctgaattctatcaggcattcaaagaagaattggtaccaatcctactgacactattccaaaagatagagaaagaggaaattttccctaagtcattctatgaagtcagcatcacccttataccagaaccaggaagggacacaacaaaaaaagaaaactatagaccaatatccctgatgaacatagatgcaaaagtcctcracaaaatactagtgagccaaatccaacagcatatcaaaaagataatccaccatgatcaactgggtttcagaccagggatgcagggatggtttaacataggcaagtcaataactgtgatacaccacacaaacagaattaaaaacaaaaatcacatgatcatctcaagagacacagaaaaagcatttgacgaaatccagcatccttttatgattaaaaccctcagcaaaattggcacagaagagacatgccttaaggtaataaaagccacctgcgagaaacccacagccaacattatactgaatggggaaaagtttaaaacattccccctgaaaactggaacaagacaaggatgcccactttcaccacttctagttaacatagcactggaagtcctagacagagcaatcagacaagagaaagaaataaagggcatccaaatcagtaaagaggaagtcaaactgtcactgtttgctgatgatatgatcgtatacctagaaaaccctaaagacatatccaaaaagctcctgga

SEQ ID NO: 935249 - DNA, 633 bp, Homo sapiens
gctggctttcctctacttccctggtgacctgtgtgatgtatgatgcaggagaggcagccataattcccttggaacataactccattggcctgagaaccacacctgcatctcctattatagccatagcaagccctgcccaaggagagtctgagctcagacatacctgaccctgccctcaacagatggtctttctctacctgccttggtagccaaagacaaaagacataatctcttaggagctctatggacctgcccatcacctgagagacctgaatatttatccaggtgaccatagcgcaagctagcatcccacctatactacaccctccttagggtaggctggtttgcccccatattrtccccccatagtactcttttgaaagcaccacctcctgactggaggtgaatcaactcaagctattacaacccttataaaagaacaaccctgctccaacaaagaagacaacagctaattacatggtctgtaacatcatggctaaccagaggtcctgagtctgtccacatgacaactttaccactagcacaaccagcacttgagaaaaccagttcactgaacaaaactacaaccaaggacccttacagagtccacttcactcctctgttacttccact

SEQ ID NO: 935250 - DNA, 633 bp, Homo sapiens
gctggctttcctctacttccctggtgacctgtgtgatgtatgatgcaggagaggcagccataattcccttggaacataactccattggcctgagaaccacacctgcatctcctattatagccatagcaagccctgcccaaggagagtctgagctcagacatacctgaccctgccctcaacagatggtctttctctacctgccttggtagccaaagacaaaagacataatctcttaggagctctatggacctgcccatcacctgagagacctgaatatttatccaggtgaccatagcgcaagctagcatcccacctatactacaccctccttagggtaggctggtttgcccccatattatccccccatagtactcttttgaaagcaccacctcctgactggaggtgaatcaactcaagctattacaacccttataaaagaacaaccctgytccaacaaagaagacaacagctaattacatggtctgtaacatcatggctaaccagaggtcctgagtctgtccacatgacaactttaccactagcacaaccagcacttgagaaaaccagttcactgaacaaaactacaaccaaggacccttacagagtccacttcactcctctgttacttccact

SEQ ID NO: 935251 - DNA, 761 bp, Homo sapiens
agcctggagaggctccccaatgctgggagaaggtaagtgagtggcctccagtggtctacattcccattatggactcctgcaatcctagccatgagagagcacctccaccctcgcagcccccaggactagtatagggagctacaagatatgcaatggcattgctccagagagggagctcctaagcggttaaagcaaggcaccattttgagagtctagccccgaatggactgcaggctgactttgggcttaatagcccctacatctccacattcctggagacttactgacatccccaagtgtagccaggcactgctgctggctgctgccaccaatgctgaagcaactccaccccctcaggagcagggctgctgcacatttcaaaacaccctgtggaagggctaccctgcttatctccactacctggagcgaaagtgcatgctctccagtcacctatagctactgccactgaaagcaaccccatcctccccaggagcagggcagcagcacagtcactactgcccccacccaagcattccaccagtggtctggatatcatccyatgcctgcctaccacagccagctcccacatgcaccactagaggggtctgaggacaggcctgccctggctctacactcccactcagtgcctgagcaaatggtctggaagcctggggatgaccctgccccatccaccactgttggtacctcagcactcctcccaggagcctgaggacaggcccactaaacctgcagctactacc

SEQ ID NO: 935252 - DNA, 749 bp, Homo sapiens
gccactgaaagcaaccccatcctccccaggagcagggcagcagcacagtcactactgcccccacccaagcattccaccagtggtctggatatcatcccatgcctgcctaccacagccagctcccacatgcaccactagaggggtctgaggacaggcctgccctggctctacactcccactcagtgcctgagcaaatggtctggaagcctggggatgaccctgccccatccaccactgttggtacctcagcactcctcccaggagcctgaggacaggcccactaaacctgcagctactaccacagctaacatctgcctgcatgtgccacctacgggcctggggactagtgtgcccagcctgttgcagccactgtcaacaccaatgcagacttcttggaaaccagaggattgtcctgccactgctactgccatttccyatgccatacctgctgtccaggggcctgaagacccagccatccagaccagtggtctaccactgccactgccagcacccaagcaggccagtcacctggaggcccaagattcatcatgcttggactcactaacaccagtgccagcatatactgcactgaagcccaaggacaggcacactcagcctgctgctgccaccagtgaagtccaaggactggccttcttgatgaccccatccccagcaaaacttcactacagcctccactaacaactataccctaagccactgaggaaatcacaaacaccactgatgctgtt

SEQ ID NO: 935253 - DNA, 537 bp, Homo sapiens
tactatagcattatagcatctgcaagactactgtgaacacctctgtgaaccaggaaatctagaggaaattgataaatttctggaaacacacagtctcccatgatggaatcaggaagaaattgaaaccctgaacagaccaataccaagtttcaaaattgaatcaatagtaaaaacctaccaaccaaaaaaatgtcctggaccagatggattcacagctgaattctgccacacagacaaagaagagggagtatcagtcttaccaaaastattccaaaaattgaggcagagggactcctctctaactcaatctacaaagtcagcatcaccctgacaccaaaacctggaaaagacacaacaaacaaagaaaactacaggccaatatccctgatgaacatagatgcaaaaatcctcagcaaaatactagcaaacccaatcatcaaaaagttaattcactatgatcaagtagccttcactcctgggatgcaatattggttcaacatatgcaaataaataaatgtgattcacgacagaaaaaaa

SEQ ID NO: 935254 - DNA, 654 bp, Homo sapiens
cttattggagatgtggataaaccacttaggttttctgcctcttcattagtgcaagggtggcaagggcagtagcagagaggctttcagttgcccctgaaggctctgtccagggagttggtgagtttgctgctggctcaatagctctggcagggggcggctggaggcctaggcctggaggacctgcgtggtgaggagatataagaacaaccacccacctaacaatctggctaattttgctgcagtatgttgggggcccattccagtctctagtcacctcaaatttttcagtacctggcaatatcaacagtgaggcctacaaaacagcaaagatggcagcctgcccctccttctgggagcttcatcccagggacattcatccctgttgctggcttaaacacacctgtaggagggggctggagacgccagttaggagatctctcctagtaaggaggaacgggattggggacctgcttcaaaaarcagtctggccatgttttagtggagcatctgtgctgtgctgggggtccacttcaacccccagtcaccttgcacactccaaagcctgaagactggaacggctaagtcgcccaaacagcaacaatgatggcctgcccctccctctgggagctctatcccagggaggttacaaatctc

SEQ ID NO: 935255 - DNA, 705 bp, Homo sapiens
ccctactttaactggagaacgacaatgacattttgtgtcccctggagtcaatgtcagctcagagccagtgtccagtagtccctgaaatgtctgatcatttccatttccccaatccacagttgccctggtagaagctagaggtgtccttgggaaatgattggagaaagaattaacagcataaattgtcagtagtgtagtggggtccttacacaaaaagacccgacctctccttcattcaaggggttataggtctgtaaactggttcaagtactgaaattgattgacgggccatgattccctgtatttgtaattcagattagtcttttgtytactcgatctgaaagttctctgcttatataaattaagtaagaatgcagtaggcttcgtatcaatttaacttctaggaacaccatgattaattagccaatgtcagagctcaacataagtcacactattctgattgcgactttgcatctgctgtccattctggtagctacacccaccttgcctttgatggttgagtgctgccacctggcccctgccacctcgggatctaatttttcccattgcatttaaattttgcagttgaatggctgcagtttccactgttagatctggcatatagagaagagcaatcacagagctcttcaaagatggcaggtccaccctcacaaatctatttcacaaagtattggtcaaggatat

SEQ ID NO: 935256 - DNA, 630 bp, Homo sapiens
ggagggagaggatgagggagcatctgcaggtcaaggtgagggaaagggaagaagaacgtctgctggtgtgtgcgtgtgtgtgtgttcgtgtgtgtgtgtgtgcacgtgtgtgtgtgtgtgtgttaggcattgtcacataggaggaagaggaggaaagaaaacaatggaaagaatgcctgaaattgactggaaaagcgaggaggctatgtagtttgcagcttagcttaggcaaatccctcactatgataaaagttctcatctttatgaatgagaraatggaggcgctgggattgtgttttatccaagagcccttgactggtgaatacaaaatttgtattttgttccaaggtttgtgtcttcctaccatctatgttgctgtaaaaacggaaatgattttgctgaaaatgcttaaaactcaaaggctttactgtaaggtagcttagtactgacccaagaatagacccagttcagaggagcaggagcagctccaaaaaccgagtcactgaatgtcagccactgtttcctttgattgatgtttttatatggtacatttgataaaagctggataaatgaggatactgccatacaggtagctggtttagttattttctaagtggcttttaggaggtg

SEQ ID NO: 935257 - DNA, 743 bp, Homo sapiens
ggccctttttttttttttgagactgagtttcactcttgtcccctaggctggagtgcaatggcgcgatcttggctcactgcaacctccgcctcccaggttcaaatgattctcctgcctcggcctcccaagtagttgggactatgggcgtgcaccgccatgcccagctaattttttgtatttttagtagagacagggtttcatcatgttgcccaggctggtcttgaactcctaacctcaagtggtctccctgcctcggcctcccaaagtgctggaattacaggtgtaagccaccacgcccagccgaaaagatgggttcttctatcttttctctttccatagccaggaatgtatcctaaagaaatgatacaagtgtcgataaaactatgcccaatgctgtttgctggtttgctttgcaacctctaaatgaaagaacttagctgctcagtaggaagggaatggtatgatatgagtaktaagcagccatttgaaatgtttgcaaaagtgtataatgatgtttcttactgttaaatggacaaagctagctgtgaaattatgtctgtagaatctaaatgatttcgtagaatatctggaaggaaattttccagaatggtaacagtagttgtctctggctgatgtgtgattgtttttcttgcttctttagactttcctgtattttgcgaattttctataatgaggctgtaggacttttaggatgaggggataaacaaaggcagcagaagaga

SEQ ID NO: 935258 - DNA, 542 bp, Homo sapiens
cactaattatcagggaaatgcaaattaaaaccacaatgagataccaccttattgctacaagaatggccataattaaaaagtcaaaaaataataggtgctggtgtggatgtggagaagagaacacttttacactgctggtgggaatgtaaactagtacaaccaatgggaaaacagtatgaagattccttaaagaactaaaaatagaactaacatttaatccagtaatcccactactgggtatctacccaaaggaaaagaagtcattatatgaaaaagacacacacatgcatgtttatagaagcacaattcacagttgcaaaaatatgcaaccaacttaagtgyccatcaaccaacaagtagataaagaaaatgtggcatatggaatcatactcagacataaaaaagaatgaaatagtgtctttggcagcaacttgaatggaggccattattctaagtgaagaaactcaggaatggaaaatcaaatatcatatgttcttacttataagtaggaactaagctataaggacacaaaggcataagaa

SEQ ID NO: 935259 - DNA, 785 bp, Homo sapiens
ttcttttttgagacagggccttgctctgttatccaggcaggagtgcaatgacatgatggctaattaatttttttttttttttttgcagagatgggtgtctctctatgttgcccaagctggtcttgaactcctggcctcaggcgatccttccaccttggcctcccaaagctctgggattacaagtgtgagccactgagcctgacaagacctttagtaagcatcagccctgtaaaagggaggggacagaagtataactgggcagaggaacaaacggaactacaatggagagcccaacaaagccctggccakctaatctggacaggagttctggagtaagtgtcttagcttgggctactggaacacattaactatagactgggaggctcaaacacaaagtatttatttctccctgttctggaggctggaagtccaaaatcagggtggtagtatggctgggttctggtgagggccctcttccggttgcagacatgcctacttcatgttgtgtccctgcatggtggaaagagagctagctagttctctggctctaatcctattggcaggcactaatcctattagcagagtcctcatgacctcatgacctctcagaggccacacctcctaacactatcacattgggattagggtttccacaagtgaatttcggtggagtggggagtgtaggggaacaaacattcagtccattgcagtgagtactgttcacctgagtgtcttgtgttgggccaagatggccggccctgtattcccccgtggcctcactgagt

SEQ ID NO: 935260 - DNA, 598 bp, Homo sapiens
agcatctgcaggtcaaggtgagggaaagggaagaagaacgtctgctggtgtgtgcgtgtgtgtgtgttcgtgtgtgtgtgtgtgcacgtgtgtgtgtgtgtgttaggcattgtcacataggaggaagaggaggaaagaaaacaatggaaagaatgcctgaaattgactggaaaagcgaggaggctatgtagttcgcagcttagcttaggcaaatccctcactatggtaaaagatctcgactttatgaatgagagaatggaggtgccaggattgtgtgttatccaagaacccttgactggtgaatacaacatttgtactgtgttcyaaggtttgtgtcttcctatcatgtatgttgctgtaaagaaggaagtgattttgctgaaaatgcttaaaactcaaaaggctttactgtaaggtagcttagtactgacccaagaatagacccagttcagaggagcaggagcagctccaaaaaccgagtcgctgaatgttggcccccgtttcctttgattgatatttttatatggtacgtttgataaaagctggataaatgaggatactgccatacaggtagctggtttagtgatttttctcagcg

SEQ ID NO: 935261 - DNA, 728 bp, Homo sapiens
attttgctgaaaatgcttaaaactcaaaaggctttactgtaaggtagcttagtactgacccaagaatagacccagttcagaggagcaggagcagctccaaaaaccgagtcgctgaatgttggcccccgtttcctttgattgatatttttatatggtacgtttgataaaagctggataaatgaggatactgccatacaggtagctggtttagtgatttttctcagcggcytttaggaggtgattaaatccttttatggttagaaaagcaaaaacggaattatcctgagattaacgtgagatggaaataatttctcccagataaaatgttttgaaaggaagcatttatgtaacggaggtcatggattattccagggatgcactgttaaaagttcctagaatctgactgacaacaatgcccattaattgctgtccgcccactcccttattctcagtgcgggggacagtatattttctgtgattcacaaacaatgttatatttggtgctttgttcttcacggggttcatttatggaatattacctttaggaccttcggacctaaatataactttatttgaacaaagtgaagtttctctttaccccaataggtaatgggtgtcgtgactgtaagattttccatagtcctcaaatccatccagctaatcaatccttcagaaactgacattgtaattgtaactgaaatcctacccacgtggtagacttcagattt

SEQ ID NO: 935262 - DNA, 718 bp, Homo sapiens
ttgctgaaaatgcttaaaactcaaaaggctttactgtaaggtagcttagtactgacccaagaatagacccagttcagaggagcaggagcagctccaaaaaccgagtcgctgaatgttggcccccgtttcctttgattgatatttttatatggtacgtttgataaaagctggataaatgaggatactgccatacaggtagctggtttagtgatttttctcagcggcctttaggaggtgattaaatccttttatggttagaaaagcaaaaacggaattatcctgagattaacgtgagatggaaataatttctcccagataaaatgttttgaaaggaagcatttatgtaacggaggtcrtggattattccagggatgcactgttaaaagttcctagaatctgactgacaacaatgcccattaattgctgtccgcccactcccttattctcagtgcgggggacagtatattttctgtgattcacaaacaatgttatatttggtgctttgttcttcacggggttcatttatggaatattacctttaggaccttcggacctaaatataactttatttgaacaaagtgaagtttctctttaccccaataggtaatgggtgtcgtgactgtaagattttccatagtcctcaaatccatccagctaatcaatccttcagaaactgacattgtaattgtaactgaaatcctacccacgtggtagactt

SEQ ID NO: 935263 - DNA, 783 bp, Homo sapiens
actgtgttccaaggtttgtgtcttcctatcatgtatgttgctgtaaagaaggaagtgattttgctgaaaatgcttaaaactcaaaaggctttactgtaaggtagcttagtactgacccaagaatagacccagttcagaggagcaggagcagctccaaaaaccgagtcgctgaatgttggcccccgtttcctttgattgatatttttatatggtacgtttgataaaagctggataaatgaggatactgccatacaggtagctggtttagtgatttttctcagcggcctttaggaggtgattaaatccttttatggttagaaaagcaaaaacggaattatcctgagattaacgtgagatggaaataatttctcccagataaaatgttttgaaaggaagcatttatgtaacggaggtcatggattattccagggatgcactgttaaaagttcctagaatctgactgacaacaatgcccattaattgctgtccgcccactcccttattctcagtgcgggkgacagtatattttctgtgattcacaaacaatgttatatttggtgctttgttcttcacggggttcatttatggaatattacctttaggaccttcggacctaaatataactttatttgaacaaagtgaagtttctctttaccccaataggtaatgggtgtcgtgactgtaagattttccatagtcctcaaatccatccagctaatcaatccttcagaaactgacattgtaattgtaactgaaatcctacccacgtggtagacttcagat

SEQ ID NO: 935264 - DNA, 783 bp, Homo sapiens
actgtgttccaaggtttgtgtcttcctatcatgtatgttgctgtaaagaaggaagtgattttgctgaaaatgcttaaaactcaaaaggctttactgtaaggtagcttagtactgacccaagaatagacccagttcagaggagcaggagcagctccaaaaaccgagtcgctgaatgttggcccccgtttcctttgattgatatttttatatggtacgtttgataaaagctggataaatgaggatactgccatacaggtagctggtttagtgatttttctcagcggcctttaggaggtgattaaatccttttatggttagaaaagcaaaaacggaattatcctgagattaacgtgagatggaaataatttctcccagataaaatgttttgaaaggaagcatttatgtaacggaggtcatggattattccagggatgcactgttaaaagttcctagaatctgactgacaacaatgcccattaattgctgtccgcccactcccttattctcagtgcgggggacagtatattttctgtgattcacaaacaatgttatattkggtgctttgttcttcacggggttcatttatggaatattacctttaggaccttcggacctaaatataactttatttgaacaaagtgaagtttctctttaccccaataggtaatgggtgtcgtgactgtaagattttccatagtcctcaaatccatccagctaatcaatccttcagaaactgacattgtaattgtaactgaaatcctacccacgtggtagacttcagat

SEQ ID NO: 935265 - DNA, 646 bp, Homo sapiens
taggacatgacttgcctgggtgtggcaattcttgtggcctagactccctttcaggtttatttggagccacagaccactttagcctgcagtggagagccttacgacaactcaaactctgacctctgggatcagtcattctcctctggctagggctggtttaaatgcaccctcagtggacaggcatcaactgrgtttaatctagttttgctttcttctataaaggagggcagcatggagttcaatggctcaaaattgctgggtctccctctcagggcacaaaatctctctctaaagaaagctgctgctgctggtgggtggggaaagggtggtgtcagtgattcaagtctcctttttctacttcttcagtgcctctttcagtgatacaaagtaaaagccaaggattatgaatggtcacctgattttttggttcttatgaaggtgcttttttgtgtgtaaatagttgttaaattagtgtccttgcaggggatgataggtggagccttctattctgccatcttgcttcattctcaacctatcctcccatttaaaattattatggtcttcatttttggaaacagatgtgacaggaatcaacagatgttaacgggaaacaaggaattttcctgatgagacaatttggtcttag

SEQ ID NO: 935266 - DNA, 606 bp, Homo sapiens
ggctgggacacagggcatcaagtccctagactgcactcagcacagggggcctgtcccactaaaccattttctcttaggcctctgggcctgtgatgggaagggctgctgtgaagacctctgacatgctctggagacgttttccccattgtcttggagattaacattcggctcctagtaacttttgcaaatttctgcagccagcctgaatttctcctcagaaaatgggtttttcttttctatcacattgtcaggctgcaaattttctgaacttttatgctctgcttcacttgtaaaactaagtgcctttaacagcacccaagttaactcttgaatgctttgctgcttaggaattttttttaccagataccctaaatcatctctctcaagttmaaagttccacaaatctctagggcaggggcaaaatgctgccagtctctttgctacaacataacaagagtcacctttgctccagttcccaacaagttcttcatctccatctgagaccacctcagcctagaccttattgtccatatcgctatcaggattttggtcaaagccattcaacaagtctctaggaagttccaaactttcccacattttcctgtc

SEQ ID NO: 935267 - DNA, 535 bp, Homo sapiens
cttttagatccctctcagtggctaagagggcaggcagcagcagtactagtagcaaagggatagtcagttcaggaaggttttcactccacctgctgagggaggtcggcacctaaagtcctatctgacccgatgccccatgactcctgrcaggagatggcactgatggtccccccttactgagaaggagggctccccactcctgagcccatagcacctacaccctcgcaagacatccacacccctagaccacccagagtagacaaaagaggaagtgaagctgcaggaaatcttctcccttgacagcccacttatgacctaagactggaatccaaacacccctgagggagcagcgatgtactggggaagatgaggacaggcacatggtggaaagacgtgcctttctgtatcagcctttcacttctgctgatttcttaaattggaaaaacaatacaccctcttatactgagaaaccccaggccttaattgatctgctccaaaccattttacagactcacaatcctacctgggctgattg

SEQ ID NO: 935268 - DNA, 766 bp, Homo sapiens
taaaaagcatttagagttagtgaaaaagcaacttgcagaataatatacacagtattgttgtcatttgtgaaacgttttaaactatgtaaaacaatacttctctaatatttgtcgtaaaaatatcaaatgcagcctggaatgacatatgtaaatctcatmattatgcttgcccctggggtggggttgagacacaagaagggaatttttatctgtaatgttttattgtatttatactttttaaaggccaggaaagctgggcaacgatgtcacataaagtcataacataaaaacggcaaagccaggcacaatggcgtgggcctgtggtcttagctactcgggaggctaaggcaggaggatcgtttgcatccaggagttcaagtccagcctgggcaatatagcaagtcgccatctctaaaaaaataaataatcatgggggcagggagaggtgcctaatgagagaaacacatgctgggggtggggaaggctggcaacttcctgtttcatgacttgggtggtgattatgctgatgtctgctttataactaatcattttaggcaactgtgttttatgcagttttatatgctatcgttcacaatcttatgagttcaaaaatctcgggctgggagcggtggctcgcacctgtaatcccagcaatttcagaggctaacgggggagcatcactctagcccagtagtttgagatcagcctgggcaacatggcgaaaacccgtctctgcaaaaaaatacaaaaaaattagccggttgta

SEQ ID NO: 935269 - DNA, 766 bp, Homo sapiens
taaaaagcatttagagttagtgaaaaagcaacttgcagaataatatacacagtattgttgtcatttgtgaaacgttttaaactatgtaaaacaatacttctctaatatttgtcgtaaaaatatcaaatgcagcctggaatgacatatgtaaatctcataattatgcttgcccctggggtggggttgagacacaagaagggaatttttatctgtaatgttttattgtatttatactttttaaaggccaggaaagctgggcaacgatgtcacataaagtcataacataaaaacggcaaagccaggcacaatggcrtgggcctgtggtcttagctactcgggaggctaaggcaggaggatcgtttgcatccaggagttcaagtccagcctgggcaatatagcaagtcgccatctctaaaaaaataaataatcatgggggcagggagaggtgcctaatgagagaaacacatgctgggggtggggaaggctggcaacttcctgtttcatgacttgggtggtgattatgctgatgtctgctttataactaatcattttaggcaactgtgttttatgcagttttatatgctatcgttcacaatcttatgagttcaaaaatctcgggctgggagcggtggctcgcacctgtaatcccagcaatttcagaggctaacgggggagcatcactctagcccagtagtttgagatcagcctgggcaacatggcgaaaacccgtctctgcaaaaaaatacaaaaaaattagccggttgta

SEQ ID NO: 935270 - DNA, 601 bp, Homo sapiens
acacacacgtgtgcatacactagtatgtacaaacacagaaaggttcacctgtttacagaatacgtaggaggccaggtgcaatggctcatgcctgtaatcccaggactttgggaggccaaggcaggagtatcacctgagcccaggagttcgagaccagcctgggcaatatggagagatgccatctccacaaaaattaaaaaaaaaaaaaaaatagccagacgtggtggtgcatkcctgtagtaccagctacacaggaggctgagaagggaggatcacttgagcccaagagtttgaggctgcactgagctgtgactgtgccactgcactccagcctgattgacagagcaagaccctgtctcaaatatatgtggaggaccagtgcctttaaattgctcatccaagtgccagcaaatgctcttctgcacaggggagggatgagaccaaaggaaaacctggcactggcattgcccggagtatgtgaggagaaggacctcgccaggccatgtgtgaagagcattggcagagcccctgccatggctaagtcctggtgtcccctgcaaagcagggccttgatgctccagtttcctgtccctttcctttc

SEQ ID NO: 935271 - DNA, 718 bp, Homo sapiens
gtcccagctactcagaaggctgaggcaggagaatcgcttaaacccgggaggcagaggttgtagtgagccaagatcatgccactgcactccagcctgggtgacaagagtcagactctgtcaaaatcaaaatttacaggtagagttccaaattcaaggaacttagaggctggggcagacccctgaggaagcagggggccacaccaggccatgacaggataaacccgaggcagtgggcgcgcagaggggacggccaacccaccctgagggtcagaaaagccccccaggcccagaaggaccaggaatttatcaacggtgaacactgaggaggtcagaggagggtgctggagctgtggattaagggtgcgcaaaggtgtggaggtgggacccggcttcaaagccaagggaaagtccgggcgggctgtgaggaggacctggtggaagaccgtccgcggaagccgagcgcgccaggccgggggctgcagacccgtgaagggccgcttagygctaatgttaggctctgtgtgcctcgcaatctgtggccaccatgcagctctgtccttagggcaaaagcagccatagagaagcatcacggagctggcaaggctgcgttccaacaacacggtgttaatggaagctgaagtgtgaatttcatgtcattttcatgtgtcacaaaatatttttcatttcatttttctttctgctattccaaaaagtaaga

SEQ ID NO: 935272 - DNA, 485 bp, Homo sapiens
cgaattgtaaccctcagcgttggaggtggcgcctggtgggaagcgactagatcacgggggcggttttcccatgactggttgagcaccatccgccttggtgagtcctcacgagctcggccatttacaagtgggtagcacctcccgcctcactctcttgctgctgcgctgrccgtgtggcatgcctgctcccccttagccttctgccatgattgtaagtttcttgaggcctcctcagaagctgagcacatgccagcatcaagcttcctgtacagcctgaggaaccgtgagcccattactttgcttttctttatcaattacccagccttgggtactttatagcagtgcaggaaaggactaatacagccagggatggtgacccgcaaggcctggaaccagaccccaaatgtggccttccccagctcttagcgccttccaagtctaagctgacagctcggcattgttgcaggtggaaacacacctggatt

SEQ ID NO: 935273 - DNA, 632 bp, Homo sapiens
gaaaaagttgccaccagagggcactactgctctttacaaaccaagttttagcaataacaaatactgaagatttaatggctagggggtcgacgtggcaaatttggatatgcatatgaaatgctccaaaaataataaattcattaaagttaatattatttatcagacagtttacgaactgagcactgaaactgccattcccatcaacccaatttgactagtctttgatatgtacatgcgggacaaaaaatacacataaaggaaaatatatttatggcatttcagttactttactcagmtaaattatctcatatattcattgtaaagaaggattctgcacctcttaatataaaataataatgtgaataataagctgggtacatagattaacatctctttgaagtgctgtgatgtatttacacatatgcaatttatattcataacacagtataaattcatgcatacacatccacagcgagaagggagacaagtagtataatcaccaatttaaaaaggaagaaattgaggtgcagaatgtcatagcttacctaaatcacagagcagctagggtgtaatacgtatttgtgtatgtgcacacataggggcaaaaatggggacaaaatattatttctcta

SEQ ID NO: 935274 - DNA, 632 bp, Homo sapiens
gaaaaagttgccaccagagggcactactgctctttacaaaccaagttttagcaataacaaatactgaagatttaatggctagggggtcgacgtggcaaatttggatatgcatatgaaatgctccaaaaataataaattcattaaagttaatattatttatcagacagtttacgaactgagcactgaaactgccattcccatcaacccaatttgactagtctttgatatgtacatgcgggacaaaaaatacacataaaggaaaatatatttatggcatttcagttactttactcagataaattatctcatatattcattgtaaagaaggattctgcacmtcttaatataaaataataatgtgaataataagctgggtacatagattaacatctctttgaagtgctgtgatgtatttacacatatgcaatttatattcataacacagtataaattcatgcatacacatccacagcgagaagggagacaagtagtataatcaccaatttaaaaaggaagaaattgaggtgcagaatgtcatagcttacctaaatcacagagcagctagggtgtaatacgtatttgtgtatgtgcacacataggggcaaaaatggggacaaaatattatttctcta

SEQ ID NO: 935275 - DNA, 638 bp, Homo sapiens
aaaatcaacaaagtaaacagataacccacagatcgggagaaaatatttgcaaactatgcatccaacaaagggctaatagccagaatctacaagcgactcaaacaaatcagcaagaaaaaaattaaataggatgttggctgtgggtttgtcatacatggcttcgaggtttattttattactttcaggtaaattccttctgttcctattttgttgagggtttttatcataaaatgatgctggattttatctaatgcctttgttgtgtttaytgagataatcatatggtttttgtttctgtttatgtgatgttttacatttattgacttgcatatgttaaaccatccctgcatcccagatctgaaacccacttgatcatgttgtgttatcttttagatacactgttggattcggttagctagtatttcgttgaggacttttgcatctgtgttcatcaagcatattgctctgtagttttcttttctctattatgtcctttcccggttttctatcatggtggtactggctttaacaaatgatttagggagaattttctctttctcttttttttgttttgttttgtttttgtttttcttttaatagtttctgtagaattcgtaccaattcttctttgaatgtct

SEQ ID NO: 935276 - DNA, 586 bp, Homo sapiens
gagctcaagtgttgccaatatcagcttaaaagtcatgcaatgaggccaggcgcggtggctcatgcctgtaatcccagcactttggaaggccaaggcaggcagatcacgaggtcaagagatcgagaccatcctggccaacatggtaaaacctcatctgtgctaaaaatacaaaaattagctgggcatggtggtacctgcatgtagtcccagctactcaggaggctgaggcaggagaatcgcttgaacccgggaggcagaggttgcmgtgagccgagattgcatcactgcactccagcctggtgacagagcaagactgcatctcaaaaaaaaagaaaaaagaaaagccatgcaatgttaataatctccatgtgagcagttcatctctccagtaaattgtgtactatagtaaaaagtgatctcctatggttctcacatattttcatgtttagtgcaagactgtgaaccttgattaacagcgtgagactcatacaaaatgccgttagtgatgcttgaagtggtcctgagaatcatagaaaagtcatgacattacaagaaaacattaccttgtttgatatgtgatgtatgt

SEQ ID NO: 935277 - DNA, 625 bp, Homo sapiens
gaccatactatttatataaaatgcataggtaaaataagctttaactacaagaaaatactgataacaacagaaggcagccaaatgcctaggcagataggggcgggtacccagtgaaatcccacctccaagctgaagacagtttaaagcctgacacccaaactacaagttaaatcctcagacctcctcagactggattgaaaacgtgtactcccgtgtggcatgctttcctcggattgatccccaccttccacctgttttacatatccccaccatttcctaattgttttttctacagtgttgtgcccacctttgagtggtgtcatcaagttaacattttttgcatactcacaaaccaatcagcacgcactcccctccctgtgcctataaagaccccagactcagtcagtagagagggagaaagccygacttcatggaagagacaccctgactttggagaagataacctgcccttcccactccctctccaactcccctctgcactgaaagcccttttcatcactcaatgaaattaaacaccttcaccatccttaaattgcccctgtgagctcattcttcttgtatgttggtcaagagcttgggactcactgagtatgggtatccaaaa

SEQ ID NO: 935278 - DNA, 636 bp, Homo sapiens
atgtatgtgtatttgaaaagtcattttatcagttgatatagtttggatatttgtcccctgaaaatctcttgttgaaatgtgagcccccatggccgggcgcggtggttcacacctgtaatcccagcactttgagaggcccaggcgggcagatcacaaggtcaggagatggagacaaacctggctaacatggtgaaaccctgtctctactaaaaatacaaraaaattagccgggagtggtggcgggcacctgtagtcccagctactcaggaggctgaggcaggagaatggcgtgaacccaggaggcggagcttgcagtgggccaagatcgtgccactgcactccagcctgggcgacagagcaaaactccgtatcaaaaaataaaaaataaaaaaaaaagaaatgtgagcccccagtgttggagtgggtcctagtgggaggtgtttgcgtcacaggggccgatccttcgtgaatggctggacgtcctccctgtagttatgagtgacttctcacactactattagttccctgaacagtcagtttttcctctccacaatctccacactcttgctccctctgttgccatgtgacatgccagttccccttgacttctgccatgagtaaaatcttcttgagtgc

SEQ ID NO: 935279 - DNA, 631 bp, Homo sapiens
gagcttcaattaataaatgattgggactaaaaaggaaaaagtaaagaaattgaaatttgacctactgcccaaagcttgctaattgcttattttatttcagttttaatcttcaggtcctgagcaaattatccatcataaccagctgatatggtttggctgtgccctcactgaaatctcaaattgagttatatctgtcagaattcccaagtgttgtgggagcgacctgggggaggtaattgagtcaggggggctggtctttaccgtgctatcatcatgatagtaaataagtctcaagagatctgatgggtttaacagaggtttctgcttttgcttctttcatatttttctcttgccaccaccatgtaagaagtgcctttcacctcccaccatgattttgaggcctccccaggcaagcaaaactgtaaggacaattaaaactcttttkgtttccagtttcaggtatgtctttatcagcagcatgaaaatgaactaatacagttaattggtaccaggagtggtgtgatgctgaaaagacacctgaaaatgtgcaagaggctttggaactgggtaacaggcaaaggttctaacagtttggagggctcagaagaagacaggaaaatgtgggaaagtt

SEQ ID NO: 935280 - DNA, 591 bp, Homo sapiens
taactaggagccaaatgttaatcccaaagacaacagggaaaatgtctccaaagcatttcaaagctcttcacaagcccctcccatcacaggcctggaggtctaggaggaaaaagtggttatgtgggtcgggcccagggtcccagtgctatgcgcaggacttggtgccctacatcccagctactccagccatggctgaaaggggtacacctagagcttgggctatggtttcagaggattcaagccccaagccttggcagcttctatatggtgttgaccctgctggtacacagaagtgamgaattggggtttgggaacctccgcctacatttcagaggatgtatggaaacgagtggatgcccaggcagaagtttgcttcaggggcagggctctcatatacaacctctgctagggcagcatggaagggaaatgtgggtttggagtccccacagagagtccctactggggcactacctagtggagctgtgagaagagggacatcattctacagaacccagaattgtagattcactgacagcttgcactgtgagcctggaaaagccacagacactcaacacaagcccatggaaacag

SEQ ID NO: 935281 - DNA, 589 bp, Homo sapiens
atttgcctaagtaactaggagccaaatgttaatcccaaagacaacagggaaaatgtctccaaagcatttcaaagctcttcacaagcccctcccatcacaggcctggaggtctaggaggaaaaagtggttatgtgggtcgggcccagggtcccagtgctatgcgcaggacttggtgccctacatcccagctactccagccatggctgaaaggggtacacctagagcttgggctatggtttcagaggattcaagccccaagccttggcagcttctatatggtgttgaccctgctggtacacagaagtgacgaattggggtttgggaacctccgcctacatttcagaggatgtatggaaacgagtggatgcccaggcagaagtttgcttcaggggcagggctctcatatasaacctctgctagggcagcatggaagggaaatgtgggtttggagtccccacagagagtccctactggggcactacctagtggagctgtgagaagagggacatcattctacagaacccagaattgtagattcactgacagcttgcactgtgagcctggaaaagccacagacactcaacacaag

SEQ ID NO: 935282 - DNA, 652 bp, Homo sapiens
tttaaagttaaagtcattgctcatttaccattctgaaagcccccaggccttaaggattaggctaaatctactctgcctgaatacttttagcccatttttgagacctactgctcagaaaaaaatatttcttttaaaatattactgctttttgacgattcgcctgttcatccaagggctctgatggagatgtacaaggcgattaatgttgttttcatgyctgctaacttaacctccattctgcagcccatggatcaaggaggaattttgactaccaagtcttattatttaaaaaatacatatagtaaggttatagctaccatacatagtgattcctctgacaaatctggtcaaagtaaattaaaaaccttctggaaaagatccaccattctagatgctagtaagaaaacttatgattcatgggaggagataaatcataaccgtaatgtcaaaggaggttaaaagaagtttattccaaccctcatggatggctttgaggggttcaaaactccagtggaggaagtaactgtagatgtggtggaaatagcaagagaaccaatattagaagtggagcctgaagatgtgactgagttgctgcaatcttatgataaaactttaacagatgaggagttgtttcttatcaatgagcaaagaa

SEQ ID NO: 935283 - DNA, 562 bp, Homo sapiens
ttccccactgtcagggacatttagcagagactggagatatttttgattgtcacactttcatgagactatgggagtgttgctgctggcagtcagtgggtagaaacaagagatatttctaaacatcctatgatgtgtagctaacaagtgttaaccaacctcaactgtcaacagtgccaggatgagaaacactgccctagagcatgcgaagtagatttctcttgaccagtgcatatcccgaactaagcaaacatttgtctgataacctttaaaaccctggaatctctcattacaattctgctaattctccatggaagcatgtgccaatactttcatttgaratgttatgtgaacatgtcattataaataacaacttgcatgtagtgcattagaatttgaatctatataaaattcatgaaaaatgatattgccaggttcatcatggatatgcaaaggtttaacctcaaagtgatccaactacaaaccaagtctttaggcttatctatcaggtttagttcatatgcccgcatataccaccacagaatgtcctatgcccagctggctg

SEQ ID NO: 935284 - DNA, 562 bp, Homo sapiens
ttccccactgtcagggacatttagcagagactggagatatttttgattgtcacactttcatgagactatgggagtgttgctgctggcagtcagtgggtagaaacaagagatatttctaaacatcctatgatgtgtagctaacaagtgttaaccaacctcaactgtcaacagtgccaggatgagaaacactgccctagagcatgcgaagtagatttctcttgaccagtgcatatcccgaactaagcaaacatttgtctgataacctttaaaaccctggaatctctcattacaattctgctaattctccatggaagcatgtgccaatactttcatttgagatgttatgtgaacatgtcattataaataacaacttgcatgtagtgcattaraatttgaatctatataaaattcatgaaaaatgatattgccaggttcatcatggatatgcaaaggtttaacctcaaagtgatccaactacaaaccaagtctttaggcttatctatcaggtttagttcatatgcccgcatataccaccacagaatgtcctatgcccagctggctg

SEQ ID NO: 935285 - DNA, 546 bp, Homo sapiens
gtggctacctttctgattcttttccatggactcatctttaccttcactggaagaaacatctcatactaaattgtatacttaaaaataacattagaaactgtacatctaaaagcatcttatgaatggaaagaatatgttttccttaaartgacttcatagaaggatttaggttattagtaaattaagtctttttattattagaaaatgaaaatatatactgtggaagcattacggtgagtgctgcagtatccatactcagacatctaggttttaatataggttacaccggttactagcctctctgcctcaatttcctcatttgcaatataaggataagaatagcacctcccatttaagattctttatttatttattttttttgagatggagtcttgctctgtcaccaaacctggcatgcaatgggacaatcttggctcactgcaacctccacctcccggggtcaagcgattctcctgcctcagcctcccgagtagctgaaactacaggcatatgccaccatgcctggctaactttttgtattttttt

SEQ ID NO: 935286 - DNA, 600 bp, Homo sapiens
ctcaaactcttatgaaagctgagagtggtgatcatgtaccagctaagagaaagagcccctggctcagtctctttcaaaatggctgctgtttgaatcatgtcaaaaaccccaatgtcctgtcatagcccccataattccaatttggttttgaatgcaactatttttatctggcgacttgaacacagttgttgttccrccctgaagtgacataatgagttctttgagcaggtcaaacaagtaagcaagttttgcaacccattctgtgtcactgaaatgttctgccaattgtaactgtttttctaaaagaaatctctagagcacctctcaagactcaaaaactctgaccagtgatctacatttagaaaggcatctcactactatgtataagagaagatgtttgtgctctgtgtccatctcacagagctgtgcaaacagacatgagttaaggacatgtactttaatgtggttgacaactgaaaagcactgttaagttcaggtgaattgttttggctagccagcatttctctatggatgacacagtgcatagactcgcattcaaaagtgaccgctttgacctgagtattgaaatcagaaagctgt

SEQ ID NO: 935287 - DNA, 629 bp, Homo sapiens
tgaatataaagcacgcagaaaaacgtgaaaaggcaaggcttgcctagctcccagcctacatctgtctcttgtgctggatgcttcctgccctcaaacatcagacttcaagttctttagttttgggacttggactggctcttcttgctcctcaagcttgcagatagcctattgtgggaccttgtgatcatgtaagttaatacttaataaactcccctatatatatcctataatatcatatatataatcctattacgtaatatatatatgtggatatatatgtgtgtgtgtgtgtatatatatatatatatcctattagttctgtccctctagggaaccctaatacactctctaaactsgttattctgattagcaactcctgtaatttttatcacggttcttatcttctttacattgggttagaacatgctcctttagctcagcaaagttcattattacccaccttctgaagcctacttctgtcagttcatccatttcagcctcatcccagttctatgccctcgctggagaggtgctatgatcacttggaggagagaggcactctggcttttagagttttcaggattttttttgttgatttttttctcatcttcacgagtttagctttaatc

SEQ ID NO: 935288 - DNA, 643 bp, Homo sapiens
gaggttgaggcaggagaattgctttaacttgggaggtggagattgcactgagctgagatcacgccactgcactccagactgggcaacagagtgagacttcgtctccaaaaaagaaagagagaaagaaagaaagaaagagagagagagaaagaaagaaagaaagagagagagagaaagaaagaaagaargaaggaaggaaggaaggaaggaaggaaggaaggaaggaaagaaagaaagaaagaaagaaagaaagaaagaaagaaagaaagaaagaaagaaagaaagagaaaagcaaagcaaagcaaagaaaagaaaagaaaagaaaagagaagaggtgcaggccacaaaatttgaggaaggcagagaagggggtggtcattttgtactggatgatcagaataagtcctgacaaaggagatggggtttgtctaggccctgaaaaatagggagagatgagatttaaatatcaggaaagaatgaagaaagggagttcccagcaatgagagcaggatgaactaaggtagagagagggtttgaaagttcaaaatgtattggaaactctgaggagacagaagtagagagtccctaaaacagcaaggaaaggtaagtttgcaaggacaggatgagaccagattttggcagg

SEQ ID NO: 935289 - DNA, 643 bp, Homo sapiens
gaggttgaggcaggagaattgctttaacttgggaggtggagattgcactgagctgagatcacgccactgcactccagactgggcaacagagtgagacttcgtctccaaaaaagaaagagagaaagaaagaaagaaagagagagagagaaagaaagaaagaaagagagagagagaaagaaagaaagaaagaaggaaggaaggaaggaaggaaggaaggaaggaaggaargaaagaaagaaagaaagaaagaaagaaagaaagaaagaaagaaagaaagaaagaaagagaaaagcaaagcaaagcaaagaaaagaaaagaaaagaaaagagaagaggtgcaggccacaaaatttgaggaaggcagagaagggggtggtcattttgtactggatgatcagaataagtcctgacaaaggagatggggtttgtctaggccctgaaaaatagggagagatgagatttaaatatcaggaaagaatgaagaaagggagttcccagcaatgagagcaggatgaactaaggtagagagagggtttgaaagttcaaaatgtattggaaactctgaggagacagaagtagagagtccctaaaacagcaaggaaaggtaagtttgcaaggacaggatgagaccagattttggcagg

SEQ ID NO: 935290 - DNA, 719 bp, Homo sapiens
taggatgtgtgtgacccatgagagatggactggcctcctttccttgggtcaactgcaacttattggagatgtggataaaccacttaggttttctgcctcttcattagtgcaagggtggcaagggcagtagcagagaggctttcagttgcccctgaaggctctgtccagggagttggtgagtttgctgctggctcaatagctctggcagggggcggctggaggcctaggcctggaggacctgsgtggtgaggagatataagaacaaccacccacctaacaatctggctaattttccacagggttgctgcagtatgttgggggcccattccagtctctagtcacctcaaatttttcagtacctggcaatatcaacagtgaggcctacaaaacagcaaagatggcagcctgcccctccttctgggagcttcatcccagggacattcatccctgttgctggcttaaacacacctgtaggagggggctggagacgccagttaggagatctctcctagtaaggaggaacgggattggggacctgcttcaaaaaacagtctggccatgttttagtggagcatctgtgctgtgctgggggtccacttcaacccccagtcaccttgcacactccaaagcctgaagactggaacggctaagtcgcccaaacagcaacaatgatggcctgcccctccctctgggagctctatcccagggaggttacaaat

SEQ ID NO: 935291 - DNA, 649 bp, Homo sapiens
ggataaaccacttaggttttctgcctcttcattagtgcaagggtggcaagggcagtagcagagaggctttcagttgcccctgaaggctctgtccagggagttggtgagtttgctgctggctcaatagctctggcagggggcggctggaggcctaggcctggaggacctgcgtggtgaggagatataagaacaaccacccacctaacaatctggctaattttccacagggttgctgcagtatgttgggggcccattccagtctctagtcacctcaaatttttcagtacctggcaatatcaacagtgaggcctacaaaacagcaaagatggcagcctgcccctccttctgggagcttcatcccagggacattcatccctgttgctggcttaaacacacctgtaggagggggctggagacgccagttaggagatctctcctagtaaggaggaacgggattggggacctgcttcaaaaarcagtctggccatgttttagtggagcatctgtgctgtgctgggggtccacttcaacccccagtcaccttgcacactccaaagcctgaagactggaacggctaagtcgcccaaacagcaacaatgatggcctgcccctccctctgggagctctatcccagggaggttacaaatct

SEQ ID NO: 935292 - DNA, 629 bp, Homo sapiens
gagcaaaggaggaaaagtcccttataaaaccatcagataaggagagaactcactcagtatcacaagaacagcatgaaagaaaccacactcatgattcaattacctacacctggtctctcccttgacacttagagattatgggaaatataattcaagatgagatttgagtggggacacaaagcctaaccatatcattccactcctgacccttcccaaatctcatgtttcattcacatttcaaaaccaattatgccttcccaacagtcccccaaagtctgaattcattccagcattaacccaaaagtccaagtttaaagtctcatctgagaaaaggcaagtytcttccacctatgagactgtaaaatcaaagcaagttagttgcttcctagatacaatgggagtaaaggcattgggtaaatacacccattccaaatgggagaaattggccagaatgaaagggctacaggccccatggaagtccaaaatccagcaacacagtaattaaagcttaaagctctaaaatgatctcctttgactccatgtctcacatccaagtcatgctgatgcaagaggtgggctcccatgatcttgggcagctctgtccctgtggctttacaggttacagcccc

SEQ ID NO: 935293 - DNA, 635 bp, Homo sapiens
attattattcaaagtgatttttagataaggggacttatgaatgattttctcaaaaaaaatcgataccagtttgatcagtcttgaggatactgggtcatagcaactaccagtactcagacattggggaattgttcagggaaaaggcagcaactttgaagtatcctcaagaataagaagggcatgttgaaacaattaatcataaacaagtcattcaaattaaaagtgtattcttaaatagtttcttgattaagaacaaatgcctcattaatctggaacatattgacttgagaacacaagtaaagtcaaagagagtaatgactgacatgacgtggaacacagcatgctgtgtgttcccatcacaaaagctttggaggaacagattccacagaaggtcactggagacagtgaactgaagagaaaacccagcatcacccaatgacgcaraggtaaatttttaaaaatctagattacagagaacattgggtaccagtagcactgacactatttccatctatagattctgagttcatttcatttatttcaggcatgcaaataagtctaaacccaagatctaaaaaataaaaaataaagatatatctaaaagaaataggcatctaattttaaagaaacttact

SEQ ID NO: 935294 - DNA, 574 bp, Homo sapiens
atagatttggtcttttcacatagtcccatatttcttggaggctttattcgtttctttttactctgttttctctaaacttctcttctcacttcatttcattcatttgatcttccatcactgataccctttcttccagttgatcaaatcggctactgaagcttgtgcatgtttcatgtagttctcgtgccatggttttcagctccatcaggtcctttaaggacttctctacactggttattccagttagtcattcatctaatcttttttcaaggytttaagcttctttgcgatgggttcgaacttcctcctttagctcggagaagtttaatcatctgaagccttcttctctcaactcgtcagtcattccccatccagctttgttctgttgctggcaaggaggtgtgttcgtttggagggggagaggtgctctgattcttggaattttcagcttttctgctctgttttttccccatctttgtggttttatctacctttgctctttgatgatgatgacatacagatgaagttttggtgtggatgtcctttctgtttgtcagttttccttctaacagtc

SEQ ID NO: 935295 - DNA, 574 bp, Homo sapiens
atagatttggtcttttcacatagtcccatatttcttggaggctttattcgtttctttttactctgttttctctaaacttctcttctcacttcatttcattcatttgatcttccatcactgataccctttcttccagttgatcaaatcggctactgaagcttgtgcatgtttcatgtagttctcgtgccatggttttcagctccatcaggtcctttaaggacttctctacactggttattccagttagtcattcatctaatcttttttcaaggctttaagcttctttgcgatgggttcgaacttcctcctttagctcggagaagtttaatcatctgaagccttcttctctcaactcgtcagtcattccccatccagctttgttctgytgctggcaaggaggtgtgttcgtttggagggggagaggtgctctgattcttggaattttcagcttttctgctctgttttttccccatctttgtggttttatctacctttgctctttgatgatgatgacatacagatgaagttttggtgtggatgtcctttctgtttgtcagttttccttctaacagtc

SEQ ID NO: 935296 - DNA, 572 bp, Homo sapiens
ctatggtatgcttagcaaaccaatgcaggaacagaaaactaaataccacacgttttcatttaaaagtgggagccagccgggtgtggtggctcacacttgtaattccatcacattgggaggccaaggtgggtggatcacttaaggtcaggagttagagaccagcctggccaacatgatgaaacctcatttctcctaaaaatacaaaaattagctcggcatggtggcgcatgcctgtaatcctagacactcggggggcactgaggcagaagactcacttgaacccgggtggtgaaggttgcagtgagccgagatcgtgccactgtactccagcctgagtggcagagtgggactcagtctcaaaataaataaataaatttaaaaataaagattctatcatgaaagagcgttaccagccrggcacagtggctcatgcctgtaatcccagcactctgggaggccgaggagggcagatcatttgaggacaggagttctagaccagcctgaccaatatggtgaagtcccgtctctactgaaaatacaaaagttagccaggagtgctggcagacacctgt

SEQ ID NO: 935297 - DNA, 572 bp, Homo sapiens
ctatggtatgcttagcaaaccaatgcaggaacagaaaactaaataccacacgttttcatttaaaagtgggagccagccgggtgtggtggctcacacttgtaattccatcacattgggaggccaaggtgggtggatcacttaaggtcaggagttagagaccagcctggccaacatgatgaaacctcatttctcctaaaaatacaaaaattagctcggcatggtggcgcatgcctgtaatcctagacactcggggggcactgaggcagaagactcacttgaacccgggtggtgaaggttgcagtgagccgagatcgtgccactgtactccagcctgagtggcagagtgggactcagtctcaaaataaataaataaatttaaaaataaagattctatcatgaaagagcgttaccagccaggcacagtggctcatgcctgtaatcccagcactctgggaggccgaggagggcaratcatttgaggacaggagttctagaccagcctgaccaatatggtgaagtcccgtctctactgaaaatacaaaagttagccaggagtgctggcagacacctgt

SEQ ID NO: 935298 - DNA, 596 bp, Homo sapiens
tccctccgatatagggaggaaaatcaccctctcctccccttgattttacagacaatatcacacagcggtatacacccctgcgatatgaggagtagcatcatcctctccaccctggacattatggacaatattgctggagggtgtacagcccctgcgatatggggagtaacagcatccttaccccctggttattatggacaatatcgcagtagggtgtacacctcctgcgatatggagagatacatcatcgtctccctttctggatattatggacaaaatcgcaggggtgtgtacaccttctctccacccccggactttacacacaatatcgcrggggtgtgcccctggatttggggagttgcatcatcctctccccctccctagatattacggacaataccagagtgaggtgtacatcccctttgatatggggagaaatatcatcctctcccctcttggatgttacaaacaatatcacaggggtgtgtaccccctgcgatatggggagtaatattattctctccctctctggatgttacagtccatatcttaagggggctttcattccctgcgatgtggggagtaatgtcttcctc

SEQ ID NO: 935299 - DNA, 562 bp, Homo sapiens
ctggcagccctgcagcccttgctcgctctcggtgcctcctcggcctcggcgcccattctggccgcgcttgaggagcccttcagcccaccgctgcaccgtgggagcccttctctgggctggcctagtccggagccggctccctcggcttgcggggaggtgtggagtgagaggcactggcgggaaccagggctgcgcgcggcgcttgcgggccagcgcaagttccgggtgggcgtgggctcggcgggccgcacttggagcgggcggccggccccgccggccrgggcagtgaggggcttagcacctgggccagcagccgccgtgcttgatttctcaacaggccttagctgcctccccgcggggcagggctcgggacctgcagcccgccatgcctgagcctccgccgcgccgccgccgtgggctcctgcgcggcccaagcctccccgacgagcgccaccccctgttccacggcgcccagtcccgtcgaccgcccaagagctgaggagtgtcggcggatggcacgggagtggcaggcagctccacctgcggccctgcgcgggatcca

SEQ ID NO: 935300 - DNA, 562 bp, Homo sapiens
ctggcagccctgcagcccttgctcgctctcggtgcctcctcggcctcggcgcccattctggccgcgcttgaggagcccttcagcccaccgctgcaccgtgggagcccttctctgggctggcctagtccggagccggctccctcggcttgcggggaggtgtggagtgagaggcactggcgggaaccagggctgcgcgcggcgcttgcgggccagcgcaagttccgggtgggcgtgggctcggcgggccgcacttggagcgggcggccggccccgccggccggggcagtgaggggcttagcacctgggccagcagccgccgtgcttgatttctcaacaggccttagctgcctccccgcggggcagggctcgggacctgcagcccgccatgcctgagcctccsccgcgccgccgccgtgggctcctgcgcggcccaagcctccccgacgagcgccaccccctgttccacggcgcccagtcccgtcgaccgcccaagagctgaggagtgtcggcggatggcacgggagtggcaggcagctccacctgcggccctgcgcgggatcca

SEQ ID NO: 935301 - DNA, 611 bp, Homo sapiens
gtaggtgtcttcagtgattggtttgaggagcctatttgtttttctgtggttgattctgagttgcaagagtcctgaccatttggggctgattgctgctgaggttgtggttttcttgcaggacaggcaagccccaaattgggccttagcccatgagggttcctggctttacccaggaaagaattcaagggtgagccagtggtaaggtggaagaaaacaacttcatkaaagaggcagtgtgacagctccgtgacttttcctgcagagtagggctgctccgcaggcagtgtgctgaaagcagctcagggcagttgtgcagtcagatctatacctacttttaattgcacgcagattaaaggacagtttctgaagacatctgtaggaaaagggtagtaacttctgggttgttgggtcattgccatggaaaggggtggtaaatcctgggtgttgcgatggcaatggtaaactgacatggcaaactggtgggcgtgtcttaaggacggctgcttcggcccctccctgttttagctagtcctcaatttggtcggctgtctgaaccccacctctggagtcgaatctcgccttctatctcattttgagttccttggactgcc

SEQ ID NO: 935302 - DNA, 531 bp, Homo sapiens
gatcatttgcatgtgataagttgcttctctcatgctgctttcaaaattttttgtttttgtctttcaaaaatgtaatcataaagtgtcttggcctggatgtatttgaatttattaaacttgaagttcgttgcacttcttggtttcatagagtcgtgtctttcttaaaatttgggaaattttcagccattagttcttcaaatgttctttcwgctcttttctctctcctcctcctctgaaacgcccattatgcaaatgttccacatgtctcttaggttttattattattcttttttaaaccattttaaagtgtacgtttcagtgacatttaatacattcacattgttgtgcaaccatcaccactatctgattccagaacactttgtcatcccaaaagtaaacctcatacctattaggcagttactccccattcccctctttctcaaacccctcatgaacgctaatcttcattttgtctctatggatttacctattctggatattttgtatatatggaatcatacaatatgtggt

SEQ ID NO: 935303 - DNA, 531 bp, Homo sapiens
gatcatttgcatgtgataagttgcttctctcatgctgctttcaaaattttttgtttttgtctttcaaaaatgtaatcataaagtgtcttggcctggatgtatttgaatttattaaacttgaagttcgttgcacttcttggtttcatagagtcgtgtctttcttaaaatttgggaaattttcagccattagttcttcaaatgttctttcagctcttttctctctcctcctcctctgaaacgcccattatgcaaatgttccacatgtctcttaggttttattattattcttttttaaaccattttaaagtgtacgtttcagtgacatttaatacattcamattgttgtgcaaccatcaccactatctgattccagaacactttgtcatcccaaaagtaaacctcatacctattaggcagttactccccattcccctctttctcaaacccctcatgaacgctaatcttcattttgtctctatggatttacctattctggatattttgtatatatggaatcatacaatatgtggt

SEQ ID NO: 935304 - DNA, 669 bp, Homo sapiens
gggggagagaagtgtattcgtcagtttaaagatcagaatgccagatttgagtgggaggatcttaatatataatcaacacaggggaaatcaatctcttgggcaatctctctctctctccgtctctctctctctttcawatcacagatggtattagcttgctcagggggagaactatgggtagtagtcgggatttgacatcttttcagtgataacaaaatgacgcagtaatcatacagtaaagaaggaatcaaggcggagtgttgcaaggtcctgccagcttttcacagcaaggcagcagatggagtaggtgggccttatataactgaactgcatatcctttttgtcttttgcacttcttgtatttgcttctttttttctctcttagtatttagaaaaataactttctttgaaaaaaatccaatctgtatcagttatgctaagtggacaaaaatgtgaaatagtttgttagataaaaatgttaagttgaggtttgttagagtgttacagaggagttcaatgacttttgtgaggtcagagagctggaaaatgataaaactgggagttcaacccaaccaattttggctccagagtttatgcacttaaccacttccctgagtaaatcgcattcactgagagaaaagtgagagtcagggaaatgtagagctggta

SEQ ID NO: 935305 - DNA, 669 bp, Homo sapiens
gggggagagaagtgtattcgtcagtttaaagatcagaatgccagatttgagtgggaggatcttaatatataatcaacacaggggaaatcaatctcttgggcaatctctctctctctccgtctctctctctctttcaaatcacagatggtattagcttgctcagggggagaactwtgggtagtagtcgggatttgacatcttttcagtgataacaaaatgacgcagtaatcatacagtaaagaaggaatcaaggcggagtgttgcaaggtcctgccagcttttcacagcaaggcagcagatggagtaggtgggccttatataactgaactgcatatcctttttgtcttttgcacttcttgtatttgcttctttttttctctcttagtatttagaaaaataactttctttgaaaaaaatccaatctgtatcagttatgctaagtggacaaaaatgtgaaatagtttgttagataaaaatgttaagttgaggtttgttagagtgttacagaggagttcaatgacttttgtgaggtcagagagctggaaaatgataaaactgggagttcaacccaaccaattttggctccagagtttatgcacttaaccacttccctgagtaaatcgcattcactgagagaaaagtgagagtcagggaaatgtagagctggta

SEQ ID NO: 935306 - DNA, 743 bp, Homo sapiens
acctcctaataaagaaaaaaagcagaaactatgtgaggtagtggtgtgttaatttagcttgattgttataataatttcacaatatatactacgccaaattatatattgtatacactttaactgtatacaacttgaattttctaatcatgcctcaataaaacttggaaaatataaaaaatcggggatagggagtgagtttagatgactttttaaaagagtgttgctgtaaaggcagcaaatgagattgtagctgggagaagacgtgggtttaagagaaaggtttcaaaaatgagatgtatcacagaatgctgatgaggattctccagtaaaaagaaataagtagtgattcacaagagagtagaatttctatagtgttatccttaaaaggacagagaagttgacacacagttcacaagtggaggggtaagagcaaggacagtttatccatagtcactaaaaagaaagcataatatgtatgcacgatactggtgggcaaggagatgtgggaagcayatagacattctcttctgatggcctagattttcttaatgaaatagaaagcaagggcatcaattgagagggaggataggaaggaggtgaggcaatttcagtaaagagaaggtgagaaatggtcttcttggagagcgggaaaatagatggaaaggacatgtggtaggattgttgaacagcaccaaagatcagcttgaatttggagaagccaacttggtgacgtagttttggtc

SEQ ID NO: 935307 - DNA, 553 bp, Homo sapiens
tgagtttagatgactttttaaaagagtgttgctgtaaaggcagcaaatgagattgtagctgggagaagacgtgggtttaagagaaaggtttcaaaaatgagatgtatcacagaatgctgatgaggattctccagtaaaaagaaataagtagtgattcacaagagagtagaatttctatagtgttatccttaaaaggacagagaagttgacacacagttcacaagtggaggggtaagagcaaggacagtttatccatagtcactaaaaagaaagcataatatgtatgcacgatactggtgggcaaggagatgtgggaagcacatagacattctcttctgatggcctagattttcttaatgaaatagaaagcaagrgcatcaattgagagggaggataggaaggaggtgaggcaatttcagtaaagagaaggtgagaaatggtcttcttggagagcgggaaaatagatggaaaggacatgtggtaggattgttgaacagcaccaaagatcagcttgaatttggagaagccaacttggtgacgtagttttggtcca

SEQ ID NO: 935308 - DNA, 761 bp, Homo sapiens
cccaccaccacttggtattttcatctttaaaaaactagaccaggcacggtggctcatgcctgtaatcccagtgctttggaggccgtggcaggtgaatcacttgaggtcaggagttcgagaccagcctggccaacatggtgaaaccccgtctctactaaaaatacaaaaattagcctggtgtggtggcaggcgtctgtaatctcagctactcgggagactgaggcaggagaatcaaatcacttgaaactgggaggtggagtttgcagtgagctgagattgtgccgctgcactccakcctgggtgacagagtgagacttcatctcaaaaaataataataataataataataaactttattttagaacagtttcggatttacaaaaaaattcaacggagttaccccatcccccaccccagtttcccttattattaacgtttttaatgtggtgcatttgttacaactgataaactgatattgatatattattattaactcacgtctatagcttgcatttgtgcacactctttgtgttttacagttctatgaattttgacaatgtataacatatatccaccattattgtataatatagaatagtttctctgccctaaaaaatctcctgttatatacctgttcatccctccctccagcctgaacctctagcaaccactgatcttttcactctctttaatgttttgccttttccaaaatgtcatatagttgaaattttacagtatgtagcttttaaggctggcttctt

SEQ ID NO: 935309 - DNA, 571 bp, Homo sapiens
attttttaaaatgctttttatgtatctattgaaacgatctttctaagtctattgctatggtgaattacagtgattgacttttaagtgttgaaccattctaccatttcccatagaaccattctatttggtcatgatgtattattcttgttatatatatctcggcttatttttatttacagttttttttgtgtctgcattcattagatatattggtctttaattttcttttcttataatgcatttatktggttttggaaaagagtcactctagtctcataaaatgaggtgggaagtgttttttccgtcttttgtgaaacagcttgtgtagaattagtattctttcttccttaagtacttggtgtattagtcagagggggagtttattaagtattaacttccatgattacaaggtcccacaataggctgtctgcaagcttgaggaacaaggagagtcagtccgagtctcaaaactgaagaacttggagtcctatgtttgagggcaggaagcatccagcatgggagaaagatgtaggctgcgaggctaggctagtctcgcttcttaatgtttttc

SEQ ID NO: 935310 - DNA, 768 bp, Homo sapiens
gtggctggggcacagggcgatgtcccaaggctgcacagagcagcaaggccctgggcctagcttgaatttctccccagaaaaaatttttctttctaccacatggtcaggctgcaaattttccaatcttttatgctctgcttcccttttaaatstaagttctaatttcaaaccatttctttgtgagtgcatataaccatacgcttttaggaaaagacaggtcacctattgaatgctttgctgcttagaaatttctactgctggcctggtgcagtggctcacacctgtaatcccagcactttaggaggctgaggcggtcagatcacgaggtcaggagattgagatcatcctggccaacatggtgaaaccccgtctctactaaaaatacaaaaattagctgggtatggtggcgtgtcctataatcccagctacttaggaggctgaggcaagagaatcacttgaaccagggagtcagaggttgcagttagccgaaatcaagatcatgccacttcactccatcctggtgacacagagagacaccctctcaaaaaaaaaaaaaaaaaagaaaaggaaagaaatttctactgcaggacatgctaagtcatctgtctcaagttcaaagttccacagggcaggggcaaaattccttcagtctctttgctaaagcatagcaagggtctcctttactccaattcctagcaagtttcttatctccatctgagaccacctcagcctggacttgattatgcatatcactatcagcattttggt

SEQ ID NO: 935311 - DNA, 771 bp, Homo sapiens
atcaagatcatgccacttcactccatcctggtgacacagagagacaccctctcaaaaaaaaaaaaaaaaaagaaaaggaaagaaatttctactgcaggacatgctaagtcatctgtctcaagttcaaagttccacagggcaggggcaaaattccttcagtctctttgctaaagcatagcaagggtctcctttactccarttcctagcaagtttcttatctccatctgagaccacctcagcctggacttgattatgcatatcactatcagcattttggtgaaagccattcaacaagtctctaggaagttccagactttcccatatcttcctatcttcttctgagtcctccaaactgttctaccctcttcctgttacccagttccaaggttgcttccacattttcaggttatctttatagcagtgccccacgcctgatactaattttctctattagtccgttttcacactgctgtaaaaaatacctgagactgggtaatttataaagaaaaaaggattaattgactcacagttccaaaaaactggggaggcctcaggaaacttacaatcttggtgaaaggcaaagggaaagcaaggcacgtcttacatggcggcaggggagagagagagggagagagaaagaaagcagggaactgccaaacacttttaaaacattagatctcaggctgggtgtggtggctcacacctataatcccagcactttgggaggccaaggtagcacaggaattaaaagaaattaaaaaatgtgtaagc

SEQ ID NO: 935312 - DNA, 771 bp, Homo sapiens
atcaagatcatgccacttcactccatcctggtgacacagagagacaccctctcaaaaaaaaaaaaaaaaaagaaaaggaaagaaatttctactgcaggacatgctaagtcatctgtctcaagttcaaagttccacagggcaggggcaaaattccttcagtctctttgctaaagcatagcaagggtctcctttactccaattcctagcaagtttcttatctccatctgagaccacctcagcctggacttgattatgcatatcactatcagcattttggtgaaagccattcaacaagtctctaggaagttccagactttcccatatcttcctatcttcttctgagtcctccaaactgttctaccctcttcctgttacccagttccaaggttgcttccacattttcaggttatctttatagcagtgccccacgcctgatactaattttctctattagtccgttttcacactgctgtaaaaaatacctgagactgggtaatttataaagaaaaaaggattaattgactcacagttccaaaaaactggggaggcctcaggaaacttacaatcttggtgaaaggcraagggaaagcaaggcacgtcttacatggcggcaggggagagagagagggagagagaaagaaagcagggaactgccaaacacttttaaaacattagatctcaggctgggtgtggtggctcacacctataatcccagcactttgggaggccaaggtagcacaggaattaaaagaaattaaaaaatgtgtaagc

SEQ ID NO: 935313 - DNA, 469 bp, Homo sapiens
aacagttttggcaatcattgagtggaaagtttgcttaacttcaatttttcagtcagaattgtgcaagctgagccaattgagatgtttatgctattggctattgtttctgctgttaatttcagtcccctttatttggggcacaaacaagatgaatttyttcctcaaaaaatgacatgaattgtctgcccctgcaggcttcatcttcaatattgtctcgtcccgttttaaaattagttttccatttataaaccactgaatcctttgagacattgcccccataaacttttcttaatgtatcaatcattttaccattcttttatacaggatctaccataaattcgatgtttgctcttgcttcaactttagcagaattcctgttgctctgataggggctcttttcaaactaatgtcttatccttctctttgtgcttcaagctagatgcaactagatcctgttcaaatatgttgt

SEQ ID NO: 935314 - DNA, 595 bp, Homo sapiens
agagaatctaaactcttcctcaacccttggaggaggtctcttcccagggcaggattcaagtgcatctgctttgctgcaaggcaagttccctattgaacgagagctcaacccagaagatttcaaaaaccatgcctggggacttttaagaccacattttacaaacactttaaaatgtggttttgatgctgttaacctttaaccatgcttttttttttttttttttgaaaaagctctctgtttagaatcttgcaactctctcagacgaactacagatcatcatttccataactacaccaacttacagcgaacttctttctggtgtttattatctgtattgccattcattgmctcttattgctttgttgttgatgttgttgttgtttttataagcaagccttgaactctaggaagattgtaagcatcttggggttaggggatagatattttatctcagtctatttgctttaaacaaagtaagttctaacattgcgtattgagtactgtacttgttaacaattctcagcatgtgaaacatatcatttgtgcagcttggaaaagtaacttatatgattatacagaatgtttgtgatttggt

SEQ ID NO: 935315 - DNA, 581 bp, Homo sapiens
aagaacctacattgaaatattggggttgggttcccccgataccctagtaccgtttattaaatacgaagttcattccccactgctcatttttgtcaacttttttgaaaatcagatacgtagttataggtgtatggcttatttctgggctctctagtctgttccattgatctatgtgtctgcttttgtaccatgaggtccatgttgtaccaacaggtccacgttgtaccaacaggaccaagctgttttagttactacagccctgtagtatagtttgaagtcgaggaacgtgatgcctcctgytttgttgattttgtttaggattgccttggatattcaagttcttttctggttccatataaattttaaaatagtttttttctagttctgtaaataatatcattggtagttggataggaatagtattgattttgtaaattgctttggacagtatgaccattttaaccatattaatttcttcctatccatgagcatgaaatgtttttccatttgtttgtttcatctctgattttttaagcaatgtctggtaattctcattgtactgatctttcaactccctggtt

SEQ ID NO: 935316 - DNA, 792 bp, Homo sapiens
agtaagaaaatgtatgttaactcctttatatcgatgtctggcatatagtaagtatgtaatctgctgctgtatctacatcataattatagcagttatcttaacgttgtctaaatgtataagcatagtagattcacctcttttttttttttttcttttttttttttttttttttttttttttttttgaaacataagtttttgctcttgttgcccaggctgagtgccaatggcatgatcttggctcactgcaacctccacctcccaggttcaaagcgattctcctgcctcagccttcccaagtagctgggataataagcatgccaccaccaatcctggctaattttgtatttttagcaggatggggtttctccgtgtgggtgaggctgttctcgaactcccagcctcaggtgatccgcccacctcggcctcccaaagtgctgggattgcaggcgtgagccaccgcgcccggccagatccacctctttaccttggcttagaatctgaaattgtggaagttttaatagttttgartattatggctttaagaaaatatgagtgggaaataatgtttctaatggacagagctatggagttagaatgcatgggttcattctacttcacatttaaatgggacagtatttcctgagctagagggctgttgtgagaattaaatgggatatgtttgcctgacatttagtatattgtgagatataccacctttccttgacatattgtgttagtaaaagaaaatttatgctgtaggaaaattgtatattatccatcttcaagtagt

SEQ ID NO: 935317 - DNA, 617 bp, Homo sapiens
agtttggggatctgacatgcggtttgatggagtgccaaattcttgctggaaagttcccagacaaaaactgagcactatgaagatactagaccttggctatttctacccaatgcagcattcttctacagtcacttaagtacagaattcttcaatagcatcatttttcatttctctgagataaattctcaagagcacagtttcaggggcatgtggtaattacatttttatttttctaagaaaacacaaagctgttttccatagagaatgtaccawtttatattcccaccaacaatgtatcagtgatccagtttctctgcatcctaaccaccattgatgttatcactttttttttttttttgaaacagagtcttactctgttttccagactggagtgcagtggtgcaatcttggctcacggcagcctccacctcctgggttcaagagatcctcatgcctcagcctcctgggattacaggcatacactaccacacccggctaatttttgtatttttagtagagatggggtttcaccaggctggtcttaaactcttggtctcgagtgatctgcccacctcagcctcccaaagtgctgggattacaggcatgagccagctcac

SEQ ID NO: 935318 - DNA, 598 bp, Homo sapiens
gtaaggcaggcctggtggtgacagaatccctcagcatttccttgtctgtaaaggattttatttctgcttcacttatgaaacttagtttggctggatatgaaattctgggttgaaaattattttctttaagaatgttgaatattggcccccactctcttctggcttgttgcatttctccagagacattcactgatgggcttccctatgtaggtaacctgacctttctctctggctgcccttaacattttttcctgggtttcaaccttggggaatctgacaattatgtgtcttggggttgctcttcttgaggaatatcttagtggtgttctctgtatttcctgaatttgaatgttggcctatcttgctaggttggggaagttctcctggataatatactgaagggtgttttccaacttggttccattcttcccrtcactttcagggaccccaatcaatcagaggtttagtcttttcacatagtcccatatttcttggaggctttgtttgctcctttttaatctttttttctctaatcttgtcttcatgcctcatttagtaagttgatcttcaatctctgatattctttcttccgcttgat

SEQ ID NO: 935319 - DNA, 743 bp, Homo sapiens
tgccgggggtgacatcacatatcagtaggaccatgatgtccacctaagtctcagaccagcaagtttttattaagggtttcagaaagggagggagtgtaagaacagggagtaggtacaaagatcacatgcttcaaaaggcaaaaagcagtgctgctagtaagggtctaacaaagatcacatgcttctgagggaacaggacaaagggcaaaagcagaactactaataagggtctatgttcagcagtgcacatattgtcttgataaacatcttaaataacagaaaacagggtycaagagcagagaaccggtctgaccacaaatttaccagggtgaagtttctccccaccctagtaagcctgagggtactgcaggaaaccagggtgtatctcagtccttatctcaactgcataagacatacattcccagagcggccatttatagacctccccccaggaatgcattcctttcccagggtattgatattaatattccttgctaggaaaagaatttagtggtatctctcctacttgacgcgtccatttataggctctctgcaagaagaaaaatatggctctttttgcctgaccctgcaggcagtcagaccttatggttgtcttcccttgttccctaaaaatcgctgttattctgttctttttcaaggtgcactgatttcatatcattaaaacacacatgttttacaatcaatttatacagtcaacacaattatcacagtggtcctgaggt

SEQ ID NO: 935320 - DNA, 838 bp, Homo sapiens
gtgtggctaagacaatggcagaggcctggccattggattttgtaacgtggacgttattgttggcctggacaggtaagacttcggtggagtgggggtgtggggggaacagcagcctcatgggaactggacaagatgtgaatgaaagtgggatgaagtggcatcaaaactgtagacctggctgactgtggtggctcacgcctgtaatcccagtactttgggaggccaaggcaggaggattattttgagctcaggagtttgagaccagcctggccaacatggcgaaaccccgtctctactaaaaatataaaaattagccgggtgtggtggcacatgcctgtaatcccagctcctcgggagactgaggcaggagaatcgcttgaacccgggaggcagaggttgcagtgsgccaagatggtgccactgcactccagtctgggtgacaaagtgagactccatctcaaaaacaaaaacaaaacacccaaaacccccaaaaaactgtagacccactgtctagcaaagggttaactcagcaggcttgggctgatggaaccctgtgcattccaaagaaaggactgggcctggagcagctccccagcaggtaacttctaaacccttggaaggtcctgcctgatgagactatctttgtttaccttgggccatgccagataatttatgctgacaaagtcttttatgccaaatgcccttggtcacactgtatcagtttgacctctggagagggtcctgagactgagtagttaaggtcagtcatacgggtgctccattacataaccatcccccagtatagaccctggacaccaagactggggtgagcttccct

SEQ ID NO: 935321 - DNA, 753 bp, Homo sapiens
ggctaagacaatggcagaggcctggccattggattttgtaacgtggacgttattgttggcctggacaggtaagacttcggtggagtgggggtgtggggggaacagcagcctcatgggaactggacaagatgtgaatgaaagtgggatgaagtggcatcaaaactgtagacctggctgactgtggtggctcacgcctgtaatcccagtactttgggaggccaaggcaggaggattattttgagctcaggagtttgagaccagcctggccaacatggcgaaaccccgtctctactaaaaatataaaaattagccgggtgtggtggcacatgcctgtaatcccagctcctcgggagactgaggcaggagaatcgcttgaacccgggaggcagaggttgcagtgggccaagatggtgccaytgcactccagtctgggtgacaaagtgagactccatctcaaaaacaaaaacaaaacacccaaaacccccaaaaaactgtagacccactgtctagcaaagggttaactcagcaggcttgggctgatggaaccctgtgcattccaaagaaaggactgggcctggagcagctccccagcaggtaacttctaaacccttggaaggtcctgcctgatgagactatctttgtttaccttgggccatgccagataatttatgctgacaaagtcttttatgccaaatgcccttggtcacactgtatcagtttgacctctggagagggtcctgagactgagtagtt

SEQ ID NO: 935322 - DNA, 612 bp, Homo sapiens
caatataatcaacttgccaccaggtagctggctgaccaccccaaggaacggtgccatatggagggctcagtgttggtctccgctgctggcaaattgggcactcagcagtggccatagccaggtcagccttggtgagtagaagtccatgttgctaagtccatgtgtaacctccatycctgtcaccatggccactttgttcacgggcccattgggccatgacaggggcggctggggaaagaggctgagtggtgactgcaaaacaggtcatcctatccacttcattattaaaatcctcctctgctgaggtcacccattggtgagcactcacagggtataaaaatatcttcacagtttttgaccactcagagaggtccatccatatacctcttccccacatttctttgtcaccaattttccaatcatgcttcttccaagtccctgaacatgcagccaaaccattggctacagcccatgactcagtatataatcacacatctggccatttctccttccatgcaaagtgcacaacgaggtgcactgctcgaagttctgtccactgggaagatttcccttcattgctgtccttcagggatgtcctagaaagggtttgta

SEQ ID NO: 935323 - DNA, 612 bp, Homo sapiens
caatataatcaacttgccaccaggtagctggctgaccaccccaaggaacggtgccatatggagggctcagtgttggtctccgctgctggcaaattgggcactcagcagtggccatagccaggtcagccttggtgagtagaagtccatgttgctaagtccatgtgtaacctccattcctgtcaccatggccactttgttcacgggcccattgggccatgacaggggcggctggggaaagaggctgagtggtgactgcaaaacaggtcatcctatccacttcattattaaaatcctcctctgctgaggtcacccattggtgagcactcacagggtataaaaatatcttcacagtttttgaccactcagagaggtccatccatatacctcttccccacatttctttgtcaccaattttccaatcatgcttcttccaagtccctgaacatscagccaaaccattggctacagcccatgactcagtatataatcacacatctggccatttctccttccatgcaaagtgcacaacgaggtgcactgctcgaagttctgtccactgggaagatttcccttcattgctgtccttcagggatgtcctagaaagggtttgta

SEQ ID NO: 935324 - DNA, 572 bp, Homo sapiens
ctgaataggagtggtgagagtgagcatccttatcttgttccagttctcaaggggaatggttctagttttttggctattcagtgtgttgttagctgtgggtttatcatagacagctcttgttattttgaagggtgttcctttgatacctagtttcttgcgggtttttatcatgaagggatgttggattttattgaaagctttttctgtgtctgtggagatgatcatatggtttttgtttctaattctgtttatgtggtgaatcagatttattgatttgtgtgtgttgaaccaatcttgcctcccaggaataaagcctaattaatcatgatgagttawcttttcgatgtgctgttggattcagtttgctagtattttgttgagaatttttgcacgtatgttcatcggggatattggcctgcagttttattttttttgttgttgatgtgtctttattaggttttggtatcagagtgatactaactttgtagaatgagttagggagaagtccctcctcctagatttttgggaacactttcagtagaattggtactagctctcctttgcacatctgg

SEQ ID NO: 935325 - DNA, 572 bp, Homo sapiens
ctgaataggagtggtgagagtgagcatccttatcttgttccagttctcaaggggaatggttctagttttttggctattcagtgtgttgttagctgtgggtttatcatagacagctcttgttattttgaagggtgttcctttgatacctagtttcttgcgggtttttatcatgaagggatgttggattttattgaaagctttttctgtgtctgtggagatgatcatatggtttttgtttctaattctgtttatgtggtgaatcagatttattgatttgtgtgtgttgaaccaatcttgcctcccaggaataaagcctaattaatcatgatgagttaacttttcratgtgctgttggattcagtttgctagtattttgttgagaatttttgcacgtatgttcatcggggatattggcctgcagttttattttttttgttgttgatgtgtctttattaggttttggtatcagagtgatactaactttgtagaatgagttagggagaagtccctcctcctagatttttgggaacactttcagtagaattggtactagctctcctttgcacatctgg

SEQ ID NO: 935326 - DNA, 578 bp, Homo sapiens
ttatgaaaacagtttagatctctcagacacctgtgtactccctggcccaccctgtgagaacctctgaactacagacgtggcagaatgttacaccagatggaaatcctgctgtaactcttcaagacctcagacaaggcggtgacctcatgtgatcacaactgcgattggatttcttgagctatgtgtaccagttaatgtgcaaacaagtcagaatgattcactcagccagaggcacaaaactagagggctccagagagaagtacagtcaggaatttggggaaatcacagaaagggccctggatccacgtgaggtatgaaatttgaggatttggatccacttcgtctaaatctgccagaagcagaaatgcccygtgtatcatctaggttcaaacttgttgctgtaagttcaaaaatataactcttcccaaaggccttgagcctatagcagcatctgcactccccttatgaggtcagcgtctgtgctcagccctaccagccccctcccctttcccagtgctagagaaaacataaagccactgcaatcaaaatgaaatgtcaaatttttaaaaacccgagga

SEQ ID NO: 935327 - DNA, 789 bp, Homo sapiens
acagaggagagcaccacagacacgtcaaaggaccagcttgagttacctccctggaagtgaccatgtctgcaggtactggaaatttcaatcatgtgagccaataaattcccctcttctggggaaacacatggaaatgggtttctgtcacaactgaaatcatcctgaccaatggatttagggctctgaagaacaaaaaggaaatacatcattagggctcttaaatgcctcaaagggaagcctaacgtcaggcagggtgtcccagaaatgcaatctaacaccttttggtgaaactcattgcctgtctttttggtgagtaggatgggagctgcggagaaaaaggccatgctacttttattaagtatttgcagttacattttgcaaatgatttcagcaactttatctcaggtgttttaacatctcagcatctcacagttgtaagaaacagaatcaatcttctactcagtgcagagggggagagagcatgatatagcaaaaagagcactgaaccagagtctaacaatctggcttttcatctttatctgatcactgattagagtgtggtctcagacaaatcaccttgcttttattggtctcatgactacctcgtcttcaagcactcacccaactctgyaatggaaaatacactaggacagaggttcttaattttttatggggcctgggccctaggaaaacacacactgcacacatgattttacgttgcatggggttcacaactctagaagccaatctacatctctaacttctctgctttacagtaacaccagcttc

SEQ ID NO: 935328 - DNA, 784 bp, Homo sapiens
ccactgcacccggcccatattggttattttctaatattccgtcttcaagttcacttgtccctccgcctcctctgctccacctccattctgccgttgagctcatccattgggttttttgttagctcttctatatattatttatttctttttctcttattttatgaaactttctattttttttttttttggctgagactatcttttttctctttttataatattttgtatttatattattgttttttattttactgcctacagccctcttaagaatttttttctttttttaaatcacgttcataattgctcactgaagtatctttatgatggctgctttaatatcttcaacagataaatgtaacgtctctgtcatcttgctgttggtatctatcaattgtcttctttcattctgttggagatcttcctggttcttggtaggatgagtgccttttgattgaaatctgcacatttggggtattatgttaggagactctagatcttacttaaaccttcagtttagttacctttttctgataccactcyagcagggcaaagaggggtttgccgcctcattactgctagctgggggtagaagtccaggttgccaccattgacaccagaggggggttcctcattactgctgcccaagagtgggagcttcggccctctgctaggcttctgctgctctctcctgggtgggagaggcaggagtgccttgttattgatccccacagggtcccactgacaccaggtccagggggacctcattacttccaggcagtgg

SEQ ID NO: 935329 - DNA, 685 bp, Homo sapiens
gagttaaataaggtattgcatgaaaaacacgcaggcttgtgcctggtacagagtaaagcacccagtaaggggtcctgagaaaaagctggaaggtgagatttacaccattcagaatccgagactcagcaggcaggtgtgagagggtggtgccagccttgagatgcgccagccactgrtcttggggagccaaggcaggtggagctagtggttcctgctcccgggtgtcacatggtattcccacggccccagcccagattgggggtcactggagcagaagggacactgaatttggcaaaaagcaccctccccatggaggccagtcatagaggcaccaagagagctaggaatccccaaggcccaggagtcaccagaatccatgaggagacagagcgcttcgtgtaactgttcgagttcctactgctcgtccaccaggcctcaggctccttgagggcagcgctgtgtcttcctcgccaccgtgtctgtgtgcctgaccgagctgactctgcaggggtcctcacttggtggtgcagggtggggagaaaaggagtagcctcagagtccagtgaatacacaaacttgaaacccagtaagggctccgaaagagagaagactgcgcaggcagcctcgcacgccccaagccaaggccatgagatgtgagcagtctggggactcagaaggctgagca

SEQ ID NO: 935330 - DNA, 778 bp, Homo sapiens
tgaacctccaattctctgatctcttaacttctatctcagtggttctcaacaggaccgattttgcccatttgacattaccctgggagattctgattattgcatcttggggcaggtctactccacatctagtgggtagaatccagggtgctgctaaacaccccactgtgcacatgacagccctgtccccagtaaagaactgtccggccccagcataatactaagattgagaaatcctgatcgcgtcctttgacctcagaacctccacctggagagtcgggggtgagggactttagtgttgcccccacaacacccctgtcatattcagacacagatggagggggcatcctgcacccacagcacagccaggggcaggttcactctgcaccatgacctccaaggcatggctcctcatttcttgggcctgaatgtgtgtttggcctatttccaagggctcttgcctctaacactaggtctcacttcctctctttttccagttttttttttcttttcttttctttttttttcgcaaagctcgtctgcttctggggcgccagccttttgrcttgacaggggtctccttctccagagacccttctgcatccttatcctcatcatcttcctcctcctcctcctccccttttcccttccacctctttttggcttgtgctcctggcccctgagccctccccacaacctctgtcctccttaggttttcgtcatcgaggtgaagacaaaaggaggatccaagtacctcatctaccgccgctaccgccagttc

SEQ ID NO: 935331 - DNA, 571 bp, Homo sapiens
tccctccgtgctgttcttgcgatggtgagtgagatctggccatttaaaagtatgtggcacctcctctttctctctctcttcccctgctcttgccatttaaaacttgcccgcttccccttcatcttccaccatcattgtaaggtttcctgaggcctcctcagaagcagaagccactagscttcttgtatagcctgtagaaccaagagctaactaaacctcttttccttataaattatgcagtctcaggtgtttttttgtttttttgtttgttttttgttgttgttgttgttgttgttgttgttttgagactgagtcttgctcttgttgtccaggctggagtgcagtggcatgatctcggctcactgcaacctctgcctcccaggttcaagtgattcccctgcctcagcctcctgcgtagctgggattacaggcacccccaaccttgcccagctaatttttgtactttcagtagagatggggttttgccatgctggccaggctagtcgcgaactcctgacctcaggtgatccacctgcctcggcttcccagagtgctgagattacagtcatga

SEQ ID NO: 935332 - DNA, 571 bp, Homo sapiens
tccctccgtgctgttcttgcgatggtgagtgagatctggccatttaaaagtatgtggcacctcctctttctctctctcttcccctgctcttgccatttaaaacttgcccgcttccccttcatcttccaccatcattgtaaggtttcctgaggcctcctcagaagcagaagccactaggcttcttgtatagcctgtagaaccaagagctaactaaacctcttttccttataaattatgcagtctcaggtgtttktttgtttttttgtttgttttttgttgttgttgttgttgttgttgttgttttgagactgagtcttgctcttgttgtccaggctggagtgcagtggcatgatctcggctcactgcaacctctgcctcccaggttcaagtgattcccctgcctcagcctcctgcgtagctgggattacaggcacccccaaccttgcccagctaatttttgtactttcagtagagatggggttttgccatgctggccaggctagtcgcgaactcctgacctcaggtgatccacctgcctcggcttcccagagtgctgagattacagtcatga

SEQ ID NO: 935333 - DNA, 708 bp, Homo sapiens
actaacacaaaaaattggtaccaaagagtagggcattgctataaagatatctgaagatgtggaagtggttttagaaatgggtaacgggcagagggtgaaagaatctggagggctcagaggaagacaggaatatgagggaaagtttggaatttcttagagactggttaaatgtttgtgaccaaaatgctgatagagatatgaatagtgaagtccatgctgacagaattttcagacgaaaatgaggacgttcttgagaactggagtaaagatcacccctgtttatccctagcacaaaactgaactgcattgatgcatgacctagggatctgmggaagtttgaatttaagagtgatgacccagggtatctagcagaagaaatttctaagtggcaaagcattcaagacaggacctggctgcttctaatagtctatgctcagatacaggagcaaagaaatgacctaaagttggaattatatttaaaagggaagcagagtgtaaaagtttgaaaagtttgtaacctggctatgtgacagagaaagaaatagcattttcaggagagtaatatgtttaaaagagtcttgtggagtaaccacttgctaaagagattagcgtgactaaaagggaatcagtgctactatccaagacaatgaggaaaaggtcttgaaggcactgaaggccttgaagtcgttttcaagattttctttgaag

SEQ ID NO: 935334 - DNA, 748 bp, Homo sapiens
cgtaatcaatctttcagagttgttgtgagaattatctgtcatataacacaagtaaagaattgagaacaatgcctggtttataaacgtccaataacttttggcaagttaatatcatcatccctaagtgactccataaaagctgctgattacattgaagtagcaatttggggtagacaccaatcaagatcaaagtccagcagtaaatcagtaggtagataaattttcatgtttgcaaataataatagcacttgctgaactcttgtcttatgcccaaccctgagctgagattacataagttttcatcttgctgaattcccagagctgggctgtgaggtagactttactgttaacctgtattgatacatcaggaaactgagaattggagagctagttcacctagtttggaagtgatggagctgggattgaaactgatggaaactccaggatccatatccataagctccatactccacagctgagagtttatagatgaggaaactgaggctcagagaagggagatgccttggctgtggtcacacagcggctacttgactgaatcagtttccacatgatcttgtcagtgckgtaagatgaaaggcatctcagagggtggcccagagacagagagagggtctccattttccagctttatttctgggtgtccaggaatgtgttttgagttggacttgaaaaagaaactcccttgacatcagagaggcagtactgggctgggccagtgtgtgccaag

SEQ ID NO: 935335 - DNA, 722 bp, Homo sapiens
aaactcacaaggacttttagggcccaggcttggaaaaggcaccggatccactgcacacattctgtgggtaaagtaagtgacactgccaatacaaattgaagagttggagacagacacaactatctaatagagggaactgaaaasacacattgcaaatggcaaggacacaggaaggtagggaaaacttgggccagttttgcaagcaaataaatcaaataagacttgaacttagagtcctctggctctaagttcaaatgttccaaggccagccatgatggcccatcatcctagagatgacttagcccttcttttccttctcaccctgactctgtcttgtctgcatgtaagtcttagctcatctcttctttctcccagtgattctcactcccactctcagcctcccttccttggacatctgaattagatggcattttgagcaggaagggaggagttggctcatttgagctctgtttctatctccatttgtttctatacccttttgggtctcagacaatccctcatcctccctgagcctcagtgttgccatctgtacaatatgtaagatggagaagattctatttgagattgcttccaggcaaattcttcatgattctatgagtagtaagtggttccctagccctagtggtctagctcatgcctgtacctgtcctgaaattaccaccatcctagtctctactttagggaaatatctggcctccaga

SEQ ID NO: 935336 - DNA, 548 bp, Homo sapiens
gaatccacctggtccttgactttttttggttggtaggctcttacttattgtgtcaatttcagaacctgttattgatctattcagggattcaacttcttcctggtttagtcttgggagggtgtatgtgcccaggaatttatccatttcttctagmttttctagtttatttgcgtagaggtgattatactattctctgatggtagtttgtatctctgtgggatcagtggtgatatcctctttatcattttttattgcgtctatttgattcttctcccttttcttctttattagtctttttagtggtctatcagttttgttgatcttttcaaaaaaccagctcctggattcattgattctttgaagggtgttttgtgtctctatttccttcagttctgctctgatcttagttatttcttgccttctgctagcttttgaatgtattagctcttgcttctctagttcttctaattgtgatgttagggtgtcaattttagatctttgctgctttctcttgtgggcatttagtgctataaatttccctctacaca

SEQ ID NO: 935337 - DNA, 548 bp, Homo sapiens
gaatccacctggtccttgactttttttggttggtaggctcttacttattgtgtcaatttcagaacctgttattgatctattcagggattcaacttcttcctggtttagtcttgggagggtgtatgtgcccaggaatttatccatttcttctagcttttctagtttatttgcgtagaggtgwttatactattctctgatggtagtttgtatctctgtgggatcagtggtgatatcctctttatcattttttattgcgtctatttgattcttctcccttttcttctttattagtctttttagtggtctatcagttttgttgatcttttcaaaaaaccagctcctggattcattgattctttgaagggtgttttgtgtctctatttccttcagttctgctctgatcttagttatttcttgccttctgctagcttttgaatgtattagctcttgcttctctagttcttctaattgtgatgttagggtgtcaattttagatctttgctgctttctcttgtgggcatttagtgctataaatttccctctacaca

SEQ ID NO: 935338 - DNA, 575 bp, Homo sapiens
ttgctttccttctaccttccaccatgattataaatttcctgaggcctccccaatcatgcagaactgtgactcaattaaacaacttttctttattagttacccagtctcagatagttctttatagcagtgtgaaaatggcctaatacagaaagttggtactgggagtrgggcactcttataaagatacctgaaaatgtggaagcaactttagaactgggtaatgggaagaggttgaagcagtttggagggctcacaagaagacaggaagatgtgagaacgtttggaacttcatagagacttgttgatggttttgaacaaaatgctgacagcgatatggacaacgaaatccaggctgaggtggtctcaatggagatgaggaacttactgggaactggaattaaggccactgatatggtttggctctgtgtccccactcaaatcttaccatgaattgtaatccccacgatcccccacgtgtcaacggcaggaccaggtgaagataattggataatgggtgtggcttttcccatgttgttcttgtgataatgactgagtctcaggagatctgatggttt

SEQ ID NO: 935339 - DNA, 584 bp, Homo sapiens
ccttaagttgaagccaatgctcattgaagattctgaatatcctagggtcctaaagaattttgctaaatctactctacttgtgctctagaaatggaacaaccaaccaagcctggatgacagcatatatgtttacagcatggtttattgaatattttaaattaactactgagamccattgctcagtaaaaaagattcctttcaaaatattactgcttattgacaatgtacctagctactgaagagctctgatgaagatgtgcgaagtgatcaacgttgttttcgtgcctgcaaatacagcatccatttttcagcccacggatcaagaagtaatttcgactttcaaggtttattatttaagaaatacatttcataagacaatagctgccatagatagtgattcctctgatggattaaggcaaagtaaattgacaatcttctggaagggattcatcattctaaatgctattaagaacatttctgaatcatgggaggagatcaaaatatcaacattaacaggagtttggaagaagttgattccaattatcatggattactttgaaggtttcaagatttcagtagaggaa

SEQ ID NO: 935340 - DNA, 623 bp, Homo sapiens
actcctaacaatagagacagcctgtcctttgaagctttgaagccaggtgctgacttcctttctgtagctatgaaagtcctagatggcattttcttccaatataatgctgtttggtctatattaaaaacctgttgtttccggtcgggtgtggtggctcttgcctgtaatcctagcmctttgggaggccaagatgggcggatcacttgaggtcaggagttcaagaccagcctggccaacatggtgaaaccccgtctctactaaaaatacaaatattagatgggcatggtggtgtgtgactgtaaccccagctacacgggaggctgaggcaggagaatcacttgaaccagggagccggaagttgccgtgagccgagatcgcgccactgcgctccagcctgggtgaaagagtgagactccatctcaaaacaaaacaaaacaagacaatctgttgtttaatgtagccacctttgtcaatgttcttacgtagaacttctggataacttgctgcagcttcttcatcagcccttgctgcttcaccttgcacttttatgttatggggaggaggcttctttccttaaacttcatgaaccaacctctgctagcttcacacttttcttctgcagc

SEQ ID NO: 935341 - DNA, 627 bp, Homo sapiens
tcttagactgctggtgttgctataaagggatacctgaggctgggtaatatatgaaggaaagaagatatttacttggctcatggttctacaggctgtacaagaaacatggtgccagcatctgcttctcatgagggcctcaggaagcttccactcatggctgaaggtgaagaggagctggcgtgtgcagatcacttggtgagacgggaggcaagagagaggggagggaagtgccaggctctttttaacaaccagctctcatgggaactgacagagcaagaactcatttattacctcagggaggaggacggcaccaagatgttcaggagggatctgtccacatgacccaaacatttgcttttaggccccacctccaacactggggatcaaatttcaacatgagatttggagaagacagatatggaacttatatcwactgacaaggatgtgagaggacagaccctaacaaaaatttcacaggtctacccaaatcaattgacttgataattccatcctacagcatttatcaaaaagaaatgctcctatacaaatatgtagagctatatggaggatgctgtttattgcagcatggtgtataatagcaaaaacatggaaacaagaaaaatgact

SEQ ID NO: 935342 - DNA, 627 bp, Homo sapiens
tcttagactgctggtgttgctataaagggatacctgaggctgggtaatatatgaaggaaagaagatatttacttggctcatggttctacaggctgtacaagaaacatggtgccagcatctgcttctcatgagggcctcaggaagcttccactcatggctgaaggtgaagaggagctggcgtgtgcagatcacttggtgagacgggaggcaagagagaggggagggaagtgccaggctctttttaacaaccagctctcatgggaactgacagagcaagaactcatttattacctcagggaggaggacggcaccaagatgttcaggagggatctgtccacatgacccaaacatttgcttttaggccccacctccaacactggggatcaaatttcaacatgagatttggagaagacagatatggaacttatatcaactgacaaggatgtgagaggayagaccctaacaaaaatttcacaggtctacccaaatcaattgacttgataattccatcctacagcatttatcaaaaagaaatgctcctatacaaatatgtagagctatatggaggatgctgtttattgcagcatggtgtataatagcaaaaacatggaaacaagaaaaatgact

SEQ ID NO: 935343 - DNA, 624 bp, Homo sapiens
ctagggtgggggtgcacagctgtagtccaagctactctggaggctgaggtgagaggatcgcttgagcctgcaaggtctgcttgagcctaggaggtcgaggctgcagcgagctgtgtctgcgccactgtactccagcctgactgacagagcaagaccctatctcaaaaaataaaataaaatactttaaaatcctaattcctaatgagacagtattagaaggtggggcctttgggaagtaattagggtcatgaaggtagggacttcattaatgtgattaatgmccttgtaagaagagacacaaggctgggcgcggcagctcacgcctgtaatcccagcactttgggaggtggaaacgggtggatcatgaggttaggagttcaagaccagcctgatcaacgtggtgaaacctcacctccactaaaaatacaaaaattagccaggtgtggtggcgtgtgcctgtaatcccagctactcaggaggctgaggcaggagaatcgcttgaacccgggaggtggaggttgcagtgagccgagatattgccattgcacttcagcctgggtgacagagcaagactctgtctcaaaaaaacaaaaacaaaaaaagaggatatacagacagaatatt

SEQ ID NO: 935344 - DNA, 624 bp, Homo sapiens
ctagggtgggggtgcacagctgtagtccaagctactctggaggctgaggtgagaggatcgcttgagcctgcaaggtctgcttgagcctaggaggtcgaggctgcagcgagctgtgtctgcgccactgtactccagcctgactgacagagcaagaccctatctcaaaaaataaaataaaatactttaaaatcctaattcctaatgagacagtattagaaggtggggcctttgggaagtaattagggtcatgaaggtagggacttcattaatgtgattaatgaccttgtaagaagagacacaaggctgggcgcggcagctcacgcctgtaatcccagcactttgggaggyggaaacgggtggatcatgaggttaggagttcaagaccagcctgatcaacgtggtgaaacctcacctccactaaaaatacaaaaattagccaggtgtggtggcgtgtgcctgtaatcccagctactcaggaggctgaggcaggagaatcgcttgaacccgggaggtggaggttgcagtgagccgagatattgccattgcacttcagcctgggtgacagagcaagactctgtctcaaaaaaacaaaaacaaaaaaagaggatatacagacagaatatt

SEQ ID NO: 935345 - DNA, 739 bp, Homo sapiens
aggtcaagaagaacatctccagtcctggaagcttccctgtcccccacctgccttgggtactccccaacgttactgctcttctgaccttcttcactgtagattggcttctcctggctcttaacttcatgtaattggagttaygcgttgtttgctctgctgcgtctggcttctgtttcccagcagagatccctccatgctgttgtgtgtttcagttgcctgtccttttcatggctaagtagtactccatgcgggcttctcatgcatggcactggtgacattttgagctggatgattctttgttgtggggctgtcctgtacgttgtagggtgttttagctgcattcctggtctctacccactagatgccggtgtcctatcccctcaagtgtgacaaccaaaaatgtctccagacacggccaaatgtcccttgggggacaaaatcatccctggttgaaaaccaccaccctaccccattcttctgttgatgaacacctaggttgtcccaggttggggctgttaccgataacacagacgtgcctgttctgggacgtggctttttgtggggtgtgtgagcatttctcctgggtatgcacccaggagtggccccgctgggtcctagcgtgggcatatgtttggttttagtagaagctgctgagcagccttccagagtggttgctgcctgtttattattcattgaataaacgaatgaacgaatgaatgtgtgaatgagtgtcctccca

SEQ ID NO: 935346 - DNA, 739 bp, Homo sapiens
aggtcaagaagaacatctccagtcctggaagcttccctgtcccccacctgccttgggtactccccaacgttactgctcttctgaccttcttcactgtagattggcttctcctggctcttaacttcatgtaattggagttacgcgttgtttgctctgctgcgtctggcttctgtttcccagcagagatccctccatgctgttgtgtgtttcagtygcctgtccttttcatggctaagtagtactccatgcgggcttctcatgcatggcactggtgacattttgagctggatgattctttgttgtggggctgtcctgtacgttgtagggtgttttagctgcattcctggtctctacccactagatgccggtgtcctatcccctcaagtgtgacaaccaaaaatgtctccagacacggccaaatgtcccttgggggacaaaatcatccctggttgaaaaccaccaccctaccccattcttctgttgatgaacacctaggttgtcccaggttggggctgttaccgataacacagacgtgcctgttctgggacgtggctttttgtggggtgtgtgagcatttctcctgggtatgcacccaggagtggccccgctgggtcctagcgtgggcatatgtttggttttagtagaagctgctgagcagccttccagagtggttgctgcctgtttattattcattgaataaacgaatgaacgaatgaatgtgtgaatgagtgtcctccca

SEQ ID NO: 935347 - DNA, 868 bp, Homo sapiens
gttccattttcatggataaaaggtcctaatattgttaatgacgtaggaggcaggactcaactctgggggcagggcttggactctggaccagattgaagactggctgaaacaggaaacagggaagaggtgaaagcgcctcttcgtgagacacgcccaccagcaccatgtcagtttgctattgccatggcaacacccaaaatgtactgcccttttccatgacaatggcctgacaacctggaaattatcaccctttttctagaaatttctgcattgtctgctccttaattttgcatataactaaaagggggtataactatgccttcagcactgcctctgagctgctgctctgggcacactgcctatggggtagccctgctctgcagggagcaacacctctgctgttgctgtacacgtycacttcaataaaagttgctatttaacaccaccagctcacccttgaattctttcctgggcaaagccaaaaccctcccaggctaagccccaattttggggctcacctgccttgcattgttaagatgtcaattttttccatgttgatatacagagtcagtgcaatcccaatcaaaattctagtatgttattttgtggatattgagaaactgagtctaaattttatatagaaagtcaaagacctaaaagagtcaacacattactgaaaaaggaagaacaaagctgggggactgacattacccaacttcaagacaagctataaagatgcagtaatcaaaagagcatggtatgagagaaagaacagaccaatagatccatggaacagaacggagtgctcagaaatagacccacacaaacacggctgacctttggcaaagaagcaaaggcaattcaataa

SEQ ID NO: 935348 - DNA, 868 bp, Homo sapiens
gttccattttcatggataaaaggtcctaatattgttaatgacgtaggaggcaggactcaactctgggggcagggcttggactctggaccagattgaagactggctgaaacaggaaacagggaagaggtgaaagcgcctcttcgtgagacacgcccaccagcaccatgtcagtttgctattgccatggcaacacccaaaatgtactgcccttttccatgacaatggcctgacaacctggaaattatcaccctttttctagaaatttctgcattgtctgctccttaattttgcatataactaaaagggggtataactatgccttcagcactgcctctgagctgctgctctgggcacactgcctatggggtagccctgctctgcagggagcaacacctctgctgttgctgtacacgtccacttcaataaaagttgctatttaacaccaccagctcacccttgaattctttcctgggcaaagccaaaaccctcccaggctaagccccaattttggggctcacctgccttgcattgttaagatgtcaattttttccatgttgatatacagagtcagtgcaatcccaatcaaaattctagtaygttattttgtggatattgagaaactgagtctaaattttatatagaaagtcaaagacctaaaagagtcaacacattactgaaaaaggaagaacaaagctgggggactgacattacccaacttcaagacaagctataaagatgcagtaatcaaaagagcatggtatgagagaaagaacagaccaatagatccatggaacagaacggagtgctcagaaatagacccacacaaacacggctgacctttggcaaagaagcaaaggcaattcaataa

SEQ ID NO: 935349 - DNA, 731 bp, Homo sapiens
ccaaggagaaattgataaactgaataaacctgtatcaattttagacattgaatcaatcagtaacttttccaaaaaaaaaaaaagcaccaggcttagatggttttactggtaaatcctaccaaattcttttttttttttttggagatggagtcttgccatgttgctcaggctggagtgcagtggcacagtgttggctcactgcagcctccaccacctgggttcaagttattctcctgcctctgcctcctgagtagctgggactacaggcatatgccaccacacctggctaatttttgtatttttttttttttgagacggagtctcgctctgtcgcccaggctggagtgcagtggygcgatctcggctcactgcaagctccacctcctgggttcacgccattctcctgcttcagcctccccagcagctgggactacaggcgcatgccgccacgtctggctaatttttttttgtatttttagtagagacggggtttcactgtattagccaggatggtcttgatctcctgaccttgtgatccgcccgcctcagcctcccaaagtgctgggattacaggcatgagccaccgcgcccagcctaatttttttatttttggtagagacagggtttcaccatgttggccagtctggtctcgaactcctgacctcacgtgatctgcctgcctcagcctcccaaagtgctgggattaaaggcatgagccaccgtgcccagca

SEQ ID NO: 935350 - DNA, 677 bp, Homo sapiens
ggaatctggttcaaaatgcagacctgagactattctcctgcagaatatctgagtcagtggatttgggtggggcccaggaatctgcactttaaacagccactccctggggttattctgatactgatggtccagggtccacactttgagaatcactggtttaatggttctgagcatgtgctgagggctcagagatgcaagttcaaatcccagctccaccctagctttgaccttggtaagtagctttgcttttcagagcctcagttttctcctctaaaaaactgagttggccgggcgctgtggctcatgcctgtaatcccagcactttgggaggctgaggtgggyggatcatctgaggttgtgagtttgagaccagcctgaccaacatggagaaaccctgtctctactaaaaatacaaaattagccgggcatggtgatgcatgcctgtagtcccagctactagggaggctgaggcaggagaatcacttcaacctgggaggcggaggttgcggtgagctgagatcacgccattgcactccagcctgggcaacaagagcgaaactctgtctcaaaaaaataaataaataaataaagtaaaaataaaaaagtgagttaacagtaatacctcttttaggatttgtattagtcagggttctccagagggacataaagacacaccc

SEQ ID NO: 935351 - DNA, 656 bp, Homo sapiens
aaacgtaatccactacataacagaacaaatgacaaaaaccacatgattatcttcagtagatgcagaaaaggccttcgataaaattcaacacccttcatgttaaaaactgtcaataaactaggtactgatggaacgtatctaaaaataataagagctatttatgacaaacctacagccaatatcatactgaatgggcaaaaactggaagcattccctttgaaaactggcacaagacagggatgccctctctcaccactcctattcaacatagtgttggaagttctggccagggcaattaggcaggagaaggaaataaagggtattggtctaaaattctctttttttgttgtgtctctgccaggctttggtatcgggatgatgctgacctcataaaatgagttaggaaggattccctctttttctatcaattggaatcgtttcacaaggaatggtaccagctcctcyttgtactctggttgaattcggctgtgaatccgtctggtcctggactttttttggttggtaagctattaattattgcctcaatttcagagcctgttattggtgtattcagggattcaacttcttcctggtttagtcttgggagggtgtatgtgttcaggaatttatccatttcttctaaattttctagttta

SEQ ID NO: 935352 - DNA, 564 bp, Homo sapiens
ttacctaatcaagcctgggcaatggggggcgcccctccccaagcctcgctgctgccttgcagtttgatctcagactgctgtgctagctagcaatcagggagactccgtgggcgtaggaccctctgagccaggtgcgggatataatctcgtggtgcaccgttttttaarccagtcggaaaagcgcagtattcgggtgggagtgacctgattttccaggtgccgtccgtcacccctttctttgactcagaaagggcactccctgaccccttgcacttcccaagtgaggcaatgcctcgccctgcttcggctcgcacacggtgcgcgcacccactgacctgcgcccactgtctggcactccctagtgagatgaacccggtacctcagatggaaatgcagaaatcacctgtcttctgcgtcactcacgctgggagctgtagaccggagctgttcctattaggccatctttggctttttcattaagcataatatctggagcttcatccagatttttgcatgtatcaatagttactttttattgttgcatagtattccatgttatgaatg

SEQ ID NO: 935353 - DNA, 564 bp, Homo sapiens
ttacctaatcaagcctgggcaatggggggcgcccctccccaagcctcgctgctgccttgcagtttgatctcagactgctgtgctagctagcaatcagggagactccgtgggcgtaggaccctctgagccaggtgcgggatataatctcgtggtgcaccgttttttaaaccagtcggaaaagcgcagtattcgggtgggagtgacctgattttccaggtgccgtccgtcacccctttctttgactcagaaagggmactccctgaccccttgcacttcccaagtgaggcaatgcctcgccctgcttcggctcgcacacggtgcgcgcacccactgacctgcgcccactgtctggcactccctagtgagatgaacccggtacctcagatggaaatgcagaaatcacctgtcttctgcgtcactcacgctgggagctgtagaccggagctgttcctattaggccatctttggctttttcattaagcataatatctggagcttcatccagatttttgcatgtatcaatagttactttttattgttgcatagtattccatgttatgaatg

SEQ ID NO: 935354 - DNA, 564 bp, Homo sapiens
ttacctaatcaagcctgggcaatggggggcgcccctccccaagcctcgctgctgccttgcagtttgatctcagactgctgtgctagctagcaatcagggagactccgtgggcgtaggaccctctgagccaggtgcgggatataatctcgtggtgcaccgttttttaaaccagtcggaaaagcgcagtattcgggtgggagtgacctgattttccaggtgccgtccgtcacccctttctttgactcagaaagggcactccctgaccccttgcacttcccaagtgaggcaatgcctcgccctgcttcggctcgcacacggtgcgcgcacccactgacctgcgcccactgtctggcactccctagtgagatgaacccrgtacctcagatggaaatgcagaaatcacctgtcttctgcgtcactcacgctgggagctgtagaccggagctgttcctattaggccatctttggctttttcattaagcataatatctggagcttcatccagatttttgcatgtatcaatagttactttttattgttgcatagtattccatgttatgaatg

SEQ ID NO: 935355 - DNA, 781 bp, Homo sapiens
ctgtgttaagagtttttgggtttccttctgtactattcttgatgtatctggcaaagggacctcaaaagcagggagtgtgcaggggaggaagcctggctccaccacccccacaccaaagggagcctcaggctccatgaggaagagagcttttcctttataaagcaaggtcttggccaggtgcggtggctcacgcctataatcccaacactttgggaggctgaggcaggcagatcacttgagctcaggagctggagaacagcctgggtaacatggcgaacccctstgtctacaaaaaatacaaaaattagctgggcgtgggtggtgcatgcctcaagtcccagctacttgggaggtggagattgcagtgagctgagctcgcgccactgcattccagcaccccagcctgggtaatagagtaagaccctgtctccaaaaaaaaaaaggttgtggttgtggcttcctcttgctgactcactcgtggcagtgccccccaaggcttgccctatggcttctcacagaagtgacaagagaagcatcccggatgggaacccagcccttctcagtctagcgtccatctgctgctgcctacatagaaatttactatgtttacaccaggaaaatgatgctttaaacccacagaagaaaagcatgtaggccaggagcagtggctcacacctgaatcccagcactttgggaggctgtgtgggagggttgcttgaacccaggagtttaaaaagaccatcttgggcaaaatggtgaaacccaatctctacaaaaaaag

SEQ ID NO: 935356 - DNA, 848 bp, Homo sapiens
aagcattttcaaccccaaggaccccaagcttcatacttccaacatgggatgagagcattcactgattcattcattcactcattcatttggaaaattttccccaagcactggctgtctgccaggcactggtatagtctctgggaacctacagaggacaaaatgcacaagtgagcagaagagatacaggraggggaaatgagtccatttccaatgcagcaacaaggctgcccacgtgcatcctctcagcacctgccctgtggcctggccactgtggccgcagcacagccatcagtgacattctgtgcctgattactggacagacagtgatttttttttttaaacagacaaggtatcatccttcctgtaggagatagctttaaaaaaaaaaaaaaagacaaattgttgctctgtgacccaggctggagtgcagtggtgcaaacatagctcactgcagcctcaacctcctgggcccaagtgctcctcctgcctcagcctcctgaggagttgggtccacagttatgtaccacaacacctagctaatttgtaaatttttttttgtagagatggggtctcactgtgttacccaggctggtcttgaactcctgggctcaagcaatcctcccaccttggcctcctaaagtgttgggattacagacgtgagacaccacaccccaccatcagtgatctcttaacctcgatttagacactgtgcatagtttaagagtttctgctacatactctaggactcttaagggcaaagaccatgccgtaaaccagatacactgctgaggttcagtaggtactctggctactggcagtgacagcaactagattgttgccgaagaaaa

SEQ ID NO: 935357 - DNA, 786 bp, Homo sapiens
tgggtctcgctgggctcaccgctggggagcgtgtagggagacctgcagccaggcctcagccgcagtccccataatggagtgttgagaccccaacacctttccccaggggccacagataatctgcggaaaggctgctgaatcggagaaaacacaaggcacataatactgtgcccattttacaggaggagsagcagcagcctgggaggctgtgcccagagaaagagaatagcactggataggtgtagacaggtgaaggcaagaggctccaggctcatcacagcccttccgtataggggatggtgctgccggcatccaacgagggattcaccaaaccaaaagagaagacaaagtagacgcataaccccaggagggaaatagggcataaatcaaagagacgtcgcaaaacatatctcactgcactagcccctcgccgatttagaaaacaaaaagaataatctgaggttcagtttgttttttaggaaaagcagtgatgccaatgagaaatcattttctctgtccaccagacaaggtatcagaatgaacctctgtttggtaatcctctctgattctagtctggtcaccatgaggagctggagggttaagggcctttttaaaaatgtagtctgtgcgccaggcacagtggctcacgcctgtaatcccagcactttgggaggccgaggcgggtagatcacttgaggtcaggagttcaagaccagcctgaccaacatgatgaaaccccatctctactaaaaatacaaaattagccgggcgtgatggcacacacct

SEQ ID NO: 935358 - DNA, 768 bp, Homo sapiens
tccccctggacaagcagcatcagcatcatcacggaacttgttagaaatgcagaaagccagacccaccccagacctacagacagaatctgcagttcaccaagaccccaggggctcccaaggcacattcaagtttaagaagccctgttccaaygcaatgccctaaagagtctgcaatgggcctccactctcctaaaaacctcttctcaggaagcagtgtgctctgggactcttagtctttggtgagactctgcatcacagcgccactctctgaggagaatgcacattaaaacacttgtagaactataatacctaacatttaccaacttctgtgccagacactggtctaaggatttcacgtctgtttctgtagctcatccttctaaccactctgtgaagtgggagctcgtactctcatcccctcccctggggtacaaataaggacatggtgctgagttacccagccagccagccagcaataggtccaagcagatgctgcctctctcgaatgttttgcccagatggagagattttaaggctcagagaaagatgggtcagtgtttccgaatgagggagcagcttggtgaaatacactctggacaggcagcggggatgactgggttccagagcttgctcagctactgggaccttgtataaataactcactagaccacctggaacctcacttttcttatctgtgtatggagtgatctgcaagctcccctccagctctgacgtccctcgggtccggacgtgccttccgtatgatcg

SEQ ID NO: 935359 - DNA, 662 bp, Homo sapiens
gactgatgttgagtgcctgtggcttttctcggtacagggtgcaagctgccagtggatcttctggggcctagaggacagtggccctcttcttacagctccactaggcagtgccccagtggggactctgtggggggggctccaacyccacattttccctctgcgctgccttagcagaggttctccatgagggctctgcccctgcagcaggcttctgcctggacacccaggcttttccatacatactctaaagtctaggcctcaactcttgtactctgaacacccacagccttactacaatatggaagccaccaaggcgtacagtttgcaccctctgaagcagcagcctgagctgcacctgggcccctttgagccatggctagagctagagtgactgagatgcggggagcagtgtcccaaggctgcacagggcagcggggccctaggcctggcccatgaaaccattcttccttcctaggcctctgggcctgtgatgggaggagctgctgtgaaggtctctgaagtggcttccaggtcttttccccattgtcttggctattagcacttagctcctttttacttatgcaaatttctgcagcctacttgaattcctcccctgaaaatgggcttttcttttctaccaaatggccaggctgcaaagtttc

SEQ ID NO: 935360 - DNA, 662 bp, Homo sapiens
gactgatgttgagtgcctgtggcttttctcggtacagggtgcaagctgccagtggatcttctggggcctagaggacagtggccctcttcttacagctccactaggcagtgccccagtggggactctgtggggggggctccaaccccacattttccctctgcgctgccttagcagaggttctccatgagggctctgcccctgcagcaggcttctgcctggacacccaggcttttccatacatactctaaagtctaggcctcaactcttgtactctgaacacccacagccttactacaatatggaagccaccaaggcrtacagtttgcaccctctgaagcagcagcctgagctgcacctgggcccctttgagccatggctagagctagagtgactgagatgcggggagcagtgtcccaaggctgcacagggcagcggggccctaggcctggcccatgaaaccattcttccttcctaggcctctgggcctgtgatgggaggagctgctgtgaaggtctctgaagtggcttccaggtcttttccccattgtcttggctattagcacttagctcctttttacttatgcaaatttctgcagcctacttgaattcctcccctgaaaatgggcttttcttttctaccaaatggccaggctgcaaagtttc

SEQ ID NO: 935361 - DNA, 662 bp, Homo sapiens
gactgatgttgagtgcctgtggcttttctcggtacagggtgcaagctgccagtggatcttctggggcctagaggacagtggccctcttcttacagctccactaggcagtgccccagtggggactctgtggggggggctccaaccccacattttccctctgcgctgccttagcagaggttctccatgagggctctgcccctgcagcaggcttctgcctggacacccaggcttttccatacatactctaaagtctaggcctcaactcttgtactctgaacacccacagccttactacaatatggaagccaccaaggcgtacagtttgcaccctctgaagcagcagcctgagctgcacctgggcccctttgagccatggctagagctagagtgactgagatgcggggagcagtgtcccaaggctgcacagggcagcrgggccctaggcctggcccatgaaaccattcttccttcctaggcctctgggcctgtgatgggaggagctgctgtgaaggtctctgaagtggcttccaggtcttttccccattgtcttggctattagcacttagctcctttttacttatgcaaatttctgcagcctacttgaattcctcccctgaaaatgggcttttcttttctaccaaatggccaggctgcaaagtttc

SEQ ID NO: 935362 - DNA, 682 bp, Homo sapiens
tcctcaaacaacatgggtttgggctacagagtccacttattcatggatttttttctgcctctgccacccttgagacagcaaaaccaatccctcctctccctcctcctcctcagccaactcaacctgaagacaatgagggtaaagatctttatgatgatccacttccatttaatgaatagtaaacatattttctctatgattttcttttttttttttttwaatggagtctcaaataggtacacttgtggagtacattgtggaggtaggagacaggtacacaggctggaaggcaatggcgccatctcggctcactacaacctctacctcctgggttcaagcgattctcctgcctcagcctcctgagtagctgggattacaggaatgtaccaccatatctggctaatttttgtattttcagtaaagacagagtttcaccatattggtcaggctggtctcaaactcctgatctcaggtaatccacccgccttggcctcccagagtgctgggattaaaggcatgagccaccgttcccggcctctatcattttcttaatgacattttttctctagctaactttattgtaagaataccatatatgatacatataacatacaaaatatgtgttgatcaattgttcctattatccacaaaatttctggtcaatagtagactattagtagtt

SEQ ID NO: 935363 - DNA, 595 bp, Homo sapiens
agagcatgagctcaaacttcagaggccatggttgcccagacagtcccagaaactgatgacacgtgcttctcttgacctgcctgaggaggaaggagctttcaggccctttcccaacagctatgctacctgcacagtggcagccatcctttgagggcagaaggaagggatttagaaatcacttgtgccctctcaataaccttcaaagtgcccgggagacaccaamcctcagatttcactggaggtacatacagcagtttttaaaacaagattctgggccgggcgcggtggctcacacctgtaatcccagcactttaggaggccaaggtggatggatcatgaggtcaggagattgagaccatcctggccaacatggtgaaaccccatctctactgaaatacaaaaaattagccaggcatggtggcgtgcacctgtagtcccagctatttgggaggctgaggcaggggaactgcttgaacccaggaggcggaggttgcagtgagccaagatcaagccactatactccagcctgggcgacagagtgagactctaaaattaaaatttaacattaaaatttaaaaaaaaggtgctatcattc

SEQ ID NO: 935364 - DNA, 576 bp, Homo sapiens
atcaatatattactttgctactggcagaaataaacaaaacagccatttactgtcaagaaaacagcattttcagagctgaagtagtaataatagcaattaatatttcctcagaatttaatatttgtcaggtactgtggactaagtattttacacagattatcttaataatctccataaatataaatctacaattcccatttttacagaaaataaatgaggttaagagaggctgagtcacttgcacagggctgattagtagtggagccaggattcaaacccaaagcccacagtcttggtgctctcactgtgcctcatggtgcctgcctgcccacagcctgtgttatcatcacagctcgcttctggtctggtctaatgacctgttgaaggaactcaartgatcactcatctcatctactgaaactaagaataattcaaaatattttggggtgtcaaaatgcatatggccagcctgagctgagaacctgtctctacaaaaaaaatagatttaaaaaattagccaggcacagtattgcatgcctgtagtcccagctactcaagaaactgaagtgggaggat

SEQ ID NO: 935365 - DNA, 738 bp, Homo sapiens
gggaactttctggggaagtctgttcaggccccaccatactgtccatgaacagagccgacaggtccactttccctgtaattccccacccatgacttctctgtaacctacagtctcttttttttctcatctatcatctcttttctgcccataaagaccttatcctaccaaacaactggatctggcccatgtctgttttcaagagacaatcaacccccagcccccacaaaggtgttttttttttttttttttttaatgggatcgcaaaaggcctgggagcctgggggcaggtccccagatcaaatgctgtaaattcagtcaatcaatagaataaatgcggtaaacacaacaaaatgcwggctgtgtttgggacgtacttgtgtgctgtgtatctgaaattcaaattgaactgggtgtcctggatttcatctgccggatctggccacgctccctgagggcctgagctcttgcgccggctcagcggttgccgagcggccctccttctccaggtcccgccctctgagccgcccaggctgagcccggcaggtgctaacactccctgccctgggaccaccatctgggcgactgggcagccacggctggttctggccggcggtcacctcttggccctcgtgctcagccccagcccagcctctaaccagacactcactggcttacagcttgcaccacacgctaactccatagtcctacagcaccctccgtcctgacacgctgggagac

SEQ ID NO: 935366 - DNA, 638 bp, Homo sapiens
cggagcaaaactccttctggagaaaagcagagggaaatataaagggtactttttcctgcacttcagggcacaagcaccaccacagaggggtagagcatcaagtgggctcttagggtccccgattccaggacttaactcttggacagcatttccggacccgccctaagccagagggaagtccacttccctaaagggtgmgtcccaggaaaggcagcattcaccacaagctgacttaagagaccttgggccttaagagaacatcagtagtagtattacagtactccttatggcctggaattctggtggcttaaggggtgaggctcctctgactttggaaaggggaggaaagggaaaggaagagtgagaaggactatgttttgtgatttgagtgccagcttagctacaatacaatagaacaccaagtagacttctaataatttttaatccagtcccagtctcccggatggcccttctggacccaactggggcctgggagaccacactgtcctaggggaaggacacaagcctggctcacattgccacttgctgactgtagagtcccagggccttgagtgaatataggcagtagccaggaagtcattacaacaggtcatgggtgagactcagtgctatgctgg

SEQ ID NO: 935367 - DNA, 591 bp, Homo sapiens
actgaaaaatgcaataggcatactgaagaccatatctgtcctttaatagcagaattgatcaagcagaagaaagaattagtgagcttgaagacaggctacttgaaaatatacagtcagaggagacaaaagaaaaaagaataaaaamcaatgaagcacaactagaggatctagaaaatagactcaaaagggcaaatctaagaggtattggctttaaagaggaggtagagaaagagatagaagtagaaagtttgttaaaagggacaataacagagaacttcccaaacctagggaaaatatcaatatgcaagtacaaggttatagaacaagccaatttaacccccaaagactacctcaatgcatttattaatcaaagtcacaaagatcagggataaaaactggatcttaaaaggggcaagagaaaggaaacaaataacatacaatggcattccaatacatctgacagccgacttttcagtggaaaccttacaggaggagagagagtggcatggcatatttgatgtgctgaagaaaaataacttttaccctagaatagtatatccagcaaaaatattcttcaaacatgaaggagaa

SEQ ID NO: 935368 - DNA, 775 bp, Homo sapiens
gattcaattccccaagaaagtgacagaggtccctgaaatatagatttaaagttacatagtgtcaaatgctagtcattttctttttgctcgatggtatcctctcagaaaaaccttttataatatttctaattcatttaccagatttatagaatcatcaaattgtctatccatgtgtttttcaaatattttgtgaagtgtctagggtaacaacctagtgttcgaacgtattttgtgaagtggctagggtaacaacgtaatgttcgaacttatgttcgtatttaaatacaaatgtattttggttgagtgattactcaaggtcactgaggaatccacaaggttaacctcctgactctagaaccattgttatatagagatatataaatagctgatttaatattataggcttagcaaaatatttaataaataaggtcttagtaaaacaacacacatgtatttatccacttatttaattttgtttttccatttcttctgaacataagttcctgaggacacgggccttttttcacagttcatttttggattccaacatctagccagtactytgcaaagagcactgaatttgaaagaaatttctcagttaatgatttgaatcatataaaatatttagtaaatttgaaaactagtaaccgtgtaaagcgattaaaacaaacatactagagggtaataatcccccgccccttgccttcttcctttacatccacttcattcctattcttgtctacttcccctgccccacccagggaacgtggttagc

SEQ ID NO: 935369 - DNA, 601 bp, Homo sapiens
cgggcaaccatttgagcccagacttcaatactctatcaataccaccttatcatctacttttctaacatgacccctcaaggtggtgaccccacttacagtcgtcttttattgaatttagctttccctaatcaacatgctagtctattggatgcagtgtcagaggcaaaaatcacagaggttctgaaagcatcagcccatggttttctaaacatcatggttcaagacccttaacacgaaacagaaagtttccccgaggcgccgtaaacaacccatttgggcgcttccctgataattatagtgaaatctggcatctaattttttttggtggactctcaaattttatatttatgttttgattcctagaaataaaaaatgtttttataaggaattctttgatcgtttatgttttattcttgatagaaacctactactttataacttcgtttatgttttactctkgatagaaacctactactttataacttcgaacattattgatgttcttcctgtatttctgagaggtgacagcttgctggcatccctcgctggctctcggcgcctcctcggcctcagcccactctggccgcgcttgaggagccct

SEQ ID NO: 935370 - DNA, 571 bp, Homo sapiens
gtgacccatctacacaagaaatattaaaaaactaagaaaacgatgtcatgaatgcataaatcatatgtagatactagtgatcatttaatacaatgagatatatatgcgtctattataaaaagttaaaatttatcaagacgtaggcamacacagagcatacatgcagccaattgaagtttagagaaaagtaaaacaaaaatatacaaaagtaaatcataactgcacaaaattaactgtagtacatactgtactactgggataatttcctagcctccacctgttgttcttgcagtgaactcaagtgttgtgagtattcacttaaaatgccacataatgctaatcatcttcttgtgagtagcttgtctctccagtaaattaacacagtaaaaagtgttctctcatgtttctcctgtattattcatgatgtctagtgcaataccataaaccttgaataacaccttcagacctataaaaagtgctgctagtgatgctgaaagttcttccaggaaacagagaagggtcctgacattacaggaaaacaatgaattgcttgataggtaccctagattga

SEQ ID NO: 935371 - DNA, 657 bp, Homo sapiens
agctggaaagaaccatgtgctgccagtctgagctttttattttgttttacttagaaagatagagacagggtcttgccatgttgcccaggctggtctcgaactcctgggctcaagtgatcctcctgcctcggccttccaaagggctggggttacaggcgtgtgccaccgcactcagccgcagccagtctgttttcaaagatggtctttgggttaatgacaattctctctctgcttactctccaggcagtgtggctttctgaatccaaggaggctgggcatagggagatgggatttgtttgcccggtttggactcagcattttttgtactcgatttaatagactcataaaatgtcaaaggtttaagtgagcttagagttcatctggcccaaacctggctgatcagaatctccaggggaagttttattgaaatgccagatctctgcrttctgagatcctgatttagtaactccagggttggaacttgagttttttgtttttttgtgtgtgtgtgtgaaggcaaggtcttactctgttgctctggctggagtgcagtggtgtgatcacagctcactgcagccttgaattcctgggcctaagcaaccctcttgcctcagccttccaagtagctgggactccgggtgtacaccactgtgcccg

SEQ ID NO: 935372 - DNA, 709 bp, Homo sapiens
agaaccatgtgctgccagtctgagctttttattttgttttacttagaaagatagagacagggtcttgccatgttgcccaggctggtctcgaactcctgggctcaagtgatcctcctgcctcggccttccaaagggctggggttacaggcgtgtgccaccgcactcagccgcagccagtctgttttcaaagatggtctttgggttaatgacaattctctctctgcttactctccaggcagtgtggctttctgaatccaaggaggctgggcatagggagatgggatttgtttgcccggtttggactcagcattttttgtactcgatttaatagactcataaaatgtcaaaggtttaagtgagcttagagttcatctggcccaaacctggctgatcagaatctccaggggaagttttattgaaatgccagatctctgcgttctgagatcctgatttagtaactccagggttggaacttgagttttwtgtttttttgtgtgtgtgtgtgaaggcaaggtcttactctgttgctctggctggagtgcagtggtgtgatcacagctcactgcagccttgaattcctgggcctaagcaaccctcttgcctcagccttccaagtagctgggactccgggtgtacaccactgtgcccggctaattttaaatgtttttgtagagatgggatctcactatgttgcccaggccagtctcaa

SEQ ID NO: 935373 - DNA, 706 bp, Homo sapiens
accatgtgctgccagtctgagctttttattttgttttacttagaaagatagagacagggtcttgccatgttgcccaggctggtctcgaactcctgggctcaagtgatcctcctgcctcggccttccaaagggctggggttacaggcgtgtgccaccgcactcagccgcagccagtctgttttcaaagatggtctttgggttaatgacaattctctctctgcttactctccaggcagtgtggctttctgaatccaaggaggctgggcatagggagatgggatttgtttgcccggtttggactcagcattttttgtactcgatttaatagactcataaaatgtcaaaggtttaagtgagcttagagttcatctggcccaaacctggctgatcagaatctccaggggaagttttattgaaatgccagatctctgcgttctgagatcctgatttagtaactccagggttggaacttgagttttttgtttttktgtgtgtgtgtgtgaaggcaaggtcttactctgttgctctggctggagtgcagtggtgtgatcacagctcactgcagccttgaattcctgggcctaagcaaccctcttgcctcagccttccaagtagctgggactccgggtgtacaccactgtgcccggctaattttaaatgtttttgtagagatgggatctcactatgttgcccaggccagtctcaa

SEQ ID NO: 935374 - DNA, 577 bp, Homo sapiens
aattcctgggcctaagcaaccctcttgcctcagccttccaagtagctgggactccgggtgtacaccactgtgcccggctaattttaaatgtttttgtagagatgggatctcactatgttgcccaggccagtctcaaactcttgagctcaagtgatcctcctgccttagcctcctaaagtgctgggattacaggcatgagccaccgtgcctggctgatactagcattcttttttattttttattatttttttaagatagagtcttgctstgttgcccaggctggagtgcagtggcacagtctcagctcagtgcaacctccgcctcccaggttcaagcaattctcctgcctcagcctcccaagtagctgggataacaggcacatgccaccacgcctgcgcttgatcgtgggaggcagaggttgcattattgtgccactccattctagcctgggcaacagagcgagactctgtcttccaaacaaagcggaaaaagattatctgcgagaatgactgcattggccccttgggtgggagggcttctccagggcaaggtgaggggatgcccagtgctgggagtg

SEQ ID NO: 935375 - DNA, 612 bp, Homo sapiens
tgagctttttattttgttttacttagaaagatagagacagggtcttgccatgttgcccaggctggtctcgaactcctgggctcaagtgatcctcctgcctcggccttccaaagggctggggttacaggcgtgtgccaccgcactcagccgcagccagtctgttttcaaagatggtctttgggttaatgacaattctctctctgcttactctccaggcagtgtggctttctgaatccaaggaggctgggcatagggagatgggatttgtttgcccggtttggactcagcattttttgtactcgatttaatagactcataaaatgtcaaaggtttaagtgagcttagagttcatctggcccaaacctggctgatcagaatctccaggggaagttttattgaaatgccagatctctgcgttctgagatcctgatttagtaactccagggttggaacytgagttttttgtttttttgtgtgtgtgtgtgaaggcaaggtcttactctgttgctctggctggagtgcagtggtgtgatcacagctcactgcagccttgaattcctgggcctaagcaaccctcttgcctcagccttccaagtagctgggactccgggt

SEQ ID NO: 935376 - DNA, 612 bp, Homo sapiens
tgagctttttattttgttttacttagaaagatagagacagggtcttgccatgttgcccaggctggtctcgaactcctgggctcaagtgatcctcctgcctcggccttccaaagggctggggttacaggcgtgtgccaccgcactcagccgcagccagtctgttttcaaagatggtctttgggttaatgacaattctctctctgcttactctccaggcagtgtggctttctgaatccaaggaggctgggcatagggagatgggatttgtttgcccggtttggactcagcattttttgtactcgatttaatagactcataaaatgtcaaaggtttaagtgagcttagagttcatctggcccaaacctggctgatcagaatctccaggggaagttttattgaaatgccagatctctgcgttctgagatcctgatttagtaactccagggttggaacttgagttttwtgtttttttgtgtgtgtgtgtgaaggcaaggtcttactctgttgctctggctggagtgcagtggtgtgatcacagctcactgcagccttgaattcctgggcctaagcaaccctcttgcctcagccttccaagtagctgggactccgggt

SEQ ID NO: 935377 - DNA, 599 bp, Homo sapiens
atcacttaataatgggaatgcattctgagaaatgcatccttacatcgtccttctgcaaatatcataaagtgtgttcacccaagcctagatggtacagcctgctacacatctaagctatataatgcagcctgttgctcctaggatacaaacttggacatagggttacgattgcctacagcactcagcaccttactgtamtgaatactgtaggcacttgtaacacaatgttcctaaacatagtttttgtgcatctagacatagaataggtacagtaaaaatgaagtagaaaagattttaaaagggcacacctatatagggcacttaccatgaatggagcttgcaggactggaagttgctctgggtgagtcagtgagtgggtggtgagtgaatgtgaaggcctaggacatcactgtatcactgtaccccactgtagactttataaggactgtacacttaggctacactaagtttgttttttaaattgttctttctttgataataaattaaccacgctcagcttacttttttactttataaactttttaatttttaaaaactttttgataactttcataatagcactcagtttaaaatacaaa

SEQ ID NO: 935378 - DNA, 605 bp, Homo sapiens
tggggggattggagggtccatggccaaaaccaggttttttgttctcctgcctttagtggcattggggcaggcaacaacagattaccgttcatctccaatacctggtcagaggaggtcatccttggcgagtatctaactggatgggggtggcgaccctgtgtggccttacattcaaggtttggagcagcaggatcaaccttgaactccagccctgcaaagacagggaagtaacatgcatgcattacctatttttcaggagtgcattacattgctcaatyataccagcagcttgtaggttatatggaacctggaacctcccctttatgtccatccattgtgcccactgttgaacctactgtccagtaaaatgtgtttccctaccactttcaatggtcagagacaaccatatagggcacacaagtgtggcaaggcccgaatggtatgttgttggtctgccatcctacaagggtaggcaaacaacagacttgtggttgtttttacagccatcagcacatgtgtatgccccagtgaccttggcagacgcccaatgtagtctatttgccatctagtcaagggcatccgccctaccgtcacttattgtgtaa

SEQ ID NO: 935379 - DNA, 729 bp, Homo sapiens
gatgctgcctgattgcctcggaagccccgtagaccatcacggacgccgagcttcaggtaactctcacagtggaaggtaagcctgtccccttcttaatcaatatggaggctacccactccacattaccttcttttcaagggcctgtttcccttgcctccataactgttgtgggtattgatagccaggcttctaaacctcttaaaactccccaactctggtgccaatttagacaatactcttttaagcactcctttttagttatccccacctgcccagttcccttattaggctgagacactttaactaaattatctgcttccctgactattcctggactacagctatatcttgttgccacccttcttcccaatccaaagcctcctttgcatcctcctcttgtatcccccaccttaacccacaagtataagatacctctactccctccttggcgacccttaccatctcattaaaacctaatcacctttaccccactcaacrccaatatcccatcccacagtgcgctttaaaaggattaaagcctgttatcactcgcctgctactacatggccttttaaagcttataaactctccttacaattcccccattttactgcccaaaaaccagacaagccttacaagttagtttgggatctgcgccttagcaaccaaattgttttgcctatccaccctgtggtgcccaacctgtacactcttttgtcctcaatacct

SEQ ID NO: 935380 - DNA, 550 bp, Homo sapiens
ggccctgttacagaggagcgcggccttgtgactaggagccacttcccgagtcgtgatttctgcatcccacagttttgctttttcaaccccatgatagaaaagcctagagcttactcccctcacaccctcacactgcatccttcctgggcttgaaaccattcttaaaagaactgcactatttttttttttaacattctatatgcttcacacttactcgtttcatatttttatacataaaatcctcccactctctctccatcacaacctcactacctccctccacaaaatactttttttttttttaacagacattttcagaacatcagggatatatcctgccctgggatgctgatgaatggccgctttaagactcactgagacactttggtgcacggctcaragtgctctgaaggagtagttttaattcagcagttttgatgtggaagcaaaaatatataaaatggcattatattgctgggtaatgtgttgtagcactatgaatttaatccacagcagccaggcacacaaaagcttacatttattatttttt

SEQ ID NO: 935381 - DNA, 636 bp, Homo sapiens
actgctctcttcaaagctgtcagacagggacattcaagtctgcagaggttactgctgtctttttgtttgtctgtgccctgcccccagaggtggagcctacagaggcaggcaggcctccttgagctgtggtgggctccacccagttcaagcttcccaactgctttgtttacctaagcaagcctgggcaatagcgggcatccctcccccagcctcgctgccaccttgcagtttgatctcagactgctgtgctagcaatcagcgagactcygtgggcgtaggaccctccaagccaggtgcaggatataatctcctggtgcgctgttttttaagcccgttggaaaagtgcagtattcaggtgggagtcacccgattttccaggtgccatctgtcacccctttctttgactaggaaagggaactccctgaccccttgtgcttcctgagtgaggcaatgcctcaccctgctttggctcacgcatggtgtgctgcacccactgtcctgagcccactgtctggcactctctagtgagatgaacctggtacctcagatggaaatgcagaagtcacccgtcttctgcgttgctcatgctgggaactgtagaccggagctgttcctattcagccatcttggctccca

SEQ ID NO: 935382 - DNA, 636 bp, Homo sapiens
actgctctcttcaaagctgtcagacagggacattcaagtctgcagaggttactgctgtctttttgtttgtctgtgccctgcccccagaggtggagcctacagaggcaggcaggcctccttgagctgtggtgggctccacccagttcaagcttcccaactgctttgtttacctaagcaagcctgggcaatagcgggcatccctcccccagcctcgctgccaccttgcagtttgatctcagactgctgtgctagcaatcagcgagactccgtgggcrtaggaccctccaagccaggtgcaggatataatctcctggtgcgctgttttttaagcccgttggaaaagtgcagtattcaggtgggagtcacccgattttccaggtgccatctgtcacccctttctttgactaggaaagggaactccctgaccccttgtgcttcctgagtgaggcaatgcctcaccctgctttggctcacgcatggtgtgctgcacccactgtcctgagcccactgtctggcactctctagtgagatgaacctggtacctcagatggaaatgcagaagtcacccgtcttctgcgttgctcatgctgggaactgtagaccggagctgttcctattcagccatcttggctccca

SEQ ID NO: 935383 - DNA, 585 bp, Homo sapiens
aggaatcgtacacttctttgattaagctaattcctaggtatttaattgcatttgtgggtattctaattgagattactttttaaaatttctcttttggattcttcagtgttgacatatagaaatgctattaattttgtatgttgattttataccctgcaactttactaaatttgtcagtctaatagktttttgatggggtctttaggattctccaaatataaaattatatcatctgcaaacaaggataatttgacttctctcagcctctcccagtggccaccacagccactggtcaactgggagttctgccaggccacccctgatgttcacttaaaccccaagtacccttcagtaagcttgtgttgaatgcttccaggcctgggccttacccttcatggcagtgggctcccctctggccgagggtaggtccagaaaggctttctaagagcctaggcctcgacttgagttcccaagagcctgcttggtgctctgcacccctgtgtctgagttggtgtttaacacacaacacaaagtcccctttacttttctctctgcttttctcaaacagaagtcttttgccataga

SEQ ID NO: 935384 - DNA, 585 bp, Homo sapiens
aggaatcgtacacttctttgattaagctaattcctaggtatttaattgcatttgtgggtattctaattgagattactttttaaaatttctcttttggattcttcagtgttgacatatagaaatgctattaattttgtatgttgattttataccctgcaactttactaaatttgtcagtctaataggtttttgatggggtctttaggattctccaaatataaaattatatcatctgcaaacaaggataatttgacttctctcagcctctcccagtggccaccacagccactggtcaactgggagttctgccaggccacccctgatgttcacttaaaccccaagtacccttcagtaagcttgtgttgaatgcttccaggcctgggccttacccttcatggcagtgggctcccctctggccgagggtaggyccagaaaggctttctaagagcctaggcctcgacttgagttcccaagagcctgcttggtgctctgcacccctgtgtctgagttggtgtttaacacacaacacaaagtcccctttacttttctctctgcttttctcaaacagaagtcttttgccataga

SEQ ID NO: 935385 - DNA, 583 bp, Homo sapiens
gtcccactcggccatgctggcatgccccaactggcctgtgttatagcttgtatcatgtttggtggttcctgagttcttgtaccatgcccaagaagaatgaggatactctgcacattgaaggatgagaagggcagaaaagaatattattgagtgctgaaaataactctcagtagaggggggatgtggggttggtcttcctacccaaggtgggtaagttcctccatatggctgggtccggggccttttatggactcagaatggggagtgaatgctgattggtttgtgagaatccaaaaaaggttaaakgaagacaccactcaaaggtgggcatgacagcatagaaaaaccaattaggaaagggtaggtaaatgtaaaataggtgaagggtggggaccaatcagaggaaagcgtgccaaacaggaagacaagttctcaatctgatccaaagatttaacctgtagcttggctttcaggctttaaactgtcttttgcttggaggtggggtttcactggggacccaccccatctgcctgggcattggctgcctcctgctgctgtcatgcccaatttctaaagaagtaca

SEQ ID NO: 935386 - DNA, 629 bp, Homo sapiens
cccttggctaagggagggagttccccgactccttgcatttcccgggtgaagcgacaccccaccctccttcagctcaccctccgtgggctgtacccactgtctaactagccccagtgagataagccaggtacctcagttggaaatgcagaaattgcctgccttctgcattgatgttactgggagctgcagactggagctcttcctatacagccatcttgccagccacctcaatttttataatttttaacagaagtgagatcccaggttttgygggcttaaatgttgtacaacttggagaactctctatgaaaattgcatgcataaaattataaagagttgagaacatttatttagagtaagaaaataatttatgataaattaaatattttaaatatgatagttaccacaggcatcacaaaattcaagaaaatagcatttttaaaaattgttaaagtgcacagcacacctttataatactttaacttcagtttttggctacattttgttttcttatttcttcataaatgaccataaggtcatgcaactttgtaccatgatattgggggaacccagcccccaatatttcaacataggttctttctattttccataagtgttagtgggctgag

SEQ ID NO: 935387 - DNA, 629 bp, Homo sapiens
cccttggctaagggagggagttccccgactccttgcatttcccgggtgaagcgacaccccaccctccttcagctcaccctccgtgggctgtacccactgtctaactagccccagtgagataagccaggtacctcagttggaaatgcagaaattgcctgccttctgcattgatgttactgggagctgcagactggagctcttcctatacagccatcttgccagccacctcaatttttataatttttaacagaagtgagatcccaggttttgcgggcttaaatgttgtacaacttggagaactctctatgaaaaytgcatgcataaaattataaagagttgagaacatttatttagagtaagaaaataatttatgataaattaaatattttaaatatgatagttaccacaggcatcacaaaattcaagaaaatagcatttttaaaaattgttaaagtgcacagcacacctttataatactttaacttcagtttttggctacattttgttttcttatttcttcataaatgaccataaggtcatgcaactttgtaccatgatattgggggaacccagcccccaatatttcaacataggttctttctattttccataagtgttagtgggctgag

SEQ ID NO: 935388 - DNA, 633 bp, Homo sapiens
acaactcaagtgtccatcaacaaatgattgaataaacaaaatgtgacacattagcttaaaaaaaggaatggaattctgctacatgttacaacatggattaaccttgaaaacattatgctgagtgaaataagctagacacaaaaagacacatattgtataattccacttatatgagcaactattcaattcatagagacaaaagtagaatagaagttaccaagagttggagggagagaagaatgggaacttgttgtttaatgggcagagagtttctgtytgggatgatgaaaaacttctagaaatagacagtggtgatggttacatgacattgtgaaggtacttaatgccactgaattgtacacttaaaaattgttaaaatgggcggggcatggtggctcatgcctgtaatcccagcactctgggaagccaaggcaggcggattgcttgagtccaggagtttgagaccagcctgggcaacatggcgaaaccccatctctaccaaaaatacaaaaactagtctggtgtgggggcatatgcctgtagtcccagctactcgggaggctgaggtggatgaatcgtttgagcctgggaggtcaaagctgcagtgagctgagatcatgccactgcactcca

SEQ ID NO: 935389 - DNA, 632 bp, Homo sapiens
gtagttagacctccctgaatggggaaaaaaaagtcaagataattgtgtcccatgtgaatgttcaccaaaaggtgacctcagtagaggaggattttaatagtcaagtggacagaatgaaccgttctgtggataccagttagcctctttccccygccatccctgtcatcgcccagtaggttcatgaaccaagtggccattgtgacagggatgaagattatgccttggcccagcaacatggacttcccactcaccagtgctgacctggctatggccactgccaagtgcccaatctgccagcctcagagaccagtgttgagcccctgatatggcagcattccccagatgatcaaccagttacctgtttgcaggttgattacattggaccacttctattagggaaggggcagcatcttgtccttagcgaaagagatgcttactctggatatgaatttgccttccttgcctgcagtgcttctgccaaaaccaccattcatgaactcacagaatgccttatccaccctcatggtattccacacagcattgcttttgaccaaagaactccacagcaaatgaagtgtggcagtgggctcctgctcacggaattcactggtcttaccatgttccccatcatc

SEQ ID NO: 935390 - DNA, 579 bp, Homo sapiens
gaaacagaggtttagttggacttacagttccacatggccggggaggcctcagaatcatggcgggaggcaaaaggcacttcttacatggtggcagcaagaggaaaatgaggaagaagcaaaagcagaaacccctgataaagccatcaaatctcatgagacttattcactattaggagaacagcacaggaaagaccggcccccgtgattcaatcacctcccccttggtccctcccacaacaygtgggaattctgggagatacaattcaagttgagatttgggtggggacacagccaaaccatatcacctcatgtgacaggttgcagtcacaatgtaaccaaaatttcattacatttacaaactattaaaaatattgtataaaattacctcaggctatgtgtatataaagcatgaatttattttgtgtttcaacttgggtagcatctccaagatgtctcattatgtatacgcaaatattccaaaatacgaaacaataaaacactcaaaacacttctggtaccaggcatttcgaataagagagactccacttgtaccagctccgtatcccacggcttttgcaa

SEQ ID NO: 935391 - DNA, 742 bp, Homo sapiens
ttcaacaggcaaagaaagctttttatgatttgaatcttctagaagcatcagagaaagactgttcttgccattcacactacaacaaaactttgggatcttgaactttgagttcataatctcacaactgagaagggtccctccaagctcttggagctgtgtgcccactggaacccttaaggtaaaattaaccaaagaaatttctcccaagaggagaatggcatccttactatgaacagcttttctcacgttcacagattaagacttctactgtcgtgaaacttatcttcgaatattttttsttgcttatgcctctacaaaaaaatagaagtggaaaaggtgtctgttatgtgcacttatggtgtatactcttacttgcgaaggagtttgtaaccagctttttaaatgggtaaacttatactttgatagataaaagatgaaggcccaatgtaggtaagaaactttaaaggtacatgctttgcctcataatcaaaaacaaaacattggttcactcctcttaacccacatcatgggttaaagagaacattgccagaaggccttcactcttctaaaaaggcatcatttgttaggtcctttttccatggtttaaagaaaaagaagcaatgattagaaatatatccctcacaataggttctatagcaaattctactgtaaaggctatagttacacaatagactctaaattaccttgtgaaagttatgatagaattggctaaacagagaag

SEQ ID NO: 935392 - DNA, 641 bp, Homo sapiens
aagtgagagaaagccaaagatccagctccgtctttgccatcacttagtcaagtcactccacatcttggggccacagttttcttatctctaactgaagaaataggccaaatgacttctgaagtcccttctgaagttttagattgtgcttctaattttgactattaattaccaagtacaaaaaacatacaagtctaataaatgcaaaaagctagagcaccctaagataagaatgaagaaagtgggaattagacttggaaggccagagaagaaagggcaaataaatcatgccaaggttagaacagcgtaagaaggatatgagagacaaacytttaataatgagaagtatactaggtgaggcaaaggaagctaggctaaggatatttgatcagataagcaataataaactacagtaactttttttttttttttttgaaacagagtctcgctctgtcaccaggctggagtgcaatggcacagtctcggctgactccaacctctgattccctggttcaagcgattctcctgcctcagcctcccgagtagctgggattacaggcatgtgccaccacgcccagctaatttttgtatttttagtagagacggggtttctccatgttggccaggatggtctcgatctcatg

SEQ ID NO: 935393 - DNA, 629 bp, Homo sapiens
gttgaagctgcagaagaaaagtgtgaagctagcagaggttggttcatgaagtttaaggaaagaagcctcctccccataacataaaagtgcaaggtgaagcagcaagggctgatgaagaagctgcagcaagttatccagaagttctacgtaagaacattgacaaaggtggctacattaaacaacagattgtcttgttttgttttgttttgagatggagtctcactctttcacccaggctggagcgcagtggcgcgatctcggctcacggcaacttccggctccctggttcaagtgattctcctgcctcagcctcccgtgtagctggggttacagtcacacaccaccatgcccatctaatatttgtatttttagtagagacggggtttcaccatgttggccaggctggtcttgaactcctgacctcaagtgatccgcccatcttggcctcccaaagkgctaggattacaggcaagagccaccacacccgaccggaaacaacaggtttttaatatagaccaaacagcattatattggaagaaaatgccatctaggactttcatagctacagaaaggaagtcagcacctggcttcaaagcttcaaaggacaggctgtctctattgttaggagt

SEQ ID NO: 935394 - DNA, 574 bp, Homo sapiens
caaggatcatttgagcccaggagttcaagaccaccctgggcaacacagtgagacctcatctctacaaaaaaaaaaaaaaaaaaattagcggggcatggtggtggcacacgcctgtgtctgtcagaacaagacctgtctcttcagtgccaggcacggtgctcatgcctgtaataccagcactttgggaggccgaggcaggtggatcacaagrtcaggagatcgagaccatcctggctaacaccatgaaaccctatctctactaaaaatacaaaaaattagccaggtgtggtggcgggcgcctgtagtcccagctactcaggaggctgaggcaggagaatggcgtgaacccaggagacagagtttgcagtgagccgaggtggcgtcactgcactccggcctgggtgacagagcgagactccgtctcaaaaaaaaaaaaaaaaaaaaaaaagaacgagacctgtctcttaaacaaagcccttccatagtaggaagtcaccatgtaacatcatataaaactgaaaaacaaacaacaacaaaaaccagtacaagcatattttaggtcattctaggaaga

SEQ ID NO: 935395 - DNA, 574 bp, Homo sapiens
caaggatcatttgagcccaggagttcaagaccaccctgggcaacacagtgagacctcatctctacaaaaaaaaaaaaaaaaaaattagcggggcatggtggtggcacacgcctgtgtctgtcagaacaagacctgtctcttcagtgccaggcacggtgctcatgcctgtaataccagcactttgggaggccgaggcaggtggatcacaagatcaggagatcgagaccatcctggctaacaccatgaaaccctatctctactaaaaatacaaaaaattagccaggtgtggtggcgggcgcctgtagtcccagctactcaggaggctgaggcaggagaatggcgygaacccaggagacagagtttgcagtgagccgaggtggcgtcactgcactccggcctgggtgacagagcgagactccgtctcaaaaaaaaaaaaaaaaaaaaaaaagaacgagacctgtctcttaaacaaagcccttccatagtaggaagtcaccatgtaacatcatataaaactgaaaaacaaacaacaacaaaaaccagtacaagcatattttaggtcattctaggaaga

SEQ ID NO: 935396 - DNA, 572 bp, Homo sapiens
ctgccatgttctcaagaaagtgtgtgtgtgtgtgtgtgtgtgagagagagagagacagagagaaggagagagggaggaaatggggaggagagaagaggagacaggcagggtaaagaggagaatagaaggagagagaaaagaaagacagacatggaaatgaaatagagcaggagagagaagtggtaagagaagggagaagaaaaaagtgaagaatgagaasagacagacaggagacaaggaacaaaaaattagcaaaatggccagagaaaagaaaaaaaaagattgagaaataaaagagaagcaaagaaaaagagagacagaaaggagtgagaaaatgaaataggcaagcggttctcaagacagaaaatgggaaagggaagaaatgactgagaatgagagaaagataaaaagaataaaaagatgaaacagaagggaaatgcctcaagggccctgcccaagagactcagagacacccatgttttctcatgacccttcatgatggcagttgtcaggcagaccccaagaaaccctgagaccaaacagcaaggggaagtagccaggctccagtgaat

SEQ ID NO: 935397 - DNA, 629 bp, Homo sapiens
aaaataagaagaatcataccatagactaatacaatgggaattcaaaagaagaaaaaaaagatcaaaaaaatggataagaatgctctgggcctctgttccaacatggccaaaaaggaacagctccagtctgcagtgcccagcatgatcaacacagaagacgggtgatttctgcatttccaactaaggtaagtggttcatcttactgggactggttggacagtggtacagcccatggagggcaagctgaagcagggtggggtgtcgcctcccctgggaagtgcaaaaggtcaggggatttctctttcytagccaagggaacccatgacagactgtacctggaaaaacaggacactgccaccgaaatactgtgcttttcccgaggtcttagcaaccagtagacaaggagattctctcccatgcctggctcagcgggtcccatgcccacagagccttgctcgccactagcgcagcggtctgagatggaactgccaggcagcagccttgctgggggaggggcgtccaccattgctgaggcttgagtaggtaaacaaagcagccaggaagctcaaactgggcggagcccaacacagctcatcaaggcctactgcctctagactccacctctgtgg

SEQ ID NO: 935398 - DNA, 629 bp, Homo sapiens
aaaataagaagaatcataccatagactaatacaatgggaattcaaaagaagaaaaaaaagatcaaaaaaatggataagaatgctctgggcctctgttccaacatggccaaaaaggaacagctccagtctgcagtgcccagcatgatcaacacagaagacgggtgatttctgcatttccaactaaggtaagtggttcatcttactgggactggttggacagtggtacagcccatggagggcaagctgaagcagggtggggtgtcgcctcccctgggaagtgcaaaaggtcaggggatttctctttcttagccaagggaacccatgacagactgtacctggaaaaacaggacactgccaccsaaatactgtgcttttcccgaggtcttagcaaccagtagacaaggagattctctcccatgcctggctcagcgggtcccatgcccacagagccttgctcgccactagcgcagcggtctgagatggaactgccaggcagcagccttgctgggggaggggcgtccaccattgctgaggcttgagtaggtaaacaaagcagccaggaagctcaaactgggcggagcccaacacagctcatcaaggcctactgcctctagactccacctctgtgg

SEQ ID NO: 935399 - DNA, 629 bp, Homo sapiens
aaaataagaagaatcataccatagactaatacaatgggaattcaaaagaagaaaaaaaagatcaaaaaaatggataagaatgctctgggcctctgttccaacatggccaaaaaggaacagctccagtctgcagtgcccagcatgatcaacacagaagacgggtgatttctgcatttccaactaaggtaagtggttcatcttactgggactggttggacagtggtacagcccatggagggcaagctgaagcagggtggggtgtcgcctcccctgggaagtgcaaaaggtcaggggatttctctttcttagccaagggaacccatgacagactgtacctggaaaaacaggacactgccaccgaaatactgtgcttttcccgaggtcttagcaaccrgtagacaaggagattctctcccatgcctggctcagcgggtcccatgcccacagagccttgctcgccactagcgcagcggtctgagatggaactgccaggcagcagccttgctgggggaggggcgtccaccattgctgaggcttgagtaggtaaacaaagcagccaggaagctcaaactgggcggagcccaacacagctcatcaaggcctactgcctctagactccacctctgtgg

SEQ ID NO: 935400 - DNA, 629 bp, Homo sapiens
aaaataagaagaatcataccatagactaatacaatgggaattcaaaagaagaaaaaaaagatcaaaaaaatggataagaatgctctgggcctctgttccaacatggccaaaaaggaacagctccagtctgcagtgcccagcatgatcaacacagaagacgggtgatttctgcatttccaactaaggtaagtggttcatcttactgggactggttggacagtggtacagcccatggagggcaagctgaagcagggtggggtgtcgcctcccctgggaagtgcaaaaggtcaggggatttctctttcttagccaagggaacccatgacagactgtacctggaaaaacaggacactgccaccgaaatactgtgcttttcccgaggtcttagcaaccagtagacaaggagattctctcccatgcctggctcagcgggtcccatgcccacagagccttgctcgccactagcgcagcggtctgagatggaactgcsaggcagcagccttgctgggggaggggcgtccaccattgctgaggcttgagtaggtaaacaaagcagccaggaagctcaaactgggcggagcccaacacagctcatcaaggcctactgcctctagactccacctctgtgg

SEQ ID NO: 935401 - DNA, 708 bp, Homo sapiens
ccaagttcactcaggaagtccctggaagttcctggctcctgactctgcgcagaaggggaatcgtgctggatgtgagctcacattcagagagagaaaaagagagagagggagatgctccttttagcgctggctgcctgcagcataaatatatgcaaatgtattcagagaagcgctgcatggcatgggcagatagaggcaaagtgaggaggaaaattcatctccgtctcagggattttgcctctgatagggttctcctggagatctcggtgaaaccttcattatccccccttctkctctccaattggtccccacatcctggctgattctgcttaaaaactcatctctcaaatctgccccttctcaccagccctgcaccagcgcactgtctcctgcctcctttgctctccaaggagctgtttctccagctcccgtccaggctccctgcctccacctttgttgtctgcaggatggagccccctgaggtgccaattggatggggccatgtccttgatgaaggccttccattggcttcctgtcatccccaggggggggaaaagaaaacccaagttcaatatcctaaaatgcaaggcctttgagatctacttcaacacacgtaccttctctccttgtgcccatgggtcccatgctcctgccacatctccctcaccttttgttgaatcctcagttgcaccttcagacttctgtgca

SEQ ID NO: 935402 - DNA, 708 bp, Homo sapiens
ccaagttcactcaggaagtccctggaagttcctggctcctgactctgcgcagaaggggaatcgtgctggatgtgagctcacattcagagagagaaaaagagagagagggagatgctccttttagcgctggctgcctgcagcataaatatatgcaaatgtattcagagaagcgctgcatggcatgggcagatagaggcaaagtgaggaggaaaattcatctccgtctcagggattttgcctctgatagggttctcctggagatctcggtgaaaccttcattatccccccttcttctctccaattggtccccacakcctggctgattctgcttaaaaactcatctctcaaatctgccccttctcaccagccctgcaccagcgcactgtctcctgcctcctttgctctccaaggagctgtttctccagctcccgtccaggctccctgcctccacctttgttgtctgcaggatggagccccctgaggtgccaattggatggggccatgtccttgatgaaggccttccattggcttcctgtcatccccaggggggggaaaagaaaacccaagttcaatatcctaaaatgcaaggcctttgagatctacttcaacacacgtaccttctctccttgtgcccatgggtcccatgctcctgccacatctccctcaccttttgttgaatcctcagttgcaccttcagacttctgtgca

SEQ ID NO: 935403 - DNA, 762 bp, Homo sapiens
gaaaggaggagaatgaaaacatttgccaagaccaccagataggtagaatgggataaaagcagagccctagatggaaggcaggtagtacaagagaaagattgtgaaaaataaagatagatgaaaggtgactgagtggatggatggatggaagatgggtcaatgaagaatttcttttactcctcaaaggtaaaaattgccttgcacattgtaaatgtttaattacatgttgtgatattatgaaatatatttggttgtccctggcataaggctcctgtaacccctggaagctctggagttatgagtgtcttttgtatgctaatgagatgactcgtggctggctacctctaaataccttcaaggtgaggccaggaaagacctagacataattagagggttgagactttcagcctcacccccaccaacctcctggaaggaaaatgggggtgaagattgagttggccacaaatggccaatgatttaatcaattaaaaactatgtaatgaagcctccataaaaatcccaaaggactgggttctgggagcttccagatagctgaacacatgsagggtccttgtgggtggtacacccaggcgagggcatggaagctctgtgcccctttccacgtgccttgccctatgcatcacctcatcagactgttcatctgtgtcatttgtaatatgctttataataaactggtaaacataaatcacatgttccccccaagttttgtgagcctgctctagcaaattaattgaacccgga

SEQ ID NO: 935404 - DNA, 575 bp, Homo sapiens
attccttacagaccaagaccttctgcttcctcatccattatttccctctatacttaaatctatgcttggaatactgtatcccatgtttgagattccctgcttcatctcacaactctttaagtctcctcccttctttatttaaaacacccctcacccaaataccacggtaatgccttgctgctgatgaacaacattatgatttgtaacttatgactattgagaaacttgcaccaacacccaacaacaatgtgaatactttttacgttcaggaattgtatagttgtatatgccttcatgcattgtgagttttaagtatatcttgttttgtactttggtaaaatgggcaactgaatgaatcaagaagtatttactcccacccccatcccaacccaaatgatttcttcccaayatattagccgtaattaactttgtttttactgaagcgatctaagagagaaatagtaataatagacaatgtgcattgagtgcctctacgtgtcaagtgctttatataggatttgtagggttgctgtattagacatgaagaagatgagtctgagagatgttaagtgact

SEQ ID NO: 935405 - DNA, 581 bp, Homo sapiens
ttttaatataccatttcaaaatctacttaaggcattgatttcgctgcttatcaccaaagtcctggaaatttttcatgcaaaaataaattttttttttttgagacagtcttgcactgttgcccaggctgcagtgcagtggcartctcggctcactgcaaactctgcctcctgggttcacgccattctcctgcctcagcttcccgagtagctgggactacaggcacctgccaccacgcccggctaatgttttgtatttttagtagagatggggtttcacggtgttagccaggatggtctcgatctcctgacctcgtgatccgcccgcctcggcctcccaaagtgctgggattacaggcatgagccactgcgcccggccaaaaatttttttaaatatagttttatagccctatagtttcattgcctgtgtcttattacctttcagattggaagccttcagaccagggaccatgtcttatttttgttttttgttgcaaaacagattctggtgtcatgtgaacatttaattatataaatggtatgtgatggactcagccacctgccaatacaatagttaaatgctc

SEQ ID NO: 935406 - DNA, 584 bp, Homo sapiens
aattcacatacgaaaaaatttacccgtttaaagcgtacaattccatgacttttggcatattcagagttgtatatttgtcacaagtcgaggtttaaaacattttcatacctccaaaataaacatcgtatctttttgtcatcaccctccaataattcygattctcctactgaaagcagaggccattggtagcctctactttcagtatctcaaataaatttgcctattctcaacatctcatatatgcagaatcatataaaatgtagtgtttgtgactcatttcattcgcttagcatctttccaaggtacatccacgttgtagcatacatcaatgcttcattcctttttactgctcagtaatattcctcatatgactataacgttttggatgtgctatgaatggatgagttatttcttcagcactttatgaacattttggttgtttccacttttttggctattatgaacaatgttgctaaatagatttgtgtagaagtttttgtgttgctttgctttcaattctcttggctatttacctataaatagaattgctgggtcatatggtaactatatatctaatcttttga

SEQ ID NO: 935407 - DNA, 642 bp, Homo sapiens
cgttgaagtgaatctgggatgggatgtgaatgtgctgtgtgtgtgtgtgtgtgtgtgtgtgtgtaccaaaatttattaagaaggcaaacaatttggttggacaactcttcaaagaaaatatacagaggccaggccggacgcagtggctcacacacttgtaatcccagcactttgggagcctgaggcaggtggatcacctgaggtcaggcgttcgagaccagcctggctaacatggtgaaaccctgactctactaaaaatacaaaaattagctgggcgtgatggcrggcgcctgtagtaccagctactcaggaggctgatgcaggagaatcgcttgaacccaggaggcaaaggttgcagtgggccgagattgtgctattgcactccagcctgggagacaagagccaaagtccgtctcaaaaaaaacaggaaatatacagaggccaataagcacgtgaaaagatgctcaacatcattagtcattagggaaatgcaaatcaaaactacaatgagatgacacttcactaacccactagaatggttataatagaaaagagagacaataactagtgtcgtccaggatgtggagaaccctcatacattggaaccctcattcattgctggtgggattgtaaatgggtata

SEQ ID NO: 935408 - DNA, 880 bp, Homo sapiens
cagtctaggttaggtcctgctgctcaccgcacagaaagctaatcgctgagacaatggatatcgccaaggaagaagacttcaattaagtgctacagccaaggagatggaagatcagtctcaaatccacctctctggaccagtaaaattaggggttatatagcagggaagaaatgtaatcctgtgtgggaaaacaggaattggggagggataagtaagaggaattggtcaatggaaagcaggtggtcagttaggcaatcatgatgggggtgaggggtctgacatctcactgtccaaatgaagtgatttggtgagtttcaactccttgctactatctgggaggtctgatggttggtttccagagaaaggaactcagacaaaacaagtataattttctcaagttttaaaactgggtggatccatttctatgtttagtcmaggaaaccataaacgtcagctctatgggacaactgggtcagtttcacactaacattgacccagagcaacttccagtactgcaaactccattcatggtaagtgtcctatataagcacacaaatttttatcttttataccatatttttactgtaccttttctatgtttagatatgcttatatacacaattcttccccattatgttacaattgcctagagaattcaggacggtaacatgctatacagcttggtagcctaggagcaataggctatcccatatagcctagatacatagtaggctatacaactaggtttctgtaagtacactgatgtttacttatgtttgtacaataacgaaatcacctaatgatgcactcctcagaaagtgtcgcttttgttgaaagacatatgattgtactttagagacaatggcagctctggccagct

SEQ ID NO: 935409 - DNA, 880 bp, Homo sapiens
cagtctaggttaggtcctgctgctcaccgcacagaaagctaatcgctgagacaatggatatcgccaaggaagaagacttcaattaagtgctacagccaaggagatggaagatcagtctcaaatccacctctctggaccagtaaaattaggggttatatagcagggaagaaatgtaatcctgtgtgggaaaacaggaattggggagggataagtaagaggaattggtcaatggaaagcaggtggtcagttaggcaatcatgatgggggtgaggggtctgacatctcactgtccaaatgaagtgatttggtgagtttcaactccttgctactatctgggaggtctgatggttggtttccagagaaaggaactcagacaaaacaagtataattttctcaagttttaaaactgggtggatccatttctatgtttagtccaggaaaccataaacgtcagctctatgggacaactgggtcagtttcacactaacattgacccagagcaacttccagtactgcaaactccattcatggtaagtgtcctatataagcacacaaatttttatcttttataccatatttttactgtaccttttctatgtttagatatgcttatatacacaattcttccccattatgttacaattgcctagagaattcaggacggtaacatgctatacagcttggtagcctrggagcaataggctatcccatatagcctagatacatagtaggctatacaactaggtttctgtaagtacactgatgtttacttatgtttgtacaataacgaaatcacctaatgatgcactcctcagaaagtgtcgcttttgttgaaagacatatgattgtactttagagacaatggcagctctggccagct

SEQ ID NO: 935410 - DNA, 631 bp, Homo sapiens
tttctctaatgaagccaatctataaggactggaatagatggctacttcttcaaatgcatagacaccaacacatggccacaaagatcgtgagcaatcagggaaacttgacactatcaaagaaataaaataaaccatcagtaactgaccatagagaaatagagatttgcaarccacctgagaaagaattgaaaataatcatcttaaagaagttcagtaagctacaagagaacacagacaactaaatacgatctggaaaataacacatgaggaaactgagaagttcaacaaagagatagaaaccataaaaagaaccaaatagatattctagagctaaggatacaaagacttaactaaaccattctattgagagcatccacagcagattcaattacacagaagaaaataatgagagctcaaacacaggtcatttgaaattaccctgttagtgaagaaaaaataattaaaaatagtgaagaaagcctataggaattatggagcaacatcaagtgaaccaacatacacattatgggatttccagaaggtgtagagaaagtagaagaaagtttatttaaagaaataatggcagagaacttccaagatctggagaggaaaatgaacattcaggtccatg

SEQ ID NO: 935411 - DNA, 839 bp, Homo sapiens
gttgtatttttggtttacaggctcgtcagcccccacttatctatcataagtgggacacacatatgggaggaaaagtttccttttccttctacccatcctaggttctctggctgaggtcctataaattagaatggcaaaagacaggttgacaaaatagaaacaaacaaggttattaacatgctcakcatgcacacacatgggagcactcagccatgagtcactccaagggtttattagaacttgggctgatagagcttctaaacaaaataatgacaaattttagaggagtgacaagacaaaggaaaagacctttgggcttctagggcagcaaactgcagccagctaaacacatgggaaatgaatggaggataagggctagttcctagtagtcaagtttgctgagtagattcctccagtgctgtctccaggctgataaggcctagacttgccccagtgattggcttctgtccttcctggtagagacaggagtggggacaccttcactaaattatgtcctgcttttaggcaaagaggggcaggagagagagcttcacttatatctacatcttaaaaattgtcttcagctcaaaatgatccttatgccaaagtggtgtctttgggggtggctgactctgctgctctttacttaccttgaactcccaccatcatggctgcctcagaatcccacagggcatcgagaatgttctatgcaaatggagaggccaggagcagtggcagacgtgcaggtggcacaaatctctgctctcaggcctgctcccggtcccagtgacgtttagagcacacgtccaaagatatgatgaagaatttccaggtggtga

SEQ ID NO: 935412 - DNA, 839 bp, Homo sapiens
gttgtatttttggtttacaggctcgtcagcccccacttatctatcataagtgggacacacatatgggaggaaaagtttccttttccttctacccatcctaggttctctggctgaggtcctataaattagaatggcaaaagacaggttgacaaaatagaaacaaacaaggttattaacatgctcatcatgcacacacatgggagcactcagccatgagtcactccaagggtttattagaacttgggctgatagagcttctaaacaaaataatgacaaattttagaggagtgacaagacaaaggaaaagacctttgggcttctagggcagcaaactgcagccagctaaacacatgggaaatgaatggaggataagggctagttcctagtagtcaagtttgctgagtagattcctccagtgctgtctccaggctgataaggcctagacttgccccagtgattggcttctgtccttcctggtagagacaggagtggggacaccttcactaaattatgtcctgcttttaggcaaagaggggcaggagagagagcttcacttatatctacatcttaaaaattgtcttcagctcaaaatgatscttatgccaaagtggtgtctttgggggtggctgactctgctgctctttacttaccttgaactcccaccatcatggctgcctcagaatcccacagggcatcgagaatgttctatgcaaatggagaggccaggagcagtggcagacgtgcaggtggcacaaatctctgctctcaggcctgctcccggtcccagtgacgtttagagcacacgtccaaagatatgatgaagaatttccaggtggtga

SEQ ID NO: 935413 - DNA, 839 bp, Homo sapiens
gttgtatttttggtttacaggctcgtcagcccccacttatctatcataagtgggacacacatatgggaggaaaagtttccttttccttctacccatcctaggttctctggctgaggtcctataaattagaatggcaaaagacaggttgacaaaatagaaacaaacaaggttattaacatgctcatcatgcacacacatgggagcactcagccatgagtcactccaagggtttattagaacttgggctgatagagcttctaaacaaaataatgacaaattttagaggagtgacaagacaaaggaaaagacctttgggcttctagggcagcaaactgcagccagctaaacacatgggaaatgaatggaggataagggctagttcctagtagtcaagtttgctgagtagattcctccagtgctgtctccaggctgataaggcctagacttgccccagtgattggcttctgtccttcctggtagagacaggagtggggacaccttcactaaattatgtcctgcttttaggcaaagaggggcaggagagagagcttcacttatatctacatcttaaaaattgtcttcagctcaaaatgatccttatgccaaagtggtgtctttgggggtggctgactctgctgctctttacttrccttgaactcccaccatcatggctgcctcagaatcccacagggcatcgagaatgttctatgcaaatggagaggccaggagcagtggcagacgtgcaggtggcacaaatctctgctctcaggcctgctcccggtcccagtgacgtttagagcacacgtccaaagatatgatgaagaatttccaggtggtga

SEQ ID NO: 935414 - DNA, 642 bp, Homo sapiens
tagtgcctcactgttctgataagaagaaaacatgtacaagctacgaactgcaaattgagaaattttggtgattttgcaaatgagataaatggtcctatatttgcatttgaaattggcattgcacaaaataagttgactaataatttttaattttccttcttagaatgacaatgtggcaaataaaggaacccaatgaaaagaagggaaagagactgcagagggaaggaaaaagctttatattttactaccataatggcactttttaaaaaatttttatttatttatttatttttgagacagagtcttgctctgtcgcccaggctagagtgcagtggcacaatctcggctcactgccagctccgcctcctgggttcacaccattctcctgcctcagccttcccagtagctgggactacaggcgcccaccaccacgcctggcttttttttktgtgtgtgtgtgtttttagtagagacagggtttcaccgtgttggccaggatggtctctatctcctgacctcgtgatccacctgcctcggtctcccaaagtgctgggattacaggcgtgagccactgggcccggccaataatggcactttttcctgctttttgtacagggggtcctgcatttgtgttttgtcctg

SEQ ID NO: 935415 - DNA, 586 bp, Homo sapiens
catgtgttacagagtgctcttttggtttagcttccataggcggcttgtgttaaccagctcaattagaccctctactttgtcgcaaggacagagggttttctgtatcccaggttcttgccttggtgtgctggaagaatcggatcaaacctaggtttggagaatgaatgcaaagttttattgagtggaggtagctctcagcagatgggggaagccagaaagggatggaatggaaaggatttctcttggagaaaggcagcccaggctctcctctgactgccccagccaaactgtgtgccattctgccagtcagtggcctgccagcctgttggtgcctgtcagtgtgtccctctygacatccagccacccatgtgttcctctgctgatgtgctcctctctacgtccagccacctgtgtgtcagcctgctagggtcttgggggtttttttaggcacaggatgttggtgtggcaggccagggtgaaaatgcaacatttgggcaggaaaacaaaaatgcctgtcctcacctaggtccatgggcacaggcctgggggtggagccctagccgggaaccacacccttccccgcttc

SEQ ID NO: 935416 - DNA, 532 bp, Homo sapiens
ctcaaattacaggctcaagggatcctcatcctcctgagtagctagggaccaaagacagccaccaccatgcttgaccaaattcttgttgttttctttgtagacatagagtctcactatcttgtctaggctggtctcaaacttctggcctcaagctatccttccactttggtctctcaaagtactgggattataggcatgagccaccatgccaggcccattcataasttttaaaaagtattcactaagttagtaattgatgagacaaacaaatcataaagaaaaatatttattaaacatatgaaaaagtgctcaacatcactagttgttaggaaaattcaagtgaaaaccacagtgagctaccactacacattcgctaaaatggctaaaattaaaaagactagccataccaaatgttagtgaggatgtagaggaattggaactcttataatgttgtgatgggaatgttgtgatatagccactatggaaaacagtttggcagttctatataaagttaacacacacttaccatatt

SEQ ID NO: 935417 - DNA, 589 bp, Homo sapiens
aaatgatacctatcgtgttaagtattttatcctttgtgttacaaacaatttaattatactttttcgttattttaaattttacaattaaattatttttgactgtagtgaccctgttgtgttagcatactagatattattcatttttgctagctatctttttgtacccattaaccatcctcaacttctcatcaccccctcacttcccttcccagcctctggtaaccatcattatactctttatctccatgagttcaacagttttcatttttagttcccacaagtaactgagaacatgtaaaktttgtctttctgtgcatggcttatttcacttaacataatgacttccagtttcacttatgatgttgcaaatgacaggatctcattctttttaatggctgaatagtactccattgtgtatatgtaccacattttctttatccatttgtattagttcatttttatactgttatgaagaaatacccaagacttagtaatttacaaagaaaaagaggtttaatgcactcacagttccacatggctgggaaggccttataatcatggcagaaggtgaaggaggagcaaaggcatg

SEQ ID NO: 935418 - DNA, 589 bp, Homo sapiens
aaatgatacctatcgtgttaagtattttatcctttgtgttacaaacaatttaattatactttttcgttattttaaattttacaattaaattatttttgactgtagtgaccctgttgtgttagcatactagatattattcatttttgctagctatctttttgtacccattaaccatcctcaacttctcatcaccccctcacttcccttcccagcctctggtaaccatcattatactctttatctccatgagttcaacagttttcatttttagttcccacaagtaactgagaacatgtaaattttgtctttctgtgcatggcttatttcacttaacataatgacttccagtttcacytatgatgttgcaaatgacaggatctcattctttttaatggctgaatagtactccattgtgtatatgtaccacattttctttatccatttgtattagttcatttttatactgttatgaagaaatacccaagacttagtaatttacaaagaaaaagaggtttaatgcactcacagttccacatggctgggaaggccttataatcatggcagaaggtgaaggaggagcaaaggcatg

SEQ ID NO: 935419 - DNA, 725 bp, Homo sapiens
agaaatataattgtcttttgaatatttatcatgtatcttgcaaacttgccaatcagatctatttctgtgaatgttccatgtgctctacaacaatgtgtattctgttgttgaatggagtgttctataaatgccaattaggtaaattttgttgataatgttgtttgggtattctatgtccttcctgatttcgccccaacttgtttcatcaattcctgatatatgactgttgaagtctccagctataattctgtatttttttatttctcctttttcatctgtcagctcctgctttatgtattttgaaattttgtttttaggtgcatagttatttaagattttttttttggggagtcttgaagccttattattatttaatgttcctctttatcactcaatattatttgtcctaaagtcaactttgtataaaattaatatagttacttcaactttttttttggttagtgtttccatgaaasgtttttaaaaaattctttaatattttaatttttaacttgtttttgttttataattaaaattgattttttatagagagcatacaaatgtacctggatttttatatagtgtgacaatctgccttttaatttatatgtttaaaccaggaattgtcacataatgtttatgggccaaattcagcccagtgctctttttttgacatggcacacaagctaagcataggtgttgtatttataagaactaaggactgg

SEQ ID NO: 935420 - DNA, 664 bp, Homo sapiens
tcgatggcctcaactttgctgggctacaggtgtgttcctggtggcctttagatgacatcattgacaagattatgaccaagataattttgatgcatcctagtttcagcttaaaatttgggaaaacattcatttaaaaataacccataccaaggttttcacaaaatacaatcaaaatcagggcatattagtaggtagctcatatgtgtacctgctcggtatgtgctgttgtcattgatgtctggaatgaagtaatgaattagaaagtcttcaaacaccaaagaatgatttaatgaactatatttacatagtgtatataacacatataacataattactttttcctaaagataagaaattataattgtgcattttagaaagatttggtcaaaagaggaggaggtatgaggattttatcatrattctcaatttcacaagcatttctgtaaattaggagcctactgtactaactagaaatggtgaatgggttttcaacttcaattccatccatcacgtcccatctaaatgctctgaggtggtaacaacaaactgtgtcctagatcttcttcaagctgaagtgctttgggatgaccgcatattccaacaataccccctggaggccagttggccagggccaggggacacttgtcctcacagaagcaggtct

SEQ ID NO: 935421 - DNA, 664 bp, Homo sapiens
tcgatggcctcaactttgctgggctacaggtgtgttcctggtggcctttagatgacatcattgacaagattatgaccaagataattttgatgcatcctagtttcagcttaaaatttgggaaaacattcatttaaaaataacccataccaaggttttcacaaaatacaatcaaaatcagggcatattagtaggtagctcatatgtgtacctgctcggtatgtgctgttgtcattgatgtctggaatgaagtaatgaattagaaagtcttcaaacaccaaagaatgatttaatgaactatatttacatagtgtatataacacatataacataattactttttcctaaagataagaaattataattgtgcattttagaaagatttggtcaaaagaggaggaggtatgaggattttatcatgattctcaatttcacaagcatttctgtaaattaggagcctactgtactaactagaaatggtgaatgggttttcaacttcaattccatccatcacrtcccatctaaatgctctgaggtggtaacaacaaactgtgtcctagatcttcttcaagctgaagtgctttgggatgaccgcatattccaacaataccccctggaggccagttggccagggccaggggacacttgtcctcacagaagcaggtct

SEQ ID NO: 935422 - DNA, 543 bp, Homo sapiens
ctaccaacaatgtacaaggattctcttttctccacattcttgccaacacctgttatcttttgcctttttgatagcagccattttaacaggtgtggttttgatttgcatgtgcctgatgataaatgacattaagcaagttttcatatgcctgttggcaatgtgtcttcttttgagaaatgtctattaaggtcctttctccatgttttaattgggttatttgtttttttgctattgagttgagttcctgatgtattttttatatcaaccacttacagaagtatggtttgcaaatattttctcccaatctatcggttgtctcttcactgttgatttttttkgggggggctgtgcagaagttctttagtttcatgtaatcttatttatctatttttgtctttttgcttttgggggggttcatgtccaaaaaatcattgcacagaccaatgttatggagcattccccatatgttttcttctagaagttttagagtctcacatcttatgtttgtcttcaatcaatttttagttgatttttgtatatggt

SEQ ID NO: 935423 - DNA, 595 bp, Homo sapiens
gatattttctatgtgtgcatcagaatttcaagagatgttgtcaaatgttataataaaattaataagctcaaatcccatgcatgacatttaatctattccaaaagaatgccattatgaaacgtaggaaatatagtaatccctcttatccatagaggatacattccaagacccccagtggttgcctgaaactgtaggtagttcaaatcctatatatactgtactatgtattttttttctatacatacatagctatggtaaagtttaatttataaattaggcatagtaagaaactaacaacaataaaaatgataaaatagaacatttataatgtactgtaataaaagtagatgaatgtggtctcttactctctctcaaaatatcttgttgttatacactcacctatttttagacctyagttgaatgctggttaactgaaaccagggaaaacagccacgtacccggggtgggtggggtggggggcagggggaactaaacatgctttctttattctgaagttctcaaaatcctaataattgagtaactttattctttccctgtgtaactccaggcaatttattgaaactctatgcaccta

SEQ ID NO: 935424 - DNA, 620 bp, Homo sapiens
tctgaccgctgctgcttgattggatgagagttcagagtttactttccttttcagtctcccagtggacaaactctagtgtccctctggcgattgactgcaactggccagggccactccctggtatggcctaaaggccagcaggtcaacagrtttgactgccttgtacagaaggaaggaagggcctctcctgtcctttctggtcaaaggtccctgatccctctgtgtgttgcaattgacacacgttttgtccccctctttctctttctaaattattccatgaagacagccacacctcttgctctggacgtctccaaatcaggtgatctcacgtggcctcagagtttccacattcctgccccctctcctgggctggccccaagctgagttcatcctttacccttttttcctcatacctgggctgaacacccagtgtgacaaggccccagagctgagcactgatggcaaagtgacctgtggcaaagtgtcctttctgataggtgggacacccctttagaaggtgtacccaagtccctcagtgggcatgagtggaaccctcttcctcagtggtataccccaaaagaaggtgcaattcatgtcccagcagatgtgacttgctggca

SEQ ID NO: 935425 - DNA, 620 bp, Homo sapiens
tctgaccgctgctgcttgattggatgagagttcagagtttactttccttttcagtctcccagtggacaaactctagtgtccctctggcgattgactgcaactggccagggccactccctggtatggcctaaaggccagcaggtcaacagatttgactgccttgtacagaaggaaggaagggcctctcctgtcctttctggtcaaaggtccctgatccctctgtgtgttgcaattgacacacgttttgtccccctctttctctttctaaattattccatgaagacagccacacctcttgctctggacgtctccaaatcaggtgatctcacgtggcctcagagtttccacattcctgccccctctcctgggctggccccaagctgagttcatcctttacccttttttcctcatacctgggctgawcacccagtgtgacaaggccccagagctgagcactgatggcaaagtgacctgtggcaaagtgtcctttctgataggtgggacacccctttagaaggtgtacccaagtccctcagtgggcatgagtggaaccctcttcctcagtggtataccccaaaagaaggtgcaattcatgtcccagcagatgtgacttgctggca

SEQ ID NO: 935426 - DNA, 599 bp, Homo sapiens
caggagccttgatccatggtgagttcggaatcctgaaagcatcaactattccacagtaaactaaattttttaacttaaaaaaaaagttttttagagacaaggtcttgctctgtcacccaggctggagtgcagtggcataatcacagctcacagcaaccttaaactcctgggcttaaggaatcctccctcctcagcctcccgagtggctgggatcacaggcacatgccaacatgtctggctaatttttttatttttagtagagatggggtttcaccgtgttgccagactggtctcgaactcctgacctcaggtaatccccccgccttagcctcccaaagtgctgagattacaggcgtgagccactgcacctgatctratttttaaattaaattaaaaattttaataaaataaaaattaaaataaaaacaaaaaacccaaaacaccctaattcacatggcagagaatcttgcctaagacctaaaccagaggttctcaaagtgtggcccagggaccctggggattcctttctgaggacccacaaggtcgaaactattccagtgataatcctaaaatgctgcttgcctttcccacacttgccc

SEQ ID NO: 935427 - DNA, 655 bp, Homo sapiens
agtggaagcttcctgaggcctcaccagaagcagatgctggtgccacgcttctttgtaccagcctgaagaactatgagccaaataaccatcttttcttttcttttctttcctttcctttccttttcttttctcttcttttcttttcttttccagacggagttttgctcctgttgcccaggctggagtgcaatggcgcgatttcggctcaccgcaaactctgccttccgggttcaaatgattctcctgcctcagcctcccaagtagctgggattacaggcatgtgccaccatgcctggctaattttgtatgtttagtagagacagtttctccatgttggtcagactggtctcgaactcctgacctcaggtgatctgcctgcctcagtctcccaaagtgctgggattacargtgtgagccactgtgcctggctaccaccttttctttataaattacctatcctcgggtatttctttctagcaatgcagcaaattaagacaggtaccagccccaccatccatctccaggactgtcttgggcaggacctgtgtcacctccgctggcctctgtaatcagcatctgcacggtgggccttggattgatgtcactctctccctttagattcccctcttggaaggaaaggcaccaagggcctgcc

SEQ ID NO: 935428 - DNA, 695 bp, Homo sapiens
atgattaagataaaatgttaagttttaaagttaagctttatggaaaactcaattatctagaatgatgttcctacatagccaaagaagacagtgagaagaaaggagtcaaaaccaactgttcctagctttaagtggatgtcgttaagtggttgagtctgctttccactttcactctaccttattcattcactctgcccaagaagtacctttatccactctaatggcattcgcagcaacctggatgggattggagattatattccaagtgtgaaggaactcaggaatggaaaaccaaacattgtatgttctcactcataagtgggagctaagctatgaagatgcaaaggcgtaagaatgacacagtggactttgaggactcagggggaaaaggtgggaacggggtgagggataaaagactacaaattgagtgcagtgtatactgctcaggtgatgggtgcaccaaaatctcacaaatcaaactaaagaacttactcatgtaaccaaacaccacctgttccccaagaacctatggaaataaaaaaaaaaaaamccagaagtaccattatccactcattccatgatttcagtgggtgacacaggaagtgcttgttcattcagcatatagtcctagagcacctgctttgtgaccgggaccactccaggccctgggaatacaggggtgtgtggaagatata

SEQ ID NO: 935429 - DNA, 650 bp, Homo sapiens
tgctttgataagagatgatagttgaaagaacatgaaggaaatacaagtctgatcaagtcacatacctgtttcttcaaagacttgccattgctctcttgataaagatcaaagtcctggacaatgtcttgaggccctccgtggatagrtccccctcatgccggctttattccaaatcactttcccatttgatccccatgcagcagcagccacactggtttccttcaatctttccaactcagcatgctcccttcctgccccagggcccttgcacatgtcacttcttttccttggattactcttctcagccttcttgctcctccattactcaatcacttcattggggaagctctttctgacttcccagatcagatggaagcactcacattatctaggacttctccttcatgttaattacctattgctgtgtaacaaattaccccaaacataacataaaaccacaaacatttattactttcgagtttctgtgagttaggcatctgggagtggattaactgggtggttttgactcagagtcgctcatgaggttgcagtcaggttgttggccagggctgcagacatctggagaggctcaaccggggatagaggctctgcttccaagatcaccgacatggttgctagaagtcccctgt

SEQ ID NO: 935430 - DNA, 581 bp, Homo sapiens
tggggtgttccagacataacctagtagccaactacagaataaggtcagtagtcactacaaggaggcctggtaggaggtagaaatgccaaaccaaaactagtgctctgtgccaggaaacgagccctggaataccagtgaaagcaagtctcccatcttggagggcttggcattacggcacaatattaagcaggggctcagacacaagggtataaggkgggatcctatttttagatctagagaacaaaaaaagagcttggtcagaagggtcaagacaaaagtgttgtcttcagagccagagtcaaggccttcatggagccagcaattagagtgatttgatagcaagtcaccaatactactcaatcaggtctcttaaatcttttatgaccaaggacaggaatgatcatagcatctaggaaggaatgacaatgcaggtataatcaaataggaacagattgtttcagacagggggatattcatatgagtgtataaaggagacattattttataggttaagaacatacatactctgactcagaatgttagccattggtattgttcaccaatattttttacttccccct

SEQ ID NO: 935431 - DNA, 577 bp, Homo sapiens
gggactcaggctccttgcaatttctttttgagacttgagtcttgctctgtcgccaggctggagcgcagtggcacaatctcggctcactgcaacctccgcatcccgggttcaagtgattctcctgcctcagcctcccgagtagctgggactacaggcatatgccaccacayccagctactttttgtatttttagtagagatggggtttcaccatgttggccaggatagtctcaatatcttggcctcatgatccacctgcctcggcctcccaaagtagcaactgtaccatctctaaagatcttgaagtcattcagcagatcttcttgcatttgaagagcagatgatgaccagcctccttcttctaggaggctacctctgatgacaaggctggtggatccataggagggaacatggaaaaagttgtcctccagccaggaatatctgcttggattgctgcattttgggatctatttattatctagcctactctgaccaggctgaaggtctctgaaacagtgcaagaagttggtttttctctaaaagacctattcaagccttccactttcacatggctctgt

SEQ ID NO: 935432 - DNA, 701 bp, Homo sapiens
cctggtttccagttgtggttctaccactgtgaactgtggcatcctgggcaagtcactttgctcaggctttttattttgcaggatttttgtgtcattcttgctcagaggccatggtagtcttctccgtatcattccaatttttagtatatgtgctgctgaaacgagcacttttttctttcttgcttgcttgcttttttttttttttttytttttttttttttgagactgggtctcactctgtcacccaggctggagtgcagtggtgcgatcacagctcactgcagctttgacctcccaggctcatgcaatccttccatcagcctccccagtagctggaactacaggccttttctggagctggaagataaagaaaaccaacatgaaagcattgaatagacaaatccagagaccagcctaatgattctatttagtatttacccacaggacaatgtctctggattgtatttatttatattgtctcccaatggctttattgagacataattcacagatcatacaattcaccaatttagaatgtacaagtcagtggcttttcatatattcatagagttgtgcagccatcatcacaccaattttaaaacatttttataacccaaaaaagaaacctgccacactccttatttatcagccatcactcctcagggccttccctgattccttccagccttaggcaaccaatg

SEQ ID NO: 935433 - DNA, 767 bp, Homo sapiens
atttgcattccctgatggctaatgatgttgagcatcttttcatgcacttattggccatgcatttatcttccttagagaaatgtctatttagatttttgcccattttttagttatttggtgttttggtgttgagctgtgatacgtgtaatattatctgcacattttttctcttattcattgtaggcttgtctcktcattttcttgatggtgtctttggaaggacaaaagttttttagctgaattgtgtgcaattaatctatttttttctttaattgctcatgcttttggtgtcatatccaagaaaccattgtcaagtccaaggtcacgaaaatttacacccctgttttcttctaagagttttattggattaactcttacgttttggtcttttctctattctgaatttgtacacattgtgagacaggtccagcttcattttttttttttgacatgtgtatatccagttgtcccaggatcatttgttgaaaagactattctttctccactgaatggtcttgacacccttgttgaaagtcaattaactgtaaatgtgaaagtttatttctggactctcaattctactacactgatctatatacatctaccctatgccaggaccacactattttgattactatggctttgtacacatgttgaagttgggaagtgtgactcctccaattttgttctttgttgaagattattttgttttttctgggtttcttgaattttgatataaattttacaattaacttgtcaatttctgc

SEQ ID NO: 935434 - DNA, 708 bp, Homo sapiens
gctgctgcagtgctcctgagcagcacaggcctgatggagcttctggagaagatgctggccctcaccttggcaaaggcagattctcccaggactgcactcctctgctctgcctggctgctcactgcctccttctctgcccagcagcacaagggcagtttgcaggytagtctttaactcctgtggctttgaggcatggggtggcactcaaaggagtgttgaagatcctgagttctggtcccagctctgggggcttattagctgtgtgaccttggcaaggtatttaccctttctgagctcagtttcctttcctacaaaatggggaaaacatctcaggattgttgtgaggttgtttcatattaatccacttaacacataaggtttacctacactccaggctctattcttggcacagaggaataaaaaatgaatatagcatgtgtcctacccttagggaacttgtagtctttaaggataagattgtactcagcaaagatagtgggagaaggcattccaagtagagagaacaatatgagcaaaggcatgaagctgcacaaattcaggacatgctctgtatatttggggagtggtgaggtgctctgtgtgatgagaaggtggggaatgaatggagcagaaaagaccagacggggaggcagaagccagcctgcgaccttaaagtgcagcatggcaagccgtggaatgccacacatg

SEQ ID NO: 935435 - DNA, 639 bp, Homo sapiens
tccattcttttgttattggttcccatccagagcctcccagctagttgtctcaacatcccaggggagaaagcatagctctttgtccattggtttatttattcaatttaggaataatgagtgtattgttttatatgaataaccatacttatttaaaagatcaaactaaactaaatagtacaaacaagcgaaatctctccccaragtctactatggtgctgtgcaacagaaatataatacaagccacaaatcgaattttcaatttcctagtagcttttttaaaaagtaaaaagaggggccaggcacagtggctcagcctgtaatcccagcactttgggaggctgaggtgggcaggatcacctgagctcgggaagttgaggctaatagtgggctgagattgtgccactgcactccagcctgggtgacagggaaggagaccctgtctcaaaaaaaaaaaaaaaagaaaggaaaaacaggtaaaattaatttgatgatagtttatttgagtacagtatatatatcatttcaatatataattaatatgaaataaaaactaatgcaatattttacttttctttatattaagtctttgaaatctgatgtgtactttaaacatttatagcatataacaactaatattag

SEQ ID NO: 935436 - DNA, 751 bp, Homo sapiens
tgtacagagtcactaaactccctgcctctcatgagtggtgaatcaggagtatcaaatgcattaattttgtataactctctaagcagtttatgccaaggactatcagtatgctccatactattagaagtagagtccttagcattttggggtctaatcatattaagcagtcaactctagaaaccccaaaaccagtgaaagaactgtatccttaatattctgtttctctagaaccactcctggtaccaaaatctgtattagtcagggttctctagagggacagaactaattttatatatatatagtaacatatgtggtatatatggtaacatatgtggtatatgtggtaacaaattcttaatgtttacttgcctgaaaaataatttatttctccttcttttatgaatcttagtttacgtgaacatgaaatatatgtgtgtgtgtgtrtatatatatatatatatatatatatatgtgactttattaagtattaacttacatgatcataaggtcccacaagaggctgtctgcaagcatatatatatatgagtttattaagtattaacttacatgatcacaaggtcccacaagtggctgtctgcaagctgaggagcaaggagagccaatccgagtcccaaactgaagaactcaaagttggatattcaagggcaggaagaatccagcaggggagaaagatgtaggctgggaggctaagccagtctggctttttcacgttttttctacctgctttata

SEQ ID NO: 935437 - DNA, 572 bp, Homo sapiens
aatcatattaagcagtcaactctagaaaccccaaaaccagtgaaagaactgtatccttaatattctgtttctctagaaccactcctggtaccaaaatctgtattagtcagggttctctagagggacagaactaattttatatatatatagtaacatatgtggtatatatggtaacatatgtggtatatgtggtaacaaattcttaatgtttacttgcctgaaaaataatttatttctccttcttttatgaatcttagtttacgtgaacatgaaatatatgtgtgtgtgtgtatatatatatatatatatatatatatatgtgrctttattaagtattaacttacatgatcataaggtcccacaagaggctgtctgcaagcatatatatatatgagtttattaagtattaacttacatgatcacaaggtcccacaagtggctgtctgcaagctgaggagcaaggagagccaatccgagtcccaaactgaagaactcaaagttggatattcaagggcaggaagaatccagcaggggagaaagatgtaggctgggaggctaagccagtctggctt

SEQ ID NO: 935438 - DNA, 622 bp, Homo sapiens
ttcagggctcaagggctctttagtcagtatgtgatgcttcatgccagaactggattttttccattcgagacagtggtttctcttctggcccagagtgtttctagaaatgttatctgtgagctaggtcctggaaagggaaccccacgaccctgactggtgccctatccttctgtggctgagctggtgtctaagatgcaagacgaagtcatttttactcttcctttttctctcctcaagtagaattaaggagtcttttttgaagctgtgagctgtgcagcctggagttggtggaaggttggcaaaagcactttctcagcttccctgctcrtgactcagtaggtcgcatgccccacaagtccactaaccctgagaccagtacagtacttgcactcacctaggagttgcagttcttgtgggctagatggcctttgaagtttatttgtggctccagaggactttagcctgtggtggcaaacttggtggaactcaagttctgactgctgggattggtgattcccctctggctaggactgttttaaatattccctccatgggtgcaagtcagctaagttcaaccaagttttgctttctgctataacacagcagcactgagttcaatgca

SEQ ID NO: 935439 - DNA, 609 bp, Homo sapiens
ttgtctattcaggctctttttgattgcatataaatttaagaataccctttgctaattgtgtgaagaatgacattggaatagtaataggaatatcattgaatctttaaattgctttgggcagtatggccatttgtaaaatacttatttttccaatttatgagcaacaaatgtttttcatttatttgcattatctggtttattttagcaatgttttgtcattctacttgtagaggtcttttacctccttgattagctgtattcctaggtattacattttccttgtggctattgtaagtgggattgggttcctgatttcactctcagcttgaacttttttttttgtatatagaaatgctactgatttttatacattggttctgtatcctgaaacttcattaaagtagttgatmagttctaggggccccctggtagagtttttagaattttctttgtatagaattatattatccataagtagagatagtctgacttcttctatttatatttgaatgcatttgcttatttattttgcctgattttcctaagtaagacatccagtactaggttaaatatgagtggtgagattaggccttcttgtcttgttccatt

SEQ ID NO: 935440 - DNA, 566 bp, Homo sapiens
agcacttactaaatataataactcacaattccttaatttttgttcttgctttcaactaaggaccaatgagggaaagccatacatgtactcccaaccaatcacatatgatgcccctcttctagttagcctgcccacagcttccccatgccacagcttccagttaaggcatacctagaaccttctcttttttccactatagcgctttcccactcctctgcctgttgtgagtctctgccaaacacaagtgatgatggtggattctcttggtatagcaagtgctgaataaatagccttcacttgttatcatgttggtggtggtatgggttgaactgtgtcccatcttctccccaaaaaagatatattgaactccttatccccagtacctcaatctgtgatcatatttggaatcagrgtattcacagaggtaaccaacttaaaatcagatcaacaggctgggcctagcccaagataactggtatcctcataaaaggggaaatttggacacatggataggcacatgcagaaggaaggtgatgtgaaggcacacagggaaaatggccatgtga

SEQ ID NO: 935441 - DNA, 626 bp, Homo sapiens
gcctgtaatcccagcacttagggagaccgaggcgggggaatcatttgaggtcaggagttcgagaccagcctggccaacatagtgaaaccctatctctactaaaaatataaaaattagccaggcatgatggtgcgcacctgtaaccccagctacttaggaggctaaggcaggagaatcrcttgaacccaggaggtggaggttgctatgagctgagatcgtgccactgcattccagcctgcgtgaaagagtgtctcaaaaacacaaaacaaaacagaaagaaagaagccagacagaaaggaaaagttactctattactccatttataataaatcttatgagtcacaactaatgtaatagaaattagagccgttggttgactaggcccaggtcgtgggtgcactgattgcaaaagaacatgtgggaaatttggggagaagaaaatgttctggttgaggtggttgtgacattgtgtgtgtgtgttgtgtgtgtgtgtcaaaatgatgaaactgtataacttaaaatgactcttttgtacataagttatacctcaataaagtttatgcacacacatacacaaaacaagaaaaataggattagtaagatagaaaattcaaagtatattgaat

SEQ ID NO: 935442 - DNA, 626 bp, Homo sapiens
gcctgtaatcccagcacttagggagaccgaggcgggggaatcatttgaggtcaggagttcgagaccagcctggccaacatagtgaaaccctatctctactaaaaatataaaaattagccaggcatgatggtgcgcacctgtaaccccagctacttaggaggctaaggcaggagaatcgcttgaacccaggaggtggaggttgctrtgagctgagatcgtgccactgcattccagcctgcgtgaaagagtgtctcaaaaacacaaaacaaaacagaaagaaagaagccagacagaaaggaaaagttactctattactccatttataataaatcttatgagtcacaactaatgtaatagaaattagagccgttggttgactaggcccaggtcgtgggtgcactgattgcaaaagaacatgtgggaaatttggggagaagaaaatgttctggttgaggtggttgtgacattgtgtgtgtgtgttgtgtgtgtgtgtcaaaatgatgaaactgtataacttaaaatgactcttttgtacataagttatacctcaataaagtttatgcacacacatacacaaaacaagaaaaataggattagtaagatagaaaattcaaagtatattgaat

SEQ ID NO: 935443 - DNA, 532 bp, Homo sapiens
aatgttattgaccaaaaaccatttgagacaaagtaatcttgcctgctatcactacctctaagcaacaggaaataagaatagaaaaatgaaagttatgcgtattggaaagtaaacaacccaaaacttattgtgaaagaatgattgtcttgatataaatttaaaaataatattcaggaccgggcgcagtggcacacacctgtaatcccagcactttgcgaggccgaggtgggcggattgcctgaggttaggagttctagaccagyctggccaacatggtgaaaccccatctctactaaaaatatatgaaaacaacaacagcagcaacaacaaaaacaaaaaaccggggtagtggcatgcacctgtaatcccagctactcaggaggctgaggcaggggagttgcttaaactggtgaggtggaggttgcagtgagcagagatcataccactgcattccagcctgagtgacagcgagactctgtctcaaaataataataataataataataataatagtaataataataatcatgca

SEQ ID NO: 935444 - DNA, 593 bp, Homo sapiens
cttttgactaatcagttctcatgggaactaatagtgagaactcactcattcttgtgaggatatcacaaagctattcatgagggatctgctcccatgacctgaacacctccctttaggccctacctccaacatgggatatcaaatttttacatgatatttggaggggtcatatatccgagctacatctttttacccctggcaccccaaatctcatgyctttctcacattcaaaatacaatcattccatctcaaccatccccccagagtcttattccagcaccaactgaaaaatccaaaggccaaagtcttatctgaagctctaagataaaactcttagatacttctaagatgcaatggtggtacaggcattgggtaaacacttccattccaaaagggagaaatgggccaaaagtaacagacctcaaacatgtcagaaacccagcagggcagatattaaaacttaactctccaaaatagtctttgactccatgtttcatgtcccatctagggcatactggtacaagtgttgggccaccgaagcctcaagcagctctgtcctggtggctttgcagggtccagatcacatggctgcg

SEQ ID NO: 935445 - DNA, 630 bp, Homo sapiens
agtgctctaagtggcaggcttttcttccttctgcttagagagagttaatggtgtcagatggaacctccctacacttcctggtgagctacctaaatatatatctttatctgcacttttaccttctttttcccagtctcagaggcagtgttcttctgtcttctgcatatgacattctccacctgtgctgccttgccatctcaacccagccactgttcaatctgttgttagagactctcccttactcttgaccacttccccccccagaaaggaaacctgttctggtgttatcagtagtgagaaaactcacccccaatcattcatttcccttgaatcactttcctctttcatcttcagagccaagctcctcatttccactcattcacttttcatcatctctaytagtttgttctcatgctgctaataaagacatacctgagactgggtaatttataaagggaagaggtttaattgactcacagttcggtgtggctggggaggcctcaggaatcttagaattgtggcagaagaggaagcaaatacgtctttcttcacgtggcagcaggaaggagaagtgccgagtgaatggggaaaagccccttataaaaccatcagatcttttgagaacttact

SEQ ID NO: 935446 - DNA, 625 bp, Homo sapiens
ccgactgagccctgggaggtagccctggcatatagctccctgacatgatttgtcttccattttggggtgtcatatatgaagggaggtgactgttgtgatggtgctggcaggactgctgtccctgatgtggggtgggctgagttaggcctgaaatatgggcctccaggctgagtcctgccctctccaccacatccagggctgactgacacctctagtcagcccattctggccccttccccacatgccaggacaatgtagtccttgtcaccaatctgggcagtcagagttgggtcagtgggggacatgggattatgggcaagggtaactgacatctgctcagcctcaacgtacccgtctcaaatgcggccaggcggtggggtaagcaggaatgaggcaggggtggggttgccctgaggaggatgatcccaacgagggcgtgagcaggggacccragttggaactaccacattgctttattgtacattagagcctctggctagggagcaggctggggactaggtaccccattctagcggggcacagcacaaagctcgtagggggatggggtcaccagaaagctgacgacacgagagtggctgggccggggctgtccggcggccacgga

SEQ ID NO: 935447 - DNA, 710 bp, Homo sapiens
agctgggactacaggtacacgccaccatgcttggctaatgacagtcttttttttttttttttttttttttttttttttgagacagtcttgctctattgcccagactggagtgtagtggtgtgctcttggctcactgcagcctctgccccctgggttcaagtgattcttgtgcctcagcctcccaaatagctgggatcacaggtgcacgccaccacacccggctaatttttgtatttttaggagagatgtggttttgccatgttaggctggtctagaactcctggccccagctgatctgcccacctcggcctcccaaagtgttgggattacaggcgtgagccactacacctggcccacagtcagttcttcatgcttaaaaagaacactcttcccatggcctctaacagggagggcaggttttctgaggctcagacagagctggactatgttamtcctttcgacctctcaggaacctgagacccctaggtctcccatccccaggctggagggcttctctcctcttccagcccatgtgcagaaggggattctgatggcccacgtaggacagatggattgtaccaaaggtccctgtggaacgcttcatgggccatctgatgtggaaaggtctcaaagacaaacagcagtttcctaggaatcagtccagtaaaatttcaccagaagccagaagtggtggcagccttgcccctcct

SEQ ID NO: 935448 - DNA, 531 bp, Homo sapiens
ttagatctaatctaaagactcaatttctgtgtggtgggggttcacctccgcttttctggagcctctgagaaactcctgatcctgcacacccccttgtaaagcctggccatgcatcctgcaccccccatgacacagggagccaagcctgacatttttgagaaggtgccacctctgatccatcagagctgtagaggagggaagctggaccctggaagagactctraagaaaaggagagaaaacatgtagtgagaggagaatggagtgggaaaagtacaaaaatactgacctttttcttatctgtgtctccttcctttcagaatggaaaaatggccctcttcaagcctggtgagtaaatcactgcatgttccctggaccaacaacctgagggactatattcctttttccttttttcttctccaactcttgtgatttggagcagaaaagttcccttgacttccttcgtgggtaggaagacgcataaagggtggaggtgaagggaaggagacacacactgagtaatactgcaggga

SEQ ID NO: 935449 - DNA, 571 bp, Homo sapiens
ggttagaaatacattagccaaaatggaaaacttcataattcatgaggcattgggtagaatactcaatggtcctgcctctatggtcaggaataaataggctgagactaaatgctgttctgggcccacttaacaaatcttaaaaggcctgaaaggaacacactgtttccagtaacttaactgcatcccagaataaggttcaagaattttttttttttgaggcggagtttctctctgttgcgcagcctggagtgcagtggcgtgatctcggctcactgcaagctctacctcccaggttcacgccattctgctgcctcagcctcccgagtatctgggaccgcaggtgcccgccaccacacccggctaattwttttgtatttttagtagagacggggtttcactgtgttagccagaatgatctcgatctgctgacctcgtgatccacccgccttggcctcccaaagtgctgggattacgggtgtgagccactgcgcctggccaagaatattttatatgaatataaaaatattcagaacccaataaggtaaaattcagtgtgtggcatccaatcaaa

SEQ ID NO: 935450 - DNA, 439 bp, Homo sapiens
ttgtttcaaaaaaagaaaaaaaaaatcagaagctatacatgttactaggtaagaattaggtgataaagaaacgaagcctgcagttatggaattcatttttgttgagtttgcttgggaaagaaaagataaactgaatggtggccataaagattcayattgtggagtaaatctatttggaaatataggttatgtatttctatttaaaagtactgggaatggagcccgtagatccaaaataaaaaattgtaaggactgaaaagtacggtgataattatgagatcatggtcctaaaggaagtagaaagagatgtaattcagagtccagttcgagaggtggatttcatagaaaggtaggaaggacatctcctcaaaaaggggcataacatagaatatatattgcaacaattagtgacataacaaagcataagaaagtccagaaa

SEQ ID NO: 935451 - DNA, 439 bp, Homo sapiens
ttgtttcaaaaaaagaaaaaaaaaatcagaagctatacatgttactaggtaagaattaggtgataaagaaacgaagcctgcagttatggaattcatttttgttgagtttgcttgggaaagaaaagataaactgaatggtggccataaagattcatattgtggagtaaatctatttggaaatataggttatgtatttctatttaaaagtactgggaatggagcccgtagatccaaaataaaaaattgtaaggactgaaaagtacggtgataattatgagatcrtggtcctaaaggaagtagaaagagatgtaattcagagtccagttcgagaggtggatttcatagaaaggtaggaaggacatctcctcaaaaaggggcataacatagaatatatattgcaacaattagtgacataacaaagcataagaaagtccagaaa

SEQ ID NO: 935452 - DNA, 546 bp, Homo sapiens
agtgcctgcacgcatagttccccgggaattttctgaatttgaattctcatggtatttcaagtggctcagttgtctctttcttttcttttcttttcttttcttttctttttttttttttgagtcagagtcttgctctgtcacccaggctggagtgcagtggctggagtgcagtggcgcgatctcagatcactgcaagctccgcctcccgggttcacgccattctcctgcctctgcctccccagtagctgggactacaggcacccgccaccacgcccggctacttttttgtatttttagtagagaygaggttttaccgtggtcttcatctgacctcgtgatccgcccgcctcggtctcccaaagtgttgggattacaggcgtgagccaccgcgcccggccagttgtctctttcttttgcctactgccacacacgtaccaccaaatcctgcactccaagctgcttctacaccctggactcccaacctccagttagacaatccacatcttcccacacctgcctcaggctccatcaggctactgtgcctcc

SEQ ID NO: 935453 - DNA, 690 bp, Homo sapiens
atccacatcttcccacacctgcctcaggctccatcaggctactgtgcctcctgcagcaaccaggccagggggaatctggattcctattacacttctgaggaaggtggtcagggagtgtggaggatgtgggtgggagggggtgaggttgagggcaggagtacactgtggtcttctgtcttctacctcattggcccaggtgctgctctccctccggttgtctgctttcagccctgcctgggaaatcaggccggcgccctgatcttcctgactctcattytgtgaggaacctgaacggatgagccatcgctcttgtcccacacgttctgtccaaaaggtgccctcctctctgcttgctcgggggcctgccctctgagctctggcactcaggctgggatgccgcccagtacagaggctctgcagccctgcaggggtctgactgttccacaccagcaggataaaggccacagggcatgctgtggtggaaaagcattcagaggtgtgggctgaaggcctctctttccacagtccctttgaagacaccatggaagtaggcacccccttgacagacaaggtggcccaaggcctggcttcacatgcaggctcttgggtcccagcgggtcctctctgtgcctggtatagccaactgcttcacgcatcttacccggtttcctctcctccacaacccaagct

SEQ ID NO: 935454 - DNA, 739 bp, Homo sapiens
actccaagctgcttctacaccctggactcccaacctccagttagacaatccacatcttcccacacctgcctcaggctccatcaggctactgtgcctcctgcagcaaccaggccagggggaatctggattcctattacacttctgaggaaggtggtcagggagtgtggaggatgtgggtgggagggggtgaggttgagggcaggagtacactgtggtcttctgtcttctacctcattggcccaggtgctgctctccctccggttgtctgctttcagccctgcctgggaaatcaggccggcgccctgatcttcctgactctcattttgtgaggaacctgaacggatgagccatcgctcttgtcccacacgttctgtccaaaaggtgccctcctctctgcttgctcgggggcctgccctctgagctctggcactcaggctgggatgccgcccagtacagaggctctgcagccctgcaggggtctgactgttccacaccagcargataaaggccacagggcatgctgtggtggaaaagcattcagaggtgtgggctgaaggcctctctttccacagtccctttgaagacaccatggaagtaggcacccccttgacagacaaggtggcccaaggcctggcttcacatgcaggctcttgggtcccagcgggtcctctctgtgcctggtatagccaactgcttcacgcatcttacccggtttcctctcctccacaacccaagctcc

SEQ ID NO: 935455 - DNA, 608 bp, Homo sapiens
tgaacccattgagctattggctcatgttccctatgttctattaagtatcatgagcagaaattgagctctttggcttttacccactgagtatggctataggacaggtctctctctctctctctctctctctctctctctctctttctctctcattctttgcatcattattttttgccatcagtgtgggtttttggtttkgaggttatgaagtgaatttctggggacaatctctgttgggtcgtgttaacaaggatccagtccctgtttggtgatacatgacagctaatctggtctgtgagtcttctttattgtctatttattgtcctgagaataatggcatttcctgatatttgagactgcagcaatgataagttgttcagatcttgtctttccaatgtttggtaaacattttataggcccaatttttgtcaatatctgcaagagtggcatctctgttacaagagtgatcttactactcgatgtcccccctcccacccaacttcatttcctaggggctcttggctttaacgaatttactgtatctaaaagacatcttagtacaggaagaaaactaaatctgtagcatgtaaggagcagttttatttgat

SEQ ID NO: 935456 - DNA, 645 bp, Homo sapiens
cctccaccagccggggtcccctcgctcagcccatgagacaaataaatgaatacataaataaataaataaataaaagatggagtcttgctctgtcgcccagggtggagtgcagtggtgcgatctcggctcacttcaacctctgcctcccaggttcaagtgattctcctgcctcagcctcctgagtaactgggattacaggtgcatgccaccacacccggctaatttttcgatttttagtagagacgggatttcatcacgttggccaggctggtctcgaacccctgacttcaagtgatccacccgccttgacctcccgaagtgctgggattacaggcatgagccactgcacccagccagaagtgggcattaatatgcaggcgccgtatagggcaacatctgtgtgcacctcttacaaatcttaatgctgtgtatatgaggggagtccttcgtgtccccctggggatgtttgaggttgcctgtatgtgttatgtgtgtgcatatytttaagctcagatatgcataggcggattgacacctctgtttgaatgtattcccatgagctcatgccattaattcaccatcacaagaaatatttactgagcgtgagccatgccattccacagacaccattatagcactaagata

SEQ ID NO: 935457 - DNA, 870 bp, Homo sapiens
aaggagctggagcagtgggaggcggcatggaggcgcgaggaggaggtgggcatgggggtgcagggaggccggcgatataagaggaagataatgcacaattatgctagtgagactctcttttccaataatgtttgcacttctcaatactacatttaaaaaggaaataggagcacttgaacggttaagtaagaagatgaacaaaattgaacagaggaaaaataactgtctgaagacatgttgaaaatacatttaaagacagtstgtctgagacaggagctgagctggccaatccatcttttaaatcattgaacatcattcaggtgtcaagtatttgacctggagcctggaaggggaggagagagtccaaaaaaaagtcaaaatataaagaaaaaaaattaaagaacttgtcccacaaatcaggcaaccaaggtctaaacttataccctctgcctgggtaaattgttgttgcttctttctgtgactcttaaaagatgtaccatatacctcatttaatgactttgctttattcatgaaaactctatccccatgggaaaagctgttaaatgaaaaaagatttcttttaagtagaaaaattatgaaaggattccttccaaccctccatacccaaaatatctcaaatgaattatgtatctatcaattatcaatatatatcaaaatataccaattaaaaatatcagttaaacaatacgtcaattgaactatgaaagcaagcttatttaagtagcaaagaataacgtgaaggttagtaagtatagcttatacttaaaatacaatgaattgaaagctcatggcacttcatagagtaggaagaagaaacttaatagaaagtggtagttgggcgagaaggac

SEQ ID NO: 935458 - DNA, 730 bp, Homo sapiens
ggagcagtgggaggcggcatggaggcgcgaggaggaggtgggcatgggggtgcagggaggccggcgatataagaggaagataatgcacaattatgctagtgagactctcttttccaataatgtttgcacttctcaatactacatttaaaaaggaaataggagcacttgaacggttaagtaagaagatgaacaaaattgaacagaggaaaaataactgtctgaagacatgttgaaaatacatttaaagacagtctgtctgagacaggagctgagctggccaatccatcttttaaatcattgaacatcattcaggtgtcaagtatttgacctggagcctggaaggggaggagagagtccaaaaaaaagtcaaaatataaagaaaaaaaattaaagaacttgtcccacaaatcaggcaaccaaggtctaaacttataccctctgcctgggtaaattgttgttgcttctttctgtgactcttaaaagatgtaccatatacctcatttaatgactttgctttaytcatgaaaactctatccccatgggaaaagctgttaaatgaaaaaagatttcttttaagtagaaaaattatgaaaggattccttccaaccctccatacccaaaatatctcaaatgaattatgtatctatcaattatcaatatatatcaaaatataccaattaaaaatatcagttaaacaatacgtcaattgaactatgaaagcaagcttatt

SEQ ID NO: 935459 - DNA, 563 bp, Homo sapiens
ccaaggctcacttgttagcttgcctggggaaaggggaaagtgggatgagactgggtccccaaacacaagggaggctcaccaggaggagaagcactgccgggcagtcagtatccactgctcctttactagagaccccscgcagaaatgctggccctgcctagaggagtggggaattaggacagggaacagactcctgggacagatgctagacctgccatcttctggctaggacctctgggggcagggatagattcccagcccccagtggcataaccacagaggacacaacctcagctcctctctgtgggagacaggcagttgtgcctcaccgattccgcaagctgactgtccagggtgagttgcccggatggcccccagccacgcgcagcttggaacgacgctgatccagccgatccaccctcttgccacacttctcaaactgcacctggtctgtaggatggggtgggctggatgaaacccagactgtgtggatgtcgtgggctaaagggcctgacccataactggcccaactcgtaacctgggggggtccaggattgatggcg

SEQ ID NO: 935460 - DNA, 446 bp, Homo sapiens
gttcactggggttaagggagccagcctttggtggtgagggctgaggtaaggtcatggggcaagcgtcactagtgctcaccgcagcgtcgcagggcacagtagtcgaatggggtccttgggtccatcgtgtagcaccagggcccatggctatcccyatctgggtctggcagaagttctcctccagttgtgcatgcggttcggaggtaaatgtgaaccgaggcgggagcgggagcaaaatcgtggcagggtagtctcaaccatttccaggctctggtcccagacatcaaagcatgccgccccagggttagggccctggcggggccgggagcaccagggactcactgcagcttgtgcggcgtctcagcggaccagcgctggcactggacacccttgcgggtcttgctgaccgtgccgcggtactgctcccccgcgccgtggtagcagtc

SEQ ID NO: 935461 - DNA, 658 bp, Homo sapiens
tcaaccatttccaggctctggtcccagacatcaaagcatgccgccccagggttagggccctggcggggccgggagcaccagggactcactgcagcttgtgcggcgtctcagcggaccagcgctggcactggacacccttgcgggtcttgctgaccgtgccgcggtactgctcccccgcgccgtggtagcagtctgcggccggtgcgggcagccatcaggccgagacctcgccccggccctccggttccaggcttccagccccggctctgtagcccccaagcttgggcctcaccctggggccgcacgtcgtctgtacaacgccggatctggtagcaaaagcccacgcgcgtgccgggccgcagggtgaagcaccagggcgcctctgagccgtcgrggttccagcagaagttctcccgaaggtctctaagcaggcgctccactcagccctagcccgccagcctccagccctaagcccgtgactaccctcctcccgtctcacccgcagcagcacgtcccaacgcccgcccccccgcccacctcacttgcacgcgtatttttctggcgtaaatcggtgctgatgtgggatttgcgcgtcccaacgctggcaaggtacgccgcggtggtggtattggctgtgccccggtagccctcacccttc

SEQ ID NO: 935462 - DNA, 773 bp, Homo sapiens
tcacagatgtgccctgtctggagaactgtccttagctgagggagctgactggctggaactaccactgggggcaaccgcaactgatgacgggttgacacagggtgcaaaagacccatctcactgcctgaggtgggacagccatgtggtgccacacacgaggctccagagctctccttgggtgcactgagcccacgccctggccttgcttcttgcccgccctccactgcttccctgactccccttctcctgagcctatgtcctccacagtcccaaacatccccacacgtccccatctcagactcagcttctagggagcccgacctatrtggaatcttctggaacagccatcctcacacacctgccatcctgtagattacattccctgtgtgaaggcctgattccaaaaaggccctatcaccaggctcccagcaaggcagggccagtgtcttggcacctggcaacccaagctactgccacgaactcatcccaattcttcccaggtctgctccaggtcgtcatgaagtccgttctctctacctaatttccacatctctccctgctcaggtttgattaacagaaggttataaacaaattccagaaagaagcaaaaccagggtctccccggggtagacacagtctattgacagccagcaaattgttttgcaaccaatatttttatatttttattttgtgtagataaataggactgaactaattagtgctcctttgctttcctttttcaggccttgtactacagtgggagtctcttggcc

SEQ ID NO: 935463 - DNA, 789 bp, Homo sapiens
agcctgagctgactaagacaacataaaaaaatgaaagaaagcatgaatcaccaataccaagaatttgtatttacattaaaatgataataaaggaatgttatgaacaactttttgccaacaaattcaataactcaggcaaactcaagaaatttcttaaaatatgtgccaaaactaacagaagaggaaatagaagtgctgagtaaccctatatctaatatttaaattgaatttgtaattaaaaaccttttctgcaaaggaagctctggggccagatggcaaattctgcccaacatttgtgaaataaataatacaaattttccacaaattctttctgataataaaggtgggggcatttcaaaatttattttgaggccagcataactctgacatcaaacactgacaagcacattagaaaaaagaaaattaactcaagaacatggatgcaaaaaccactaaaaattattaaaacatacaatctagaaatacatcataaccaagcaaaaatgatcaggaattcaaggttattaacatttgaaaatcaatcaacagacccacaaccaacatyatattgaaggggcaaaagctggaatcattccccttaaaaaccagcacaagacaaggatgctctctctcaccactcctattcaacatagtattgaaagtcctagctagagcaatcaggcaagagaatgaaataaagtccacttaaataggaaaagggaagtcaaactatctctgtttgcagacaacatgattctgtatctagaaaattccatagtcttgatcaaa

SEQ ID NO: 935464 - DNA, 592 bp, Homo sapiens
ctgataaacaacttcaacaaagtttcaggataaaaaaatcagtgtacaaaaatcactaacattcctatacaccaacaacagccaagccaagagccaaatcagaaaggcaatcccattcataattgccacaaaaagaataaaatacctaggaatacagctaaccaggaggtgaaggatctgtacaatcagawttacaaacactgctcaaagaaatcagagaaaacacaaacaaatggaaaaacatttcatgctcatggataggaagaatcaatatcattaaaaaggccatactgcccaaaggaatttacagattcaatgctgttcctatgaaactaccaatgtcgttcttcacagaaatagaaaaaaaaactattttaaaattcatatggaaccaaaaaagagcctgactagcccaggcaatcctaagcaaaaagaacaaagctggaggcatcacattatccaacttcaaaccatactacaaggctacagtaatcaaaacagcatggtgctggtacaaaaacaggcacatagaccaacggaacagaataggggcccagaagtaaggccacacacccatgaccatctgatcttc

SEQ ID NO: 935465 - DNA, 592 bp, Homo sapiens
ctgataaacaacttcaacaaagtttcaggataaaaaaatcagtgtacaaaaatcactaacattcctatacaccaacaacagccaagccaagagccaaatcagaaaggcaatcccattcataattgccacaaaaagaataaaatacctaggaatacagctaaccaggaggtgaaggatctgtacaatcagatttacaaacactgctcaaagaaatcagagaaaacacaaacaaatggaaaaacatttcatgctcatggataggaagaatcaatatcattaaaaaggccatactgcccaaaggaatttacagattcaatgctgttmctatgaaactaccaatgtcgttcttcacagaaatagaaaaaaaaactattttaaaattcatatggaaccaaaaaagagcctgactagcccaggcaatcctaagcaaaaagaacaaagctggaggcatcacattatccaacttcaaaccatactacaaggctacagtaatcaaaacagcatggtgctggtacaaaaacaggcacatagaccaacggaacagaataggggcccagaagtaaggccacacacccatgaccatctgatcttc

SEQ ID NO: 935466 - DNA, 589 bp, Homo sapiens
atgctgttcctatgaaactaccaatgtcgttcttcacagaaatagaaaaaaaaactattttaaaattcatatggaaccaaaaaagagcctgactagcccaggcaatcctaagcaaaaagaacaaagctggaggcatcacattatccaacttcaaaccatactacaaggctacagtaatcaaaacagcatggtgctggtacaaaaacaggcacatagaccaacggaacagaataggggcccagaagtaaggccacacacccatgaccatctgatcttccacaaagctgataaaaacaagcaatggggaaaaggttccctattcaataaatggtgctrggataactggctagccatatgcagaagattaagctggaccccttccttacactatatacaaaaatcaactcaaaaccccaaattataaaaaccctggaagacaacctaggcaataccatcctggacgtaaaagtgggcaaagatttcatgacaaagacatcaaaacaattgcaataaaagcaaaaattgaaacacgggatctaattaaacttaagagcttctgcacagcaacaaaacacaaaaaaactatcaa

SEQ ID NO: 935467 - DNA, 616 bp, Homo sapiens
cctatgagaatctaatgctgccactgatctgacaggaggcagagctcaggcagtaatgctcagtcgcctgcccactgttcacctccggctgtgcagtccagtttctaacctgtctgtggcccagggactggggactcctgggttaaaggaatgaaaggatggaggagagaggaagctcttccaggcagagaaaacagcaaaagcaaaggcaaggggtgaggagggcagtggaaacagtttgattgctggggcagagaaaggtaaagagaaagatgaagcagagagaggtaagtaggagatggggtgtggtgartcttgtagtccatgctaaggtgcgaggacttgatgctcagggcagccactgcaggctgagaaccccagaataacctggtcaagatcagtgttaatccctctgaagagaagggatgtaatgtcactgcttgggttcgtgctcgtgagggtttagttcctgaacctacatctcatccccctggagccacccctcttgtggcagtgaagttagttattagccaaagagtacatatgccctaagcacaaggcacatcctcccaagcaccttcccggggctctaatttgcagaatatgaagcaggatg

SEQ ID NO: 935468 - DNA, 790 bp, Homo sapiens
agtctggtggggacgtggagaacctttatgtctagctcagggattgtaaacacgccaatcagcaccctgtgtctagctcagggtttgtgagtgcaccaatccacactctgtatctagctgctctggtggggccttagagaacctttatgtcaagctcagggattgtaaatacaccaatcagcactctgtatctagctcaaggtttgtaaacacgccaatcagcaccctgtgtctagctcagggtttgtgagtgcaccgatcgacactctgtatctagctgctcyggtggggccttggagaacctgtgtgtccatactctgtatctaactaatctgatggggacgtggagaacctttgtatctagctcagggattgtaaatgcaccaatcagcgccctgtcaaaacaggccactgggctctaccaatcagcaggatgtgggtggggccagacaagagaataaaagcaggctgcccgagccagcatgggcaacccactcgagtctccttccacggtgtggaacctttgttcttttgctgtttgcagtgagtcttgctactgctcactctttgggtccatgctgcttttatgagctgtaacactcaccacgaaggtctgcagcttcactcatgagccagcaagaccacgagcccacagggaggaccgaacaactccagacgcgcctccttaagagctgttaacactcaccgccaaggtctgcagcttcactcctgagccagcgagaccacgaacccatcagaaggaagaaactctgaacacatctgaacatca

SEQ ID NO: 935469 - DNA, 644 bp, Homo sapiens
aatactccaatagcaccaccacctcctccccgctctctggatgctgctcccgcacccagctctgcagattccccggcaggatggtcaggaactgctccagcaccagcagctccaggatctgctccttgctgtgcatctcaggctgcagccactgtcggcagagctctcggagccgactcagcgcctcgcgggggcctgcagcctccgggtagcggaagcctcggaagcgctcgcgggagccctcagaacccagatctgggctactgggmaaaccggcttcttcttcctccacctttatgaccagaagctccatctggtcttctgtagactgggcatccagggctgtgctttcacttaattctctagccatcctaggccaaggcagtactcaggcctcactctagcttccagcgctatttctgcagaagatccctgaaaggtgggaaatcattattaaccagtaaacttgcaagtagtcccttctctcctgcccaggagcccagagacatctctggggaactgctgcagaaatttctccatgttcagtggttctgcagcttaatcctctacaccaccccaaacctgaatcccatagtaaggttcccaaaggatgtcctggagtgatcctggacacccccaagccc

SEQ ID NO: 935470 - DNA, 644 bp, Homo sapiens
aatactccaatagcaccaccacctcctccccgctctctggatgctgctcccgcacccagctctgcagattccccggcaggatggtcaggaactgctccagcaccagcagctccaggatctgctccttgctgtgcatctcaggctgcagccactgtcggcagagctctcggagccgactcagcgcctcgcgggggcctgcagcctccgggtagcggaagcctcggaagcgctcgcgggagccctcagaacccagatctgggctactgggaaaamcggcttcttcttcctccacctttatgaccagaagctccatctggtcttctgtagactgggcatccagggctgtgctttcacttaattctctagccatcctaggccaaggcagtactcaggcctcactctagcttccagcgctatttctgcagaagatccctgaaaggtgggaaatcattattaaccagtaaacttgcaagtagtcccttctctcctgcccaggagcccagagacatctctggggaactgctgcagaaatttctccatgttcagtggttctgcagcttaatcctctacaccaccccaaacctgaatcccatagtaaggttcccaaaggatgtcctggagtgatcctggacacccccaagccc

SEQ ID NO: 935471 - DNA, 665 bp, Homo sapiens
tctgccagaaaatagagcatgaacagccactgggccccaagggtgggcctagagaccccctaccatagtgaagcacacttcttatagtgcttgtaccccccactgagttgtgggagttaggcaagcagtgccagcagcatttgggggagactccctgcctgaattctgtctctccgggacaaaggagctgatccatttcctgctccccctctgagatggaaaagctggcttctttaattacagtgtggtctgatgccggtgaaataccagaaactgtcagtagatggcagttgtatatagacttagtgcaagtcattcgggaaaaggacattgctgggcaactaggtcccgccggagcgttccagctcaaagattacctgctgcagtcaggcagaaatgtaaagtctttyctgtttgattgggaactgacccaggtgccaggcttggggggacaccggacaaccaaaggcaatatgtggactcggcaagccactggtccctaaacctgaataagtttccgggcagagctgcatttattgacggttatgaaagctggtcagtgaaagtgaaacctgtatctttggacctcggcatcggccgcttagctccctgcttatgcactgtggatgtctctcccatgcctgaggacaggctgtgggtggatg

SEQ ID NO: 935472 - DNA, 665 bp, Homo sapiens
tctgccagaaaatagagcatgaacagccactgggccccaagggtgggcctagagaccccctaccatagtgaagcacacttcttatagtgcttgtaccccccactgagttgtgggagttaggcaagcagtgccagcagcatttgggggagactccctgcctgaattctgtctctccgggacaaaggagctgatccatttcctgctccccctctgagatggaaaagctggcttctttaattacagtgtggtctgatgccggtgaaataccagaaactgtcagtagatggcagttgtatatagacttagtgcaagtcattcgggaaaaggacattgctgggcaactaggtcccgccggagcgttccagctcaaagattacctgctgcagtcaggcagaaatgtaaagtctttcctgtttgattgggaactgacccaggtgccrggcttggggggacaccggacaaccaaaggcaatatgtggactcggcaagccactggtccctaaacctgaataagtttccgggcagagctgcatttattgacggttatgaaagctggtcagtgaaagtgaaacctgtatctttggacctcggcatcggccgcttagctccctgcttatgcactgtggatgtctctcccatgcctgaggacaggctgtgggtggatg

SEQ ID NO: 935473 - DNA, 661 bp, Homo sapiens
tctttgttgagtctcccacaattaccaatgttcctggcccagacttcaatccggcctcccacattattcctgataccacacctgaccctcatgactgcatctctctgatccacctgacgttcaccccatttccccacatttccttcttccctgtttctcaccctgatcacacttggtttattgatggcagttccaccaggcctaatcgccacacaccagcaaaggcaggctatgctatagtacaagccaatagcccgcctcttagaacctctcatatcctttccatcgtggaaatgtatcctcaaggaaataacttctcagtgttccatctgctattctactactcctcagggattattcaggccccctcccttccctacacatcaagctcagggatttgccaccgcctaggactggcaaatcagcgttactcaacatgcccygagtcaggaaactaaaatacctcttggtctaggtagacactttcactggataggtagaggtctttcccacagggtctgagaaggccaccacggtcatttcttcccttctgtcagacataattcctcagtttgtccttcccacctctatacagtctgatagcagactggcctttattagtcaaatcagccaagcattttttcaggcttagtattcaggt

SEQ ID NO: 935474 - DNA, 616 bp, Homo sapiens
taggactggcaaatcagcgttactcaacatgccccgagtcaggaaactaaaatacctcttggtctaggtagacactttcactggataggtagaggtctttcccacagggtctgagaaggccaccacggtcatttcttcccttctgtcagacataattcctcagtttgtccttcccacctctatacagtctgatagcagactggcctttattagtcaaatcagccaagcattttttcaggcttagtattcaggtgaaacctttatatcctttacagtcctcagtcttcaggaaaggtagaacagacyaatggccttttaaaaacacacctcacctagctcagccaccaacttaaaaaggactggacaatacttttaccactttcccttctcagaatgcaggcctgtccttggaatgctacaaggtacagcccatttgagctcctgtatagatgctcctttttattaggccccagtctcattccagacaccagaccaacttagactgtgccccaaaaatttgtcatccctactatcttctgtctagtcatactcctattcaccattctcaactactcatacatgctctgctcttgtttacactgccggtttatactgt

SEQ ID NO: 935475 - DNA, 635 bp, Homo sapiens
acagctgcccccttgcttgctttctctctcctgctgccatgtaagacgtgccttgcttcccctttgtcttccaccatgattgtaagtttcctgaagtctccctagccatgtggaactgtgagtcaattaaacctcttttctttataaattagcaagtcttgggcagtgctttagagcaatgtgagaatggatgaatacagaattctccaaagggacagaaccaagaggactatatatatatgtgtgtgtattatctctgataaactcataaatatatatatatatatacacacacatayacacatatatacacataaacacatatatacacacatatacatatacatacacacatatatatatacatatatatatatatatatatatccttttcctccagaccatcctgggttgggttaaactaatatatatatatatgagttcatcagagagaattagcttacacgattacaaggcaaagtcccacaataggctgtctgcaatctggggaaagagagaagccagtagtgtggctcagtccaaatccaaaagcctcaaaaccagcaaagccaacaatccaaagtctgagtccaaaggcctaagagcccctgggaggctgctggtggaagttccag

SEQ ID NO: 935476 - DNA, 586 bp, Homo sapiens
gataggaagcctttgggtttagagcagagtggtggtgtgaccgacttggattttaaaggatcactctggcagctctgtggagaacaaactgtagaggcaatgttagaagcccagagactgggctggagacaagtacagttgtcctggcaagagatgactgtggctcaaatcagtgatagaagtggtttaaagagcaaaaaagcctgtttaaaaaacaaaaaagtggtcagattctgtaaatggtctgagtgtacagccagcaggccacactgttgacggattggatgtgtgagagtgggaggaggcaaggatgcctcatggcwttcgacctgagcatctggagaggtggagttgccattaagtgactgtgggaggagcaggttcagggaggaaaatcatttcagtgtggacgtgaagtctgagatccaggtagcatccaagtggagatgtgaggaaagcagttggacgtaacactgtagagtttgtgggaggaaataggagagagatgagatcgtcaagatgaggtccaaggtttgacctctggttttctctaggtgtgtagaagtttagaggatgagcagaagcc

SEQ ID NO: 935477 - DNA, 616 bp, Homo sapiens
gactgtactgtagtcattgctcacagcaggtggctctgtaatgtgctcctctaggctctagaatacctgcaatgtaacagggactgtgcacagtaaggagattccagaggtggagacagagatgcacaccccaccctcaaaaatggcagtctctcaggaagacagccatgaagtaagtaagtacacaaacagtgaggatgaaaagtactgtgcaagagaaggatagggtgcagtaatgggattgatggagtctgtgaggataccaagtgaacagggtggctgagggccagaagtgaggtagggagggtgggaaattttatatggagaaagccacttagtgtgtttaagaaacccagtaggctgggctggcctgaacctacagaacrtcggaaagaggtagaagcttttaggaattggaggctttctcctggggcagtggggagccacaggatggtttttaccaccaccgctggttaagcacctaaaagaaagcccacatctcagtaaccatgatctgtagttagcctcttatttcccaacaaaatcgtatgtctcccattcaaaaaaacaaaggccactagtagatatcccatgtccgatacctacctattagtgg

SEQ ID NO: 935478 - DNA, 608 bp, Homo sapiens
ggctttggtatcaggatgattctagcctcataaaatgagttagggaggattccccttttttctattgattgaaatagtttcagaaggaatggtaccagctcctctttgtacctctggtagaattcagctgtgaatctgtctggtcctggactttttttggttggtaggctattaattattgcctcaatttcagagcctgttattggtcaatccagagattcaatttcttcctggtttagtcttgagagagtgtatgtgtccaggaatttatccatttcttctagattttctagtttatttgcatagaggtgtttatagtattctctgatggtagtttgyatttctgtgggatcagtggtgatatcccctttatcattttttattgcatctatttgattcttctctcttttcttttttattggtcttgctagcagtctatctattttgttgatctttttaaaaaaacagctcctggattcattgattttttgaagggttttttgtgtctctctctccttcagttctgctctgatctttgttatttcttgccttctgctagctgttgaatttgtttgctcttgcttctctagttcttttaattgtgatgt

SEQ ID NO: 935479 - DNA, 631 bp, Homo sapiens
ttcctctgggtagatacacagtagtgggattgctggagcaaatggtagttctacttttagttctttaaggaatctccacactgtttcccatagtggttgaactagtttacattaccaccagtagtgtaaaagtgttcccttttcaccacatccctgtgaacatctattatttatttattttttgatcatggccattctcgcaggagtaaggtgatattgcattgtggttttgatttgcatttctctgataattagtgacgttgaacattttttcatatatttgttggccatttgtatgtcttctttttagaattgtctattcatgctctgatgggtttgtttgtattttttcttgcttgaggtccttatagactctggatattagtcctttgtcagatgcacagattgcaaagactttttcccactctttgggttttctgtttactctgctgattktttcttctgctatgcagaagctagtttaattaagttccatctatctagcttcattttggttgcacttgcttttgggcttttgatcatgaagttttcgcctaagtcaatgtctggaagggtttttccaatgttatcttctaaactttttttggtttcaggcctttagatttaggtc

SEQ ID NO: 935480 - DNA, 668 bp, Homo sapiens
tagtagtaattgttttataatttgcaagctccagtgctaggtgcatatatattaaggattgtgagattttcctattgaacaaggccttttatcattatataatgtccatttttatcttttttaactgctgttgctttaaagtttgtattgtctgataaaagaatagctactcctcaattttggtgtccatttgcatggaatatttttttccactcttttgtcttatttgtgtccttatgtgttaggtgaatctcttgaagacaccagatacttggttggtgaattcttatccattctgctattctgtatcttttaattggagcatttaggccatttacattcaatgttagtattgagatctaagktgctattctattcatcatgctatttttttgcctgaatacctttttcttttattattttggttttgttttataggtcctctgagattcatgctttaaggatgttttattttggtgtattttaaggatttgtttcaaaatttagcactccttctagcaattcttgtagtgctggcttgacagtggtgaattctctcatcatttgtttgaaaaagactatcttttcttcatttatgaaggttagttttgctggatacaaaattcttagctaataattgttttgtgtgagaaggctaaagttagggc

SEQ ID NO: 935481 - DNA, 616 bp, Homo sapiens
ggcagctggcctggcgggggctgacccccacctccctcccggacggggtggctgccgggtggaggggctcctcacttctcagacggggcggctgccaggtggagggtctcctcacctcccagaaggggcggcggggcagaagcgctccccacatctcagacgatgggcggccgagcagagacgctcctcacttcccagacggggtggcggccgggcagargctgcaatctcggcaccttgggaggccaaggcaggcggctgggaggtggaggttgtagcgagctgagatcacgccactgcactccagcctgggcaacattgagcactgagtgaacgagactacgtctgtaatcccggcacctcgggaggccgaggctggcggatcactcgtggttaggagctggagaccagcccggccaacacagcgaaaccccgtctccaccaaaaaaatacgaggaccagtcaggcgtggtggcgcgcgcctgcagtcgcaggcactgggcaggctgaggcaggagaatcaggcagggaggttgcagtgagccgagatggcagcagtacagtccagcttcggctcggcatcagagggagaccgtggaaagagagggagagggag

SEQ ID NO: 935482 - DNA, 743 bp, Homo sapiens
gtgaggaggcccaagggggatggtggtggtgaggaagccgagaggacttggccattcaccagctcctcagggaaagcactgctcaccaggcaaggtccatagaggtaacaggaacctctcctctaatggcactgaaaggcaccatgaaaagtgagaactgggccgggcacggtggctcacaatgtaatcccagcacattgggaggctgaggtcaagagttggaggccagcctgtccaacatggtaaaccccaactctactacaaatactaaaattagctgggcatggtggtgggttcctgtaatcccagctacttgtgaggttgaggcaggagaatcatttgaacccgggaagmagaggttgcagtgaggtgacatcacaccactgcactctagcctgggcgacagaaggagacttggtctcaaaaaaaaaaacaaaaaaatgtggaagtgggtaggatccaaggggaaaacagggtgaagaaaactcagagagagggacaacaagcagggaggggaggagctgctatgcaggatgtggagtttaagttcagaaatgagttcttaaattctcagtctcacctctattttcccacaggagatggaaacttcaagtgctggatttacaggatgtctgtgagaacttctggatggtttggtctgaagctatggcccatgggtgcttcctcaatgccaagaggaacaaaacaccagtgcaggactgtccaaggatgagagaacggca

SEQ ID NO: 935483 - DNA, 734 bp, Homo sapiens
gtggatcacttcagtcaggagttcgagacgactctggccaatatgatgaaaccctttctctattaaagacacaaaaattaactagggggttgagccaagatggccgaataggaacagctccagtctacagctcccagcatgaacagtgcagaagacgggtgatttctgcatttccaactgaggtaccaggttcaactcaatggagagtgtcagaaagtgggtgcaggacagtgggtgyagtgcatcgagcatgagccaaagcagggcaaggcattgcctctcctgggaagggcaaggggtcagggaattccctttcttagtcaaagaaaggggtgacagacggcacctggaaattcaggtcactcccaccctaatactgcacttttccaatggtcttagcaaatggcacaccaggagattttatcccatgcctggctcagagggtcctatgcccatggagcctcactcattgctagcagagcagtctgagatcaaactgcaaggcggcagcaaggctgggggaggggcgcctgccattgccgaggcttgagtacgtagacaaagcagccaggtggctggaactgggtggagcccactgcagctcaaggaggcctgcctgcctctgtagactccacttctgggggccgggcattgccaaacaaaaggcagcagaatcctctgcagacttaaatgtccctgtctgtctgacagctttgaagagagtagtggttctc

SEQ ID NO: 935484 - DNA, 734 bp, Homo sapiens
gtggatcacttcagtcaggagttcgagacgactctggccaatatgatgaaaccctttctctattaaagacacaaaaattaactagggggttgagccaagatggccgaataggaacagctccagtctacagctcccagcatgaacagtgcagaagacgggtgatttctgcatttccaactgaggtaccaggttcaactcaatggagagtgtcagaaagtgggtgcaggacagtgggtgtagtgcatcgagcrtgagccaaagcagggcaaggcattgcctctcctgggaagggcaaggggtcagggaattccctttcttagtcaaagaaaggggtgacagacggcacctggaaattcaggtcactcccaccctaatactgcacttttccaatggtcttagcaaatggcacaccaggagattttatcccatgcctggctcagagggtcctatgcccatggagcctcactcattgctagcagagcagtctgagatcaaactgcaaggcggcagcaaggctgggggaggggcgcctgccattgccgaggcttgagtacgtagacaaagcagccaggtggctggaactgggtggagcccactgcagctcaaggaggcctgcctgcctctgtagactccacttctgggggccgggcattgccaaacaaaaggcagcagaatcctctgcagacttaaatgtccctgtctgtctgacagctttgaagagagtagtggttctc

SEQ ID NO: 935485 - DNA, 608 bp, Homo sapiens
gattatagggaactccccatgggaccatagatgcaggatgaaagagagaatgcagtgtaacatgaatgtgaaccatgggacacttcacaaaatttacttgtgccttcaaggcatgttcaggcctgattatgtgtataccacttaacatttgatgacagtacttttctgtacatttccaactttatagcctggtaggttagataacacccagttcatgatgaggagctcaggtcatatgcaacttgatgtcccatggttaagtatttagtctttattaaggcccagtagcagagctgattttttttttccrtttttataattacttttattttgtattgactgggtaagtatgcagggatgttacctggatacactgcatgatgctgaggtttgggatattactgatctcataaccaaggtactgagcatagtactcaatagtaagtttttcaaagcttgtctccctcctccttccgccatctagtactccccagtttctattgttgccatctttatgtctatgagtacccaatgtttagctcccacttataagtgaggacatgatgcacttggttttctgttcctgcattagttcacttaggatgatg

SEQ ID NO: 935486 - DNA, 495 bp, Homo sapiens
ttttcattatgtttgcttttttcctttttctttttctttcttttttttttttttttttttttttttgaggcggagtctcgctctatcacccaggctggagtgcagtggcgcgttctctgctcactgcaagctccgcctcccgggttcacgccattctcctgcctcagcctcccgagtagctgggactacaggcaagtgccaccacaccgggctaacttctttttgtatttttagtagagacggcgtttcaccgtgttagccaggatggtctcgatctcctgacttcgtgatccgcccgcctcggcctccaaagtgctgggattacaggcatcacctaccgcgtctggccrcttttttccttctttatcaaaatagccctgcagcgtggctctgtatcatcttcttcatccgtttctgcaaataaaattagtttgccgtatgtcccacataaataagtcaatgcaattatttaattatgaattgtaattcttcctt

SEQ ID NO: 935487 - DNA, 622 bp, Homo sapiens
ctgactcagtgtttcagctgctcagatcatacaggcacctattttcttctgcagaaatgctgatgtatcatggagggtgggtgggattgtgattctacccctcatacaaacctgaatcaggagggcactcctcctgtggggatctggtcaccatgaagtgttccagaaaggctatctacaggtgcacccatgctgagctccaatgggggaagccccagatgtgtatgcagtggtagatgatggggaaaagaattccccttttttaaratcatttatgagcaccagggctgcccgactgttgaagagctacagactcctcgctgagcccaatactgcacctgtggctctgctgaaggaaactttctgcaagtggaaggttctgggactgcaggcctatttgaactcttttgtcgcacagagtgttccctttatgtggtgcactctccctttccataggagtagcaggccctgagaaccaaactactatgaatgctgctgcttttctgggtctagctacccagtggggctgccacacaccaggctgatgtttggggatgtctggtcccatccagtgatgtgagctgtcctcaagtctcatagcagtgtttaccagcacgagctc

SEQ ID NO: 935488 - DNA, 679 bp, Homo sapiens
tggtttttgttgttagttctgttcacatgatgaatcacatttattgatttgtgtatgttgaaccgatcttgaataaagatcgagtaggaataaagcgcctacttgatcatggtggattagctttgtgatgtgctgctggattcagtttgctagtattttgtygctgatttttgcatctatgttcatcaaggatattggcctgaagttttctttcttgtgtctctgccaggttttgttataagaatgatgatgccctcgtagaatgagttaggcaagagtctctccttctcaattttttgaaatagcttcactaggattagtgccaacttttctttatatgtctggtagaatttggctgtgaatccatctgggccagggctttttctttttggtaagcattttattactgattcaaattcagaacacattattgaactattcagggtttcagttcttccatgttcaatcttgggaggttgtgtattttcaagaatttatccatttattctaggtattctagtttgtgtgcatagagatgtttgtaatagtctctgagggattttgtatttctgtggagttggtaatgtcccctttgccatttatgattgtagttatttgtattttgtctttttctttattaatctaactagtgttctatcaatctcatttattatttcaa

SEQ ID NO: 935489 - DNA, 657 bp, Homo sapiens
ctgtttatattctctgtaaagttttaattataaaaaaagatttgtcaggttggtcttaagctgtagccaatttggtgtgctctgcatgactttctgtaaggtcagtagcaaactttgctgcaggcctccatcttgttttacatcctcgggagagtgacctgtaaccaygtagcaatgttttgtttagcctccaccgttttatagtaacagccaggttcaaacctgacttagggaatgagtacttttggactgatatctgtgtgacttttgctacttgctgattctcttcccctccatgaacaacttctagtttttttcttaaatcttcctttctctgggttacctttaaaggttctaaattttgtaagaactgcttagcccctttgaaaatacctcatacacttgtggttaaagcataaccttaattgaggcgtgttggtttcacctgtgtagtgaccttcagtagcgtttgaaagccagaaatattggctgcttgttgtggctgaagttgggtaataagggagttaaaaggattttcttagagagtgctcagcttaatttaaagtgaatatccaacttatagatatattgaaaaagcctttatgtttttcttttcttggatcctgttttgctggaaaaaaagtgttttgttttttt

SEQ ID NO: 935490 - DNA, 657 bp, Homo sapiens
ctgtttatattctctgtaaagttttaattataaaaaaagatttgtcaggttggtcttaagctgtagccaatttggtgtgctctgcatgactttctgtaaggtcagtagcaaactttgctgcaggcctccatcttgttttacatcctcgggagagtgacctgtaaccatgtagcaatgttttgtttagcctccaccgttttatagtaacagccaggttcaaacctgacttagggaatgagtacttttggactgatatctgtgtgacttttgctacttgctgattctcttcccctccatgaacaacttctagtttttttcttaaatcttcctttctctgggttacctttaaaggttctaaattttgtaagaactgcttagcccctttgaaaatacctcatacacttgtggttaaagcataaccttaattgaggcgtgttggtttcacctgtgtagtgaccttcagtagcgtttgaaagccagaaatatyggctgcttgttgtggctgaagttgggtaataagggagttaaaaggattttcttagagagtgctcagcttaatttaaagtgaatatccaacttatagatatattgaaaaagcctttatgtttttcttttcttggatcctgttttgctggaaaaaaagtgttttgttttttt

SEQ ID NO: 935491 - DNA, 586 bp, Homo sapiens
tttatctatttcctacctcttacaatgtttccctgtcctgcctccacccttttttcctcccttaatctctcttcccctcccttccttcttttttcaacccaaatttttgttgagcatctactgagtgcaaaggcactgtgctaggtatttgggactacagcagtgactaaagcatggtccttgtcctagtgcacttasagtctaataaggaagatagacattaaacgtacatgataagtgttagggaataaaattgtttaactgggaagtctgacctaatctgaggaattagggaagaaatctctcatgatgtgttattttacctgaaacttgaatgactagtacaaattagttgtgggggtagagaaacagcatagggaatgtattgaggctggaaaaagattgacaccatggaaaaagtgaagggagggcagtctggctgaaatggtagaaatgaaggtgtcaggggagtggagtaggtcatggctaacataagacttgagaggaaggtaaaggctttgttggccagactaaaggatttacactttgttccacagatggtttttaagtgtgtgtgtgtattttt

SEQ ID NO: 935492 - DNA, 597 bp, Homo sapiens
gacatatcttaagcaaatccatctgagaacagaaaaccaaatactgcatgttctctcttataagtggtagctaaacattgggcactcgaggacataaagatggcaacaatagacactggagactgttagagggggaagctagggagggacacaagagttggaaaactagctgtcacgtattatgctgagtaccttggtgacaggataattcataccccaaacatcagcctcacgtagtatacccargtaacaatcctccacatgtacccactgaatctaagataagttgaataaaccccacaacattttgtatgtgctgtcactactccacacagaaggaattaatttactcctgtgcaacaatactgggagaggacttttggaagcttatacctgatttcctcaagattttgccacatgcaccttttttcattgttaattttgccttccatcctttcactgtaataaataatagccatgagtattttttaaaaatgagcacaagagaactttcagggttaatagaaatgctctatatattattactgtggtggtaattatgtggtcatttgtctaagttcattgaattattcaccc

SEQ ID NO: 935493 - DNA, 627 bp, Homo sapiens
ggccactgggtctgcaaacatgacaaagaaaaaagtctcccaaaagaagcagagaggccgaccttcatcccagccccgcaggaacatcgtgggctgcagaatttctcatggatggaaggaaggagatgagcccatcacrcagtggaaaggaaccgttctggatcaggtgcctataaatccctctctttatctggtgaaatatgatggaattgactgtgtctatggactggaacttcacagagatgaaagggttttgtctcttaaaattctttctgacagggtggcatcatctcacattagtgatgccaaccttgcaaataccataattggcaaagcagtggaacacatgtttgagggagagcatggttctaaggatgaatggagggggatggtcttagctcaagcacctatcatgaaagcctggttttatattacctatgagaaagatcctgtcttgtacatgtaccagcttctagatgattataaggaaggtgacctccgcatcatgccagaatccagtgagtctcctccaacagagagggagccaggaggagttgtagatggcctaataggtaagcatgtggaatataccaaagaagatggctccaaaaggatcggcatggtcat

SEQ ID NO: 935494 - DNA, 767 bp, Homo sapiens
aaaaggcacagtcattccctggaagcgtttgcacttgtaactggggccacaccctggaaaaactgcccctttgacttgctttgatcccatttgctttttaatttacttgttttatctttaccccacaaatacttacttcaggtgggctctctgccaggcactcttctaggcacagatactgatgatgtaatmatgaatgaaagaagcaaactaaaattcttaccctcatggaggtttcattttagtgtgggggacagacagtagccaaaataaataagcaattataatgtattttcatagtgtctagtgttaaatagaaaaacataaagcaaggaattgggatagaaaatttcaggagggaagctgaaactagatagacaaggtatccagggaaggcctcactgagaacttggcttttgagtctcacctgaaggcaatgggagaactgaccctgtagctgtctggggaaggagcattccagatggagggacagcatgtgctgaggccccaagacaggtttaggcctggcatgtttgaggagcaaggaggatgttatcatgactggagctgagtgaacaaggcagagaaaagcaaaaggtggtttcagagaggtaatggggatgagggagaggcagcttatagccctgtaggtttcaaaatgcaatttggcttttacactgtatgtgatggaaagccatccacgtattaataatggaggggagacaaggtttgtcttagttttacaggatcactctgacaacttggag

SEQ ID NO: 935495 - DNA, 623 bp, Homo sapiens
taaaactggacccctttctttcaccacatacaaaaattaactgaagatggattgaagacttaaatgtaagacctaaaactatagaaaccctaggaaaaaaacctaggaaatatcattctggacataggccttggcaaagatttcatgatgaagatgccaaaagcaattgcaacaaaaacaaaaatagacaattgggacctaattaaactaaacagcttctgcacaacaaaagaaactttcaacagactaaacagacaacctacagaatgggaaaaaaatttgcaagctacgcatatgacgaaggtctaatatccataatctataagcaacttaaatcagtaagaaaaaamcaaacaaccctattaaaaatgggcaaagtacatgaacagacacttctcaaaagaagacatacatgcagccaacaaacacatgaaaataattctccacatcactaatcattagagaaattcaaatcaaactacaatgagataccatgtcacaccagtcagaatggctattattaaaaagtcagaaaataacagatattggtgagattgtggagaaaaaggaacacttatacacttatatactggtaggaatgtaaattatttcagccactatag

SEQ ID NO: 935496 - DNA, 633 bp, Homo sapiens
tcaagaaagatgggtacaaaccagcccaaactctgagaataaataactaacttgttaaaacacagacataaacaaagatctagaagcatcaagaacacccaagaaaacatgacctcaccaaacagactaaataaggcaccagtgacaaatcctggaatgacataagtatttgactgaagatggggaattcaaaatagctgttttgataagctcaacaaaccaaaataacacagaaggagaattcataattccaacaggtaatttttttaaaaattgagataataaaatacatcaaacaggtagtctggagctgaaaaattcaattggcaaactaaaaagtgcatcagaaagatctgttccaatgatccaaataccagcttcgcaactaggatagggcactgggcagaatcatgaggcccccccttccatgatctacctcccagaggatatttctagacataccctgagcaagaaggggaccttctwccttgacaaataggactcagtcctggcaggatttatcacctgctgattaaagagcagttagatcctgagtaatcagcaccaacagccaggtagtatatgctgtgggtattaggtaagactctgagatgtgtgggcttcaagggtact

SEQ ID NO: 935497 - DNA, 880 bp, Homo sapiens
ctgcttcttcagctggatgaatgctggcctcacactaataagaggagtagcttataactgggaattagagttattttatcccctccatcagagacaagaccacacaggcaagatttcttagaggacttttctgcagtgtaattttttaaagttcatctttcattcagattttagttttgaagttttagtttaaagcaggcacctcaatctaattttccacctgtgtgggtcccatgatttattccctgtctaccacatgtgcagttttctcataaaactgcaggctttgttgccagggacaggcagacatacttgggacaggctttggtttcagtcctacattaccactctgagtttatgctttcccatcatgtcgggtctcttagaagtcctttcactttcttgcgatctatgctatgtaattaaaagttattggccgggcgcagtggctcacgcctgtaatcccagcactttgggaggccgaggcgggcggatcacaaggtcagcagatcgagaccatcctggctaacacggtgaaaccccatctctactaaaaataycaaaaattagccaggcgtggtggtgggtgcctgtagtcccagctattagggaggctgaggcaggagaatggcgtgaacccgggaggcggagcttgcagtgagccgagatcgcgccactgcagtccagcctgggcgacagagcgagactccgtctcaaaaaaaaaaaaaaaatctgttttcataggatgctgcatttttaggtatttagtactgaggaggcttcttagtttgtcatattgccccaaattgaagttcatccctttttatatttccattctgagctttccaaaaggacacttttgatgaaagcccactcaatg

SEQ ID NO: 935498 - DNA, 790 bp, Homo sapiens
gaaagcccaactccacatgatctgactctcaaacacgttctctgtctgcagaattcatggtcttcaggctggcctgaatcccaggaaacaaagacccaggagaggtttgtggtgggaaagagcctttgcactgagggcttacactgagtgttcggtggatagtatctttattcccacgggccaattatttctttatagaggtttattattctcagtggaactgggggagatactaacctatggtagcaaatccatacctcctycaattatggggcaagcaatggcatggattgtagatgcctgaactgatggaaacagcagaaagatctggggtagaggactctgcccctggaagctgcccatacatataacacatgtgatccttccaaattcagcccttgtggttaatcaggctgtacttcttgccctaactttgaattggattgttttccttcttgcctgatagaatctcaggtttaaccaaatattctctgagattaaagactttctgaggagggaacaagtagggtagatttacttgggctgaaatttgggaatgacaaaaagaagtggcctaaatgtgggtggagggagaaagaaaactagtgcatgactccactccacattatgcttttggccatttaagattaggtcacagtagataaattaagtgattctgtctaaatttctaattgtactgttatagtttagaaacatcaattaaagttgggatgagttaagcttcattcttcagctcacatgtagacattcagagagtgaaatgggcctg

SEQ ID NO: 935499 - DNA, 525 bp, Homo sapiens
tggctcatgcgtgtaatcctatcactttgggaggccgaggcgggcagactgcctgagctcaggagttcaaaaccagcctgggcaacacagtgaaaccccgtctctactaaaaaacacacaaaaaattggccgggcgtggcggcgggtgcctgtagtccyggctactcgagaagctgaggcaggagaattgcttgaaccccagaggcagaggttgcagtgagccaagatcgtgctactgcactccaatctgggcaacagactccgtctccaaggaaaaaaaaagaagaaattaccatatgatccggcaattccaaccctaggtttatgcccagaactgaaagcagggactcaagacagacacttgtacactgacattcacaacatccaaagggtggaaacagcccaggtgtccagccacagatgaatggatgaagagaatgtggtgaatccacactacagggtatgattcagcctttaaaaagagtgaaattctgacacatgctgcaacacagatggaccctgagg

SEQ ID NO: 935500 - DNA, 647 bp, Homo sapiens
tggacacagtttagtgattcctcaaaaagttaaacacagaagttaccatatgaggcggggtgcgttggctcatgcgtgtaatcctatcactttgggaggccgaggcgggcagactgcctgagctcaggagttcaaaaccagcctgggcaacacagtgaaaccccgtctctactaaaaaacacacaaaaaattggccgggcgtggcggcgggtgcctgtagtcccggctactcgagaagctgaggcaggagaattgcttgaaccccagaggcagaggttgcagtgagccaagatcgtgctactgcactccaatctgggcaacagactccgtctccaaggaaaaaaraagaagaaattaccatatgatccggcaattccaaccctaggtttatgcccagaactgaaagcagggactcaagacagacacttgtacactgacattcacaacatccaaagggtggaaacagcccaggtgtccagccacagatgaatggatgaagagaatgtggtgaatccacactacagggtatgattcagcctttaaaaagagtgaaattctgacacatgctgcaacacagatggaccctgaggacattatgctgagtgaaataagccagacacagaaggacaaactgagtctacttctgt

SEQ ID NO: 935501 - DNA, 547 bp, Homo sapiens
ccagcctgagtgcatgcaggtcacttctgggtcccagatgtgggtaggtggggtatagccaagaggaaccccacagctcaggaatccatcagacctcaccatccactctgcagaaaagggacctctcccacctgccccagygccacccagctcttccgatcgccacttccttctgcttgacccttcttgccacaccctttcctctccaaccacaaagaactttaaacacacttcttttatggcacttgccatactggggcataatgatttttttatatgtctgctccaccaacctgtgagccacaaatttcaagggtctcaatcatcttcgtatcacaggaactggcacttaataggaacttggtcagtagtggtggaatgaacagatcttcctgtattttaataataacatctaccggttgggcacagtgcctcacacctgtaatcccagcactttgggaggccgaggcgggtggatgacctgaggtcacgagttcgagaccagcctggtcaacctggtgaaaccccatctctactaaaaatacaa

SEQ ID NO: 935502 - DNA, 847 bp, Homo sapiens
ctggcttgaatttcagataaataaataactttctagcataagtatgtcccaaatattgcatgggacaaacttacactaaaaagttctttttctgtattggaaatgcaaataattcaaatttaagtaggcatcttgtattttatcgggcaaccctaaacacagtgaaagaaaaaaatgagaaagttctgtatgtgctgatatgaaatgctgtctgtttgkgctgtggtaacaaaataccttagacatgggtaatttatagatgatagaaatttattagccaggtgccgtgtctcacacctgtaatcgtagcactttgggaggccgaggcaggtggatcacctgaggtcaggagtttgagacccacctggccaacatggtgaaaccctgcctctactaaaaacacaaataaaaaaattagccaggcctggtggcatgcgtctgtaatcccagctactcgggagactgaagtgggagaatcgcttgaacccgggaggcggaggttgcagtgagcggagattgtgccattacactacagcctgggcaacaagagcgaaactccgtctttaaaaaaaaaaatggcctagtgtggtggctcacgcctgtaatcccagcactttgggaggccaaggcaggcagatcacgaggtcaagcgattgaaaccatcctggccaacatggtgaaatcccgtctctactaaaaatactgggcatggtggcgtgtgcctgtaatctcagctactagggaggctgaggcaagaccatcgcttgaaccagggagttggaggttgcaaagcgatactctgtctcaaaaaaaaagaagagtataggaagtatgttaagtataagca

SEQ ID NO: 935503 - DNA, 526 bp, Homo sapiens
ttgttttcagtagtataaacatttcaaccatatttattttttcaatctgtgaacatgaaataatttttttccattttttgtgtcctcttcaatttcttctattaatgttttataattttcattgtagaaattttgacttatttggtgaagttaacttattaggtttttaatgttatttaggttagcttttaatgcaattgtaaatgtgattacattttttatttccttttcagattattcagtgttggcatataaaaatgcaatcgaatttttatgttgatttrtatccagaaaagctactgaatttgttgatcaattctagtagttttttgttaaagtctttagtttttctaaatataagattatgtcacctgtaaacaagaataatttgatttcttccctccagtttgaatgtccttgattttttccctcttgtttgattgctttagctagaccttccagtactgcgttaaataacagttgtgaaagcggacatcctcatcttttaccaggtctttcagtttct

SEQ ID NO: 935504 - DNA, 737 bp, Homo sapiens
tagttgcctgctctattattctatctccaagcagcaggagtggcagaaaggaagagtgtgagggcacacgtgcgtgagagatgtacatacacacacacagcggggagacgggagagcaagagacagacaggaagagttagggagacagagagacagaggggcatggagagagccagagaaagggtaagacagagaaacgccaaggaggaagggagccaggcaagggaaacaggaagcaggagagagacgcccaaagagacagagacagaggtggacagaagccagcaggggcagagggtccccaccccctgcaccycaaggtgatttttcctcttttcatcgtccactctcctctctggctccgtcgctcctaagctgggctttccggtccctcttccacctcttccccagtgtcattttcttttctttctttctttcttttttttttttttttgagatagtcttgctctgtcgcccaggctagagtgcaatggcatgatctcagcttactgcaacctaggttgccgcctcctgggttcaagagattctcctgcctcagcctcccgagtagctgggattacaggcgcctgccaccctgcctgactaatttttgtatttttagtagaggcggggtttcaccaagctggccaggctggtctcgaactcctgacctcagatgatccacctgcctcagcctcccaaagtgctgggattacaggggtgagccactgcgccca

SEQ ID NO: 935505 - DNA, 644 bp, Homo sapiens
ttttttttgagacgaattccgtggagaggtgtgtgctaacctcttgttaatcagaaacaccttcagggagcctggcacctctcggggctgggaggaattaactgaacacgccttgggtgttcccctcccccagcctttgcccctgccattccctctgctcagggaaccctttcttcttctcgccctgacaaattcctgcctacccccatgcctgaatttctttttcttttgaaaattattttattttattgttgagacagcctgtcactcaggctggagcgcagtgatgcgatcacaacagctcattgcagcctcgacctcctgagctcgggtgatcctcccaccttagccccccacccccacccccgagtagctaggactacaggtgcacaccaccatgtccagctaattttttttttaatggaatttgctcttgytgcccaggctggagtgcaatggtgcaatcttggctcactgcaacctccacctcctgggttcaagcaattctcctgcctcagcctcccaagtagctgggattacaggcatgggccaccatgaccagctaattttgtattttcagtagagatggggttttgccatgttggccaggctggcctcgaactcctgacctcaggtgatccgct

SEQ ID NO: 935506 - DNA, 579 bp, Homo sapiens
ttccaaggccaagtgcaaacaggatgtcaaccaacgcgataacaatttttatattgattttatgttgaaataacactggtgatcatgggataaataaaatgtattattaaaagcaattttcttctggctctcttgtttttttttttttcagagacagggtctcattaggttgccaggctggtctggagctcctgggcccacatgatcctcctgcttcagcctcccaagtagctgggattacaggcgcgggccaccacacccyttgttgcatgtggatattagacaggttaagtcacaagtgtgacctgcgttgttgttctatggaacagcgttgctgtggagatgggtttgagccatatgcgtgccgaagtgccggatgggagccagggctttctagggtgcgtgcagggcagcgggcgtctgtctcagacaaggctgactttcagcgagtctacatcctgaggccagaatgcggggtgcacgcctgagatgctgtgtgctgtgggcatatgggtcccagagtgtgtgtgtaagagagacagtctggaatttgtgtgtgtagattatgtatgtgtagaa

SEQ ID NO: 935507 - DNA, 631 bp, Homo sapiens
cacgctgtctgtcccgcacttctgacactgactcccgtcaatttagcccagtattctcatggcagaaaaggaggagggccgcatcaagaagaagtggggccaggcacagtggctcacgcctgtaatcccagcactttgggaggctgaggcgggccctcagtggatcacctgaggtcaggagtttragaccagcctgaccaacatggtgaaaccccgtctctactaaaaatacaaaaatgagctgggcgtggtggcacatgcctgtagtcccagctactagggagattgaggcacgagaatcatttgaacccaggagatggaggttacagtgagccaagattgcgccgctacactccagcctgggcagcagagcaagactctgtctcaaaaaaaaaaaaaaaaaaaagaataagggaaaccaggcctaacactttagaaggccgaggcgggcagatggagactagcctagttaacacagtgagacctcgtctcgacaaaaaaaatttaaaacattagttgggtgtggtggtgcgcgcctattatcccagctactcaggaggctgaagcgggagaatcacttgagctttgggaggttgaggctgcagtgaaccataatcgtgccactgcactc

SEQ ID NO: 935508 - DNA, 631 bp, Homo sapiens
cacgctgtctgtcccgcacttctgacactgactcccgtcaatttagcccagtattctcatggcagaaaaggaggagggccgcatcaagaagaagtggggccaggcacagtggctcacgcctgtaatcccagcactttgggaggctgaggcgggccctcagtggatcacctgaggtcaggagtttgagaccagcctgaccaacatggtgaaaccccgtctctactaaaaatacaaaaatgasctgggcgtggtggcacatgcctgtagtcccagctactagggagattgaggcacgagaatcatttgaacccaggagatggaggttacagtgagccaagattgcgccgctacactccagcctgggcagcagagcaagactctgtctcaaaaaaaaaaaaaaaaaaaagaataagggaaaccaggcctaacactttagaaggccgaggcgggcagatggagactagcctagttaacacagtgagacctcgtctcgacaaaaaaaatttaaaacattagttgggtgtggtggtgcgcgcctattatcccagctactcaggaggctgaagcgggagaatcacttgagctttgggaggttgaggctgcagtgaaccataatcgtgccactgcactc

SEQ ID NO: 935509 - DNA, 631 bp, Homo sapiens
cacgctgtctgtcccgcacttctgacactgactcccgtcaatttagcccagtattctcatggcagaaaaggaggagggccgcatcaagaagaagtggggccaggcacagtggctcacgcctgtaatcccagcactttgggaggctgaggcgggccctcagtggatcacctgaggtcaggagtttgagaccagcctgaccaacatggtgaaaccccgtctctactaaaaatacaaaaatgagctgggcgtggtggcacatgcctgtagtcccagctactagggagattgaggcacgagaatcatttgaacccaggagatggaggttacagtgagccaagattgcgccgctacactccagcctgggcarcagagcaagactctgtctcaaaaaaaaaaaaaaaaaaaagaataagggaaaccaggcctaacactttagaaggccgaggcgggcagatggagactagcctagttaacacagtgagacctcgtctcgacaaaaaaaatttaaaacattagttgggtgtggtggtgcgcgcctattatcccagctactcaggaggctgaagcgggagaatcacttgagctttgggaggttgaggctgcagtgaaccataatcgtgccactgcactc

SEQ ID NO: 935510 - DNA, 711 bp, Homo sapiens
tgtataactacaggcaacatcgtggacgaatcccataaacataatgttgagtgaaggaagccagacagaaaagaggacaggattccatttacgcagaggacaaaaccaggttaaaatctgcaagatcaggatactccttccttgtgggaggaattgtagaaagtgggctcacaggggttcatgggggctggctgtgttctgtgtctttatttggtttctggctayatggtgtgctcactgtgtatacacttatttcatatatataatatttcaactaaaactgtacccctgcttctctgccatgggctgatgtgcgctccccaaaaatccatatgttgaagtcctaacccccagtatctcaggatgtgatcatatttggagataaggtctttaaaggggtgactgaagactgggtaagctgggcgcggtggcttacgccggtaatcccagccctttgggaggtcgaggcgggcagatcaccagaggtcaggagttctagacaagcctggcccacatggcaaaaccccatctctactaaaaatacaaaaattagctgggcatggtggtgcatgcctgtaatcccaactccttaggaggctgaggcaggagaatcgcatgaacctgggaggcagaggttccagtgagccgagattgcgccactacactccagcctgggtgacagagcaagactctgtctcaaaaaaaaaaaaa

SEQ ID NO: 935511 - DNA, 578 bp, Homo sapiens
tgtgtggtgtgtgtgtctgcatatactgtgtacatgtacatacatatatacatatataaatcatcccagatcatctctgggagaatatggaggaaactgccatcagttattgtttttcatttattttttatttatttattttattttttttttttttttgagatggagtctcgctctgttgcctaggctggagggccatggtgcgatcttggctcactgtaacctccacctcycgggttcaagcaattttccctgccgcagcctcctgaggagctgggattacaggcaccccccaccgctaccacatctggctaatttttgtatttttagtaagggtttcgccgcatggccaggctggtctcaaactcctgacctcaggtgatccgcctgcctcagcctcccaaagtgctgggattacaggcatgagccacggtgccaggccttttttgtttgtttgttttaaatagagacagggtctcactatgttgcccaggctggtctcgaagccctggcctcaagtgaacctcctgccttggcttccccaaagtactgggattacaggcgtgagccactgcgcc

SEQ ID NO: 935512 - DNA, 633 bp, Homo sapiens
aatccagcctctgggagcaggggccttgccactcggttatgtgagcctgctaaagccctccttgccatgtgtgcttgcaggcgggggcccagaaccaagttgggaggccactggctgtcctgtgggaccagagaagtctggtgccaccctagcagggccaagggacttcttctggacgtcagtctgtgcccagcctctaccaccagctttcccttccctgcagggaggggcatgacctgcagaaccaaaggtgcttctgtgagccagtagcccagtgctgcttgggggcaggggcggggcctgtgccttgggwtcccccccctccctgggcacatttggggttggggcagcccacacggtggggtgggaagattgacctgcccattttacaaatgagcaaaggtgggagaactcagggagacatgggggagcagagggaggaagcagagcccaacagcccggggcacccggaccccagccactgcctgcctgtggatgggtttctggccacggtgcagggctactgcgaggaggaaatgagggtgatgtgggcacctgaaacagcagaaatggctcagggccaggcactggggagccactgtccccatggggcttgagcttctgcctcagagg

SEQ ID NO: 935513 - DNA, 761 bp, Homo sapiens
cacactgcactcacacccagtcgaatgcctttgcactgtgtccacattgcaccaccacacatgacagccctaaatgtgaactgaaggaacaaggactgacccctctgaccaccactacccataaccagtactgtctctgcgtctgagtcctggcctggtttacctgctgggtgacccctggcaagttactttgcctctctgggccttagttcccgcacgtgtaaaatgaggttgggctcaatgacctggccagctctgacatcctgtcattttcttgccaaggtctcagcctatcagttgtgacacaagtctcatcagtttcagttttcttgtccatagaatgaccacagatcggccagatgcggtggctcacgcctgtaatcccagcaytttgggaggccgaggctggcggatcacctgaggtcaggatttcgagaccagcctgaccaacatggagaaatcccgtctctactgaaagtacaaaattagctgggcgtggtggcacatgcctgtcatcccagctacttgggaggccgaggcaggagaatcgcttgaacccaggaggcggaggttgcagtgagccgagattgcgccattgcactccagcctgggcaacaagagggaaactccgtctccaaaaaaaaaaaaaaaaaaaaaaaaaaagaatgacggcagatcccataaggataaggatcatgtccatctctgtcaccacatccccaatcctggcacctagtaagggctcagtaaatgttccttgc

SEQ ID NO: 935514 - DNA, 548 bp, Homo sapiens
ctcaccatgttggccagtctcaaactcctgacctcatgacctcaccatgctggtctcaaactcctgttcactgaggcagtgatctgcctgactcggcctcccaaagtgctgggattacagatgtgagccatcacactggctgagaccccatctctttaaaaaaaaacaaacacatggctgggcgcggtggctcatgcctgtaatcccagcactttgggaggccaaggcgggcggatcacaacgtcaggagattgagaccatcctggctaacacggtgaaaccccayctttactaaaaatacaaaaaattagacgagcatggtggcaggcgcctgtagtcccagctactcgggaggctgaggcaggagaatggcgtgaaccagggaggcagagcttgcgatgaaccgagattgtgccactgcactccagcctaggggatagagcgagactccgtctcaaaaaagaaacaaaaaaagaaacacaaaaaacatacaaacaacaagaaaaagaaattctagaaatgacaacaaaatctcaagaagcaagccg

SEQ ID NO: 935515 - DNA, 548 bp, Homo sapiens
ctcaccatgttggccagtctcaaactcctgacctcatgacctcaccatgctggtctcaaactcctgttcactgaggcagtgatctgcctgactcggcctcccaaagtgctgggattacagatgtgagccatcacactggctgagaccccatctctttaaaaaaaaacaaacacatggctgggcgcggtggctcatgcctgtaatcccagcactttgggaggccaaggcgggcggatcacaacgtcaggagattgagaccatcctggctaacacggtgaaaccccacctttactaaaaatacaaaaaattagacgagcatggtggcrggcgcctgtagtcccagctactcgggaggctgaggcaggagaatggcgtgaaccagggaggcagagcttgcgatgaaccgagattgtgccactgcactccagcctaggggatagagcgagactccgtctcaaaaaagaaacaaaaaaagaaacacaaaaaacatacaaacaacaagaaaaagaaattctagaaatgacaacaaaatctcaagaagcaagccg

SEQ ID NO: 935516 - DNA, 543 bp, Homo sapiens
gaaaagtctgtcctttctccactgaattgcaggggtgcctgtatgagactcaggtgaccatatgtatttgggttggatgtgtacattttgattattgatggatgtgccaaattgccctctaagaaggttgtaccaatgtatactcccacaacagtgtatgtgagtgtctgtttacacttattctttcccatgctgaatattaccaaccatgaaatgtttgccatttgggtaggtgtaaaatgatctcattattttttgtttgcatttggttattttgttccaytggtgagtgtttcttcctatatattggccattttttatttcttctgtgaatttttctgttcttatcttttgtcttttttttccccctagtgggttatttttccttttccttattaagttatgggagattttcatatgctttagatcagcagtccccaacctttttggcaccagggaccagtttcgtggaagataatttttccatggaccagagcaaggggatggttttgggatgaaactgttccacctcagatcatcagg

SEQ ID NO: 935517 - DNA, 748 bp, Homo sapiens
gaacaagtattattatcccatcttcccatctcagagatcaagaaactgaggcccagagaggccctgaattgtacatgttcaaagggcaaattaaggccgggcacagtggctcgtgcctgtaattccagcattttgggaggctgaggcagacggattgcttgagcccaggaatttgagaccagcctggggaacatggcaaaaccctgtctctacaaaatataaaataaaattagctgggcatggtggtgtgcgcctgtggtcccagctactcgggaggctaaggcaagaggattgcttgatcctcttgaggtcgagactgcagtgagccaagattgcactactgcactccagcctgggagacagagcaagaccctgcctcaaaaacaaaacaaaacaaagggcaaattaaagttgatgtccaccaaaaaacaaaaacaaacgggctgggcgcagtggctcacgcctgtaatcccagcactttgggaggttaaggcgggcggatcacgaartcaggagattgagaccatcctggctaacatggtgaaaccccgtctctactaaaaatacaaaaaaaattagctgggcgtggtggcgggtgcctgtagtcccagctattcgggaggctgaggcaggagaatggcgtgaacccgggaggcggagcttgcagtgagccgagatcatgtcactgcactccagcctgggcgagagcgagactctgtctcaaaaaaaaagaaagaaagaaaaacaa

SEQ ID NO: 935518 - DNA, 670 bp, Homo sapiens
ccctgctgaccctggccagtggcgccccatgacctcccagggaaagcccagactccagcatccatgagagctggcccaactcacccctccaactcatccctcacctctactccagccacgccgcaccatcgatcttcccagaacacgtcaaactcgtgtctcagtgcacttggggataccacacatacgctccatcrgcgtagcccatcctccccactttcttaacctgaatgtgtgctccacaaaggacaaatgaacaaatctcttcttatccatgaagatacagctcaggtgccatctcctctgaaaattcatacccgcacctccgccctgcagcctggtgtgccttcctcttctccccagcaccccacaccacccagggcccagcccacaggaacacacaccatgtgagaatgggggtgcatctgttggcttgggctgctcacccaacccgctttgatttgtttccctaagcacctggcatgatgttcctgactcacagtgggtgtttaataagtttggtgaatgaatgaatgagaatgaatgaatgaaccacctataagcccatggggccagcacctctgaagcccccagacacactttattcccttgaaggtgataacagggaccacacactgttcccacccactctgagctgccatgctcctct

SEQ ID NO: 935519 - DNA, 764 bp, Homo sapiens
tcacagtttaatttctcagcttccccacattcggcaccgtagtccttattccatactcataagtggcttcttgtcttaaacaaaccaaaccaaaacgctaaaaatgtccctggacctgcatagcttcttgtgagtgtctttcagaacctcagggctccagcagggtgtggagcaggaaatgatcatggccaccaccaccgtaatcatagcagttaacgtattgaacacatgctgtgaactgggcactctgctagtcactttatactggttaactcctttcatccccgcaacagccccaggaggcaggtgatagggtttggctctgtgtccccacccagatctcatcttgaattgtactcctataattcccatgtgttgtgagagggacctggtgggagataatttgaatcacgggggcggttttccccatgctgttcttttggtagtgattaagtctcacgagatctgatggttttatcaggtgtttctgcttttgcctcttcctcatttttctcttgctgctgccatgtaagaagtgccttttgcctcctgccatgactctgaggcctccctagccatatggaactgtaartccaattaaacctctttttcttcccagtcttaggtatgtctttatcagcagcatgaaaatggactcgtacaccaggcattattacttttatacccattttgcagatgaggaaactgaggcacagaagcaaagtaacttcaaggctacctagctagcatgtcatagaactagg

SEQ ID NO: 935520 - DNA, 640 bp, Homo sapiens
ggggtgcttggaggaccagttgggctgaggtagagtgtttagggattttgctcctttttttgacaaatatttatctgcatgtggtaagtgctatgctgggcagtgggctacagttatgactaaggcatagacaattaagaaggtaggtaaataggccaggcacagtggctcacgcctataattccagcagttggggaggcctaggcaggcgattcgcctgagctcaggagttcgagaccagcctgggcaacatggtgaaaccctgtttctactaaaatacaaaaaaaaaaaaaaaaaaaagaagaattagactggcgtggtgttgcgtgcctgtaatctcagctactcaggaagctgaggggcaggagaatsacttgatcccagctactcaggaggctgaggcaggaaaatcgcttgaactcgggaggcggaggttttagtgagctgagttttcgccactgcactccagcgtgggtaacagagtgagactccatctcaaaaaaaaagaaggtaggtaaataattgcagtgggttctaatagctaattttctttttttttcttaaacaacagaaatttgctttctcacagatacacaggctagaagtccaagatgaaggagctagcaaggctggcttctaa

SEQ ID NO: 935521 - DNA, 792 bp, Homo sapiens
aacccctaggattaagggtcctcttgtaaaagggaaaggggagatacgtaggaagcattcaaaccaggcgactccattttgaatacgggctaagaaaaatgaagctggatcaccaactggcaattaagggctgcacagcctacatttgccttgctcaattaattttaaaaagaggccacctcatgctaatartgatagctgtggtggtttttacaaaaaagagaaggggggtatgttgggagaaaagctgagtgttgggagagaagctgaggcagggcttgcatgtctgttagacatgctggctccttgcttctagcactcccattatttcaagcagccatatgtttctcattcactcgatacactgtttcctttcaacccccacatcctcaccacctgtttgtttgtttgaacaccaataaatagagtggattcccagagctcaaggccttcgcagcctccaccctcgtgacgccctctggtcccactctgtctctcaaactgtctttttctcattcctttgtctcctctggacttcgttgccccccacgacctggtgttggttctgatcaccccaataggcacagaagacagaagaacagatttcctgttccggaatgatttccagaccaccccacctccaggcttggcacccactgcatggactgcctagctttggcccaacttgttgccctctctcttactccctctttcaagttcctctctaagtcccctttcttaggcaaagggagtgagcgctctccattcctgtgcctaaagcttccagactca

SEQ ID NO: 935522 - DNA, 687 bp, Homo sapiens
catcacctgtgttggactaaacaagtcggcatcagctcctggtgctggagtctgcccgggctgggagccgccacatgcccccgcagtgcagcctctgcagctctgaacatttgggacatctgagcattttgggttaaaaaggataaaaagaggagaaaaaggctaaaccagttctatgggaaaatttggttgtcttctttttttttttttttttttttaacttagcttagtagggctggttttccttyttaaaattatcattcaagttcaaagaccagccataattatcatccccctcaaaaaaaaatccagaaaagctacattttactggaataacccaatcttttaacatctactaatcactagaaactataggagcactgatttgccagctagcaaatatattatcttttttttaaatcttatttttttttttgagacaagtctcgttctgtggcccaggctggaatgcagtggtacactctcagctcactgcagcctcaacctcctgggctcaagcagtcctcctgcctcagcctcccgagtagctaggactacaggcacaggcatgcgccaacatgcctggctaatttttgtattttttgcagagataaggatttgccatgttgtccaggctgatcctgtactcctgggctcaagagatccacccacctcagcctcccaaag

SEQ ID NO: 935523 - DNA, 640 bp, Homo sapiens
catcacctgtgttggactaaacaagtcggcatcagctcctggtgctggagtctgcccgggctgggagccgccacatgcccccgcagtgcagcctctgcagctctgaacatttgggacatctgagcattttgggttaaaaaggataaaaagaggagaaaaaggctaaaccagttctatgggaaaatttggttgtcttctttttttttttttttttttttaacttagcttagtagggctggttttcctttttaaaattatcattcaagttcaaagaccagccataattatcatccycctcaaaaaaaaatccagaaaagctacattttactggaataacccaatcttttaacatctactaatcactagaaactataggagcactgatttgccagctagcaaatatattatcttttttttaaatcttatttttttttttgagacaagtctcgttctgtggcccaggctggaatgcagtggtacactctcagctcactgcagcctcaacctcctgggctcaagcagtcctcctgcctcagcctcccgagtagctaggactacaggcacaggcatgcgccaacatgcctggctaatttttgtattttttgcagagataaggatttgccatgttgtccaggctgat

SEQ ID NO: 935524 - DNA, 687 bp, Homo sapiens
catcacctgtgttggactaaacaagtcggcatcagctcctggtgctggagtctgcccgggctgggagccgccacatgcccccgcagtgcagcctctgcagctctgaacatttgggacatctgagcattttgggttaaaaaggataaaaagaggagaaaaaggctaaaccagttctatgggaaaatttggttgtcttctttttttttttttttttttttaacttagcttagtagggctggttttcctttttaaaattatcattcaagttcaaagaccagccataattatcatccccctcaaaaaaaaatccagaaaagctacattttactggaataacccaatcttttaayatctactaatcactagaaactataggagcactgatttgccagctagcaaatatattatcttttttttaaatcttatttttttttttgagacaagtctcgttctgtggcccaggctggaatgcagtggtacactctcagctcactgcagcctcaacctcctgggctcaagcagtcctcctgcctcagcctcccgagtagctaggactacaggcacaggcatgcgccaacatgcctggctaatttttgtattttttgcagagataaggatttgccatgttgtccaggctgatcctgtactcctgggctcaagagatccacccacctcagcctcccaaag

SEQ ID NO: 935525 - DNA, 687 bp, Homo sapiens
catcacctgtgttggactaaacaagtcggcatcagctcctggtgctggagtctgcccgggctgggagccgccacatgcccccgcagtgcagcctctgcagctctgaacatttgggacatctgagcattttgggttaaaaaggataaaaagaggagaaaaaggctaaaccagttctatgggaaaatttggttgtcttctttttttttttttttttttttaacttagcttagtagggctggttttcctttttaaaattatcattcaagttcaaagaccagccataattatcatccccctcaaaaaaaaatccagaaaagctacattttactggaataacccaatcttttaacatctactaatcactagaaactataggagcactgatttgccagctagcaaatrtattatcttttttttaaatcttatttttttttttgagacaagtctcgttctgtggcccaggctggaatgcagtggtacactctcagctcactgcagcctcaacctcctgggctcaagcagtcctcctgcctcagcctcccgagtagctaggactacaggcacaggcatgcgccaacatgcctggctaatttttgtattttttgcagagataaggatttgccatgttgtccaggctgatcctgtactcctgggctcaagagatccacccacctcagcctcccaaag

SEQ ID NO: 935526 - DNA, 481 bp, Homo sapiens
gtatgtgtgcatttaattctgggctctcaattctatacttatgggtgcccccatgctagaagcatgctaaattttttttttttttgtaagtttccatctcatgaatgtgtgtcctccaacagtattctttttcaatgttaccatggttatttgagccacataaaaattcactgaagtcttaggattatcttttccatttctgcacagagggctgttgccagtttgatagcagttgttgtgagtctatagatcattgtgtagtattgtgtgttagtcatgtttagtcttcctatccatgaatayggtatgcctttcaacttatttgtaccttctttactttctagaatctaggttgacagctaataagttacatttatcatgactgataaaaatctgattttttttttttttttttgcaatggagtcttactctgtcaccatactggggtgcagtgatgtgctctccactcactgcaacctc

SEQ ID NO: 935527 - DNA, 795 bp, Homo sapiens
cttcggtaagttacttaacctctctgtgcttttgtgtccttgtctataaaacagggataataatcatcccgcagaacaatatctgaaaactaactgagttaacctatgtaaagtgcttgaagaacatgtctgggcccttcctaagcactcaaagtacccatcactgtggccatcrtcatcagtatcgcctccttgccttctgcgagtttcttattgctgctgtaactaactaccattcacatggtgacttacaacaacccaaagtttttctctcacagatctggaggcccaggtctcggcagggctgagttccttttgcaggctccaggggagaaccgtttccttgccttctccggcttctacaggctgcctggactccttggcttgtggccccttcctctgtcttcaaagccagcagcatagcgtctgcaaactctcatctgatctctccttctgccacatttcctctctgactttgactctctcccctcctattttttctttttttgagacgaagtctcactctgtcacccaggctggagtgcactggagcaatctcagctcactgcaacttccacttcccgattcaggtgatcctcctgcctcagcctcctgagtagctgggattacaggcactcaccaccatgcccgattaatttttgtatttttagtagagacggggttttaccatgttggtcaggctggtctcggactcctgacctcaggtgatccacccaggcctcccaaagtgctgggattacaggtgtgagccactgcgcccagccaccttctatt

SEQ ID NO: 935528 - DNA, 864 bp, Homo sapiens
cttgccctagtgacaagcctgcttttgagagagcacaagctctaagtaagaaaatgcatcaccgggagcggtggctcacacctgtaatcccagcactttgggaggccgaggcaggtggatcacctgaggtcaggagttcaaaaccagcctgaccaacatggagaaaccccgtctctactaaaaatacaaaattagtagggcgtggtggcgcatgcctgtaatcccagctactcaggaggctgaggcaggagaatagcttgaacctagaaagtggaggttgcagtgagctgagatagggctattgcactctagcctgggcaacaagaacgaaattctgtctctaaaaaaaaaaaaatgcatttaagcataaagctttcactcaaggacagcctggcaatgtcctgacaaaatttcaacggtggacatgcactctcatccgtggtggccctcaccacatggggttgyactcagcacttgagatcagccaggataaccagtaacaggacagcaagaggcacccactctaaccaagtcaataaaaagcctgctcagctcatcaactaggtttccaggagagcagccagtacctcacaaccgactttcaggcaggcatttcagtgttactggtgagtcaccagttgaattttaaaggggaatggttcccttgctaagggccagtaaggacacagtgccctctgctggcaagggagaagcctacccataagcgtgcgggcacgggacccccatgatcacataggtcacttctactaagtggcaggccaagccaccccggggcactgggctcacctgggtgtgggcaatgacacggatgacttggcagtacttcttcatgctgctgaagtc

SEQ ID NO: 935529 - DNA, 630 bp, Homo sapiens
aatatctaaaatataacatagatggttaaaagctgaaaacatgtataagtcagcagctttggattcaaaagttgaggttaaattacagcaaatagagccgtcttgcataaggttgtagagagggaactgttatcctgggaaccaacttcaactttgttttcctctgtgttcctacctttgtttggaagtgtttgtttctgtcacagtgaagggcctcccctgacmgatcccctgattgacagtgacacagtcagttcccaccctgccttatctgtaagagttctctagccagagcaaccacagcctcagagaagaaaaacctggggccctattcaattctgcatccattatccatgcctttgtggagacttttcctgagggaaagagttaaagaggcacgtaaactttcaaacagcagagaccaacagtggactaagcacagcgaattggattttctgttgaagaggcagtgcagtggccgggttcaggcagtaacgggagcctgggggacttagggtcacagcctctgcacagtttcaacttgggtttcctaataaaaatgctgcccagagaggaaagacactagggtagaggaaaagctgtttcttacaaacctactggcaagtccgt

SEQ ID NO: 935530 - DNA, 673 bp, Homo sapiens
tagctaaactcatagcatacaactcacccatttcaatgcaatgtattaaatcaatgtcaatgagttatacaatgaacaattcagtggcattaagtacattcataatgtcacacaaccatcaccccatctctctctcttttttttttttttttttttttttgacacagggtctcgctctctcacccaggctggagtgcagtggcgtgatctcagctcactgcaacctctgcctcccactctcagsgatattcccacctcagcttcccaagcagctgggattacaggcacacaccaccatgcccagataatttttgtattttttttagagacagggttttgccatgttgcccaggctggtctcgaactcctgggctcatgtgatccacccacctctgcctcccaaagtactgggattacaggcatgagccaccatgcccagccacaactgtctattcctaaaacttttttatcaccccaaaaagaaactctgtacctattaagcagtaactctcctatttccccctccccctgccccctattaaccactttctgtctctgtgaatttgcctattgtagatatttcacatgagtggaatcacgcaatatttgtccttctgtgtctggcttatttcacttagcataatgttttcaaggtacattcatgttgtagcat

SEQ ID NO: 935531 - DNA, 673 bp, Homo sapiens
tagctaaactcatagcatacaactcacccatttcaatgcaatgtattaaatcaatgtcaatgagttatacaatgaacaattcagtggcattaagtacattcataatgtcacacaaccatcaccccatctctctctcttttttttttttttttttttttttgacacagggtctcgctctctcacccaggctggagtgcagtggcgtgatctcagctcactgcaacctctgcctcccactctcagcgatattcccacctcagcttcccaagcagctgggattacaggcacacaccaccatgcccagataatttttgtattttttttagagacagggttttgccatgttgcccaggctggtctcgaactcctgggctcatgtgatccacccacctctgcctcccaaagtactgggattacaggcatgagccaccatgcccagccacaactgtctattcctaaaactttttkatcaccccaaaaagaaactctgtacctattaagcagtaactctcctatttccccctccccctgccccctattaaccactttctgtctctgtgaatttgcctattgtagatatttcacatgagtggaatcacgcaatatttgtccttctgtgtctggcttatttcacttagcataatgttttcaaggtacattcatgttgtagcat

SEQ ID NO: 935532 - DNA, 734 bp, Homo sapiens
ccatgaagaaaagccacagactgggagaaaatatttgtaacacagagaaggtgcttgtatccagaatagataaagaaacttttacaactcaataataaaaaggcaaacacaaggtaataaaaaaaaattgggcaaaagatttgaacagaaagtttcaccaaagaagacaaacggatagataaagaaacttttacaactcaataataaaaaggcaaacacaaggtaataaaaaaaaattgggcaaaagatttgaacagaaagtttcaccaaagaagacatacggatagcaaataagcacatgaaaagatactcaatatcattagagaaatacaaattataacctcaatgagatagcacacaccagaatggctaaagtttaaaagacagacaaaaccaaatgttagcaaagatgtgagaagaaactagaactctcatacattggtgttgggaatgcaaatggtgcaaccactttgaaaaacagcttggcattgtctgaagaagtgaaatgtatacctctwatgtaactcacccatttcagaaagatgtttaactatatgacaaattttgatttcgattttcatatggtgtacgtccataaagtttttgtccacacaaagacttgtacacaaatgttcatagtagttttattcgtagtaaccaaaaactgaaaacagctcaaatgtgtatcaacagatgaatggatagactgtggtatgtccatacagtgaaatact

SEQ ID NO: 935533 - DNA, 672 bp, Homo sapiens
gtgtaattctgccaacaatttggatgagcctggaaatggactattccccagatgagtctccagatgagaacacagcccaccaacatcctgattgtcatcttgtgagtcccagagcagggaacccgaatatgtcaggcctggattcccaaaacacagaaactaggagatgataaatggatgttgcttcaagccactatgtttgcaggmatttgtgatgtagtaatagaaaactatgctgagtgcactggctcacacctgtaatttcagcactttgggaggccaaggcaggcagatcacttgaggtcaggggttcaagaccagtctggccaacatggtgaaaccctgtctctattaaaaatacaaaaattaaccaggcttgatggcacacacctgtagttccagctactcaggaagctgaggcaggagaatcgcttgaacctgagaaaccgaggttacagtgagccgagatcgtaccactggactccagcctgggcaacagagctagctagactctgtctcaaaaacaaaaaacaaaaaacaaaaaaaaaaaacaacaaaaaaacgaatacagcacatttttaaagtaagaaaaagaagtgagattattttatcagcattttaaaagtatacccaaagtattatttcaacatgcaatcaatatacaaaatttta

SEQ ID NO: 935534 - DNA, 687 bp, Homo sapiens
caaaaccttatgtgttgctcttttacaagtgggggtgcagtcccagggaaatacgagtgaaggaaaagaggaatgagacagggaaagaaaggagagacaacgcaagcatgcgatcctgtctggtcgtctcttggtatcaagagctactggttgcccctcttatgggaccatctttggtggggctacatgaattactgtgtttaaagatcattcaactgggagcaggaaggggaaggaacagatgcatcaacttccagtctagatttgtcaaaggtttgctgcaaagggcaatcattaaaaacccaagttgcttatgaatggttgctgagtcagttctgctgctcttaagtctcagcatcaacatgacagtgagcaagggctgcagagctttccctgtgtagaggtggtcagagcccatgcacagtygatcacccccatggcaacggaatagaactagtagccaagggtcccaaatatagcagaggccagaagtccacagcagtgcccaagaagtgtcagatacaatgtatgtaatgcatgtgcctgtacctacccacgtctaggtacatattataattaaaactcagatgcctccagcatctacagctaagaacactttcaggcaaatacagttctgctgattatccctagaaggacaatcatgttataggaccaagaggtttgttt

SEQ ID NO: 935535 - DNA, 687 bp, Homo sapiens
caaaaccttatgtgttgctcttttacaagtgggggtgcagtcccagggaaatacgagtgaaggaaaagaggaatgagacagggaaagaaaggagagacaacgcaagcatgcgatcctgtctggtcgtctcttggtatcaagagctactggttgcccctcttatgggaccatctttggtggggctacatgaattactgtgtttaaagatcattcaactgggagcaggaaggggaaggaacagatgcatcaacttccagtctagatttgtcaaaggtttgctgcaaagggcaatcattaaaaacccaagttgcttatgaatggttgctgagtcagttctgctgctcttaagtctcagcatcaacatgacagtgagcaagggctgcagagctttccctgtgtagaggtggtcagagcccatgcacagttgatcacccccatggcaayggaatagaactagtagccaagggtcccaaatatagcagaggccagaagtccacagcagtgcccaagaagtgtcagatacaatgtatgtaatgcatgtgcctgtacctacccacgtctaggtacatattataattaaaactcagatgcctccagcatctacagctaagaacactttcaggcaaatacagttctgctgattatccctagaaggacaatcatgttataggaccaagaggtttgttt

SEQ ID NO: 935536 - DNA, 695 bp, Homo sapiens
aacacagtaacatattcatgagtttttaaagtcatgagttttagagaaaatattttacttaaaaccagcacttgatgatctctgacaatgttacgtagcctgaacctggagttttggctgatgggttgtctcagcctgtgacaggttttagctggctttggttcatcttctatcacacccccacactcacatgctcacacactgtcttagtcagctcgggctgccatcacaaaataccatagactgggaggctcaaataacagaaacttatttctcacagatctggaggctgggaagtccaaggtcaaggtgccagcagactcagttccccagtgagggctcttttcctgtcttgcaggtgtccaccttcttacyatgtcctatggcagagagagagagactgagagagagagggggataggaagagagagagagagagaaagagagagagtgagagagagagtgcacattgccctggtctcttcatcttcttagaagaacacggatcccatcatgggaacctggcccccatgacttcatctaaacctaattacttcccaaatgttcccatttccaaaaacgtcacactgggggttacagctttaacatgaattttagggagacagaaacattcggtccataatacatgccctgtgatatacccccataaaataaatacactgagtggctgttgg

SEQ ID NO: 935537 - DNA, 578 bp, Homo sapiens
acccattgacctctgatgaagttcaaggctggcacagatgcccaggcctgccaaggcaagagactcagttagaggctgtgtagtctgggatggtgcattcagcaggaaagaatgagcctgtcatgagcatgtgttgaacttggtcaagccacaaaccgtctctttttttttttttttttgagacagagtctcactctgtcgcccaggctagagggcagtggcgcaatcttggctcactgcaagctccgcctccagggttcaygccattctgctgcctcagcctcccgagtagctgggactacaggcgcctgccattatgcccagctaattttttctatttttagtagagacagggtttcaccccgttagccagggtggtctcgatctcatgaccttgcgatctgcctgcctcggcctcccaaagtgctgggattacaggcgtgagccaccatgcccagccccatctctttgtctacaaaacaggaaggctgggccacatgacctctatggtatcgccaacttcaatcttctggccagtgcttctcaaactttggcttgcatcagaatcaccaggaggg

SEQ ID NO: 935538 - DNA, 622 bp, Homo sapiens
ctctgtggcctaaattggggcattaaacacaatcaggtagtacaggtactgcaccctccacccccacctgccccatcctctctggttaactttcctggagaatctcaagatgttacagagacaagcaaagcaagtcactttccatattcaaagtcccaggccattttagtacttctgtcattctgtggacccatcaatatcatacccattttagagatggcacaaccaggacccagagacttttcatgacggcccagggtcagatatctaggtagttacggagacaggacttgaacgccagtctctcagccaatggagctgacccctcaggtgccctcccagacccctgcgtcctctcatgaggtagggaggccagatctgggttgggggtgaggctggcagacatccctgaggtccarggatctggaactgagggacacagacacagcatcccatccctttgctgtatcacacaacgagaacattctcttttaagcctcctgatatgtgaaggagaaagtctctgttaggtgctaatgggtatttaacacctctccaaaccttgccaatctccctttttcactgagggcacacatctcaagccttggcaggccacggtttc

SEQ ID NO: 935539 - DNA, 568 bp, Homo sapiens
acacatggcaacccaatggataaagcggaggtggtggtgttgaaggcaggaatcttagaaccctgtccatttggactcctttctttccctcctcccctgtgccccaaggtggttggaaaggccccttctgagaacrgttgaactcccctggactcacagttccctaaatcctggtagtaaattgcatctttgtttagcaactattcatcaccagctctgtcagttgatgttgacttgactgcgtgactttattttcccccaaaatgtgggcccgtgtgacaacgtgatggattccagtggaggctttaagaggcgttgcaagttcctcctaccaccttgcactcctgccctgggccctgggatgagagacacgtggaccaggcctgactctggccacagcccgcactagagcttgtggcagcagttccccctgccactggcacacaacctgaggaagaaataaagatttattgctgcaagaaactgagattgaggttgtttcttatgcagcataacctggtgaaaacgagtacgagcccctctagctttgctgtgcctgcagcttaag

SEQ ID NO: 935540 - DNA, 643 bp, Homo sapiens
atctggctaatttaatttttaaatttttttagtagaaatggggcttaagcatgttggccaggctggtctcaaactcctgacctcaggtgatctgcccaccttggcctcccaaagtgctgggattacaggcgtgagccaccacgcccagcccaactttaatctttattgtttccttccctctgctagctttgagtttagtttgttctttacctacttccttcgggtataaagtttggtttttcatttcagattcattttccttcttttttaacatayacttttagcgctataattttttttttgtatttttttctggcacacaaatgaggattagatagaactatacatttctctctgggcactgcttttgcgtattccaaaattttggtaaactgtgttcttgttttcatttatctcaatgtattttcgaatttcccttgtgatttcatctttgatccactcattgtttaagagtatgttgtttaacttccatgcattttctagtgttacctctgttattgattcctaccttcattccactgcggtcagaaaagatacttcatatagtctcaatcttttttaaatttattgagacttgttttgtggcctaacatatggtctatcctgaaaaatgttccatgtg

SEQ ID NO: 935541 - DNA, 592 bp, Homo sapiens
acccaggagactttttgttgaaattgacaagccaattcttaaatctatatagaaaatcaggccgggtgcagtgcctcacgcctgtaatcccagcattttgggaggcccaggcgggtggatcacttgaggtcaggagttcaagaccagcatggccaacatggtgaaaccctgcctctattaaaaatacaaaattagccaggcatgatggcacgcacctgtaatcccagttacttgggaggctaaggcaggagtattgtttgaacccaggaggcggaggttgcagtgagcggagatcacaccactgcactctagcctgggtgacagagtgagatgctgtctcaaaaatcaaaggatgaagaatagccaaaacagttttggaaaacaagaacaaasctggaggacttaaattacctactaacatgatttactatacaactaaaataatcaaggcagtgtagtattggcgtaagtatggacttataatggaacatagcagagttcagaaatagacatgcacatatgtgatcaactgaatttttttttttttttttgagacagagtctagctctgttacccaggttgaagtgctgta

SEQ ID NO: 935542 - DNA, 701 bp, Homo sapiens
cttctgacaagtgtgccaagaccattcagtaggtaaaaaatagtcttttcaacaaatgttgctgtgaaaagtgtgtatccacatactgaagaatgaaatcaaacctttacctaacaccatatacagaaattaactcaaawggatcaaagactgaaatgtgagagctgaaactataaaacagttataagcaaaaccttagtgcaaaagcttcacaacattggaattggcaaacatttcttgggtatgataccaaaggtacagacgataacaaaaatagacaaaatggacttcgtgaaaattaaaaaatttatgcctccaaggacactatcaacagagtaaaaacaaaaccacaggatgtgagaaaatatttgcaaatcatatatatggtaagggattaatatacagaatacagaactcctaaaactcaacaacaaaaaacccaatccgattcaaaaatgggcaaaggactttagtagacatttatccaaagaagatacacaaatggccaatacgtacatgaaaagatgcttggcttcattaatcattaggaaaatgcaaatcaaaagcacaatgagataccaccttacacccactaggacggctaccatctaaaaaactgaaaataacaagtgttggcaaggatgtggagaatttaaaactcagcgttggtgggaatataaaatggttgagcagctgctgtg

SEQ ID NO: 935543 - DNA, 701 bp, Homo sapiens
cttctgacaagtgtgccaagaccattcagtaggtaaaaaatagtcttttcaacaaatgttgctgtgaaaagtgtgtatccacatactgaagaatgaaatcaaacctttacctaacaccatatacagaaattaactcaaaasgatcaaagactgaaatgtgagagctgaaactataaaacagttataagcaaaaccttagtgcaaaagcttcacaacattggaattggcaaacatttcttgggtatgataccaaaggtacagacgataacaaaaatagacaaaatggacttcgtgaaaattaaaaaatttatgcctccaaggacactatcaacagagtaaaaacaaaaccacaggatgtgagaaaatatttgcaaatcatatatatggtaagggattaatatacagaatacagaactcctaaaactcaacaacaaaaaacccaatccgattcaaaaatgggcaaaggactttagtagacatttatccaaagaagatacacaaatggccaatacgtacatgaaaagatgcttggcttcattaatcattaggaaaatgcaaatcaaaagcacaatgagataccaccttacacccactaggacggctaccatctaaaaaactgaaaataacaagtgttggcaaggatgtggagaatttaaaactcagcgttggtgggaatataaaatggttgagcagctgctgtg

SEQ ID NO: 935544 - DNA, 701 bp, Homo sapiens
cttctgacaagtgtgccaagaccattcagtaggtaaaaaatagtcttttcaacaaatgttgctgtgaaaagtgtgtatccacatactgaagaatgaaatcaaacctttacctaacaccatatacagaaattaactcaaaaggatcaaagactgaaatgtgagagctgaaactataaaacagttataagcaaaaccttagtgcaaaagcttcacaacattggaattggcaaacatttcttgggtatgataccaaaggtacagacgataacaaaaatagacaaaatggacttcgtgaaaattaaaaaatttatgcctccaaggacactatcaacagagtaaaaacaaaaccacaggatgtgagaaaatatttgcaaatcatatatatggtaagggattaatatwcagaatacagaactcctaaaactcaacaacaaaaaacccaatccgattcaaaaatgggcaaaggactttagtagacatttatccaaagaagatacacaaatggccaatacgtacatgaaaagatgcttggcttcattaatcattaggaaaatgcaaatcaaaagcacaatgagataccaccttacacccactaggacggctaccatctaaaaaactgaaaataacaagtgttggcaaggatgtggagaatttaaaactcagcgttggtgggaatataaaatggttgagcagctgctgtg

SEQ ID NO: 935545 - DNA, 595 bp, Homo sapiens
cacttgcctttctcctttttgggtgtctttgctatgattgaaacaaggcctagaattcccccaagtcaggctgtcttcactggttccctctaccccagtgtctagtaccaagcaagggtgcccctctaccccacttctgggatccctaaccagatgcctgcctccctctccaccccacttctgccacaatgcttccacggcaccaggctggtacccttgctatagtaacgagcctgctctagtcttagtatttgtttatgcatctctctttcccactaggccatgggaaattcagaatctgattcactgattcaacccyaagaagcaaatatttaataaatgtctactttgtgggctctgctgtaggtgctggaacaaaaactaatagtgccagccctcaagaaatgtatactccctgtgatctttcattcatttactggcccaaaacattcattcatttattcaataaatattcattaatattttgtgtgctgggctgcataccccaaagcatgcggatcattcaatgtttgcataatggggtagaaacaatggtctactcctacaataaaagaaaaaaaagtttaggcttatt

SEQ ID NO: 935546 - DNA, 704 bp, Homo sapiens
tctcctgcggaatttcaggaaggaagcagcttgcccagagaaaaggtgtgaacagacagacagcaacaccttgtttttttcagaagcttcaacaaaaggattttggcgccagttggcccagatttggaggggaggaagaaaagagtgggttgcctgcagtcagaaagagactgaaagkagaaggggaaaaaagtagaaaacacagaattatgacttggggaatagacagagtttgcggggatgtttctgggtgggtggtgggcatggcattgatcaaacttataacactgatgaatagaaacatataaatgactacataaaggaatacatttagagtgcctggcatatgacaaaaaaaaatgctcaatgtgatttagtacgtattcattgggcaggcactaagtaagtgtttattgaactaaagaaatgaaagtggtacatactttttaagggaggagaacagaatcgttcaagaaaaatgtttctcagccctgaactttcatcacatgggtggtgcttggttagaagcgaagaccgaattacatgtatcagtaactttgtaatttacttaaatttattgttttaatcatgatgttaactgagatcattgtagagtttatgtttgtcctaagatgtacttcttttttaaaaaattttaggttcactaggtatatgggcttgttacacaggtgttacatgcacaa

SEQ ID NO: 935547 - DNA, 568 bp, Homo sapiens
gccccgggctgttcatggctctggtatttttgcaggtttctttttggtgtatacaagtcggacagtggcaccattcacagtggccattgctctagaatgaagagattgcacagacttgattgggttttctttcctctttctaaaagtttaggatatggtattattatctacagtatgatggcataacatatggttgggggcaggagccgtaaatgggttaaatggaactattgttagaaatgtgcttctgcccatttttgtttgtgtgtatgaaacacctgctagtttgtgcttcttccttttgaaagagacagaagtatgtgacttctctcttgactcctttaccagtggaagagcaatgcacaccgagtggcagttgactttccacgagtgcagggaacaagagrgagggctgggcacccgggtcacctggagacaagtgtgtcccccgcctagaggagccagtggctttcctgttccagccaatgcctggcaggctggtgacccagagcggctagattttccgctctttcatcagaagcccctgctttgatttctatatgaaatt

SEQ ID NO: 935548 - DNA, 635 bp, Homo sapiens
aggcatatagaccaatggagtagaatggagagaccagaaacaaatcctcacacataaggtcaaatgattttttacaaggatgccaagacctttcaatgggaataggacagtcttttcaacaaatggtgctgagaaaactggctatctaatggaaaataatagagttggatccttaccttacaccatatatataaaagttaactcaaaatgaatcraagacctaaacaaaagatctaaaactataaaatgcttagaagaagacagaggagaaaagcttcatgacacttgcaaaccatatatctaataaaggggtaatatctagaacatatagagaatttctacaacccaacaaaaacagcaaaaaaccccagacaacctgattaaaatggtcaaaggacttgaatagacatttattcaaagaagatacacaaatgaataagcacattaaaaatactcaacgttaatataattaggcaatacaaatcaaaaccacagtgagatacagcctcacacccattaggatggcaactctgaagaaaaaaaaagaaaataacagatattgccatgaatgtggagaactcttgggaactcagtgcactgttggtgggaatgtaaaatggtgcagctgttatgga

SEQ ID NO: 935549 - DNA, 771 bp, Homo sapiens
cgcacacaatgcttctgccaaaactaccatctgtggacttatgaaatgccttatctgccatcatagtattccataaagcattacttctgatcaaacaaggctcatgagattcactggtcttaccatgtttcacaccatcctgaagcatctggcttgatagagtggtggaatggccttttgaaggtcagttacagtgccagctaggtggcaatactttgcaggactggagcagggttctctgggaggctgggtatgctctgaatcagtgtcaatatatggtcctgtttctcccatagccaggatacacaggtccaggaatcaatgggrggaaatggaagtagcactgcttgcttttacccctagtgacccatcagcaaaatttttgctttctatgaccttatactctgctggcctggaggtcttatttttaaaaggaggacagcttccaccaggaggaacaattattccattgaactggaaatcaaaactgccacctggccctttgaggttccttatgcctttgagtcaacagacaaaaaagggcgttgtgatgttggctggagtgattgatcctgattaccaaggggcaactggactactaatggaagtaaggaagcgtatgtctggaagaccccttagggctggctcttagtattaccatgctctgtgattacggtcaatggaaacacaaaacaacccaatctagcagaactacgaatatcccagacttcaggaataaagatttgggccacccaagcaggttaagaacta

SEQ ID NO: 935550 - DNA, 764 bp, Homo sapiens
ccttttaaataggtggcttcactatctctcacttatttctattgatgtattttggctgggaaagagaaatgcttatattcaatatctatggaattgagaatttgaatattatctttatcaaaaaagataaggcatatgacattgagtattaatagatcagaaatatttatttgattgacaactcagttacttttgcttctccaatggacactccataaatattcgaatgcgtcttatgtctactgtgtgcatagccttatgctaattccatgaatgcaatggtgatgtgtttccagctaacatctggaagccttattctgccaaagatgagagatcacggtacagaatgttcctaataagagtattttattatccatcctgtactcgcatggtccctgttctcaatgactttatagtcttgttgataaggtttcaaacatgcaagtattgagtaatatgtcagactgasttctagaaaacgttttattgactatgatcaggggcccaaatataggacaccaaaaagaaggatttagggtggacaagttgtagagaagctaaaggaaccaaggaaggtgtcacaaaagaggtggtttgaggagtgtgtgatgcaaggatagggtaataattcatctctagtctaaatcagaccttattttggcaattttattagtcatcaactaccgcaataatgtataacaaataatgccccaagtctcactggctgacgccacaaacattcatttttttattcacaggtctgt

SEQ ID NO: 935551 - DNA, 764 bp, Homo sapiens
ccttttaaataggtggcttcactatctctcacttatttctattgatgtattttggctgggaaagagaaatgcttatattcaatatctatggaattgagaatttgaatattatctttatcaaaaaagataaggcatatgacattgagtattaatagatcagaaatatttatttgattgacaactcagttacttttgcttctccaatggacactccataaatattcgaatgcgtcttatgtctactgtgtgcatagccttatgctaattccatgaatgcaatggtgatgtgtttccagctaacatctggaagccttattctgccaaagatgagagatcacggtacagaatgttcctaataagagtattttattatccatcctgtactcgcatggtccctgttctcaatgactttatagtcttgttgataaggtttcaaacatgcaagtattgagtaatatgtcagactgacttctagaaaacgttttattgactatgatcaggggcccaaatataggacaccaaaaagaaggatttagggtggacaagttgtagagaagctaaaggaaccaaggaaggtgtcacaaaagaggtggtttgaggagtgtgtgatgcaaggatagggtartaattcatctctagtctaaatcagaccttattttggcaattttattagtcatcaactaccgcaataatgtataacaaataatgccccaagtctcactggctgacgccacaaacattcatttttttattcacaggtctgt

SEQ ID NO: 935552 - DNA, 621 bp, Homo sapiens
gggggaggaagctgggaactctgcatggggctaccccacaccaggacttgtttctggcccccagtgacccctgggaatgggtgagttgaactggcaaggagcaatccaatcttgccatgggcctctggaatttcagcagtaggagacccctcaaccaccatgaacacttgagttggcagggagaggtgcttagagaagtggtaggggcagcatgccagttgaggtggagcccagagggttttgtgtgggagcatctgtagtggtgtaaggccaggaaagcccatctccctaggctctatttgctcctttagctttaggggaattgttacgcctgaactcttcagggccatcttgtgaggtyggtcccacctgagtaccccttgatctgctggcctctccctgggccctagcctggctgggcctgcttgcagggaagccttgggtgccctcggggcctgtatcatagcttctgtgctggtggactgtttttgactagtgaagagctccagcagggtggcccccacagccatatgccagcctgcccactcatttcccatactacagcttcctctgagctcacaggaattccccacatcactttgctgctgcgtgtgtccacag

SEQ ID NO: 935553 - DNA, 693 bp, Homo sapiens
cttttgttaattttgtcaaaggaaagatgactgtaggtgtatggaattatttctggcctctctattctattccattggtctatgtgcctgtttttgtaccagtaccatactatgttgtttcggttactgaagccttgtagtatagtttgaagttgagtaatgcaatgccttcagatttgttctttttacctaggattattcccttggctattctgactgtcttttgattctatatgaattttaacatagtttttttctaattctgtgaataatgtcattggtagtaaagtggttacattttytagggtgtataccatggagttcgttgtctcgtgccaggaaaacttaagacacagaaatgcacgaggagtttaggagcagaggtttaataagcagaagagaagagaatgataaacagctctttctagagagagggggtctccaagtggaaaggaccggcagacagtggatgcactggattttatagtcaggtttgaggaggtggtgtctgatttatataggattcacagattgatttgatcaggtatgacatttacatagcatgtggggaaggctggctgctccagcctaatactattatgcaaatgaactgtcccattgactggcaccaccttatctgctccttactgtacacatgactgataaagagaagggaagatggaaccaccattt

SEQ ID NO: 935554 - DNA, 631 bp, Homo sapiens
tgacttccatagaccattgcaaacatgcttaaactttccgacttgtcctaaacaaccttctttttaaacaaccaactattctgtttggggcaagtatctgccatacaagattctttcttatataaactctgtttcctttataaccttctttgcatagccagggtgtgacatattacyaaacccaataaaaagtcctagcaggctaagtgatagaaaaactttcacgcttcctttatgttggtaactattatccctgctattaagatgataattaagcaaaatactacagcaatggaaactctctgtttgatattccagttagaagatgcaacagtatatggtctcactgcaaatagagtgagtatagccattcccacgagtgtgacatcattacctggcagaacttgcaagataattgctcagaattagcatattgatccagatatttgcattacccatcccttttttgtttctcccaagctgcaggagatcaccacttaattcacaggaataagaaagttagtctaaaatgtaggcaaaaagcttaaaaacaattaatgagactaggatttaatgacaaatgtatgataatctttggagcataatttctctctcaagtcctcatttttgg

SEQ ID NO: 935555 - DNA, 761 bp, Homo sapiens
aattttatcttcagaagacaagcttcttgacagcacaaaaccccgaagtgctaaattccctcaacgcaaaaaccaaagaactctttctctgcattcagaatgatggcattcacacggggggaagacaggtctgtctgcacaacagaaggaaaggtgacctcattcatccaccttttcctgtctcygcgtgtgcgatgctcccgcgtgtggctgcagaaacggtaagtgtagagaggacgctcagagaccactcgggctcgggagtcatttagacttggccttgccatgcaggtgtcctgtgacctcagacaaaataaactctgggtgtcaacaggctcattggtgccgctggcccagtgcccaactaccagcaagtgctgtccctggcctgggcagcccatcacagaacagcagcaggccatcactgctggctgagcctgacctgcgacggtgcaccccaaattctgctttcttttcctccactgaaagtggaatttgatttttcccagtatcgggaatggctgagcacgcaggccgaagacaatgttgtagatgtcatacaccaaagggcatgaaagagctgaaaacaaaaatgacagattcgacggcctgcagcagccagccaaaataaactgcccggctggctccctgcagtgctcctggtgggtggatgggtaaaagggattggtgctggccagggctggtccctgccctgtttgccctaaaagcaggaagccgcctgtgggaaccaggccaattct

SEQ ID NO: 935556 - DNA, 638 bp, Homo sapiens
taactgcagaggtaggcagaggtggacatcctcgctgccacggcccgagcacacctggctggctgggttctggccgctccacaggccttgcactgagcacaggctgacctgcagctcgtttcctcttcactatctggggggagattcttcagtgsttgggaaataacgatttattctaagccaatgtttgggcccaaggtgagagggccctttgataagggacatatttaccatgtgaacatctaccatgtgccaggcactcttctaagctgggggaggggcagtggacaaggcagactgggtccctgccctcctggggctgacatcctactagggcagattggcacacagcaaagtaaaaacagctatatggtgtgaaaagcaccaggacacagagaagtagggcactctaaaagacctgggggtggggcgggcttactgagatagaatgcgagctctctgaggactgcaggaagatgggcagtgggcatgagaaggacaggggaggggtctttccggcagaggcagagggagtgagtgttgtggctgtcccagcacccaacaaagcggaagctcacatgcttctgtggggcagggtgcactttagaaaggactaatctggcatcatagataagctg

SEQ ID NO: 935557 - DNA, 638 bp, Homo sapiens
taactgcagaggtaggcagaggtggacatcctcgctgccacggcccgagcacacctggctggctgggttctggccgctccacaggccttgcactgagcacaggctgacctgcagctcgtttcctcttcactatctggggggagattcttcagtggttgggaaataacgatttattctaagccaatgtttgggcccaaggtgagaggrccctttgataagggacatatttaccatgtgaacatctaccatgtgccaggcactcttctaagctgggggaggggcagtggacaaggcagactgggtccctgccctcctggggctgacatcctactagggcagattggcacacagcaaagtaaaaacagctatatggtgtgaaaagcaccaggacacagagaagtagggcactctaaaagacctgggggtggggcgggcttactgagatagaatgcgagctctctgaggactgcaggaagatgggcagtgggcatgagaaggacaggggaggggtctttccggcagaggcagagggagtgagtgttgtggctgtcccagcacccaacaaagcggaagctcacatgcttctgtggggcagggtgcactttagaaaggactaatctggcatcatagataagctg

SEQ ID NO: 935558 - DNA, 638 bp, Homo sapiens
taactgcagaggtaggcagaggtggacatcctcgctgccacggcccgagcacacctggctggctgggttctggccgctccacaggccttgcactgagcacaggctgacctgcagctcgtttcctcttcactatctggggggagattcttcagtggttgggaaataacgatttattctaagccaatgtttgggcccaaggtgagagggccctttgataagggacatatttaccatgtgaacatctaccatgtgccaggcactcttctaagctkggggaggggcagtggacaaggcagactgggtccctgccctcctggggctgacatcctactagggcagattggcacacagcaaagtaaaaacagctatatggtgtgaaaagcaccaggacacagagaagtagggcactctaaaagacctgggggtggggcgggcttactgagatagaatgcgagctctctgaggactgcaggaagatgggcagtgggcatgagaaggacaggggaggggtctttccggcagaggcagagggagtgagtgttgtggctgtcccagcacccaacaaagcggaagctcacatgcttctgtggggcagggtgcactttagaaaggactaatctggcatcatagataagctg

SEQ ID NO: 935559 - DNA, 638 bp, Homo sapiens
taactgcagaggtaggcagaggtggacatcctcgctgccacggcccgagcacacctggctggctgggttctggccgctccacaggccttgcactgagcacaggctgacctgcagctcgtttcctcttcactatctggggggagattcttcagtggttgggaaataacgatttattctaagccaatgtttgggcccaaggtgagagggccctttgataagggacatatttaccatgtgaacatctaccatgtgccaggcactcttctaagctgggggaggggcagtggacaaggcagactgggtccctgccctcctggggctgacatcctactagggcagattggcacacagcaaagtaaaaacagctatatggtgtgaaaagcaccaggacacagagaagtagggcactctaaaagacctgggggtggggcgggcttactgagatagaatgcgasctctctgaggactgcaggaagatgggcagtgggcatgagaaggacaggggaggggtctttccggcagaggcagagggagtgagtgttgtggctgtcccagcacccaacaaagcggaagctcacatgcttctgtggggcagggtgcactttagaaaggactaatctggcatcatagataagctg

SEQ ID NO: 935560 - DNA, 609 bp, Homo sapiens
tcttttctttcttttctctttcttttcttttctttcttcctttttctttttctttttttttgagacagagtttcgctttatcgcccaggctggagtgcagtggcgcaatctcggctcactgcaagctccacctcccaggttcacgccattctcctgcctcagcctcctgagtagctaggactacaggtgcccgccaccgcgcccggctaattttttttttttttttktattttcagtagagtcggggtttcactgttttagccaggatggtctcgatctcctgacctcatgatctgcccgtctcggcctcccaaagtgctgggattataggcgtgagccaccgtgcccagcccagggcatgaattttttaggaaacctcagagtccagcagtgtctgcgccatattcctgattatcgaggacctgcctcctccctgtttccctttcccctgacctaactcaccatttctctccttttcccatggggcggggtggggggaagaaggctctcctgcacagactgcccctcttccacatgtgcggagacctactgtggacatggctccagactcatggtcttgtctagggtcagagcaccaaaaaacttgtt

SEQ ID NO: 935561 - DNA, 811 bp, Homo sapiens
cagatatccagttgtcccagcgtcacttgttgaaaagatttttctttcccccattgaactggcttagcatccttgtccaaagtcaactgaccataaatgtaggggtttagttttgttttcttgactctatctcatttttccatgtctatccttatgcccgcaccacactgtttcttgaatactgtagatttatacatttttgtaaattrggaagtgtgagccctccaactttgttctctgacttttcaaaactgttctgactattcttggtcccttgcatttccacagggattttagaattggcttgttgctttgggattttgaaagggactgctgtgactctgtagctcaatttgaggagtactgccatctgaactatgtgaagtcttccagtccatggatgtaggatctctttccatttattcaggtccttttaaatttatttcaacaatgttttgtaattttcagaatataagtcttacacttctcttcataaatttactcctattttattctttatatactataataaatgaaactgttttcttaattccattttttgaattattccttgctagattatagaaatatcgttatttttgtatattgatcttatatcctacaaccttgctgaacctgtatattaattctaagagtttttttggtgattccttatgattttctttatataagatcatgccatctttgaacagagagtgttttaccttttcctttccaatctgtatgccttttgttttcttgtctaacttcgaagttcctggttagactctccagtacaatattgagcaga

SEQ ID NO: 935562 - DNA, 588 bp, Homo sapiens
cctgcaaatgggccgggcgcggtggctcacgcctgtaatcccagcactttgggaggccgaggcgggcggatcacgaggtcaggagatcaagaccatcctggctaacatggtgaaaccccatctctactaaaaatacaaaaaattagccgggcgtgggggtgggcgcctgtagtcccagctacttgggaggctgaggcaggagaatggcatgaacccgggaggcagagtttgcagtgagccgagatcacgccactgcactccagcctgggccgcagagcgagactccatctcaaaaataaaaagaaatcctgcaaatggatratcaaattaggtactttactgagtgcatattttatgacattttatacacgctcctcagatctttatatacaatgatatactcaggatatacactcatgataaccttgcaaggtgggagtactgcgccagttttcagatgagaaaactacaggtttggggaagtggcttgcccacagttgcacagcaatggtagcgcgggaagctgcaaccctggctccctctgacggccgagtgtgtcctggacctccacaaacagcgtgacactgc

SEQ ID NO: 935563 - DNA, 662 bp, Homo sapiens
aggcagaagtttgctgcaggggtggaggcttcatggggaatctctcctagggcagtgcagaaaaaaatgtggggtgggagtccccacacagagtccactaacagcttgcaccatccacctggaaaagccacagacacttaatgccagcccatgaaagtagccaggaggggtgctgtacccaaaaagccacagggtcagagctgcacaagactgtgggagcccaccttttgcatcagcatgacctggatgtgagacatggagtcaaaagagattatttcagagctttaatacttgaccaccctcttggatttcggwcttgcatgaggcctgtagccctttcattttggccaatttctcccatttggaacaagtgtatttactcaatgcatgtacccccattgtatctaggaagtaactaacttgtttttgattttacaggctcataggcagaagggacttcccttgtctctgatgagactttggactgtgaactttggtgttaatggttaaatgagttaagactttgggggactgttgggaaggcatgattggttttgaaatgtgaggacacgagatctgggaggggccacaagcagaatgatagagtttggctgtgtccccacacaaatcttaccttgaattataataatacccatgtgtca

SEQ ID NO: 935564 - DNA, 795 bp, Homo sapiens
ttttgctgtcttagtgtaattggttagttattgtgcattgggcatatgagcctgttggtcctataacatcttcagcccactgcaagcagcctcaccctgattcctctgctcaatctactccaggacaggtagtaagggctccttgatctcgtatccattaattctttcttcctgagggaccctctcattccacgcttttcctttttctctcattctctcyccttctttcttctcccatccctttttctcccccttcttctcctcctctgcccaatcccaccactgaagttcctcagggccatgccagagcctctttttcttctctcctctccccactctgcataatccccctgggtaaactcatttgcccttgttgtctcaaccaccagcctcagccatattcttactccttcaaactctgaggaagctgcagccccaaccctcttccccctaaaaaacacaccacagggcattctgccctcaatttcggtgaatcatgacctctgatgtctgttcatggacataggaccatttatccagctcctcccttgaaaccctgtcttcctctgcttgccagaacaccatttgctcctgcctttcttttactcctttggcagctccttctctggctccttgctggcatttttctttgcttctgtttcctccttaaacatccacattctcagggccctgacctcttcctctccaaacaccctctgagggaggtcttaaaatttatagccatggcttgggaaaggaggagacacggagtgggtcttgaaagatgcacaggaa

SEQ ID NO: 935565 - DNA, 633 bp, Homo sapiens
aatgtgtgatcttgggcaagttatttaacctctctgactctgtttcctcatctgtaaaacagagataataagagtacctatatcacagggttgttgtgataattaagttagcatacacacaaaaacacaaatacccrgacacagacacacagtttccaacttaagatggttcaacttagatttttttgactttatgatgatgcgaaagccatatgcattcagtagaaacagtactttttttttttttttgacaaagtcttactctgtcacccaggctggagtgcagtggcgtgatctcagctcactgcaacctccgcctcccgggttcaagagattctcctgcctcagcctcccaagtagctgggattacaggcacatgccaccatgcccagctaatttttttgtgtttttagtaaatacagggtttcatcatgttggccaggctggcatcgaactggtgatccacccgcctcagcgtcccaaagtgctgggattaccaccgtgcctggccagaaaccatactttgagtacccatgcagccagccattctgcttttcaatgtcagtacagtgttcaataaattccatgaaatattcaacattttattataaaataggctttgtgttagatgag

SEQ ID NO: 935566 - DNA, 559 bp, Homo sapiens
ttcaacttatgaaaaaactgaatacccctttaactttagccagtgttcacacatagaatttcttttacaagattaatccttcataaaccttccataagttgctcaaaagtttagctttttcctatcaaacttaaaacaagactttaaccctttaatctaggcaaaaaaaaaaaaaaatccacattcccatgccttcttataatcttttaycaaaaacacattttactttccttacacaccttgcatgtaaaactgtttcctcagtagtttcaattacatgttacaatattaactcttagtaacttttatttttggtgaaaaacttagtaagtaagcaattttaattatgtactaggtgtggggcttaggacaccagacagaagtgcagataaagtctgactcttttcagcattgctaggggttatggctaactccacatgtccccaggccttatgtagaaactaatggctctaaagcaggtaagttgaacaattttcaaaagtcaaagaaataacttatgaccttaaagcattcatcaaacctaatatctgacctgcct

SEQ ID NO: 935567 - DNA, 595 bp, Homo sapiens
gattccagaaatcctagggcccttaggaattacactaaatctggctgggtgtgatggctcacgcctgtaattccagcactttgggagaccaaggtgggcggatcacttgaggtcaggagtttgagaccagcctggccaacatggcaaaaccccatctctactaaaaatacaaaaaattaaccaggtgtggtggtgtgctcctgtaatccctgctactcaggaggctgagtcaggagaattgcttgaaccagggaggtggagcagtaagctgaggttgtaccactgcactccagcctggatgatagagcaagactccrtctaaaaaaaaaaaaaaaaaagaattatgctaaatctgttctgcctgtgctctataaatggaagacaaaagcctggatgatagcacatatatttataacatggcttactgaatatttaaagcccactgttgagacctactgctcagacaaaaagaatcttttcaaaatattactgctcattgacaatgcacctggtcacccaaaagcttggatggagatgtacaaggagattaacgttttcatgcctgctaacataatgtctgttctgcaactcatgg

SEQ ID NO: 935568 - DNA, 787 bp, Homo sapiens
aagtctgtgaggagaaagtcgcctctgtgccccggagttcagaggtctaaggcgagtcctgaggaagaaaacgtagttgatggggcagagcagaaggggctggaggtggggtggagggagagggcattggacagaaggcctgggagacttggtgggggaygggcagccaggccgggaccctggggagtgcctcaccccgagcgagcggaagaccatctgggcttcccctagcccagaaagggtggattggcttcacctctgctggccatcacctctacatgccttggaactaaccttgtatattattattattgtcgttatttaagtattaaaagtattttttgaggtgagctgaatgagaccctttgctagagctggcacagggaggaaggtcgtcctggagggagggtagacactgtggagggaagggagacctgtgtcaggagagctgagaccacctctctgcccctcactactcttgtaatctttaggagtgtaaataatccccctaaggtggggacaggaccccagtccctgctgtgcgcaatagattatgatgatcaaaataaataatcagtgaatgtggatgggaaatctaagtaattgttaaaaccctgtgatgcttaaattttcactcacagaaatgtgtaggctaggagttttaagaggaatggttagtaattataggtatagttcagttttaaaaaatgtttgtaagagtgacaaagatagaatgaacacagttccagatcatggactgttcatcgtgtagtgagggatggtacaa

SEQ ID NO: 935569 - DNA, 574 bp, Homo sapiens
aacttacacaaacatcaatgttgtagcctactacacacctaggctgtatggtagagcctattgcttccaggctacagacctgtacagatgttactgtactgaacactgtaggcaattttaacacaatagtgaggacttgtgtattagtccattctcacattgctaataaagacatacccgagaccgggtaatttataaaggaaacragtttaattaactcagttccacatggctgggggggcctcacaatcatggaggaaggtgaatgaggagcaaggtcacacgttacatggtggcaggcaagagagcttgtgcaggggaactcctttttatcaaaccatgagatctcatgagactcactatcaggagaacagcaagggaaagatccaccccacgattcaactacctcccacagggtccctcccatggtacgtgggaattatgggagctacaattccaaatgagatctgggtgaggacacagccaaaccatatcaacttgtgtatctaaacatagaaaaggtacagtaaaaatgtggtattataatcttacgggaccaccatcgtaagaccaa

SEQ ID NO: 935570 - DNA, 648 bp, Homo sapiens
gttatgggcagtctcagctaggaagatgtgtgtcaggtgactctcttttttttttttttttttgccattctaggtgtatgtataaatgaccatgaaaccactgcattattaatttttgggttacaaataaattttagcaaataggcaaatatggaatccatgaataatgaggattggctgttcgagcaaaccaaatctaacatctaaaaggattataaccaaatgggatttatcccaggaatacaagggtggtttaatatgagaaaatcaatcaatgtaatatattgcattakaaaaatcaaagaaaggaaaaccacaggatcacctcaatcaatgcagaaaaggcactgataaaatctaactcatgattaaaacattcaacacactgggaatagaagagaacttcctcaacatgataaggacatttatgaaaaactcacagctaatacactcaattgtgaagtgtataactggaagttatagccagagtaattagacaaaaaacaaacggcatccaaattgaaaagaagtaaaactatcactactcattcacaattctatatataggacacgatcctatatatagaaaatcctgaaaaatccacaggaatgctactaaagctaataaattcagcaaagttgcaggat

SEQ ID NO: 935571 - DNA, 479 bp, Homo sapiens
cctttcttttgacaatgtttcactataatgttgaccaaaaaaaaaaaaaaaaaaaaaagatcccagccagggccactgtctgtgtgggttttctccaggtattccagtttccccccacatcccaaagctgtgcatgttaggtgaatcggtatgtctgcactgtcccggtgtgagtgagtgtgggtgtgtatgggtaygccctgtgatggatggcattctgcacagggctggttcccatctggtaccctgagcactcatgaccctgaactcaactgagcagactggaaaaaatgaataagtgaatgagtacaaattattgcaaaataaacgttcataaagcatacaataatcgtatagacacatgacaataaatgatgcagtacaaaagctctcggaggcccaccgtattcgtgattgtttctgaactgcatgcttataggaggggctccttacaatttttgcttggcagacatgaattt

SEQ ID NO: 935572 - DNA, 479 bp, Homo sapiens
cctttcttttgacaatgtttcactataatgttgaccaaaaaaaaaaaaaaaaaaaaaagatcccagccagggccactgtctgtgtgggttttctccaggtattccagtttccccccacatcccaaagctgtgcatgttaggtgaatcggtatgtctgcactgtcccggtgtgagtgagtgtgggtgtgtatgggtatgccctgtgatggatggcrttctgcacagggctggttcccatctggtaccctgagcactcatgaccctgaactcaactgagcagactggaaaaaatgaataagtgaatgagtacaaattattgcaaaataaacgttcataaagcatacaataatcgtatagacacatgacaataaatgatgcagtacaaaagctctcggaggcccaccgtattcgtgattgtttctgaactgcatgcttataggaggggctccttacaatttttgcttggcagacatgaattt

SEQ ID NO: 935573 - DNA, 479 bp, Homo sapiens
cctttcttttgacaatgtttcactataatgttgaccaaaaaaaaaaaaaaaaaaaaaagatcccagccagggccactgtctgtgtgggttttctccaggtattccagtttccccccacatcccaaagctgtgcatgttaggtgaatcggtatgtctgcactgtcccggtgtgagtgagtgtgggtgtgtatgggtatgccctgtgatggatggcattctgcacagggctggttcccatctggtaccctgagcactcatgaccctgaactcaactgagcagactggaaaaaatgaataagtgaatgagtacaaattattgcaaaataaacrttcataaagcatacaataatcgtatagacacatgacaataaatgatgcagtacaaaagctctcggaggcccaccgtattcgtgattgtttctgaactgcatgcttataggaggggctccttacaatttttgcttggcagacatgaattt

SEQ ID NO: 935574 - DNA, 578 bp, Homo sapiens
acctgaaagctgttctttcatggttcattagacttcgaccttgaactggcagcacctctttgacattgagggtgaagctgacaaaatggaaatggaaactcaccaaggtttcctatggaagtgctgtaatagagagcctgggactcccagcttcatcatttattaagatagctgttatgggctgggcgcagtggctcacgcctataatcccagcactttaggaggccaaggcgggtggatcatgaggtcaggagatcgagaccatcctggctaacacagtgaaatcccgtctctactaaaaatacaaaaaattagccgggcacagtggcgggcgcctgtagtcccagctacttgggaggctgaggcaggagaatggtgtgaacccgggaggcrgagcttgcagtgagctgagattgcgccactgcactccagcctgggcaacagagcaaggctccatctcaaaaaaaaaaaaaaaaaaaaaaagatagctgttatgtattgaatgcttgctatgtgtgaggcaagaggttaattacataaccactgtcttacttcatcctaataaccctctgaaatta

SEQ ID NO: 935575 - DNA, 728 bp, Homo sapiens
ataccttacctcattaacttctagactacctcacataaaatttaatcatttctagttgtaagaataaaggggcacaaaaatgagttgaaaaggaagaaagataataaaaagatatttccaatgagaaggaatcaagtgatagtttaaaacatttcataatatttaatgctttcatattaaaatgatgaaatgataatttcttcactctcaccaagcacataccacataacattaggcagatacacagataactttgagattttaaaaattacatacaaaatgcataaatacattatgttgaaaaacaaattcaagtgcatgggatagcaaatacaaatttaaagggttttttttttaagatggagtcttgctgtgttgcccagtctggagtgcagtggtatgatctcagctcactgcaacctctgctgtacagttcaagcgattctcctgccgcagcctcccaagtggctgggattacaggcattccctttgatgacctactgtcatggtctgttgtccctctcctttctttaaaggtaaccgttagtgtcakaagggtgtgcatctttccacattacatatgtgctggatattttccactcccccttccttcccctgccccagattcactctctatccaaccatgtttgtttctaccctgtgttgtgcctctagaggcgaaatcaagagaattccatgatatttgacttctggttgtgttcagccaa

SEQ ID NO: 935576 - DNA, 617 bp, Homo sapiens
tgtgagccaatatatttctgttcattatataaaccaaaaggtatctgagacaagtctaaatttgtttagaggtttcttttgccaagattaaggacaatggcctctgtcacagcctcaggtggtcctgagaacatgcacccaaggtggttgggttacagcatcgttttatacattttgaggagacagatgttacaggaaagacataaattaatacatataaggtatacattggtttggctctgaaaggtgggacatcttgaagtgggggaattccaggtcattggtggattcaaagatttcctgattgacaattcattgaaagagttgagcaccacctgaagagttgaactcagcttgattcaagayaaagggggttgtagaagccaaggtttttatcatgtagatgaaggctccagatatcaggctccagagaaaatagatggtggatgtcctcttgtcagactctcttgaaaagacatagtaatggaaggagattctctacagagagcaaatttcccccataagagacagctttgcagggccatttcaaaatatgccaaagaaatatattttgagataaaatactttgatttccttcaggaaatgttacatcatgt

SEQ ID NO: 935577 - DNA, 608 bp, Homo sapiens
cctgggtcgagtaggggctcagaaagctgtgaaactcactcatttcctccatcaggacttactttggtcctggatgaataatattgaagatatatgcttaaaatattcctaacatcagaatttgtgcatgtgttttcttcccaaagaaagctataaacagcaaaaattttgctgtaagcttccctgtgtcttctctccctctctcccttccccttcccctgaaactaaaaggaaggttaaaagcccatttttctgtgaccagcagaccttatctatgctcccaattccagttccttgtaacacaatttataaaatcctgtgagatcctgtctcctttgccgtgccgctgcaaggtcataaggtagataaaacttaagttgcaattccggttttcctcaagatctgagacatgttaattgtctcygtttctcgctctggtaacatcttcccactgcacgtatttcccgccttaaagagttgaaaaggtgatcgaaaaatctaacactggctacctgctcgggaccccttccaggctgtggaagctttgtactgtcactctgctcaataaagcctaccgtttttttttctctctgtcagatccgtgtctc

SEQ ID NO: 935578 - DNA, 658 bp, Homo sapiens
aaaaaaacaaaacactttttttccagcaaaacaggatccaagaaaagaaaaacataaaggctttttcaatatatctataagttggatattcactttaaattaagctgagcactctctaagaaaatccttttaactcccttattacccaacttcagccacaacaagcagccratatttctggctttcaaacgctactgaaggtcactacacaggtgaaaccaacacgcctcaattaaggttatgctttaaccacaagtgtatgaggtattttcaaaggggctaagcagttcttacaaaatttagaacctttaaaggtaacccagagaaaggaagatttaagaaaaaaactagaagttgttcatggaggggaagagaatcagcaagtagcaaaagtcacacagatatcagtccaaaagtactcattccctaagtcaggtttgaacctggctgttactataaaacggtggaggctaaacaaaacattgctacatggttacaggtcactctcccgaggatgtaaaacaagatggaggcctgcagcaaagtttgctactgaccttacagaaagtcatgcagagcacaccaaattggctacagcttaagaccaacctgacaaatctttttttataattaaaactttacagagaatataaacagt

SEQ ID NO: 935579 - DNA, 658 bp, Homo sapiens
aaaaaaacaaaacactttttttccagcaaaacaggatccaagaaaagaaaaacataaaggctttttcaatatatctataagttggatattcactttaaattaagctgagcactctctaagaaaatccttttaactcccttattacccaacttcagccacaacaagcagccaatatttctggctttcaaacgctactgaaggtcactacacaggtgaaaccaacacgcctcaattaaggttatgctttaaccacaagtgtatgaggtattttcaaaggggctaagcagttcttacaaaatttagaacctttaaaggtaacccagagaaaggaagatttaagaaaaaaactagaagttgttcatggaggggaagagaatcagcaagtagcaaaagtcacacagatatcagtccaaaagtactcattccctaagtcaggtttgaacctggctgttactataaaacggtggaggctaaacaaaacattgctacrtggttacaggtcactctcccgaggatgtaaaacaagatggaggcctgcagcaaagtttgctactgaccttacagaaagtcatgcagagcacaccaaattggctacagcttaagaccaacctgacaaatctttttttataattaaaactttacagagaatataaacagt

SEQ ID NO: 935580 - DNA, 664 bp, Homo sapiens
aaagcaatgttgacacaaaggccagccatagtaaataagacatatattcagaaaaactatgtagtaaccattgaatcataaagatcttagaacagaaaatggcctttagaagttatctcatcattattccttcaacaacacccagatagaggtgaggaagcctaaatatttcagggatggcaatacttattacaattattttaaaagtttctgttttttgcagggcatgtaatcccagcactttggaaggccaaggagggcagatcacttgagtccaggagttcaagaccagactggctaacatggmaaaaccctgtctctactaaaaatacaaaaattagccgggtttagtggcgtgcacctgtaatcccagttactcaggaagttgaggtaggagaatcacatgaacctgggaggcggaggttgcagtgagccaagatcacaccactacactccagcttgggcaacagagcgagactctgtctcaaaaaaaaaaaaaaagttcctgtttttgtggggcttaaattaaaaaatatgtatgaaaaagttagctaagctgattctagtcactcttagtcccgttttcccttctgacaacatggacagcaagtttattactttctcaaaaggaatcacaggaatacaaattaaggtatcttcaacc

SEQ ID NO: 935581 - DNA, 664 bp, Homo sapiens
aaagcaatgttgacacaaaggccagccatagtaaataagacatatattcagaaaaactatgtagtaaccattgaatcataaagatcttagaacagaaaatggcctttagaagttatctcatcattattccttcaacaacacccagatagaggtgaggaagcctaaatatttcagggatggcaatacttattacaattattttaaaagtttctgttttttgcagggcatgtaatcccagcactttggaaggccaaggagggcagatcacttgagtccaggagttcaagaccagactggctaacatggcaaaaccctgtctctactaaaaatacaaaaattagmcgggtttagtggcgtgcacctgtaatcccagttactcaggaagttgaggtaggagaatcacatgaacctgggaggcggaggttgcagtgagccaagatcacaccactacactccagcttgggcaacagagcgagactctgtctcaaaaaaaaaaaaaaagttcctgtttttgtggggcttaaattaaaaaatatgtatgaaaaagttagctaagctgattctagtcactcttagtcccgttttcccttctgacaacatggacagcaagtttattactttctcaaaaggaatcacaggaatacaaattaaggtatcttcaacc

SEQ ID NO: 935582 - DNA, 680 bp, Homo sapiens
taagaataggataatcataaaatctgtattgactgaacttataaaaaacttatataaaacttatataaaattgaagatggtaagactgctgtttgggagtgttctcaaagatctaattagtgcaataattaagaggaaaaaataggagtgtaacataagaacagagatgtacaaaattatcattatcttcaaataatttgcattacaagagaatcaacaaaaaaatatgcactaatataattttcatatggtaattttcatgacaaaacatgcaagatgaacacccttcctacataccatcaaaaactatttttttaaaaaatcacaatgagggcctggcgtggtcgctcatgcctataatcccagcactttgggaggccaaggtgagggaattgcttgagccaggactttgagaccaacctaggcaacatagtgagaccttgctctacaaaaatttttttcaaattaggcaggcatggtggcatgcacccgtagtctcagctacttgggaggctgaggtgggaggatcwattgagcccaagaggtcaaggctgcagtgagccatgattgtaccactgcactccagcctgagtgaccctgtctcaaaacacacatacacacacacacacacaatgaaaaaatatctcatttccaataagatacctgaagtgtataggaaa

SEQ ID NO: 935583 - DNA, 469 bp, Homo sapiens
ggcacggagctagctgaacgatgaatcctgcttaatgaggaatacaagaagttttgtcccaaccatgaggatttgaagattttatagtatgacaaccacctgtatgcaaagctttgtctcctgtggtataacctgaagatgaactcaaaaccatgaattttcatttttttcctatttgccatgcttctcaaagmgtctcttgtagggaaaggaaaacaatgaaatcattatcctatattttgcaagcacagagtctgaatactataatagtgaagaaatgattgcctggaataacaactcaaatgtgatttcaaaatatgagagagaaaggccaaaaacagaatttgaattgcaagcctacttaattgttgattgggctctaatggtctgttcactgtactactgcctatatgaacatgagccctattcctaattacaacccatttttgttgttgttatctagatgaca

SEQ ID NO: 935584 - DNA, 469 bp, Homo sapiens
ggcacggagctagctgaacgatgaatcctgcttaatgaggaatacaagaagttttgtcccaaccatgaggatttgaagattttatagtatgacaaccacctgtatgcaaagctttgtctcctgtggtataacctgaagatgaactcaaaaccatgaattttcatttttttcctatttgccatgcttctcaaagagtctcttgtagggaaaggaaaacaatgmaatcattatcctatattttgcaagcacagagtctgaatactataatagtgaagaaatgattgcctggaataacaactcaaatgtgatttcaaaatatgagagagaaaggccaaaaacagaatttgaattgcaagcctacttaattgttgattgggctctaatggtctgttcactgtactactgcctatatgaacatgagccctattcctaattacaacccatttttgttgttgttatctagatgaca

SEQ ID NO: 935585 - DNA, 730 bp, Homo sapiens
catcatggtgtgatgatggcgtaaaccagagagtgactttaaccaaggcatggattagggtgtcttgggattggggacatcagtatagctaagcctttggtggccactccctcctatcccctaatgctgcaattttttcatcaaagtccttcatgctggggttttgcattcctgtaataaacatccatccttgttggtatatttttgtgcttagctaccatgatgactgatgacaaagatggggtgccagtccccatgatgttgaacctccggagamgttttacaaaaaacataaatgattaaaaatagtttcacatgggatacaaagcctcatcaatataaaaggaataaaaatgaaattagagaggtttacatagatagtcttcaaaacaggaaaacagttccacctctggctggattttgtatgaaggtctggggcctcgcaattcattcgtgctttgccccacatgaaaatgatgaaaagaccctaaccacataattgagagcagaaaccagagagcttgagcagcccagactgaaatcctgcctccatcactgagaagctgtgtgatgtcagagaagtcacttcacttctctgaacctctgtttgctcatctgtaaaatggggatgataatagcattgacctaacaagattgttatgaggattaactgagcaaatgtatgtagagttcttggcacaattttggacacgcggtgagtgttcagtaa

SEQ ID NO: 935586 - DNA, 805 bp, Homo sapiens
ggtggatacaaaactctccttgatggtcaggttttcagtgggaaagggctgactctgaacccagctgggtttccttcttagagtggtttatagctgctgcggttagcacccttgtaccctgggggacccagagagtaagaacagcagctgtgaagaggaagccagttggggaatctgttttcttgcatttccttctgttcttttgactgtatttgggtcttggaggactgggattgctaggggagatcacaagccttggaaagagtcaaagagtcaccatctgctgcacaaacccacactttgttttctgccaactgcatccttaggcacttggaagacaaaacagatgaggaacacayagtaagtcaggtgggttcacgtgttcccaaacttccctggcaactctgataataaaagtcaccagaggagtttttcaatcatcagcttcccaagacccacccctggagattcagatgtgatgggtctgaattctgtggagttggggttggagattagaaaaacactctagcccacccagcagagacaaacaaaatgagagggaaagggaagaggctgattcaagctgaggaggaggatgccaagtgacatcaataccccatatttcttaaaagagctagtagcatgatctttggggtcataaaaaccaagatttgaaacccagctttgctgtgtgacctcaaaaagtgatttaacatcccaaaacttcactttgatcattcataaaataggaacaataatttctgcctgatacggttgagaaggaattaaaaaggaggcaatggat

SEQ ID NO: 935587 - DNA, 698 bp, Homo sapiens
cagcctgcctcagtagtaccaggagacaccagggaaaggcttccttctttccaagctgaggctgagaaggaatgggaagaacgaagagaagcacctttgtggaggcctcctccagctggccctgggtttaggaacatcacacactcaacctccaaaggccctcaggggctggcccaaggtcacacagcttgacagtgcggagcacttcgaagccagggcgtgtggtgtagaacaggctgggtgcctgaattcaatcagccctctctacttctctactcagagcctcccaggctgtggggtgttcacctgtgcaccttcaagccgatcacttccttggggtcctcgtcaattcaattccatggaaatattacaaggggtagacagagatgagccgtgtcagtgtctgtactagcagagggcaggaccactgagcgtccggaggggagacgagtgtytgggtgtccctgggaacctggcttgtctcgacccctctggggggctcctcttggctctgacctccattctcccagactcacccccactcatgcccacccaccccgaggggccccccagtgtgcactcacacactcacactcaaactcaccaccccacttgctctctaattaccaggaacgtggcgctgtctcaggttcttcctcccctgcattcctcagcagctgccctcactgggcagggca

SEQ ID NO: 935588 - DNA, 633 bp, Homo sapiens
cccatatcctgaatatcctttcccacacatattccctggatttctacttgtataaattagagaaatcaagaagttattttggaatatagtgcatctcctcatgggtcacactttgactttaaaagtcttctgtaacttgaatctagttataggtctaaacacaaagaggggtggtggaggtaagtcatgaggagaatctgaattgtcttgcatgggaactgcctcagtggaggccattaaaatttcctaaggcaatgcaggcttaatctactcagacagaaatgaaaagggtgacactactgtgaactgggaggacaattcyactggggattgggaggctgcttccactggatgtggagaaagctcttctactggcaaagaagccttatcagaatataggggctcaaagtccccagctttatcagggtcttctcagacatcttcattccaacttacaggatcccattctttaccattcaatgccctcactttaacagtagatatcctgcgaggctgggagttaaatttgcattgtaattcagccaatctcaggatgaagtcctgcattttatttccagcaatttcagccctgcagctacaggagatcaggttctcccttggggcatacctaaa

SEQ ID NO: 935589 - DNA, 671 bp, Homo sapiens
gcttttcttgccatctttatcttctcgaaaggaaaaacaaaatggcacaggcaaggctttttgacccagtgaatgggtgagtttgcagactttttatttctcatgatccaagtaaggatttgtagttttcatgatcaaaattaaattttctctttgcagataactaaggaatctactttacyttgaaattttaagtaccagggaaaaaggacatgagagttatgtgtttatcaaaagtggagacactcaagtgcgtagcagaaggcactgggctttggagtcctggaaacctcggttacattctcagccttcgtgctctggggtgtgtggtacgcgtgggcacgcaccctttctcagtgccgtaaactcgggccagtgggagtagtgagtatcttggagggttgttaggaaagttaaagactccagtgtgcagttggctgtcagcaaattgcagctcctttcacttgccagagagagcaggagtctctcaccatcccccaaatcgtctatactactcttggggaagactcttcttttttaggactcacttcataagacggcaaggactctgccattgcagtcccttggcagtagtgatggagtcctgagggtgaggcgcgtccatgctctagcccggggacacgtcacccacttccaggaagggtctgctc

SEQ ID NO: 935590 - DNA, 635 bp, Homo sapiens
cagctggttagtcgcacagccaagatgggacctctgggacactcctacttcttgctggccatatacgtatgaatttaaaattaactacttcttgttggccatagatatgttaatttcaaattttcataaagttctaggtgatctctgctgtattgaatatctcaagtaattgataattactatatatgctaatataggtacagaaggtaccttacagttcatgagtaatctattaaaaattcaaacaacaatatatacactaagcatgctgtgttataaactgwcttaaaagtaatgttctgttttgtttgtttttatattcttgaagtgtttggccaaaggacctaattcattcatatttaaaaataaatgactgtaaatcataacatgttacctctttcatcaagtcaaatagccttaatcctaagtgcctaggtggaaattcagaaatcaataagcaagggagaaagatattggtatgtagtagaggtatgtagtagaggaagtgattctctcccaacatattactcttcaagggcatttactgaagtaactatttttaacttacgcaggtccaattaagaatagtaaataaactggaagagtaaaacaaaagcaaagtattttatgtggca

SEQ ID NO: 935591 - DNA, 643 bp, Homo sapiens
ctctgtgtttttttatatttttaaatagagacagggtctcgctctatcaccaaggctggagtgaagtggcacaatcatagcccactgcagcctcgactcaacctcctgggttcatgtgatcctcctacctcagcctcctgagtagctgggactacaggtgaatgtcacyatgcccatcaatttaaaaaaaatgtgtagagatagggtcttactatgttgctcaggctggtctagaactcccggcctcaagtaatcttcctgcctcagcatcccaaagtgctgggattataggcatgagccacagtgcctgactcattctgtgatttttgatcaggacacagaaagaaatcaggggaactggaggaccctacatagtggaagagttctatatcttgattgtggtgctagttacatgactgtgttttaggcgataacatttcatagaactacataacctgcactgccgcccgcccccaccacaatagtacatgcaaatactaatgaaatcaaaatatggtctgtaatttaattttattgtaccaatgtcagtttaattgcttttaagatgttatcatgaggagaagccaggagaaggatatgcaagtgttatctgtgttaatttttcaacttattgtgagaaact

SEQ ID NO: 935592 - DNA, 615 bp, Homo sapiens
cagcaaagtttcagattcaaaatcaatgtgcaaaaattactagttcctatacaacaacaacagccgagacaagaaccaaatcaggaaggcaaccccctttacaactgccacagaaagaataaattacctaggaatacagctaaccagggaggtgaaagatctctacaatgagagttacaaaacactactcaaagaaatcagagaagaaacaaacaattggaaaaacagcccatgctcattgatagaaagaatcaatattattaaaatgatcatactgcccaaagcaatctacagattcaagggctattcctatcaaactaccaacaatattcttcacagaactagaaaaggctattttaaaattgataygaaaccaaaaaagagcccaaacagccaaggcaatccttagcaaaaagaacaaagctgaagtcatcaaggtacctgacttcaaactatactacagggctatagtaaccaaaagagcatggtacaaaaacagacacatagaccaatggaacagaatagagagcccagaaagaaggccacacacctataaccgtctgctctttgacaaagctgacaaaaacaagcaatggggaaaaggctctattcaat

SEQ ID NO: 935593 - DNA, 612 bp, Homo sapiens
cctatcattgacttaactgtaactgagatatcagagatcgccaaactctcgggctgcagttacggtggcacttctctcatttggggttagtgtctgatctagcagtaacattacatctctccatgtcagatcaaagtattgtcctaacccttgtaaaacatcaatatagccatcagggtcatctgagaatttacctaggtctattttaatttgcttcaagtctgagagggaaaaaggtacatgcactctgactgggctgaattctccagaatacatcttaggggtgtttttgccttgtggagaacgtttcccatctgaaaatagaacatagggatgccagcacccctagtcattttctgatgagcattagtcataggtgtcctctgtggtcctaatgcttattcctttccaggacgtataacaacccatggacctctgcttattggattcgttacgctcacygatgtagcagtcctgcaccccttttcccacctttcttgaccacaaagaaaggggtccaggctgctggattctagtggtccttttccagcgtgcccaacattgcctttgtgctcaggggtgagtcctagagctgggctgggttcctgagta

SEQ ID NO: 935594 - DNA, 590 bp, Homo sapiens
acaaatagaaagggaatagccctgtaacagcagacttaaattgtaaaggaaaagtgaagttttttgtttttttttttcctaagagaatgcctatcagatagaatctcccttgctttttgatgaagtggggcttgctctgttactttgtagtrggagaatttctcagacattctgctgtagcaaaaaatttagaccttatcacctttcccaatcctataccccctcatttcctcattatttttcttagtggcttagagtgcatggcccaaccttataagcacacccccagcataccctcatcatatcctgtttaccttcaatcttactcatttgaaaaatctataatccggattaaactcaactacttgtctactcatgcctgtacactagcagctaagaatgattgaagaaaatcacagaagcctcccgtgtgatcttgcttgatgtttataaccacaaatatccaatgagcgctccgtactgtgctgaccaaccagctactacacttacctaggcagtttcatcttcgattctcacagtgcctctttcacctgttttcctctatcctcaaatcttgggcatccctctct

SEQ ID NO: 935595 - DNA, 590 bp, Homo sapiens
acaaatagaaagggaatagccctgtaacagcagacttaaattgtaaaggaaaagtgaagttttttgtttttttttttcctaagagaatgcctatcagatagaatctcccttgctttttgatgaagtggggcttgctctgttactttgtagtgggagaatttctcagacattctgctgtagcaaaaaatttagaccttatcacctttcccaatcctayaccccctcatttcctcattatttttcttagtggcttagagtgcatggcccaaccttataagcacacccccagcataccctcatcatatcctgtttaccttcaatcttactcatttgaaaaatctataatccggattaaactcaactacttgtctactcatgcctgtacactagcagctaagaatgattgaagaaaatcacagaagcctcccgtgtgatcttgcttgatgtttataaccacaaatatccaatgagcgctccgtactgtgctgaccaaccagctactacacttacctaggcagtttcatcttcgattctcacagtgcctctttcacctgttttcctctatcctcaaatcttgggcatccctctct

SEQ ID NO: 935596 - DNA, 726 bp, Homo sapiens
tgggttcaatagtcttgctggctcaagagtgaacctatagaccttcacagagctaaacttcttaaaacaggacatgtagagttcttcagttattcatttttccctcacgatctcactagctctactcaagaacaaagcagcagaccttcacagcaagtattacaactaacaaaacacagtatggatccaaacagcagtaacaacattcattacaaacagcaaagtttccacaacatagaaaagaacacaagtaattaccactacagtctccggcagcctgcttttattctcttatctggccccacccacatcctgctgattggtagagccgagtggtctgttttgacagggcgctgattggtgcgtttacaatccctgagctagacacaaaggttctccacgtccccaccagagtagctagatacagagtgtggattggtgcattcacaaaccctgagctagacacaaggtgctgattgctgtgtttacaaagtttgagctagatacagactgcygattggtgtatttacaatccctgagctagatacaaaggttctccacgtccccaccagagtaactagatacagagtgtcgattggtgcattcacaaaccctgagatagacacaaggtgctgattggtgtgtttacaaaccttgagctagatacagagtgccgattggtgtatttataatccctgagctagacataaaagttctccacgtcca

SEQ ID NO: 935597 - DNA, 629 bp, Homo sapiens
gtactttcatgatacacatggagtatccacagtatcacaagggctattttttccataatccaacttatttgtattattggtagtgagctactgttgacgtccccacgttagcaatttagtggctatactgatgataagcatttccatgcatcatgtggtcaacagcatttgctaccaagtgccacgttccatgctcagcagtgggaccacaggatgatcgagacaaagttcctgacctttagcagcaatatcgaacaagtgagattgtcaagaaagaaaaaatccttgtaaaacataccatacccctacgattcagtcatcatgctcccaggtatttaacgaagggagtaaacccacacctggatgtttatagcagctttattcataatcgccaaaacttggaagcaagaaagatgcccatcagtgggtgactggataaagaaactgtgatccatctggtcagtgaactattacraagccataaaaagacatgaaagattcctaaatgcacgttattgtacaagtgaaagaaggcaatgtgaaaagactcatcctgttagacattccagaaaagccttctgcctttttctatggagatggtagaaaacccactggttgcgagggatttg

SEQ ID NO: 935598 - DNA, 676 bp, Homo sapiens
accattgcactctaaactccagcctgggcaacaagagtgaaactctgtctccaataaaagaatgggaggaaagtgattacaataaccaaatttcatttaaatgccttgattttcttgggctgcatcttattgattggacaactcagtcagtgccttttgttttttccatcaataactgaagattcctgaggcttaaactggaaaacaggttacttaataatagagggcaccagacagattctgctcagttttcctttatttctgattgtttmtttacaaccatccatgcaagagtaactctctcatgtattctcaagcctgaattccactctagacattcagattcccattttcgactctacaggatacacgttcccaaagtcccatcgaatccatggcaacatttcccccaagtcctgcccctgcttgatcagcattcctttcccactttcagagcccatgtgtgaaacgatgggttctgtgctccctttaggatgtacctaagacctaggttttagtttccaagtgtccagaagaaagcgtttgacatacccatccaaataggcaggcattcaacagcagtattgatctgcctccaggtcataaaatgacctgttgccacagtcagggcagtagtcagtaccgaacaagatcctcttggggtgccttaagtccc

SEQ ID NO: 935599 - DNA, 758 bp, Homo sapiens
cccgcgggagagttatggtgctgatggtactctctgctggagcagatttgctcaaattagggctgagctgatgaacagagtgagggacttaaggcaccccaagaggatctttttctgtattgacaactgccctgactgtggcaacaggtcattttatgacctggaggcagatcaatactgctgttgaatgcctgcctatttggatgggtatgtcaaacgctttcttctggacacttggaaactaaaacctaggtcttaggtacatcctaaagggagcacagaacccatcatttcacacataggctctgaaagtgggaaaggaaagctgatcaagcaggggcaggacttgggggaaatgttgccatggattcgaygggactttggggacctgtatcctgtagagtcgaaaatgggaatctgaatgtctagagtggaattcaggcttgagaatacatgagggagttactcttgcatggatggttgtaaagaaacaatcagaaataaaggaaaactgagcagaatctgtctggtgccctctattattaagtaacctgttttccagtttaagcctcaggaatcttcagttattgatggaaaaaacaaaaggcactgactgagttgtccaatcaataagatgcagcccaggaaaatcaaggcatttaaatgaaatttggttattgtaatcactttcctcccattcttttattggagacagagtttcactcttgttgcccaggctggagtttagagtgcaatgg

SEQ ID NO: 935600 - DNA, 729 bp, Homo sapiens
ctgcagcaaacagaggaggcaggagtctttgagggggcattttccagtgctctggtctctgggaataatttcattaccagtcctggaaggggtgggagagaggagcctggggaaaaggctgcgggagcttcagcagttattgaatgacagcattctcatgttctccttgtccctggtctgtcctctgaggctgtgggctcctgccctctgcttttattcctgagaatgaagttcactgggccacctcactcattttgactctgccccttcagagackcccatgaaggtccgttttccctcttcaaaatggcctattttgtcattcttgaatggatggttgaaagttgctttacacttgatgtggacataagcagactgtaaatccattaaaaatagaaacaaaaggaatggtggccaggcatggtgacacgcacctgtggtctcagctactcagaaggctgaggctggagaatcacttgagcccgggaggctgaggttgcagtgaaccgagaacatgccactgcactccaccctgggcaacagaataagaccctgtttcaaaaataaaaatagaaacaaaaggaatgggcagtttgcctctggggcctccaggctaggtgagcatccatccccattgggtctgtttgtctctctaaagcattcctctctgggaaatcaccttcctcgaacccaaagagcaagggttctgtagagcatttactaggagct

SEQ ID NO: 935601 - DNA, 729 bp, Homo sapiens
ctgcagcaaacagaggaggcaggagtctttgagggggcattttccagtgctctggtctctgggaataatttcattaccagtcctggaaggggtgggagagaggagcctggggaaaaggctgcgggagcttcagcagttattgaatgacagcattctcatgttctccttgtccctggtctgtcctctgaggctgtgggctcctgccctctgcttttattcctgagaatgaagttcactgggccacctcactcattttgactctgccccttcagagactcccatgaaggtccgttttccctcttcaaaatgkcctattttgtcattcttgaatggatggttgaaagttgctttacacttgatgtggacataagcagactgtaaatccattaaaaatagaaacaaaaggaatggtggccaggcatggtgacacgcacctgtggtctcagctactcagaaggctgaggctggagaatcacttgagcccgggaggctgaggttgcagtgaaccgagaacatgccactgcactccaccctgggcaacagaataagaccctgtttcaaaaataaaaatagaaacaaaaggaatgggcagtttgcctctggggcctccaggctaggtgagcatccatccccattgggtctgtttgtctctctaaagcattcctctctgggaaatcaccttcctcgaacccaaagagcaagggttctgtagagcatttactaggagct

SEQ ID NO: 935602 - DNA, 662 bp, Homo sapiens
gtcgagtgtatgcagcttttctaggtgcaggatgcaagctgttggtggatctaccattctggggtctgaaggatggtggccttctcacgctctactaggcagtgcccaagtggggactctgtgtgggagttccaacctcacatttccataccacactgcccttatagagtttctctgtgagggctcttcccccataacaggcttctgcctggacaccaaggcttttccatatatcctctgaaatctaggcagagactctgtggctgggatgcagggagcagtgtcctgaggctgcacaaggcagcagggccctgggtctggcccacaaaactgttcttccctcctaggcttctgggcctgtgatgggaggggctgacatgaaggtctstaaaatgcctttgagacctttctctgagtgtcttgtctatcagcatatgacttctttatggttatgcaaatcttgctagtaagtggttgctccacagcctgcttgattcctctctgcaaaatcttttcgttctttgtcacatgaccaggctgcaattttccaagcttttaccaagcattttccaaatgcttcctttttaaatacaagttccaacttcaagccattcctttgctcccacatcttcacataggctgttagaagaagccaggtcaca

SEQ ID NO: 935603 - DNA, 604 bp, Homo sapiens
agaagacatacaaatggcaaataagaatacgaaaagatgctccatatcatatatcattagagaaatgcgaattaaaatacagtggcatactactacacatctattagaatggcccaaatctggaacactgacaacagcagatgctcatcagaatrtgtagcaaaaggaactcttgttcattgctggtgggaatgcaaaatggcatgtccactttgcaagaaaatttggcagtttcttacaaagctaaacatactcttaccctatgatccagcaattacactccttggtatttacccaaaggaactgaaaacttatgttcacccaaaaatatgcatgcagatatttatggcagctttattcatgattgccaaaacttaaaagcaaccaagatatccttcagtaggcaaatggataaataaactgtggaacatccagaaaatgaaatattaattagtgctaagagaaatgactgagcaagccatgaaaagacagggatgaaacttaaatgcatttgctaagtgaaagaagccagtctgaaagggctacatcctgtatgatcccaactacatgacatttctttaaaggcaaaattatgaagatagta

SEQ ID NO: 935604 - DNA, 604 bp, Homo sapiens
agaagacatacaaatggcaaataagaatacgaaaagatgctccatatcatatatcattagagaaatgcgaattaaaatacagtggcatactactacacatctattagaatggcccaaatctggaacactgacaacagcagatgctcatcagaatatgtagcaaaaggaactcttgttcattgctggtgggaatgcaaaatggcatgtccactttgcaagaaaatttggcagtttcttacaaagctaaacatactcttaccctatgatccagcaattacactccttggtatttacccaaaggaaytgaaaacttatgttcacccaaaaatatgcatgcagatatttatggcagctttattcatgattgccaaaacttaaaagcaaccaagatatccttcagtaggcaaatggataaataaactgtggaacatccagaaaatgaaatattaattagtgctaagagaaatgactgagcaagccatgaaaagacagggatgaaacttaaatgcatttgctaagtgaaagaagccagtctgaaagggctacatcctgtatgatcccaactacatgacatttctttaaaggcaaaattatgaagatagta

SEQ ID NO: 935605 - DNA, 470 bp, Homo sapiens
aagaaacatcagaagagaactatcacaagctgctaccacatttacgcagttgccttcatctgggctcacttattctgccttctcttctgctactagagatgaactgaggccaagttctctataagatcccattttatctgggcactaaaacaaaagtgactttgtttgtaccatgcaattttccttcactttggagcattcytgtcagcattttaaatatactgaaatgtctcccatgttatttaaaaaccaaacaaaaacaaaccttcctctttgacccctctagctactatccccatttttctacttctcttaaacagtgatattcaaaaagattaatctaaatttgcagtctggaattgctcttttcaccttttctctggaatcatcttctatcaggcctttgcctctccactacatacaaactgctctttcaggtcaccagtgacttccctcttattaaatccaat

SEQ ID NO: 935606 - DNA, 625 bp, Homo sapiens
tcaggtcaccagtgacttccctcttattaaatccaatgactaattctcagaccttatctcacttgatccatctatagaaactgagctgttgatcactttcctctctttgggctccacggcaccacacttccctgctttttcttaacttaccttcattcctctccagtctcctttcttgtttctcctgaccctacaaatctgaacaaaggaataccctaaggcccagtcctcaaacttttcttttcatccatacttgctctatgggtgatctcatccagtttcatggttttaaagaattatttatatatggatgctttccaacttcaaatctctagcttggacctcttcctgaactctaggatcattatctaagtgcctacttaacatgyctacttggatttaatgaacatcttaaaaaaaattaccaaaaatgttaatcttccctcataaaatctgttctagcctcaatcttcctcatctcagcaaatggctatagttacccttaattcctctctttatctatttggttaccgtatcttacccacttagcaaattctgtcatctctaccttgaaaatactttcttcagatgggaaacctgaccacttctcaccacctctactgcc

SEQ ID NO: 935607 - DNA, 593 bp, Homo sapiens
tggctatgcatgcttggaggacagttttggataccctgggaacttacaccatagcttccactctggcagaccatgcttgactggtggagagctccagtggggcggcccttgcaaccgcgcaccagcccacatgccccctgtccatactgcagcttcttcctgggaccaaggaaactttccacattgctttgctggagcatgtctgcaggcaagttttgcattctttgccctgacagcaagcggtaatgaagtctgccccacctctctctgccgactgccattgctgacaaagccttgacaggcacagagccggccagccttgccccagccagtgctctgcccttgtgctaacactgtgcagagaacagcagatcctccaccgcccccaagcaaccactcctgcttgtggggcacagaaaaagcacccagrcctgcactcaccagtgtcctgcctacaagccaacaccacctccagcatgaccatgcgcacagtcaccaggaggagctccctcaacccccacctagctgagtggcctccaccactgtggtgaatgcctgcagggaggcaggtaccctggcacccactagcagtc

SEQ ID NO: 935608 - DNA, 598 bp, Homo sapiens
ccgccacagcaggcagcacagcagtagatttatgttccactcaaaaggtttctttactccctggagagaccccgcaaaagattcctacaggggtatatggcccactgccaggagggacagtaggcctcattttagggagatgaagtctaaatttgaagggagtccaaattcatactggggtaattgattcagattataaaggggaaattcagttagtgatcagctccactgttccctggagtgccaatccaggtaatagaattgctcaattattgcttttgccttatattaaaattgggaaaacaaaacggaaaggacaggagggtttggaagtaccaactctgccrgaaaagccactcaatgggctcgtcatgtctcagagaatagacctgtgtgtacagtcactattcagggaaagcagtttataggattattggataccgatgctgatgtttcccttatcgccttaaatcaatggccaaaaaattggcctaaacaaaagcctgttacaggacttgtcggtgtgggcagcgcctcaaaagtgtatcaaagcaccatgattttacattgtctaggacctgataatcaagaaagtaca

SEQ ID NO: 935609 - DNA, 598 bp, Homo sapiens
ccgccacagcaggcagcacagcagtagatttatgttccactcaaaaggtttctttactccctggagagaccccgcaaaagattcctacaggggtatatggcccactgccaggagggacagtaggcctcattttagggagatgaagtctaaatttgaagggagtccaaattcatactggggtaattgattcagattataaaggggaaattcagttagtgatcagctccactgttccctggagtgccaatccaggtaatagaattgctcaattattgcttttgccttatattaaaattgggaaaacaaaacggaaaggacaggagggtttggaagtaccaactctgccagaaaagccactcawtgggctcgtcatgtctcagagaatagacctgtgtgtacagtcactattcagggaaagcagtttataggattattggataccgatgctgatgtttcccttatcgccttaaatcaatggccaaaaaattggcctaaacaaaagcctgttacaggacttgtcggtgtgggcagcgcctcaaaagtgtatcaaagcaccatgattttacattgtctaggacctgataatcaagaaagtaca

SEQ ID NO: 935610 - DNA, 598 bp, Homo sapiens
ccgccacagcaggcagcacagcagtagatttatgttccactcaaaaggtttctttactccctggagagaccccgcaaaagattcctacaggggtatatggcccactgccaggagggacagtaggcctcattttagggagatgaagtctaaatttgaagggagtccaaattcatactggggtaattgattcagattataaaggggaaattcagttagtgatcagctccactgttccctggagtgccaatccaggtaatagaattgctcaattattgcttttgccttatattaaaattgggaaaacaaaacggaaaggacaggagggtttggaagtaccaactctgccagaaaagccactcaatgggctcgtcakgtctcagagaatagacctgtgtgtacagtcactattcagggaaagcagtttataggattattggataccgatgctgatgtttcccttatcgccttaaatcaatggccaaaaaattggcctaaacaaaagcctgttacaggacttgtcggtgtgggcagcgcctcaaaagtgtatcaaagcaccatgattttacattgtctaggacctgataatcaagaaagtaca

SEQ ID NO: 935611 - DNA, 598 bp, Homo sapiens
ccgccacagcaggcagcacagcagtagatttatgttccactcaaaaggtttctttactccctggagagaccccgcaaaagattcctacaggggtatatggcccactgccaggagggacagtaggcctcattttagggagatgaagtctaaatttgaagggagtccaaattcatactggggtaattgattcagattataaaggggaaattcagttagtgatcagctccactgttccctggagtgccaatccaggtaatagaattgctcaattattgcttttgccttatattaaaattgggaaaacaaaacggaaaggacaggagggtttggaagtaccaactctgccagaaaagccactcaatgggctcgtcatgtctcagagaatagacctgtgtgtacagtcactattcagggaaagcagtttataggattattggataccgatgctgatgtttccmttatcgccttaaatcaatggccaaaaaattggcctaaacaaaagcctgttacaggacttgtcggtgtgggcagcgcctcaaaagtgtatcaaagcaccatgattttacattgtctaggacctgataatcaagaaagtaca

SEQ ID NO: 935612 - DNA, 610 bp, Homo sapiens
atagttactgttaactattgtcatcctcctatgctatcaaacactagaacttattccttttatctaattatatttttgtacccattaaccaaccttttttcatctccctctccattctaccctttccaatctctggtatccaccatgccactctctacctccattaaatcaattttatttaacactcatrtatcagtcagaacatgcaatatttgtgtttctgtctctggcttatttcatttaacatactgtcctccaggctcatctatgttgccacaaatgacaggatctcattcttttttatggttgataataatctattgtgcatatatactacatcttttcttctttctcccattgataatgaacacttaggttgattctacatcttggctgttatgaatagtgctgcaataaacatgggggtgcagatatctttttgacatactgattcccttttcttaggatatttatgcaccagtggggttgctggatcataagatagttctatttgtagttttttgaggaaactacatactgttgtccataatagctgtactaatttacatttccaccaacagtgtatgagagttcccttttctctgcatct

SEQ ID NO: 935613 - DNA, 624 bp, Homo sapiens
tagaataaggaaaattgatcccctaataatacaactaacttttttggtacagaacttacctagtttttgaactgaaaggctcgtgtcctgagaaatttcttagtcttaggcaaactaaggtggtctctatagaccccaacgttgtgctgttgctgctgctgctgagatgatctccttcaccttttcttacacctttgcaataatcttccatagctgtgagtaacctagatgcatctcttcctgtacccatgaggtacctagcctgcaggatggtattctccctccgcacccctgctccatgtccaccaacctggttcaacttcttttgtccatcaataattccctggcttattctattcattttctagtttgaaatayttgacatctttgcttagaccctctcctgcattgcctatatgcaattaatcaccaagtcctattgacttttattttgagatgtttgtggaatctgcctttgtccatctttactaccatgacaataacaataatgataaaaataaactccaactttaaggaccaatcagagtggactcaagaaagaatggaaggaaagaaataggaatcaacacgtatataggattcagaatttctcaaaattatttg

SEQ ID NO: 935614 - DNA, 603 bp, Homo sapiens
ctttggaaaggaaagttcggtctgtaaacttgttttacatattattttcatagaaatgcaaacattggtacatttttaagtaaaaaatagaaatttgcatgaatgtttaagataaaaacatttcaaagaatgttgtcccttgcagcaggacctcaaaccctgaacgttcaccttcccagactctttctgctctgtcatccccaaccccagacaactgataagctcagtctggtgcaactcctctcatttcccagtttgactcctctcccgccggytgacactgtgccagctcaggttcttatcagctatcactcaggttattgcagttgaatcctacctggacctgctgcctccccatcattcctttcccctctccttctacactatgcccagggttgtctttctttcttcttttttttttttttgtttttttgtttgtttgtttgtttgtttggagatggagtctcgctctgtcgcccaggctggagtgcagtggtgcgatctcggctcactgcaacctctgcctaccgatgtgagccatgtgagccaccacgcctggcctccttctggtattttcttttttttgagacggagtctcactct

SEQ ID NO: 935615 - DNA, 710 bp, Homo sapiens
ctatttccagcccatgcccagagccatttcttagctaccacggaatatgggtctcactcagtcactggttgcaccaggaaataggcctaggagagccccaaagagaaagctgctcagtgagtctaaccacacagaaagaatcctacatcaccaccacgcaaaggcggtggttttactttgaaataacaggttattgggccctggcttctcccctttattcttctgtgttaatccacttcgctcggtctctttcagtacagaacaggtacagccaggtactcccagttcaaaaacaactttattttctctgaatagagacctttcaatagaagaaacataacttgatcattgtaatttaagcctcagcattctctttagcttgggactagtcaacatggttatcagtcttctctggttatccctgcctcaactcaaatttttttgcttgatctattcttcattgsccataaccacccacccccaccttcttaataattccattcccataaaacagtgccagagcaacttctttcaggtatgagctgataagtttccttctgcttggctgtcacggaaattgctttctccatggtttccgggaccctgatttggtctgggtctcagatgctgcccttgaagtcttcctgaactcatctgttacttttctggcattccgccaaaggatattgtccaggaaggtatctttacct

SEQ ID NO: 935616 - DNA, 594 bp, Homo sapiens
tccctggccagaacttccaataggatgtggaataggagtggtgagagaggatatctttgtctttcggtggttttcaaggggaatgcttccaccttttgtccattcattatgatattggctgtgggtttttcacgtatgactcttactattttgaggtatgttccttcaatacctagtttgctaagagtatttaacatgaagggataytgaattttattgaaggcctcttctgtatatatacaaataatcatgtggttttaatctttacttctatatatgtgatgaatcacatttattgatttgcatatattgagacaacgttgcatcttggggatgaagcctacttgatcgtggtggataagtgttttgatgtgctgctggatttggtttgccagtattttgatgaggatttttgcattgatgttcatcaaggatattggcctgaagttttctttttttgtcatctctccaccaggttttggtgtcagaatgatgctggtctcatagaatgagttagggagtaatccctccttctcaattttttttggaatagtttcagtaggagtggtaccagctcatccttctacctctggt

SEQ ID NO: 935617 - DNA, 609 bp, Homo sapiens
gaaacagactgagcttaaagggtattgaagtaaaagtggtttgaatcctagttagaaacaaacagttgggtctcagggaaactcggctttgaaatctagaggatttacagttgaaaggtaaaagataaaactttaagaatggttaaggtaccaagaaagggattataaggggacaagaacagttgaagggagaaaagataattacatagaggagtagcagccaaaaggaaagaagaaaaatggtggtaacagtttaacagacagaagttgagaaragttccaaaagtaagtgatcaaaaatgtcaaatactctgaagaagtcatagaggagtaagaatgaaaaataatgagtacatccagtagttaggatatgactgataacctttaaaggagaagctttagctgtatgtaggtggcgttggggggtgggggggtgacactcaaatcacaaagagtcaaaaaatgacaaacaggctagtaaagaatactctttataaatgttgatggtaaatggaggaacaagaaagcatgcaaagtaaaggcagatcttcctcatcctaaaaacaagcctgaaaatatctacagacacaatgaatgtggtagagagaa

SEQ ID NO: 935618 - DNA, 597 bp, Homo sapiens
acaccatcatcatttttaaatggccctccaatactctgaaatatatttcctctgtcacaggacccaatacccactttctcagcaaataatctatccttacaaactgcaccattcactaggtagaaagagcatcctaaaatgtgtcacaatcatagaaaatgttcagaaaactgggatgttcctggctcttctgtcagtctccaacaacttccaaagtttgggaacaaaactgcaaaagaaacaatgaacataaatagaccatttcagtactgtaaagcaatttgttgtaacaaaacaaacaagaggtcgattgcagaggccacaggacaaatctaaactacttcattacgccagtgtggctaaaagggctctctgcaccatcatcccccaaattgttttttcaatgtataattaatsactttgctgtcatcatttcctgattcttcagttgtttaagtttccatggcaagctcaaaaacaaagtgaagcaatgctagtccagtatgagtatatgataaatggacatatgaataaacgatgactgtgaacatctagaaactctttcatataattgttttttcattttaatgtcacagc

SEQ ID NO: 935619 - DNA, 540 bp, Homo sapiens
cagtaaagaccattctgacaaggtctgagatggaaatgagggacaaagtactggaagctaaagtaaaggccatcctttttatacagttgcaaacttggctgcattgtatccatgccatagggtggtgtgacaggctgagcttgagagtgctgaactaggatagctggtgaaagaaatttctaagcagcaaagtgttcaaggtgctgcatggttacttttggccacytgcagtgagatttggaagcaaaaggatgacaaagataaaacttacaatcctgaaggaagtgcagcctggccacatgcagaatgaaaaaagcatgttcatgagaacaaaataaggatgtggctaagtgactcatggttaaatagattagcataaatagaaaggaccctcccatcacagacccaaagccataggaaggcagaatggtttttggcaattaccctaaaaagcctgctcgatgggcttgctgcccagggccatctccggactctgcccccacattccggtgcagggctccttggtcccagctgtggctt

SEQ ID NO: 935620 - DNA, 428 bp, Homo sapiens
tcttttttcccccttcctttcttctgggttgataatgacaatttcaaagaaaaactttaattaaagattttatacaaaatagccaaaagtagaataataaggaaaatgagcattgatgtgtttattgtaagagaaatcctttttcatggtttcatttcaaatctgtacttcttaaatttaaaatgaatttagtggtggagacagaaaggtgccagactgacagccgtgggtgttgaactcttccgcttgctgctgagccaaracatgggggtgcccgaagccccctccccttgggactcagtctcagtctacaggcaggcgggtgggatgcggttcctgacccccttctcttagaagccaggtgagaaaaagtggctccgggtgaggagctgcacagaaaacagctacacggaagccaataagaatga

SEQ ID NO: 935621 - DNA, 672 bp, Homo sapiens
atgtgtgagtatatgcaggtgtgtgtgtgtgagtgtatgtgcatgtgtgtgtgaatatatgtgcgaatatatgtgtgtgagtgatggtgtgggtatgcaagtatatgcaggtgtgtgtgagtatatgcatgtgtgtgatatgtatatgtgagtgatggtgtgagtgtatgcgagtatatgtgcatgtatgtatgtgtgagaatatatgtgtgtgagtaatggtgtgagtgtgtgtgagtatatgcacaggtgtgtgtgtgtatgaatatgtgtgtgagtgatggtgtgtatgcctgtatctgtgcatgtgtgtgtgtgaatatatgtgtgagtgatggtgtgagtgtgtatgagtacatgcacaggtgtgtatgaatatatgtgtgtgtgaatgatggtgtgtgtgcatgtgaatatctgcatgtgtgtgtgtgaatatatgtgtgtgagtgatggtgtatgtgtgagtatatgcacaggtgagtgtgtgtgtatgaatayatgtgtgtgtgagtgatggtgtgtgtgcatgtatctgtgaatatatgggtgtgagtggtgtgtgtgtgaatatatgcacaggggtgtgtgtgtatgaatatatgtgtgtgtgagtgatggtgtgtatgcctgtatctgtgcatgtgtgtgtgtgaatatatgtgtgagtga

SEQ ID NO: 935622 - DNA, 600 bp, Homo sapiens
tctgaggcctccccagccatgtggaactgtaagtccaattaaacctctttttcttcccagtcttgggtatgtctttatcaacagcatgaaaacagaataatacagtaaattggtaccagtggagtggggcactgctgaagagttacccaaaaacatggaagtgacttaggaactgggtaacaggcaggggttggaacagtttggagggctcagaagaagacaggaaaatgtgggaaagtttggaactccctaaagacttgttgaatggctttgacaaaaatgctgatagtgatatggacaatgaaatccaggctgaggtggtctcagatgcagatgaggaacttgttgagaactggggcaaaagtgactcttattatgttttagcaaagagactggcaacattttgcccctgccytagagatgtgtggtactttaaacttgagagagatgatttagggtatctggcagaagaaatttctaagcagcaaaacattgaagtggtgacttcggtgctgttaaaggcattcagttttaaaagggaaacagagcataaaagtttggaaaatttgcatcctgatggtgcgataaaaaagaaaatcc

SEQ ID NO: 935623 - DNA, 780 bp, Homo sapiens
cagcctgcttccactcaaggtggaaagcaaaaggagagtgggcgggtgcagagatcacatggcaagagaggaagccaggaagagaaacagaggaagccaggctcttttaagaacctgctgtcatgggaactaatccattactcaccctgggtaagggcattaatctgttcatgagggatcaccctcatgacccatacacttcccagtaggccccatctcccaacactgtcacgttggggatcaaatttcaacatgagctttggtggggacaaactacatccaaaccatagcagcttctttcatttagtatcatgtttcacaggttccttcatgttgtaacgtatattcataccttatccccttttatcrctgaataatattctgttgtatggatataccacatattttttatccattcattagttgatagacatttgggttgtttccactttttggctgatataaataatgctgctataaatattagcatataaatgtggttttggtggacattcccaccagcaatgtatgagagttccagtttttccacattgttgccaatgcttgtaattgtcttttgtgttatagccatcctagtgggtgtgaaatggtatctcttggttttgatttgcgtttccctgatgagtcatgatgttgagcaccttttcgtgtgcttgctgcccatttgtaaatcttctttggagaaaagtctgttcaaatcctttgcccatttttatgtgtgctgttgtctttttttttttttttttttaaattgagttg

SEQ ID NO: 935624 - DNA, 788 bp, Homo sapiens
caagactagataaaacctcttggctttggttagttttacctccctttccctattcctaatgagaagcaaaattgatttttagttttaccttcattctttgtttgacttcttacaaagatgataactagggtcctgcagaattgggagatgggtggagggcaggagagagrgataaaaacaaggaagagagggaaaaggccttaggtggccacaggaatcaaggagtagctttactttcttgttgctggtaatcttcccccttcctcacacatatcataggatcacatcagggctcaacctgacttttttctttttgcagatgaaagaatattttaaaaggacccatgatctctttccttttacaagatctttatgctttaaatgcacaggcaaagagagagaaggagggtatttagtcttatgagtaagcttatccttgccaattattccttctatatttttaaaatattatttatgtcaacattcatctctcccagtgctacttggattgaagccagacgatgcctcttctcagcaccagtaaggacgtaatactggagttctcttcatctcctccttacttacttggacacagttctgtgacctatttttggaagtcatttagaatctcattttacaaagcactggataccatggggtgaataacctgagtaacttgtttccccaaatcctggctgaaaactgatggttcctcagagatgtgaaacattcacctcactgtgcttgtgtctctgtggaactctactgcagccttattactgtgagat

SEQ ID NO: 935625 - DNA, 540 bp, Homo sapiens
aaattctaaaaagcaaaacttgaatttgctgtctgccaagtattatgttgattccacatgagtggagtgatgtgctggcattgcattaggtatttgatagtataagtaacctagagatgacttaaagcagtggtccctaacctttctggcaccagagaccagttttgtggtagataatttttccatggactggggaggtggrgatggttgtgggatgattcaagcacattacatttattgtgtactttgtttctattattattccattgtaatatgtaatgaaataattatacaactcaccataatgtagaatcagtgggagtcctgagcttgttttcctgcaattagatggtcccatctgtgggttggagaagacagtgacagatcatcaggcattagcttctcataaggagcccacaacctagatgtctccctgtctcccaagtgcagttcacaatagggtttgcactcctatgagaatctactgtgctgctgatctgacaggacgcagagttcaccccgtaatgtgagtgatgggga

SEQ ID NO: 935626 - DNA, 621 bp, Homo sapiens
ctcctggctgctttcatgggctgctgttgagtgtctgtgtcttttctaggcacacagtgcaagctgttggtgaatccagcattctgaggtctagaggtttgtggccctcttctaacagctccattaggcagtgccccagtggggactctgtgtgggtgctccaatcccacatttttcttctgcactgccctagcagaggttctgcatgaggaccccgcccctgcagcaaacttcttcctgggcatccaggcttttcatacatcctctgaaatctaggtggaggttcccaaacctcaattcttgacttccatgcatccacaggctcaacaccatacyggagctgccagtgctttgggcttataccctctgaagccatggcttgagctgtaccttggccttttttagccatggctagagtgactgggacacagggcaccaagtttctaggctgcatacagcagtgggccctgggcccagcccaggaagccattttttcctcctgcttctccaggcctgtgatgggaggggctgctgcaaaggtctctgacattccctggagacattttccccattgtcttggtgattaacctttggctcatcattacttatgaaaatttctgt

SEQ ID NO: 935627 - DNA, 613 bp, Homo sapiens
cggcgcgcccagcgcctgagggtcctgtggagccaggcttcccggcacacaggcgcggtggagcctcggggcgggcatacaccccgcgagctcgcggcggccgggcactgcgggtcctcgggtggggactctggagttcagtcttgaaggacaaggtcactgaggatcagggaaccaggagggcagggagggtggggaggggtgcctaggcctagtgggagaagcatgtgaaagttccctaagagggctgcgggtgaacaagcgcttggcccggcctctcccggtagactgctgtggggccccggagcctcccttctccaaggccccatggacgccccctgaagggtgacgccctcgcccacgctgagctctgagtgctgcacgagaactcccagagccgtgtgcacacgcgctcgccgtgttacmtgcaggactgaggcaccaggaggcccaggaactggctcaagctcgtagaacttcatggcaggatctgaaacaggcagatcagctccaaaatccagctcttttcaaattttttaattgtggtgaaaatatacctaacataaaatgcacagttgtaccatcttttagtgtgggttaactggcattaagt

SEQ ID NO: 935628 - DNA, 613 bp, Homo sapiens
cggcgcgcccagcgcctgagggtcctgtggagccaggcttcccggcacacaggcgcggtggagcctcggggcgggcatacaccccgcgagctcgcggcggccgggcactgcgggtcctcgggtggggactctggagttcagtcttgaaggacaaggtcactgaggatcagggaaccaggagggcagggagggtggggaggggtgcctaggcctagtgggagaagcatgtgaaagttccctaagagggctgcgggtgaacaagcgcttggcccggcctctcccggtagactgctgtggggccccggagcctcccttctccaaggccccatggacgccccctgaagggtgacgccctcgcccacgctgagctctgagtgctgcacgagaactcccagagccgtgtgcacacgcgctcgccgtgttacatgcaggamtgaggcaccaggaggcccaggaactggctcaagctcgtagaacttcatggcaggatctgaaacaggcagatcagctccaaaatccagctcttttcaaattttttaattgtggtgaaaatatacctaacataaaatgcacagttgtaccatcttttagtgtgggttaactggcattaagt

SEQ ID NO: 935629 - DNA, 631 bp, Homo sapiens
ggtgggaagatagcttgaacccaggagttcgagacctgcctgggcaatatagcgagaccccattctccacaaaaagaaagaaaaaaaaagaatctccttcctgctaaaggttcagtaacagtctactgtatgcataaccacatttcgcttgtccatccactcacccatagaccctcagaatgcttctaccttttgactcttgtgaatcatgctgctttgaacatgggtgtgcaaatatctgtgagagtccctgctctcaaaaaaatccacattcttggcacmatgaagaatcacctctcacagacaccagggaaaagcaggtctgtctgagagcagagggtgaggagtggaaagccgggctgtggaccacagtgggcggaggaaagcccacccgcgtgttcccatgtgtgggaggagagaggagagatgccctctagtgaaggaactcttgtagcagccacctccattcctgcttggcctgcagagggccaactcaggagcccagaccaggaagaagtcaaacgactgacaagatccatcaggaagcagaagtgcgcccgtgtctcatctgcaacaacaaacagttaggaccagccacccaccccccaacccagggggaagtgcatccacc

SEQ ID NO: 935630 - DNA, 797 bp, Homo sapiens
cttggagaaacagtgtaaaccggcagtgtaaacaagagcagggcatgtatgagtcgttgagaacggtgaataggagtatgactagacagaagatagtagggatgacaagttttttggggcacagtccaacttggtttggtgtctggaatgagactggggcctaataaaaaggagcgtccaaacaggagctcaaacgggctgtaccctgtggcattccaaggacaggcctgaattctgagaagggaaagtggtaaaagtattgtccagtcctttttaagttggtggctgagcttggtgaggtgtgttttttaaagaccattagtccgttctacctttcctgaagactgaggaccgtaagggatataaaggtttmactgaataccaagagcctgaaaaactgcttggctgatttgactaataaaggctggtccgttatcagactgtatagaggtgggaaggccaaactgaggaattatatctgacagaagggaagaaatgaccgcagtggccttctcagatcctgtaggaaaggcctctacccatccagtgaaagtgtccacccagactaagaggtattttagttttctgacttggggcatattgagtaaagccaatttgccagtcctaggcgggggcaaatccccgagcttgatgtgtagggaagggagggggcctgaataatccatgaagagtagtagaatagcagatggaacactgagaagttatttccttgaggatagatttccacgatggaaaggaaatgagaggttctaagaggcgggctagtggctagtact

SEQ ID NO: 935631 - DNA, 797 bp, Homo sapiens
cttggagaaacagtgtaaaccggcagtgtaaacaagagcagggcatgtatgagtcgttgagaacggtgaataggagtatgactagacagaagatagtagggatgacaagttttttggggcacagtccaacttggtttggtgtctggaatgagactggggcctaataaaaaggagcgtccaaacaggagctcaaacgggctgtaccctgtggcattccaaggacaggcctgaattctgagaagggaaagtggtaaaagtattgtccagtcctttttaagttggtggctgagcttggtgaggtgtgttttttaaagaccattagtccgttctacctttcctgaagactgaggaccgtaagggatataaaggtttaactgaataccaagagcctgaaaaamtgcttggctgatttgactaataaaggctggtccgttatcagactgtatagaggtgggaaggccaaactgaggaattatatctgacagaagggaagaaatgaccgcagtggccttctcagatcctgtaggaaaggcctctacccatccagtgaaagtgtccacccagactaagaggtattttagttttctgacttggggcatattgagtaaagccaatttgccagtcctaggcgggggcaaatccccgagcttgatgtgtagggaagggagggggcctgaataatccatgaagagtagtagaatagcagatggaacactgagaagttatttccttgaggatagatttccacgatggaaaggaaatgagaggttctaagaggcgggctagtggctagtact

SEQ ID NO: 935632 - DNA, 797 bp, Homo sapiens
cttggagaaacagtgtaaaccggcagtgtaaacaagagcagggcatgtatgagtcgttgagaacggtgaataggagtatgactagacagaagatagtagggatgacaagttttttggggcacagtccaacttggtttggtgtctggaatgagactggggcctaataaaaaggagcgtccaaacaggagctcaaacgggctgtaccctgtggcattccaaggacaggcctgaattctgagaagggaaagtggtaaaagtattgtccagtcctttttaagttggtggctgagcttggtgaggtgtgttttttaaagaccattagtccgttctacctttcctgaagactgaggaccgtaagggatataaaggtttaactgaataccaagagcctgaaaaactgcttggctgatttgactaataaaggctggtccgttatcagactgtatwgaggtgggaaggccaaactgaggaattatatctgacagaagggaagaaatgaccgcagtggccttctcagatcctgtaggaaaggcctctacccatccagtgaaagtgtccacccagactaagaggtattttagttttctgacttggggcatattgagtaaagccaatttgccagtcctaggcgggggcaaatccccgagcttgatgtgtagggaagggagggggcctgaataatccatgaagagtagtagaatagcagatggaacactgagaagttatttccttgaggatagatttccacgatggaaaggaaatgagaggttctaagaggcgggctagtggctagtact

SEQ ID NO: 935633 - DNA, 701 bp, Homo sapiens
aaactgaggaattatatctgacagaagggaagaaatgaccgcagtggccttctcagatcctgtaggaaaggcctctacccatccagtgaaagtgtccacccagactaagaggtattttagttttctgacttggggcatattgagtaaagccaatttgccagtcctaggcgggggcaaatccccgagcttgatgtgtagggaagggagggggcctgaataatccatgaagagtagtagaatagcagatggaacactgagaagttatttccttgaggatagatttccacgatggaaaggaaatgagaggttctaagaggcgggctagtggctagtactatagcatagtctgcctttgctggtgagtggtgattaggcctggtggaacygccatcaataaaccaaatgtgatgagggtgagaaacagggaagaaggaaatgtggggaaatggggtgaacgtcaggtggatcagagagatgcagtcatgagggtcaggtgtggtatctggaataatgtgggagaccggattgaagtccgggccgagaacaatggtaattgtgggactcaacaaagagtgggtacaactgaaggagccgggggagcagaaagtataagtgtcaggtgtgaggaagaaaatagattttggaaattatgagaactgtagaaagtgagttgagcatagtttgtgattttgagggcctct

SEQ ID NO: 935634 - DNA, 760 bp, Homo sapiens
aaactctcctgtactatctctttatagtcacatcttcactccatccatatcctctggcacccactgatctgttttccttcactatagctttatcttttcaagaatgccaaatgcatggaatcacacagtatgtaaccttttgacactgtcttgtcttactcagcataatgcccttgagattcatgcaagttgctgtgtgtttcattcctttttattgctgaataatattccatggtatgaatctactacagtttggttaagtattcatccattcaaagacatctgggctgtgtctagttttggattattatggaaaattctgctatgaacatttatgtacaaagctttccgtggacatatttttttttttttttttttttgagacggagtcttgctctttcgcccaggctggagtgcagtggcacggtctcggctcactgcaagctctgcctcccgggttcacgccattctcctgcctcagcctccagagtagctgggactacaagcacccgcccctgcgcccggctaattttttgtagttttagtagagacggggtttcacctgtttgccaggatggtctcgatctcctgacctcrtgatccacccgcctcagactcccaaagtgctgggattacagccgtgagccaccgtgcatgccccgtggacatatgtttttatttctcttggctatgtatcaaagagtgaaattgcttactcatatggtaactctatgtttaacctattgaagaacttgccaga

SEQ ID NO: 935635 - DNA, 614 bp, Homo sapiens
ggttggatgatctccctttcccacttccacagtttggggactcacagtatttggggtgtctcctggtttctgcaagagcaatccacttccttctgggggtctgttggtcctctcatgtttcctgatttattcctgcagtcattatggagcaaaaattcatgacgtgagcctccacgcagygctctgttcatccaagttggagctttctatctccctaatttcaattgttttgatttttaaatcccacaaataagtgagaacatgtaatatttgtctttttgtgcctggcttatttcacttagctcaatgacctccacttcatttatgttgctgcaaatgactggatctcatttttttatggctgaatagtactccactgtgtctatatactacattttcgtttttaaaatttccaacttttaagttcaggggtacatgtgcaggatgtgcaggtttgttacataggtaaacatgtgccatgctggtttgctgcacagatcatcccattactcaggtattaagcccagcatctactagctaatattcctgatcctttccctcttctcacaccaacaccatccaacagactgtagtgtgtgttgttccctaccatg

SEQ ID NO: 935636 - DNA, 614 bp, Homo sapiens
ggttggatgatctccctttcccacttccacagtttggggactcacagtatttggggtgtctcctggtttctgcaagagcaatccacttccttctgggggtctgttggtcctctcatgtttcctgatttattcctgcagtcattatggagcaaaaattcatgacgtgagcctccacgcagtgctcygttcatccaagttggagctttctatctccctaatttcaattgttttgatttttaaatcccacaaataagtgagaacatgtaatatttgtctttttgtgcctggcttatttcacttagctcaatgacctccacttcatttatgttgctgcaaatgactggatctcatttttttatggctgaatagtactccactgtgtctatatactacattttcgtttttaaaatttccaacttttaagttcaggggtacatgtgcaggatgtgcaggtttgttacataggtaaacatgtgccatgctggtttgctgcacagatcatcccattactcaggtattaagcccagcatctactagctaatattcctgatcctttccctcttctcacaccaacaccatccaacagactgtagtgtgtgttgttccctaccatg

SEQ ID NO: 935637 - DNA, 631 bp, Homo sapiens
ggttggatgatctccctttcccacttccacagtttggggactcacagtatttggggtgtctcctggtttctgcaagagcaatccacttccttctgggggtctgttggtcctctcatgtttcctgatttattcctgcagtcattatggagcaaaaattcatgacgtgagcctccacgcagtgctctgttcatccaagttggagctttctatctccctaatttcaattgttttgatttttaaatcccacaaataagtgagaacatgtaatrtttgtctttttgtgcctggcttatttcacttagctcaatgacctccacttcatttatgttgctgcaaatgactggatctcatttttttatggctgaatagtactccactgtgtctatatactacattttcgtttttaaaatttccaacttttaagttcaggggtacatgtgcaggatgtgcaggtttgttacataggtaaacatgtgccatgctggtttgctgcacagatcatcccattactcaggtattaagcccagcatctactagctaatattcctgatcctttccctcttctcacaccaacaccatccaacagactgtagtgtgtgttgttccctaccatgtgtctatgtgttctcat

SEQ ID NO: 935638 - DNA, 629 bp, Homo sapiens
tagagtaagtaacctaaccttgctaaaggttcccaaagactacccctaggtttgatgatttgctaggaggactcataggactcaacgtatagtcatactcatagctacgatttacggcagtgtaaggaaagcagtatcagcaaaaggaaaggtgcrtggggcgaagtctggtggaaccaacacaagcttccagagtcctgtctcagtggagtcacatgggatgcacttcttaatttccccaggaatgaactgtgacatgtgaaaccttacctactgaggaagctcatcggagtgtcagtaccccaggtttttatgggggactggccgttcacgtaggtatcctctgctgagcatgtaccaaaattccagactcccagaaggaaaacaggtattcagcataaactacagttgtcccttgtatacacgggagattggttccaggaccgccggcatatacccagacccacatatactcaagtcctacagtcagccctggcaaactccagtaagttggccctgttcatatgccagtttcacatctagtgaatactgcattttccatcagcgttcagttgaaaaaaggccacatataagtagaaccacacagttcaagcctgtgttgttcaagg

SEQ ID NO: 935639 - DNA, 661 bp, Homo sapiens
gtaaacccagcactttgggagaccaaggcaggtggatcacttgagtcaggagttcgagaccagcctggccaatgtagtaaaatcccatctctacaaaaacttaactgggcatgatggcgcatgcctgtagtcccagctactcaggaggctgaggcacgagaattgctgcagaggttgtagtaagccaagattgcgccactgcactccagcctgggtgacagagcaaggctctgtctcaaaaacaaaacaaaacaaaacacccaaacagtataataactatttatatagcatttgcattgtattaggtattatatgtaatctagagatgatttaaagtatactggaggaccacgtgcggtggctcatgcctataatcccagcactttgggaggccaaggtcggcggaccacctgaagtcgggagtttgagaccagcctggccaacatgtagaaaccctgtctytactaaaaatataaaaaattagccggatgtggtgtcacacacctgtaatcccagctactcaggaggctgagataggacaattgcttgaacctgggaggcggaggttgcagtgagtggagatcacaccattatactccagcctgggtaacagagtgaaattctgtctcaaaaaataaaataaaataaaataaaataaata

SEQ ID NO: 935640 - DNA, 800 bp, Homo sapiens
ctgccgcgtgcttgtcaatcaagtttttcatcctatggatccgtcttttgtcagtttaatttgcaggccccagtcgcagaatttaagaggacagaagaatggtcttttgttcccaacagcctccttcaccaccacarccccactggctgcctcaccttacgtgtgacacgctcgtcgaacttgccagcaaacccgggaggtgaggattgcgtgtgatgcccaggcagacacagtggcttttcatgagaacaaagcgttatcaccttgtgcaggtggctgagagaagaggccctgggaggcaggggagggccaggtgcacacctatggggcggtgacccctggcagcattggggggctgtggatattggaaaacgtgaaaaagatgtttcagttttttcatgtgtattcttttctttctttctttttttttttttgagacagagtttcgttcttgtcgcccaggctggagcgcaatggcgcgatctcggctcactgcaacctctgcctcccgggttcaagcgattctcctgcctcagcctcccgagtagctgggattacaggcatgcgccaccacgcgcagctaattgtatttttttttttttttttaccagagatggggtttctccatgttggtcaggctggtcttgaactcccgatctcaggtgatccgcccacctcggcctcccaaagtgctgggattacagggatgagcgaccgcacctggcctttcttgtgtatgttttaaattggtttcaaaatgtctcatgtagaatctttggtggggaggtatggatccacca

SEQ ID NO: 935641 - DNA, 572 bp, Homo sapiens
gggtgggcctgcctctcccagtccactgactcaaatgttaattttctttggcaatgccttcagagacacaaccaggaacaatactttgcatccttcaatccaatcaagttgacactcaatattaaccatcacaagtccacctcttgtaaacatgaacccatactcaccttctgaaatcatacataatcctcaaataaagacaatcataagatcataattactgctaacataatacagctatcctttgtacaaccagaagctcactaatccttaacctaaatgctattacttaaagttaacaccacttaaatgttgatgygaagtcaataaatactatgtcacatgataaagaaaaaataaaggaaataaaaatatttttagtataagtgtaaacgtgcacacgcattcttaacagaataaggagaaaatatttatgacaattataatccttgtttctgcaactggtcacaaggtcatagctgatattgatgactacctctcctattactcactctgtattccctgccaaaggctccaaacaacatccctatctgccactgatacctgaagca

SEQ ID NO: 935642 - DNA, 564 bp, Homo sapiens
ttgaacgctggctctgtcccttctagggtgtgtggtctagggcaagctacttagtctcattgtgcctcagttttaaaattcacaataacaaagatatgaaatcaacctatgtgtccatctcaatggatgactgaataaagaaattttttatatatatatatatatatagtattccatatatatatggatatatatgaagagatatatatatatagatgtagtattccatggtgtgtgtatatacatatatatgtgtaccatggaatactactaagccataaaaaataatgaaatcatgacttttgcagcaacatggatacatggatggrcctggaggccattatcttaagcaaaaaactcccagaaacagaaagtcaaataccgcatgttttcacttacagtgggagctaaataatgtgtacatatggatgtaaagtgtggaatcgtagacattggtgactcagaaggttggcagggtaggagggtggtgagagggatgagaaataatttaataggtgcaatgtatactattcaggtgatggttacactaaaagcctatacttc

SEQ ID NO: 935643 - DNA, 596 bp, Homo sapiens
gggtgcagtatagtggatgcagtgcactgagcatgagccaaagcagagtgaggcatcgcctcacccgggaagtgtaaggagtcagggaattccctttcatagccaagcaaagccatgacagaaggcacctggaaaatcgggtcactcccaccctaatactgcgcttttccaatggccttagcaaacggtacgccaggarattatatcctgcccctagcttggagggtcccacaccgagggagcctgactcattgctagcacagcagtctgagatcaaactgcaaggcagcagtgaggctgggggaggggcgccagccattgctgaagtttgagtaggtaaacaaagtggctgggaagctcaaactgggtggagaccatcgcagcacaaggaggcctgcctgcctctgtagactccacctctggggtcagggcttagcgaaacaaaaggcagcagaaacctctgcagacttaaatgtccccgtctgacagctttgaagaaagtagtggttctgccagcatggagtttgcgatctgagaacggacagacagcctcctcaagtgggtcgctgacccccaagtaccctatctagggggca

SEQ ID NO: 935644 - DNA, 699 bp, Homo sapiens
cagtgggtgcaggacagtgggtgcagcgcaccgagcgtgagccaaagcagggcgaggcatcgcttcacccgggaagcacaaggggtcagggaattccctttcatagccaaacaaagctgtgacagatggcacctggaaaactgggtcactcccaccctaatactgcacttttccaatggtcttagcaaacagcacaccaggagattatatcccacgcctggctcagagggtgccatgcacacagagccttgctcgttgctagcacagcagtctgagatcaaactgcaaggcggcactgaggctgggggaggggygccagccattgctgaggcttgagtagggaaacaaagcagcagggaaaatcaaactgggtggagcccaccacagctcaaggacgcctgcctgcttctatagaccacctctggaggcagggcatagccgaacaaaaggtagcagaaacctctgcagacttaaatgttcctgtctgacagctttgaagagagtagtggttctcctagcacagagtctgagatctgaaaacgaacagactgcctcctcaagtgggtccctgacccccaagtagcctgtctgggaggtgccacccagtaggggcagacagacacctcacaatgctgggtacccctctgagacgaaacctccagaggaatgatcagacagcaacatttgctgttcagcaat

SEQ ID NO: 935645 - DNA, 687 bp, Homo sapiens
agactgatgctgccagatcgcctcggaagcctacaggaccatcacagatgctctaggtaactctcacagtggagggtaagtctgtccccttcttaatcaatacggaggctacccactccatattaccttcttttcaagggcctgtttcycttgcctccataactgttggggatactgacggccaggcttctaaacctcttaaaacttcccaactctggtgtcaacttagacaatactcttttaagcactcctttttagttatccgcacctgcccagttcccttattaggctgagacactttaactaaattagctgcttccctgactattcctgggctacagccacacctcattgccaccttttcccccagttcaaagcctccttcacatcctccccttgtatctccccacattaacccacaagtataggacgcctctactccctccttagcaaccaatcatgcaccccttaccatcccattaaaacctaatcactcttatcccgctgaatgccaatatcccgtcccacagcacgctttaaaaggattaaagtctattatcactcgcctgctacagcatggccttctaaagcctataaactgcccttacaattcccccattttacctgtcctaaaaccagacaaggcttacaggttacttcaggatctgcgccttatcaaccaaattg

SEQ ID NO: 935646 - DNA, 711 bp, Homo sapiens
agatcgcctcggaagcctacaggaccatcacagatgctctaggtaactctcacagtggagggtaagtctgtccccttcttaatcaatacggaggctacccactccatattaccttcttttcaagggcctgtttcccttgcctccataactgttgkggatactgacggccaggcttctaaacctcttaaaacttcccaactctggtgtcaacttagacaatactcttttaagcactcctttttagttatccgcacctgcccagttcccttattaggctgagacactttaactaaattagctgcttccctgactattcctgggctacagccacacctcattgccaccttttcccccagttcaaagcctccttcacatcctccccttgtatctccccacattaacccacaagtataggacgcctctactccctccttagcaaccaatcatgcaccccttaccatcccattaaaacctaatcactcttatcccgctgaatgccaatatcccgtcccacagcacgctttaaaaggattaaagtctattatcactcgcctgctacagcatggccttctaaagcctataaactgcccttacaattcccccattttacctgtcctaaaaccagacaaggcttacaggttacttcaggatctgcgccttatcaaccaaattgttttgtctatccaccccgtgttgccaaaaccaaatact

SEQ ID NO: 935647 - DNA, 707 bp, Homo sapiens
tgtctatggagtagccattctcttattccgttactttcctaataaatttgctttcactttatggacttgccccgaattctttcttgtgcaagatccaagaaccctctcttggggtctggatacggacccctttcctgtaacatgtgtgtctatttccaggggccaccttgagccctagtccacctggagcacaggctgggatcagtaacaatggccgggttgttgactaaccaccytggggtaacctctggagtttttcagctttgtctccatgcttggtctgtctcaagattagtccctggaacttttaagtaagcacagaattagatacaaagatgcaattagatacatatgcctggggtaaaaggagtacacagtgagaaagggaagggagtgaagtttcaaggctacattttaagactaagagaaaaggattttgtttcaaggttacatcttgagagtgaaaagaaaggataaaagaaaaaaagcttttaaagtgtgttttgggctgggcgcggtggcttgcaccggtattcccaagactttgggaggccaaggcgggcagatcacgaggtcaagagatcaagaccatcctggccaacatggtgaaaccccacctctactaaaaatacaaaaattagctgggtgcggtggcacccgcctgtagtcccagctactcaggaggctcaggcaggagaatcgcttga

SEQ ID NO: 935648 - DNA, 657 bp, Homo sapiens
taaaaggccacctctgggtgaatttctaaataggcatctcaacagggtggaaccaaccacctagaggcaagattttggtagcacgaatgggccacatcagtcatcagaatactaccttaatcaagttcagcatttactgcatgttagacttaaccaagawtcatgcttccagcaaacattaaaatggtgaatttaataaaccagaccttctccttctcactaacataatccattccttgctccctgcctctgccactatcttgccagcctccacacactgtttagtaatttgccaactgcacatagaaactgaccagctaaaaagtttcatttgcagcagagatactttcctttggtatttagttctgccgcccaccctccatacacacctacctcttaccttctgaagttcacgaggctttcaaagcgcccatttccacatgcatctgttatttaccaaagcaaatcagagtacttcacagccacaaattgaagaaaccatgttgggctcctcaaaattcccattaatgggcaccaaaaagaagttcgttaaaacaatgtaatatccttaatgcaactaatgtgcttcctcctgttctaacaagctcatgaataatagatgaagggagcttcatctgtcttaattaatttggtctt

SEQ ID NO: 935649 - DNA, 551 bp, Homo sapiens
attcagtgatgtgacctatcttcaaatctcctagcagcaggtaccagcactagctctgatggggggagcaggggagtgacatagactctgtgagattccttgcttataaatagccttagtgtgttggctttctcaaatgccagttgcagaagtaacaaactggccatatggagagactcaagacctcctggttagccagagtgatgcagacaatggtgatagctgagatcatgcaaaagctttgtcctttatgggcactgtgttattctgcctggagatgttgtaatgaactgtctaaattgggctccagccagagggttgcacttgcaaaggagcacccgctccagtggtagcagtkggatttgtgcttgccttttgtttccctgaggaggtactctggtgtctcagtcaatggtaaaggccatggagctccccaaaatttctgtctgttgtgttaaattaccaaggtaggtggaggggcaaagccaggttagggctgggccaggtaagtccatgccctggttcccttcatgcaggcacaagcagctgtc

SEQ ID NO: 935650 - DNA, 721 bp, Homo sapiens
tttaggttgtctttttttctggcgatgctcaccgatcacttgattgaggtggtgtctgtttaggtgttttatatttgtttcctgttgctgctgtaacaaattactacaaactcattggtttaaaacagcacaaatttgttctcttaataattctggaggccagaagtccaaaatcagtttctttgggccaaagtcatgatgttggcagggctacttccttctggaggctctagggtagaatctgttttcttgccttttccagcttctgtagatagcctgtatttttttagcttgtggcccttccttcatctttaaaaagggcattagtccagcatctgcttccgttgtcacattaccatctgtctttgacccttctgcctccctgttaaaagtacccctgtgattatggtccttctatgataatctycctatttcaagatccttaacttagtcatatctgtaaagtcccttttgtcattcgagatagtatatttactggttccaggtattaagatgtggacatcttgggggacagttattcagcctaccccactgcaaagtcattcgtttcccctttgtaattagtattttgtgggaggatacttggattcctggttcctgttagtggagaatggtatttagaagccaagatctgcatgctagatgtgctcattgctactaggatttttctgctcctaggcccacttagtagatagagcta

SEQ ID NO: 935651 - DNA, 569 bp, Homo sapiens
gtaaacagagatgtatttagacattggggaaaggcttccactgggatctgaaatattgtgggaagagaatcgctattgttagagtagttctgtgccgtgttagtctttattttgtttagatactgcttttttgggggaccactctgcaggcatctaaatctgaagtgtaagcctcttktttgataaatgagggatagctaaaagatgggttattttggttattggttttgcttttaatagataaccagaatttttacctcttgggagagaatgttatctacttatttatagcaagcaagtgttgttacggcaggtggctgtggatgttggcattcaaatggcactgataagactttaaacaaggtagccatccagttatgcttaggctaaaaaatggctgtgtgcagattaggctacatatttcacatggatataaagttctacttttattaacaaacataacagtgcattgcttttgtgtttttagtttctcttagcccttatttcttgtctcttttggtggcttgctgttgtctatagctgagctgaaactttctgtgcaggaatta

SEQ ID NO: 935652 - DNA, 629 bp, Homo sapiens
accgaacctgacaagagggattctcccagcctagcgcacctgctctgctaagggacagattgcctcctcaagtgagtccctgacctccgtgcctcgtgactgggagaaatctcccaacaggggtcaacagacacctcatacaggagtgctctggctggcatcaggccagtgcccctctgggaggaagcttccagaggaaggagcaggcagcaatctttgctgttctgcaacctccactggtgatacccasgcaaacagggtctggagtggacctccagcaaactgcagcagacctacagaagagaggcctgtatgtttgaagaaaaactaacaaacagaaagcagtaacatcaacatcaacataaaggactcccacacaaaagccccatccaaaggtcatcagcatcaaagatcaaaggtagataaatccatgaagatggggaaaaaacagcacaaaaatgctgaaaattccaaaaaccagaatgctgcttctcatgcaaatgatcgcaactcctctttagcaagcacaaaactggacagagaatgagattgatgaattgacagaagtaggcttcagaaggtgggtaataacaaactcctatgagctaaagaagcatgttctaacccaa

SEQ ID NO: 935653 - DNA, 582 bp, Homo sapiens
gatggacattttggtggatttcttcctggttcagtcttgggagtgtatatgtgtccaggaatttattcatttcttctagattttctggtttatgtgcatagaggtgttcataatatcctctgatggatatttgtatttctgtgggttcagtagtaatatcccccttgttgtttctgattgtgattatttggatcttctctacttttttctttcttagtctagctatcaatctatctattttattaattgtttccaaaaagcagttcctagattcattgatcttttcgatggtttttttgtgtgtatgtctcaatgccygtattagtcagtttctctacagggacagaactaataggatagatatatatgtataaaaaggtattattaagtattaacttacacaatcacaaggtccgacaataggttgtttgcaagctgaggagcaaaaagagccagcccgagtcccaaaactgaagaacttggagcctgatgttctagggcaggaagcatccagcacttgagaaagatgtaggctgggaggctaggcccgcctctccttttcaggtttttctgactgcttta

SEQ ID NO: 935654 - DNA, 646 bp, Homo sapiens
ggcctatggagaaatatatcaaatgtaaattataaagattcagttgtaggggattaacaagaagactgcttagttaagcgagtagtccttttatctagcttattcattaatctatcaaattttaggtgattttagtttatggggaccttgggtatgaagcatactccaaactcttggtattatcctcctgatagacatcagagtagtctccctggtgcgctctattctctccaaagttttaaatgtttgcatgcagccatctctaaaatgtcaaatggtctctcttcaactggagtaacaaaagctgaaaaaaatgtgtaaccacgagagcaccataacctataaataatgygctaaagccagaaactgaaaataatggtaactaagggtggcactaaggccctaaggtttggtcaaactcttacctaagtgagaacccaactagaaaggagaaatttataaacaaaattataggaggccattgttttggagtgagctcatgcactatgccccaacagaccagatcaaagaaaaatggagtcactcatgttaaatgttgcatgatcaaacttagactttaagaaaacacatagatgcaaaaacatatcaggttttgtttttctcctgtaaacgggatgtttgagca

SEQ ID NO: 935655 - DNA, 608 bp, Homo sapiens
cgactagaatttttttgcaaatcccatataatgttctatatacaaccctatgttgtctgtgaactaaaacagctttacttttcgtttcaaaccttgatgtctttaatttctttatacaatgagcaaaagttaatgttgagcagaaatagagaagacagaaatcctcatcttattactgattacaagagaaaaacactgtctttcatcattaagtgtgatgttagatgtaggattctcaaagatgccccttatctcatggaggaaatccctctaattcctcttttcttaaaaggttttgtcaaaaatgggtgatgaattttgttaaatgttttgtctatatctattaagatgattgcgtggttttaatcttttaktctactaattgttaattgattttgagctgttaaaccactcttacattgctgggataaattccatatgccacaatgtttaatcttctttatatgttactgggtttatttggcttttttttttttttttttgagacagggtctcactctgttgtccaggctggaatgtagtggcatgtgatcacggctcactgcagtctcaacttactgggttcaaggaatcttcccacctcagcc

SEQ ID NO: 935656 - DNA, 644 bp, Homo sapiens
aaatcaaaagcaagttagttacttcctaaatacaatgggggtacaagtattgggtaaagacagccattccaaatgggagaaattggccaaaatgaacaggctaaaggcatcatgcaggcccaaaatccagtggggcagtcaaatcttaaacatccaaaatgatttcctttaactccatatctcatattcggttcgtgctgatgcaagaggtggtttcccatggtcttgggcagctccatccctgtggctttgcaggttaaagcctccatcctggctgctttcacggactggtgttaagtgtctgaggcttttctgagtgcacggtgcgggctgtcggtggatccaccattctcgggtctggaggtcggcagccctcttctcacagctccactaagtggtgctcaggtaaggactctgtgtgggggctctgrcccaacatttcctttctgcactgccctagcagaggttcttcatgaaggccccgcccgtgcaacaaactcctgcctgaacatccagtcacttccatacatcctctgaaatctaggtggaggttcccaaacctcaattcttgacttctttgcacctgcaggctcaacaacatgtggaagctgctgagacttggggcttgcaccctctgaagccac

SEQ ID NO: 935657 - DNA, 592 bp, Homo sapiens
tcaggggtatatcaagtctccagctttgtgtcaatcttattcagaaagagcttgatcgcttttcacttccacaaggtatcacactggttcattccattgatgacattatgctgattggatccagtgagcaagaagtagcaaacacactggacttattgtgtgtcagaagatggaaaataaatctgactaagattcagggatcttctacctcagtaaaatttctaggggcccagtggtgtggggcctgttgagatattccttctaatgtgaaggatragtttggtgcatttggcgcctcctacgaccaagaaagaggcacaatgcctagtgggcctgtttggattttggggcaacacatttctcatttgggtgtgttactccagcccacttattgagtgacccaaaaggctgtcagttttgagtggggtcctgaatagaagaaggctctgcaactggtccaggctgctatgcaagctgctctgccacttgggccatatgacccagcagatccaatggtgtttgaagtatcagtggcagattgggatgctgtttggagcctttggcagggtcccataggtgagtcacagcagag

SEQ ID NO: 935658 - DNA, 651 bp, Homo sapiens
cttattgagtgacccaaaaggctgtcagttttgagtggggtcctgaatagaagaaggctctgcaactggtccaggctgctatgcaagctgctctgccacttgggccatatgacccagcagatccaatggtgtttgaagtatcagtggcagattgggatgctgtttggagcctttggcagggtcccataggtgagtcacagcagaggcctctaggattttggagcaaggtcctgccatcttctgcagataagtactctccttttgagagacagctcttggactgttaccgggctttagtggaaactgaacgtttgactatgggtcatcaagtcaccatgtgacctgaattttctatcattaactgggtgctttstgacccatctagccacaaagtgggtcatgcacagcaccattccttcatcacatggaagtggtatacacgtgattggtctcgagcaggtcctgaaggcacaagtaagttatatgaggaagtggctcaaatgcccatggtctccactcttgccaccctgtcttctctccctcagcctgcaccaatggtctcatagggagttccctatgatcagttgacagaggaagagaagactagggcctggttcacagatggttctgcacgatatgcaggcaccatcc

SEQ ID NO: 935659 - DNA, 630 bp, Homo sapiens
accaccgatgttctcttaatgcccaggggctctttcgtcagcttgtggtaaatactgccaggcctgcgagtcaccctttagggcagtgcctccctttgggcccaaggcagttttagaaatgctgttaaggagcctaggtctggattcggggaccccaagaacctgctttttgctgtaccccactgtggctacgtgggtatctaaagtgcaaaacaaagtcccctttacttttcccctgtttttgtcaaacagaaggagtctgtcaccatagccaccatagctgggaatgtgctaggtctcacctgaagccaatacatcgcagagtcttactcaaggccccgtagcatactacctggatatcactgttagttattcagggtccaaggaatctttagtccgcrgacgatgaatcctgtcaagacggggtccttcacttcaagagaccagttttccttctggcccagggtgtgtctagaaacggtatctgggagttggggcctggaatcggggcctcacgattctgcccagtgccctgtcccattgtgactgaactcttaattaagatgcaagacaaagtactcttcactcttctctcctcaaacagatggaaggaaccactttcattgctgc

SEQ ID NO: 935660 - DNA, 812 bp, Homo sapiens
tgccagctgcactacctgaggtttggagagatatggtgcaagccctcttttagctgtgccatctggtgtctctctctgtcacgtgccaacctagttcactggttctcagaactaggacttgcctaggaactgcagtccttgtgtcctagactgtcattcaagtatacctaggacctcagagtacttttgcctgtagtgatgaggcttgtctgaactcaggttccgagtgctgggatgggtgattctcctctggctagggctggtccgaatgctcccttggtgtgtgggcatggactgagtcagcatcrctttgctctccaccgcaatagggcagcactgagtttaacgctaatgttataggagttattaagaaattattttaggtagctagagaggaaaaggtgtccttgggaagtttttgtctctttcaaagcagctccaaaaatgtttcttgtctagcaggaaagccctggctcttagagccaggcagacaacctttaatatgcaaatgcaggccattagaaactggatccacccaaacatggcaattcccactgttatcctcttgcccttgcccctacatgtgcttggcagcatggctgcccccacatatccccacgtgtgtaaaacatcatggcgccctgtatttgcaaattaaaaggctaggatgggagggccaattattttacgaactgcgtgaataacatgcctgatcaaaccaatcccctgcgccctatgcaaatcagacactgcctcctccagcctcctcatataactggctggtttccaccacactcagggtttcctctctt

SEQ ID NO: 935661 - DNA, 538 bp, Homo sapiens
agggtatccaactaaagcagctccaactgtggcaaagcaagaggttaggcccccttacatactcctaaggaaggggcttaattcggaggctgagcattgatggaactcaggctctgcttccacagcaccttgcaagataagatgcactggtttggaattccagccagccactggtagcagcattacacctccctggatggaactcccagaggaaggggcaggccattatctttactgttttgccatcttcattgttgataccttcaggagctgraaaatctgaggagattagggaatgaagcagacccccagtgtactgcagcagccctaccgaaaagtgtccagaccatttgttatgtaggtacccaatcctgtatctcgtcattgagagggtctattcctgccctggatactcagtcacaccctgtgaaggacatcaaactggtagcaactctgtgactccctgagacagagctcccaatgggaagggcggtttgccatccttactgtctcatagcacacatccttactgactcca

SEQ ID NO: 935662 - DNA, 634 bp, Homo sapiens
caagtccatgaaagggtctttataagaaccttgcctgaggctgggcacagtggcttacgcctgtaatcccagcattttgggaggccgaggcgggcagatcgcaaggtcaggagatcgagaccatcctggctaacatggtgaaaacccgtgttmatttgaagactgccaggttagcacggataggggattattgtttctctaggagaggcatagaaaggcctaaatggaagcaaagcagtacccaggtagggttatagcttagagtcaagaggtaaaggtatgttactgagggactagaaccagagacatggtagcctactcaaggcatctgtaactggaaatgccagaaacaatataaatccaaaattccttaggtgagcagagttaaaccctgggaattaggtgcaaacgacaagtccaaacaatcagagacaggattggattgatgatgaagttgaaactttagaattaaatgaagaaaagttggaaggatttcaagttttcaaacatgaaaaaaattcagtacaattgctaaacatcagtctcctcatttattaaccagtggaaataataactacctacaagggtggccaagaagtttcactcggaataataaacataaaacacatactag

SEQ ID NO: 935663 - DNA, 751 bp, Homo sapiens
cctcttctccactctctctgctgatggagctgggggattttatgggcacaggattgggggcagggcaggccatgggtggttttggaaaaggcaacatttgttcaggaaaacaggaatgcatgttctcactttgggctgctgttccaggcttgagggtgggaccctcgccagggacccatcctttctacccagaatttctctgcctcctgtccctatcacttcctctcctcaaagcctctcattccatgctttcccttctcatggcataatgtaccccatacccttccctacccctccatttccccacaagagccagggttctccctcttctcaggacttgctggtgcaggtgtgctcagttggacacctgggtggccacagtaccactaatttctttgagcagtggtttgtagctcttcttgtagagatctttcacttcccttgttagctgtaattgtgatgggatttgtttgtgatttggctctcagcttaactgttgttggtgtattgaaaggtagcaatttttacacattgattctgtatcctgagactttgctgtagttgcttatcaacttaagaagcttttgggctgatatgwtggaattttctagatataggatcatgtcatccgcaaacagagatagtttgacttcctctcctcctatttgaatgccctttatttctttctcttgattgattgctctggctagaacttccaatacaatgttgaataggagtggtgagagagggc

SEQ ID NO: 935664 - DNA, 550 bp, Homo sapiens
gggggatcccttctctccccagtcagtctggactctctgaagcctgcaggctggaaaagctgggtcattcaaacagcaaagatagtggcccacccctcccgtcaggaacaccaacctgtcctgggaaggcacaacactattgccagggactggctggaattccaagccagtgagtcttattctgtgaggcaccatggaagtggggccctcagaccaatgctgcttggacccctggattccacccccttcctaggggtacctgtggaccacytgccttccctgagttgcagtcacttttaccagggatcctggagccagagtatgtaaagctcctgagactctgtgcacacctgagtagctgctctgctgagacttcacacagctctgtgtgtcagactgaaggccccagtggagtgggttcatgaggggatctcctgacacgagagtttcaaaggtctgtgggagaatcatggtttcccaggattgcacattcattaaccacttccctcggtaggggaggttcccttggctctgtgtcacgcctgcatgg

SEQ ID NO: 935665 - DNA, 669 bp, Homo sapiens
tgcctgcatattgtgcagaaccatctgtgaaccagaccctagtcttctcttcttctgtcaaatgatcataaggaactccccataaggccattggtgcaggctgggagagaaggcaggatggcaggagtggagaccatgggcatttgagccactgcctcatgtaacttacttgtgccttcaggacctgctcaagcctgatcacatatataccacttccatttgatgatggatgctgctgtgcaygacccactttatggctagatgggtcagaaagcactcagttcatgataggctggtcaggtcgcatggtgacgtgatgacccatatgcaaatgttcagtttccaccaaagcccagtaacagaccaagagctgtctctcaaaaggagagtagttatctgcagaaaacggcagggctttgtaccaaaatcctagaggcccctgctgcgattcacctatggggcctgccaaaggctctgaacagcatccctatctgccactgacacctcaagcaccattggatctgctaggtcatatgacccaagtggcagagcagcttgcacagcagcctggacctgctgcagaactttctcctgttctggaacccactcaaaactggaaacctttcaggtcactcaataaatgggctggagtagcacactcaaatgagg

SEQ ID NO: 935666 - DNA, 669 bp, Homo sapiens
tgcctgcatattgtgcagaaccatctgtgaaccagaccctagtcttctcttcttctgtcaaatgatcataaggaactccccataaggccattggtgcaggctgggagagaaggcaggatggcaggagtggagaccatgggcatttgagccactgcctcatgtaacttacttgtgccttcaggacctgctcaagcctgatcacatatataccacttccatttgatgatggatgctgctgtgcacgacccactttatggctagatgggtcagaaagcactcagttcatgataggctggtcaggtcgcatggtgacgtgatgacccmtatgcaaatgttcagtttccaccaaagcccagtaacagaccaagagctgtctctcaaaaggagagtagttatctgcagaaaacggcagggctttgtaccaaaatcctagaggcccctgctgcgattcacctatggggcctgccaaaggctctgaacagcatccctatctgccactgacacctcaagcaccattggatctgctaggtcatatgacccaagtggcagagcagcttgcacagcagcctggacctgctgcagaactttctcctgttctggaacccactcaaaactggaaacctttcaggtcactcaataaatgggctggagtagcacactcaaatgagg

SEQ ID NO: 935667 - DNA, 669 bp, Homo sapiens
tgcctgcatattgtgcagaaccatctgtgaaccagaccctagtcttctcttcttctgtcaaatgatcataaggaactccccataaggccattggtgcaggctgggagagaaggcaggatggcaggagtggagaccatgggcatttgagccactgcctcatgtaacttacttgtgccttcaggacctgctcaagcctgatcacatatataccacttccatttgatgatggatgctgctgtgcacgacccactttatggctagatgggtcagaaagcactcagttcatgataggctggtcaggtcgcatggtgacgtgatgacccatatgcaaatgttcagtttccaccaaagcccagtaacagaccaagagctgtctctcaaaaggagagtagttatctgcagaaracggcagggctttgtaccaaaatcctagaggcccctgctgcgattcacctatggggcctgccaaaggctctgaacagcatccctatctgccactgacacctcaagcaccattggatctgctaggtcatatgacccaagtggcagagcagcttgcacagcagcctggacctgctgcagaactttctcctgttctggaacccactcaaaactggaaacctttcaggtcactcaataaatgggctggagtagcacactcaaatgagg

SEQ ID NO: 935668 - DNA, 767 bp, Homo sapiens
tgacttctagtgtgctcaattagtttctttcttcctttttctttttttattttattttatttattttttattatactttaagttctagggtacatgtgcacaatgtgcaggtttgttacatatgtatacatgtatcatgttggtgtgctgcacccattaactcatcatttacattaggtatatctcctaawgctttccctcccccctccccccactccatgacaggccccggtgtgcgatgttccccttcctgtgaccaagtgttctcattgttcaattcccacctatgagtgagaacatgcggtgtttggttttttgtccttgcgataatttgctgagaatgatggtttccagcttcatccatgtcccaacaaaggacatgaactcatccttttttatggctacatagtattccatggtgtatatgtgccacattttcttaatccagtctatcattgatggacatttgggttggttccaagtctttgctattgtgaatagtgccgcaataaacatacgtgcgcatgtgcctttatagcagcatgatttataatcctttgggtatatccccagtaatgggatggctgggtcaaatggtatttctagttctagatccttgaggaatcgccacactgtcttccacaatggttgaactagtttgcaggcccaccaacagtgtaaaagtgttcctatttctccactttcttcctttttcaaagagttcctttattattcccaggccgtcgttaggtgtaaaagctaattta

SEQ ID NO: 935669 - DNA, 767 bp, Homo sapiens
tgacttctagtgtgctcaattagtttctttcttcctttttctttttttattttattttatttattttttattatactttaagttctagggtacatgtgcacaatgtgcaggtttgttacatatgtatacatgtatcatgttggtgtgctgcacccattaactcatcatttacattaggtatatctcctaaagctttccctcccccctccccccactccatgacaggccccggtgtgcgatgttccccttcctgtgaccaagtgttctcattgttcaattcccacctatgagtgagaacatgcggtgtttggttttttgtccttgcgataatttgctgagaatgatggtttccagcttcatccatgtcccaacaaaggacatgaactcatccttttttatggctacatagtattccrtggtgtatatgtgccacattttcttaatccagtctatcattgatggacatttgggttggttccaagtctttgctattgtgaatagtgccgcaataaacatacgtgcgcatgtgcctttatagcagcatgatttataatcctttgggtatatccccagtaatgggatggctgggtcaaatggtatttctagttctagatccttgaggaatcgccacactgtcttccacaatggttgaactagtttgcaggcccaccaacagtgtaaaagtgttcctatttctccactttcttcctttttcaaagagttcctttattattcccaggccgtcgttaggtgtaaaagctaattta

SEQ ID NO: 935670 - DNA, 608 bp, Homo sapiens
ttcatgggctagcattgagtgcctacatctttcctaggtgtacagtgaaagctgttagcggatctaccattctggggtctggaggacagtggcccccttctcacagctccactaggcagtgtcccaatggagactgtgtgtgtgggttccaaccccacatttcccctctgcactgccctagtagaggttctccatgagggytctgcccctgcagcaaactaatacttggacatccagtgtttccatacgtcctctgaaatctaggtagaggttcccaagcctcaacccttgccttctgagcacccacaagcctgacactacatggaagccaccaaggcttgaggcttgcaccctctgaagcaatggcccaaactgcaccttggcactttttagccatggctggagctggagtggctgggacacagggtgccatgtcccaaggctgcacagagcagaggggccctgaacctggcccaggaaaccattttcccttcctaggcctccaggcctgtgatggggggggctgaagctaaggtcgttgacacgccctggagacattttccccattgtctcagctattaacatttggctcctctttacttacgcaa

SEQ ID NO: 935671 - DNA, 424 bp, Homo sapiens
ctccatgagggttctgcccctgcagcaaactaatacttggacatccagtgtttccatacgtcctctgaaatctaggtagaggttcccaagcctcaacccttgccttctgagcacccacaagcctgacactacatggaagccaccaaggcttgrggcttgcaccctctgaagcaatggcccaaactgcaccttggcactttttagccatggctggagctggagtggctgggacacagggtgccatgtcccaaggctgcacagagcagaggggccctgaacctggcccaggaaaccattttcccttcctaggcctccaggcctgtgatggggggggctgaagctaaggtcgttgacacgccctggagacattttccccattgtctcagctattaacatttggctcctctttacttacgcaaatctc

SEQ ID NO: 935672 - DNA, 631 bp, Homo sapiens
ttctaagtttttatcattttagatcttaaatttgggtcttcaatccactttgagttaatttttgtatatgtataaggtaagggtccagcttcattcttttgcatacgagtatccagttttcccagcatcatttgcttaaaaaaaaatacaaaacaaaacaaaaactaaaacaactgtctttccccattgagtggtcttagcagcactcctgttgaaattcaccatgtatttgagtgtttatttctgggttctctcttctgtttaattggtctatatgtctatctttatgccaataacacataytttgattacggtagctttgttgtaagttttgaaatcaggcagcgtgagtcattcaaatttgttctttttcttcaagattgttttggattttgggggtctcttgagatttcatataacttttaggatgagttctctatttttgcaaaatatgtcattaggattttgatagggattgcactgaatttgtagattgcttttggtagtattaacattttaacaatattaagtctttcagtccaagaacacagatgtctttccatttatttatgtcttctttaattttcttctgaaaatattatgtacttttcagtgtataaggcttttgtct

SEQ ID NO: 935673 - DNA, 588 bp, Homo sapiens
atctacgaggaactcaaaaaagtcagcaagaaaaaacataattcattaaaaagtgggaaaagaacatgaatcgacatttctcaaaagaagatatacaaatggccaacaaacatatttaaaaatgcttaacatcactaatcatcagggaaatgcaaattaaaaccacaatgagttaccaccttatgccagccagaatggccattattaaaaagtcaaaaaccaatacatgttactatggatgtggtaaaaatgtaatgcttatacactgctggtggatatgtaaattaatacaacctctatggaaaacagtatggagatgtcacaaagaactaaattgcagcacaatttacaattgcaaagatwtgaaatcaacttaagtgtcatcagctgatgagtagatgaagaaaatgtggcacatatatagcagggaatactactcagccataaaaaataatgaaataatgtattttgcagcaacttggatggacctggaggcaattattctaagtgaagtaacttaggaatggaaaaccaaatatcacctgtcctcacttataagtgagacctaaacacaaaagcatacggaag

SEQ ID NO: 935674 - DNA, 599 bp, Homo sapiens
gtactgttctttgtgccgcaacttgaaggaagattaagagttaactaggtgagagcagtagaattgcagaagtgggtagaacattacaagcagaggtaacaacagatataaagacctgaagcaggctggcgcggtggctcacgcctgtaatcccagcactttgggaggccgaggtgagtggatcacgaggtcaggagatcgagaccatcctggctaacatggtgaaaccctgtctctactaaaaaatagaaaaaattagccagacgtggtggcagacacctgtagtcccagctacttgggaggctgaggcaggagaatggtgtgaacccaggaggyggagcttgcagtgagccaagatcgtgccactgcactccagcctgggcgacggagcgaggctccgtctcaaaaaaaaaaaaaaaaaaaagacctgaggcagaaaagtgctttacctgtgtaagggaaagaaagatgtgttggagggatttagtcagctaagggcagagtggtattgaggtaagattcaagagactgaaaggcaccagtaaggccttgaaagagtgctaagaaaccaaatatgggcacatcttgtccttcctttt

SEQ ID NO: 935675 - DNA, 736 bp, Homo sapiens
ggaggccattgttttggactttaatgaaaggctaaatgcactaagccccaacagaccagaccaaaccaaaatggagtcacttgtgctaaatgtgacatgattaaactaagactttaaggaaacacatagatcctaaaacagaccaggttttgtttttttctcctataaacagaacgttccaacaaaaggaggtaacccttacaaaaataaaattaaaataaaataaaataacctgaaatccttgttcccccttacaaaactcattgttctgctatttcccagggggtttcaagaccaaataagtacatttacaatggtgatagtggcatcgatgactaaagttttggtaaatctctaaaaattgagaagattaccaaaagaggaaaattgttaaatcaagtttagcctaaagctgcctccttacatattttaagtttggcctaaaggtttctctgtacatcgtgaactataacaagtggaggtgtaaacagcctacacttgtgtcaatcaccaagtttcggccaatcatatgtagccaactgttcaaactgtgttcaaataaggatacacccagcygtaaccaattgggtgtttctgtacctcacttctgttttctgtatgtcactttcctttttctgtccataaatcttccaccacatgcctgcaatggagtctctgagcctactctgcctcgggaggctgcctgattcacgaatcgttcattgctcaatttgac

SEQ ID NO: 935676 - DNA, 610 bp, Homo sapiens
catgttgcttctgcagttgcatttcagtcctataaaagaagcagcacatcatcactttatgagaaaacattttaggaggctgagttatccaatctcatcagtctcccttcctaattcattcgcactagaactatacataaacagaaaaaccagtgagacaaaggtgaaaaagaggttatcaaaatacaaactagcaatttgaaactattaaaattcctagtagaaataaagcaaactcaatggtctctgataacagatcagaacaaaatctgtaattttaacgctctttccaccaatgagtttccatgtctctctcccagctaagtttgagacagcttggcagaaataatactaacaratgtgttgctttgtaacttcaaggatgtgctattttctgatgttcttccattcgggttttcctggtgtggattctagaggcacaaaaatggctcagactgtgagttccaggccaaggaactgttttcatctctgtctctgaccattattacccctatttcatcatggcactttcggtaaatgaatgagacagtaactatgttttcaacagacaaccagagatgcttcatgggatcttaaaattacttgggaa

SEQ ID NO: 935677 - DNA, 629 bp, Homo sapiens
taacaaaccttacccttgtctaatgtgcttttgctggttaactccccactcaccactgcacctcaaatcttctttctttaagttgaagatagtatttatgcttgaactgaaagccacctgttggagatttactcatttttccctgagtatctcccatgtatccataaggtatacgtgtttttaaacttttctgtttttctcattttaatctgtcagtttttacagmgggtcccatctaagaattccaaaaacatagaaaatttttttcctccccattacaagttgggcagttttttctaaagctaaacaagtctcaccttacaatccaaaaatcacattcctaagtattttgacaactactttgatgttatttccaaacaaaagctaccatgcaattatttacagaagccctattcataatgaccaaaggaaaaaaaaggaatcagaaagtcttacaatagatgactgtgtgggactccactcagacatcaaaagttgttataaagattatttaaatgaaaacatttgagatactgaagataaaggaagaaatcttaccagaacttactttatccaattaaagccaaggtcacagaaaaatacagctgccattaaccccatccaaggag

SEQ ID NO: 935678 - DNA, 596 bp, Homo sapiens
tgaaagtatgttcttggcttggcttttagcctcaataaggcctttaaaagtccaatctgagattctgtatgaaaacttccagcgaagaagcttgaaagcacctacgtggtcacctcctgttcttgctgcacttacataaatactcaggcaaaatctaacgaaactagacttatttttaaaacaagaataatctcacattgattatctatgatcaaaaatgatggttacyacagagagaaattttatgtttcaatggaaaactataactcagccgtgcatggtggcataagcctataattccagcacttttggaggccaggagttcaaaaccccacctctactaaaactgcaaaaattagctgggcatgatggcatgtgcctgtagtcccagctaatcaggaggctgaggagggaggttcgcttccacccaggaggtagaggttgcagtgagctgggattgcaccattgcactccagcctgggcgacagagccagactctgtctcaaaaaaaaatttttttaaaaaggaaaactatagcccttgtgggttatcagattctagtcttgtttctcgttttgggctattttcacctcttt

SEQ ID NO: 935679 - DNA, 762 bp, Homo sapiens
agtgattttcttcaattacttttacggtataatttctgtgaaaggaaaataaaactcaggaccacaaaatcactaaaccaaagggtaaagtcaagctggaaactatgtcaggcaaacctgcctcccattctattcctaaataagatagctgccaagataagaggctacgtacctcccttaaaatttgcccacaaggaaattccttgtggataaaggacagacagaactcaaagttatccctttaaggtgcgcctgagacaaatgcatatctaattgcttcccctcccctattgtttacstaaaaatgataattcactgagccagactaaattgtgtattcagtggaaggctgatcaaggactcaaaaaaatgcgatcttttgcctcttatctactcatgatctggaagccctcacctcaagtcccgctttacctgactaaagtacatcttacacatactgattgatgtctcatgtctccctaacatgtataaaagcaagctgtaccctgaccaccaagggcacatggtcatcagggccttctgaggctgtgtcacgggtgcaaccttaatcttggtgaaataaactttctaaattgatggatgccggatgtggtggctcatgcctgtaatcccagcactttgggaagctgagacggacagatcaactgaggtcaggaattcgagacaagcctggccaacatggtgaaactctgtctctaccaaagatacgaaaattagctggttgtattggcacacacctat

SEQ ID NO: 935680 - DNA, 762 bp, Homo sapiens
agtgattttcttcaattacttttacggtataatttctgtgaaaggaaaataaaactcaggaccacaaaatcactaaaccaaagggtaaagtcaagctggaaactatgtcaggcaaacctgcctcccattctattcctaaataagatagctgccaagataagaggctacgtacctcccttaaaatttgcccacaaggaaattccttgtggataaaggacagacagaactcaaagttatccctttaaggtgcgcctgagacaaatgcatatctaattgcttcccctcccctattgtttacgtaaaaatgataattcactgagccagactaaattgtgtattcagtggaaggctgatcaaggactcaaaaaaatgcgatcttttgcctcttatctactcatgayctggaagccctcacctcaagtcccgctttacctgactaaagtacatcttacacatactgattgatgtctcatgtctccctaacatgtataaaagcaagctgtaccctgaccaccaagggcacatggtcatcagggccttctgaggctgtgtcacgggtgcaaccttaatcttggtgaaataaactttctaaattgatggatgccggatgtggtggctcatgcctgtaatcccagcactttgggaagctgagacggacagatcaactgaggtcaggaattcgagacaagcctggccaacatggtgaaactctgtctctaccaaagatacgaaaattagctggttgtattggcacacacctat

SEQ ID NO: 935681 - DNA, 774 bp, Homo sapiens
cagaccctatcagtgctcctcaaagcacaagtccatcagcacagggccatacaactaatacccctacttatagggttaggaatggccactgctacaggaaccggaatagcagatttatccacttcattatcctactaccacacactctcaaagcatttctcaggcagtttgcaagaaagaacaaaatctatccttactctacaatcccaaatagactctttggcagcagtgactctctaaaaccactgaggcctaacctcctcactgctgagaaaggaggactttgcaccttcttaggggacgagtgttgcttttacactaaccagtcagggttaatatgagacgccacccggcatttacaggaaaagtcttctgaaatcagacaatgcctttcaaattcttataccattctctggagttgggcaacatggcttctcccctttctaggtctcatgacaaccatcttgctattacttgccttcgggccctgtatttttaasctctttgtcaatttgtttcctccaggatcgaggccatcaagctacagatggttttgcaaattaaaccccaaatgagctcaactaacaacttctaccaaggaccccctggatcgacccactggccctttgatacctagagagtttccctctggaggatactacaattcagggtctcttcttcacccctatccagcaggaagtagctagagcagtcattgcgcaattctcaaaagcagttggggtgtcctgtttaaagggggtattgagaggtgaa

SEQ ID NO: 935682 - DNA, 569 bp, Homo sapiens
ttaaatacacaaatgtatactcaagtatttgtgaatgtatttaggcaactgctgtctgagatccaaagaagaatagtctctgatgtcaaggagtttccatctagctgggaattctcagggagtattttctatccaggaacaaggaggttagatgatcatatggcttgtaagcttccgcagatggtytacaccttgaggtaagtaagagtaacagtaacataaaccagagcaaagtttttgacgaaaggccctagaagctcatagattttctgtctgacattttcactcctttcaagccacatattaatgatgctgacctttttagtaatttgattttgacagtgacacagcagcaatagtactcaaaggctgacagcctgatgtgggcaagccagggaagtaattactgctttaaatcaaagaagaactgtttgtgcctctgtagcaggaaaattccatgttaagcaggaactcttccatcctctgaaccatattgtatccatcatctttctgtgggtttacttcccagggctcagaaaaactgtctgcctattcgtgcctccagacat

SEQ ID NO: 935683 - DNA, 569 bp, Homo sapiens
ttaaatacacaaatgtatactcaagtatttgtgaatgtatttaggcaactgctgtctgagatccaaagaagaatagtctctgatgtcaaggagtttccatctagctgggaattctcagggagtattttctatccaggaacaaggaggttagatgatcatatggcttgtaagcttccgcagatggtttacaccttgaggtaagtaagagtwacagtaacataaaccagagcaaagtttttgacgaaaggccctagaagctcatagattttctgtctgacattttcactcctttcaagccacatattaatgatgctgacctttttagtaatttgattttgacagtgacacagcagcaatagtactcaaaggctgacagcctgatgtgggcaagccagggaagtaattactgctttaaatcaaagaagaactgtttgtgcctctgtagcaggaaaattccatgttaagcaggaactcttccatcctctgaaccatattgtatccatcatctttctgtgggtttacttcccagggctcagaaaaactgtctgcctattcgtgcctccagacat

SEQ ID NO: 935684 - DNA, 564 bp, Homo sapiens
aaaaataattgaggagacttttctccaaatgccctttttcactttgctactgtaccaaatcaatatctaccaagtcaaacattttttatttaaattaaaatgtaatttttaaaaatgctgccactataaagtatctatttattaaattataatcttttacctaataaagttttgttttttttttttttttttgagtcatggtggctctgtcaccaaggctgaagtgcaggtggcatgatctcagctcactgcaacctccacctcctgggctcaagccatcctcccacctcagcctcccaagtacctgggactacagacacatgcctcaccacacccggctaatttytgtatttcttgtagagacagaattccaccatgttgcccaggctggtcacgaattcctgagctcaagtgatttgcccgcctcgccccccaaagtgctgggattacaggtgtgagccaccacgcctggccataaagtttttttaaaaaaggaaaaataacacgttgttacaaaagtacattgttattttctatggttcccaaactgcactgagacaccac

SEQ ID NO: 935685 - DNA, 695 bp, Homo sapiens
gaggtgggtgctgtgatggttgcacaatgggaatgtacttgctgctgcaggaactgtacacttaaaaaggttaaaatggtaaattttattttacaacaattaaaacaagatctagcaattttacttttttttttttttccttgtgatggagtctcactcactctgttgcccgggctggagtgcaatggcacgatctcagctcactacaacctccgcctcyggggtttgggtgattgttaatgcctcagctcctgagtagctgggactacaggtgcccgccaccatgcccagctaattagctaatttttgtatttttagtagagacggggttttttcatgttggcctggctggtctagaactcctttttttttttttttttttttttgagaaggattctcactctgttgcccaggctggagtgcagtggtgtgatctcgactcactgcaacatctgcctcctgggttcaagcaattcttctgcctcaacctcccaagtagctgggattacaggtgcccaccatcatgcccagctaattttgtatttttttttttttttttttttttttagtagagacagggtttcatcatgttggccaggctggtctcaactcctgacctcaggtgatctgcctgccttggcctcccaaaatgctgggattacggtgatgaacaaccgtgcctggctgcaatttta

SEQ ID NO: 935686 - DNA, 695 bp, Homo sapiens
gaggtgggtgctgtgatggttgcacaatgggaatgtacttgctgctgcaggaactgtacacttaaaaaggttaaaatggtaaattttattttacaacaattaaaacaagatctagcaattttacttttttttttttttccttgtgatggagtctcactcactctgttgcccgggctggagtgcaatggcacgatctcagctcactacaacctccgcctccggggtttgggtgattgttaatgcctcagctcctgagtagctgggactacaggtgcccgccaccatgcccagctaattagctaatttttgtatttttagtagagacggggttttttcatgttggcctggctggtctagaactcctttttttttttttttttttttttgagaaggattctcactctgttgcccaggctggagtgcagtggtgtgatctygactcactgcaacatctgcctcctgggttcaagcaattcttctgcctcaacctcccaagtagctgggattacaggtgcccaccatcatgcccagctaattttgtatttttttttttttttttttttttttagtagagacagggtttcatcatgttggccaggctggtctcaactcctgacctcaggtgatctgcctgccttggcctcccaaaatgctgggattacggtgatgaacaaccgtgcctggctgcaatttta

SEQ ID NO: 935687 - DNA, 687 bp, Homo sapiens
tgctgtgatggttgcacaatgggaatgtacttgctgctgcaggaactgtacacttaaaaaggttaaaatggtaaattttattttacaacaattaaaacaagatctagcaattttacttttttttttttttccttgtgatggagtctcactcactctgttgcccgggctggagtgcaatggcacgatctcagctcactacaacctccgcctccggggtttgggtgattgttaatgcctcagctcctgagtagctgggactacaggtgcccgccaccatgcccagctaattagctaatttttgtatttttagtagagacggggttttttcatgttggcctggctggtctagaactcctttttttttttttttttttttttgagaaggattctcactctgttgcccaggctggagtgcagtggtgtgatctcgactcactgcaacatctgcctcctgggttcaagcaattcttctgcctyaacctcccaagtagctgggattacaggtgcccaccatcatgcccagctaattttgtatttttttttttttttttttttttttagtagagacagggtttcatcatgttggccaggctggtctcaactcctgacctcaggtgatctgcctgccttggcctcccaaaatgctgggattacggtgatgaacaaccgtgcctggctgcaatttta

SEQ ID NO: 935688 - DNA, 844 bp, Homo sapiens
gttggcctggctggtctagaactcctttttttttttttttttttttttgagaaggattctcactctgttgcccaggctggagtgcagtggtgtgatctcgactcactgcaacatctgcctcctgggttcaagcaattcttctgcctcaacctcccaagtagctgggattacaggtgcccaccatcatgcccagctaattttgtatttttttttttttttttttttttttagtagagacagggtttcatcatgttggccaggctggtctcaactcctgacctcaggtgatctgcctgccttggcctcccaaaatgctgggattacrgtgatgaacaaccgtgcctggctgcaattttactttctaaatgatctcaaattcattccttttctctttcatagtagttgactctcagtgggaccaatggagaaccttctttctgggtttcctgcctccaatttcactctcaccatccatagcctaactccctcttcatcagagtgcttttctaaacctcaaatctgttcgtgtcatttctttccatggaaccctccatggttccccatggcctatggcattaattctaagcctcttagcctggcattcaagaccctccctgatctgccccctgcctgtcttcccagccacctccctctttttggctcagtcattcctccagtgctctgggctgtttcacacccctgtgcctttctctccacctacatgctcatctctgccttctctcctgacaccgctacatgacatctctgccttctctcctgtgtccagcccattcatcctctaagtctctagaagtccaaagacttctctgtgatgctctcacaa

SEQ ID NO: 935689 - DNA, 590 bp, Homo sapiens
tgctgtccctgggatatttttacctctctcttattcattttgtttttaaataattttgttgacacataatttacattgccataaaaggttgccaattgtaatgtactattcagtaggtttcagtatatttacagcattgtataaacatcatcagaatgtttccatcacctaaaaagaaactttgtgcccatcacagtcgcttcccatttccactgccatccccaggcagccagtaatcctccctcagtctctatatatttgccttttttggatgtttcataaaaatggaagcaaaaacctgtggtcttttgtatctgacttctttcactgagcataagttttttaaggttcatccacattgtagcatgcatcartatttcatttctttacattgatgaataattcattataaatctaccacatcttatttattcatttatcagttgatggacatttgggttgtttccactttttggctactatgaataatgctgctatgaacattgtgtacagacttttctatgaacatatgtttttatttctcttgggacctctacattgaattttctgaagaactgccaaattgtttt

SEQ ID NO: 935690 - DNA, 651 bp, Homo sapiens
agtgaaagtggatcattataaaggtcttcatcctcatcattttcctgctgagcaggctgaggaggaggaagtgggggttggtcttctgtctcaggaatggcagaggcagaagaaaatctgcgttggctgggtccagtggtccatgtctgtaatcccagcactttaggaggccaaggtgggcagagcccctgaggtcaggagttcgaaaccagcctggccaacatggtgaaacccgtctctactaaaaatacaaaataattagctagacrtggtgccgcccacctgtagacccagctacttgggaggctgaggcaggagaattgcttgaacctgggaggtggagattacagtaagccgagattgccccactgcactccagcttgggcgacagaatgagactccatctcggaaaaaaagagaaaatttgcgattaggtggacccacgcattacaagttcatgttgatcaaggccaaatgtacttgcaaaacataccattggctgtcagtgtgatggacagagaggagaatggatttgagaactagaccagcctaagtttgaatcctgtctctgccactttgtagtcttgtcactttgggcgagtttcttaacttctctgcacctaatttccccatctgtacaatggggataac

SEQ ID NO: 935691 - DNA, 674 bp, Homo sapiens
aggaccccctttgttaatatttacagctccttttttttttgaaacggagttttgctcttgtcacccaggctggagtgcaatggcacgatctcagctcattgcaacatctacctcccaggttcaagcaattctcctgcctcagcctcccgagtagctgggattacaggcacccgccaccacatctgcctaatttttgtattttttagtagagacagggtttcactatgttggccaggctggtcacgatctcctgacctcaagtgatccacccacctcagcctcccaaagtgctgggatgacaggcatgagccactgcgcccagcccacagctccttctataacctgttgaatatgtatgtttagccaactctttcagcttcaagcttccactccaatccctcctcctttggagtgcctgtttctcctctttgcaggaggctacacttcccagcctgtcagcatggccaccatgcaggctgtaaccctttataagatataaaatcccctttccaaatttatagaycctggccaggtacaatggctcacgcctgtaatcccagcactttgggagaccaaggcgggtgatcacttgaggccaggagttcgagaccagcgtgggcaacatggagaaacctcatctctactaaaaatacaaaaattagctgagcgtggtg

SEQ ID NO: 935692 - DNA, 520 bp, Homo sapiens
gaacttctatttcatatcgagggtgggaaggatgcactgaagatcaaatgaactgagacatccatgttaggggagaaaacataaccatctactgaccatcagagaggtgcaagatagaccgactcactgatgaacggccacacaagagtgggctccagcccttttccaaaatgctacaggtctatgactgttactctggactsttccttctccagaataaagaagtcaagggaacaattaaactatctctacccattactatccctggacttcaaggccccttagtgcccctttcagggccccagagaagagcctcagcctgggtccacaacccatggtccctgtgcaaggcctccctggagggccagcccacacggctttgttatagatgacggcctggacagctatctcacccactgtcttctagtctcctcatctccaagttcctgaagccccggccaaagacaacagtgtggacttgtttttttggggcccaaagtagaaggcttctcagcacctg

SEQ ID NO: 935693 - DNA, 732 bp, Homo sapiens
cccaccagcgttttccgcgcacagcgccagccataggaaaggacccccaggagcgaatccgggcagggaaaccccggacgcccgcacactcagcatcagtaccggcacccagcacccagcaccgagcaccgagcacgcagcaccmagcaccgatcaccgagcagagcaccccgcacgcagaacccaccgagagcctgatgcagtctccgccgcaggcatagcgctaggccccggcgccttcacaacaaagggacgctggcgggcggggcctgagaggcgcgcggtggaggggccgggcgcgaggccgcggagacagctcggagctcggcactggggagtggcacagcgctggcggatccaggtgggcttcacggggcgcccgcgggaccggaaatgacgcgcagaaccctgcatcgggctcctcgctgccccgcgggcgccgctcctcagtgccccagagccacggagccggggaaacgcgccgcggcccacaacgcccccgcggctgcccgttggttccgcccgggccgttctactccaggcagacgggaggagaaacacggcgcgctcagcgtcccctcccccgttggttctgctcgggcccttccactgcaggccgacgggggtggaaacacgcagttttttttttttttttaaggtctagggtaacacggggcttttaagtgcctctccgctgccgcctggtggtccagcccgggccgttgcagtgca

SEQ ID NO: 935694 - DNA, 732 bp, Homo sapiens
cccaccagcgttttccgcgcacagcgccagccataggaaaggacccccaggagcgaatccgggcagggaaaccccggacgcccgcacactcagcatcagtaccggcacccagcacccagcaccgagcaccgagcacgcagcacccagcaccgatcaccgagcagagcaccccgcacgcagaacccaccgagagcctgatgcagtctccgccgcaggcatagcgctaggccccggcgccttcacaacaaagggacgctggcgggcggggcctragaggcgcgcggtggaggggccgggcgcgaggccgcggagacagctcggagctcggcactggggagtggcacagcgctggcggatccaggtgggcttcacggggcgcccgcgggaccggaaatgacgcgcagaaccctgcatcgggctcctcgctgccccgcgggcgccgctcctcagtgccccagagccacggagccggggaaacgcgccgcggcccacaacgcccccgcggctgcccgttggttccgcccgggccgttctactccaggcagacgggaggagaaacacggcgcgctcagcgtcccctcccccgttggttctgctcgggcccttccactgcaggccgacgggggtggaaacacgcagttttttttttttttttaaggtctagggtaacacggggcttttaagtgcctctccgctgccgcctggtggtccagcccgggccgttgcagtgca

SEQ ID NO: 935695 - DNA, 744 bp, Homo sapiens
accagcgttttccgcgcacagcgccagccataggaaaggacccccaggagcgaatccgggcagggaaaccccggacgcccgcacactcagcatcagtaccggcacccagcacccagcaccgagcaccgagcacgcagcaccaagcaccgatcaccgagcagagcaccccgcacgcagaacccaccgagagcctgatgcagtctccgccgcaggcatagcgctaggccccggcgccttcacaacaaagggacgctggcgggcggggcctaagaggygcgcggtggaggggccgggcgcgaggccgcggagacagctcggagctcggcactggggagtggcacagcgctggcggatccaggtgggcttcacggggcgcccgcgggaccggaaatgacgcgcagaaccctgcatcgggctcctcgctgccccgcgggcgccgctcctcagtgccccagagccacggagccggggaaacgcgccgcggcccacaacgcccccgcggctgcccgttggttccgcccgagccgttctactccaggcagacgggaggagaaacacggcgcgctcagcgtcccctgccccgttggttctgctcgggcccttccactgcaggccgacgggggtggaaacacgcagttttttttttttttttttttaaggtctagggtaacacggggcttttaagtgcctctccgcggccgcctggtggtccagcccgggccgctgcagtgcagccacacgggg

SEQ ID NO: 935696 - DNA, 773 bp, Homo sapiens
cttggttttcaagtagattcatagcgtctaagataaccacaaaaagagagctggaggaccaggcgcggtggctcacgcctgaaatcccagcactttgggaggccaaggcaggtggatcacgaggtcaggagttcaagaccatcctggctaacacggtgaaaccccgtctccactaaaaatacaaaaaaattagccaggcgtggtgccagatgcctgtagtcccagctacttgggaggctgaggcaggagaatggcgtgaacctgggaggtggaggttgcagtgagccgagatcacgccactgcactccagcctgggcgacagagcaagactccatctccaaaaaaaaaaaaaaaaaagctggataaataagctagtttctaataacctgcaaatgggtctacctgcaggtgtcgacccatcatcactggctttttctcctgcctctttgcccccactcagtggtcccataaatgcctgacatcagcgcctctccccatgacaccttttgcatggcttccagatcttgcaagagataagaaagcctctgaggccaaatcaggctgtgatcctgtgctgcyctcactccaattgccccggatgaatattggtgctgctcctgaacttcgatctctgtgcagcatccatcaagggtttcctgatgactgtggagtgtttgtaagctggtatttgtaaagtgctaagggagccctgcatttcatgagccaacttcatccctgccgtctcccgaatcccttcctgttttcccagcatc

SEQ ID NO: 935697 - DNA, 773 bp, Homo sapiens
cttggttttcaagtagattcatagcgtctaagataaccacaaaaagagagctggaggaccaggcgcggtggctcacgcctgaaatcccagcactttgggaggccaaggcaggtggatcacgaggtcaggagttcaagaccatcctggctaacacggtgaaaccccgtctccactaaaaatacaaaaaaattagccaggcgtggtgccagatgcctgtagtcccagctacttgggaggctgaggcaggagaatggcgtgaacctgggaggtggaggttgcagtgagccgagatcacgccactgcactccagcctgggcgacagagcaagactccatctccaaaaaaaaaaaaaaaaaagctggataaataagctagtttctaataacctgcaaatgggtctacctgcaggtgtcgacccatcatcactggctttttctcctgcctctttgcccccactcagtggtcccataaatgcctgacatcagcgcctctccccatgacaccttttgcatggcttccagatcttgcaagagataagaaagcctctgaggccaaatcaggctgtgatcctgtgctgctctcactccaattgccccrgatgaatattggtgctgctcctgaacttcgatctctgtgcagcatccatcaagggtttcctgatgactgtggagtgtttgtaagctggtatttgtaaagtgctaagggagccctgcatttcatgagccaacttcatccctgccgtctcccgaatcccttcctgttttcccagcatc

SEQ ID NO: 935698 - DNA, 510 bp, Homo sapiens
gctggcatttactgagtgcttactgtgtaccaggcattgagcagagcccttcacatgtgttatttcatttaatccacacagcagcctgggtcagttaccattgttatccccgttttacagataagaaatatgaagacttcaggccaggcacggtggctcacgcctgtaatcccaacactttgggaggccgaggcaggcagatcacttgaggctagaagtttgagaccagcctggccaacatggcaataccccgtctctgctaaaaatacaaaacttagccaggcatggtggtgcacatccgtgctcaggcacragaatcacttgaacccgggaggcagaggttgcagtgaaccaacatcgcaccactgcactccagcctgggcgaaagagtgaaactccgtcaaaaaaaaaagaaaagaagagaaaggaaaagaaaaattaaggcttcagaaggtcaagcacttcacccaaggtcacaaagataatgaatgacagagccaggactgtgtc

SEQ ID NO: 935699 - DNA, 638 bp, Homo sapiens
caggcacgtgccaccacatccggctaatttttgtatttttagtagagacagggtttcaccatatgggccaggctggtctcgaactcctgacctcaggtgatctgcccgccttggcctcccaaagtgtttgggattacaggcatgagccaccacacccagtccctgctctcctctttgttttttgttgttgttgttgtttttgtttggttttttgagatgaagtcttgctctgtcgcccaggctggagtgtaatggcctcccaagtagctgggattacagacgtgtgccaccacacccggctagtttttataattttagtagagatggggttttgccatgttggccaggctggtcttgaactcctaacctcaggtgattctccagccttggcctcccaaagtgcygggattacaggtgtcagctacctcgcccagccccttgcttctctttttaggctacagggcaatgcaatgttaagcccaagctcagtctgctctagtgtgtgcacacgcaatggcacccactgtgccctcacttggatgacccgcctttgtcccacaggtaattcctactgagccttcaagagctggctgggcaggcacctccctccagaagcctcccctgacaccatcgtctcc

SEQ ID NO: 935700 - DNA, 588 bp, Homo sapiens
cacatttcatttaatcttcacttctataagatgggtactattattattcccattttattttatttttttaaaacatataaattttattttattttagagacaaggtctcactttgttgcccaggctggagtgcagtgacttgaacacrgctcactgcagtctcaacttcctaggctcaaatgatcctcccaagaagttgggactacaggtgcacaccaccatgcctggctaattttttttttttttttttttttttgagacattgtcacattctgtcacccaggctggagtgcaatggctgggtcacggctcactgcagctttgaactcctgggctcaggtaatcctcccacctcagcctccctggtagctaggaccacaggctcatgccaccatgcccagctcagttttgtatttttttgtagagacagggtttcaccctgttgcccagattggtctccaactcctgggctcaagcaatcctcccatcttggcctctgaaagtgctgggattacaggtgtgattcacgacacccagtctgtcatctcattttacagacaaggaaactgcagtttaggcatttacagg

SEQ ID NO: 935701 - DNA, 741 bp, Homo sapiens
cctggagacaggataacctgggttcaaattcctgttcctcattgacttgcctccgtttcctcatctacaaaatgggcttcgtgtttccatgagcaggggcgtaatgctctcagacttccccaccctgtcacattctgccattcagcttttggtagatgttcaaactgccatttggacctttatccatgggatttcagtgtctctctcttgattggatctgaacttggtggaggaggtggtgggtttattcattagaacccactgaacattaatggcacccacccacgtgtttgatgtgacgattaagcaggtgaaggtgtttgtagctgcttgtatcctccatgtctagatatatagctaatccatacctgtgcatatctatacctatcaatacacactggggcccagcacagatcggtgcttagtttgtttgctttttgagacagtgtcttgctctgttgcccaggctggagtgcagcggcatgatcttggctcactgcaacctccacctcccaggttcaagcaattctcatgcctcagcttcctgagtagctgggattgcaggtgcctgacaccaggcctggcytgttttttttttttttttttttagtagagacagggcttcaccatgttgccaggttggtctcgaactcctggcctcaagcaatccgcccgcctcagcctcccaaagtgctgggattacaggtgtaagccactgcacctggccagattggtgcttag

SEQ ID NO: 935702 - DNA, 645 bp, Homo sapiens
agtctagacccctggacactggaccaggtgacctccaaagctcctttcaaatataagatcaggctgggtgcagtggctcacacctgtaatcccagcacttcgggaggctgaggatggcagatcacctgaggtcaggagttcaagaccagtctggccaaaatggggaaaccccttctctactgaaaatacaaaaattagctgggcgtggtggcaggtgcctgtaatcccagctactcaggaggctgaggcaggagaattgcttaaacccaggaggtggaagttgcagtgagccgagatcgcgccattgcactccagcctgggtgacaggaacaaaactccatctcaaataaaataaaatacataaaataaaatataamcaaatataagatctgtttttcttgtcctgatgatcctgtctgagttatcaatttcatgtaagacaagtggctcttaggaatcttccaggggagggtggaaaagttactagatacccacaacttcaaaggatataaacttgagaaagctagaaccataactctgttctgtcatcatgttcatcacagatcttggcacgtaggagagacacaatacaaatttaaatgaataaataagtaatttaactacatggaaagggggaagaaagag

SEQ ID NO: 935703 - DNA, 717 bp, Homo sapiens
agagctgaactccaagacaatgggcttatgcagaaagcaatgagagtctcggccttggaggcatgccagccaaggcccgagcagcacctaacagggatctgagagagagctgagtgtcagaggaggttccaaaaggatgactttaactacagtgatcctacattgcagttcacccaacagtccctgttatgcttgttgtccccatgtagttgtcattactgctatttccttcctagaaggtcccagaatgggaaataaatgatacggacccctaactctaaggcccctctcaactctgacactctgtgattctctttcctatcatgtcgcctctctccagcctcttcagctgtcatcctacagtatttgcttaaatatcccttccaccaggggccctgtcctcggtcctctgaaactgctggttycaactgcccagcagtccttctgctgtaatgccagcctgagtttcctttgggaaacctgctcttcattctctgggagtgggcacgggactccacctggccaatcagagcatgccgaccatcctcctgaccaggtcatcagtgtggggttgatgatgccaccttgacagtctgctgagaacaaagctcacacaggggcaaactgagcagaggcatcgtgctaaagccaatttgaacaacaggatgcacccatgcctgaagccaaccccaaccccagcttgtcacttacctgagc

SEQ ID NO: 935704 - DNA, 665 bp, Homo sapiens
agcatctgttagtttttggctttttaattagtcattctgacgggtgtgagatagtatctcactgtggttttgatttgcatttctctaatgattaatgatattgagcattttttcatatgcttgttggctgtgtgttacatcttcttttgaaaactgtctgttcatgtcctttgcccattttttaatggggttgtttggttttcgcttgttaatttgtttaagttccttatagattctggttattagacccttgttggatgcatagtttgcaaatattttctcctattctgtaggttatgcagaagccctttagtttaattagcttccatttrtccatttttggttttattgcaattgctttaggtgtctttgtcatggaatctttgccagggcttatgtctagaatggtatttcctaggttaccatcagacctgccttacaagagatccttaagggagggctaaatatggaaacgaaaaactattaccagccaccacaaaagcacacttaagtacaccattgacgccatgaagcaactacacactcaagtctttctcctcatccaggtactcaaattacatttacgttaaaattaaaattgtcccacagctcactaaaattcttcatttaggggtctttcttctatgtttcattttggatggttt

SEQ ID NO: 935705 - DNA, 665 bp, Homo sapiens
agcatctgttagtttttggctttttaattagtcattctgacgggtgtgagatagtatctcactgtggttttgatttgcatttctctaatgattaatgatattgagcattttttcatatgcttgttggctgtgtgttacatcttcttttgaaaactgtctgttcatgtcctttgcccattttttaatggggttgtttggttttcgcttgttaatttgtttaagttccttatagattctggttattagacccttgttggatgcatagtttgcaaatattttctcctattctgtaggttatgcagaagccctttagtttaattagcttccatttatccatttttggttttattgcaattgctttaggtgtctttgtcatggaatctttgccagggcttatgtctagaatggtatttcctaggttaccatcagacctgccttacaagagatccttaagggagggctaaatatggaaacgaaaaactattaccagccaccacaaaagcacacttaagtayaccattgacgccatgaagcaactacacactcaagtctttctcctcatccaggtactcaaattacatttacgttaaaattaaaattgtcccacagctcactaaaattcttcatttaggggtctttcttctatgtttcattttggatggttt

SEQ ID NO: 935706 - DNA, 619 bp, Homo sapiens
tgatcgcgtgttttgcagccaacctgtaaggatgttaataagcttttaatacctatgctgccatttctgaacacaataaaaaaaaagatgatgctgattggtatacaatcaatcaaccctgcttgatatggtttagggaacatgtgtgagtttaaaaatcattttgtacaacaatcactgaatcatcagagaatacagwagtatctactgtgttacatgagaaatagaatctgtttagggtttaaattagacatcatacattatgtgtatgataggtttaggtttagacataaaaacatatgtttaactagctacatctttaatatacaagtataaagaaaccattcattcatgaacatctaagttaaattcacagtatatacttagtgcagccatgattctctttgctagattactgacatcacagtaggtttctatgattctctcttgaataaagcaatgatgtgaaaagctccaggacacaagctgctattatagcctcctgaaatcagatttccaactacaaatggtcctgacagatccttaaggcattattcttctattgataacagggtaattgtcactaagttgtcttcctttgttcttaggctgaggtctt

SEQ ID NO: 935707 - DNA, 607 bp, Homo sapiens
aatctggattacaaggaagctcacggagatcctggagaaagttcaaacccaatccaaggaagccaagcaatcattataataattctagagctgaaagatgaaatttctattttaagaaagacctaaacttaaccttttgagctgaaaaattccctatgrgaatttcatagtacaattggtagtattaagatcagaatagaccaagctgagaaaagaaactcacagctcaaagactagttctttgaatcaactcattcagacaaaaataaagaaaaattaattttaaaaaataaacaaaaccctgaagaaatatgggataatgcaaagagaccaaatctataacttcttggcacatctgaaagatgtgccattttatgctagataaggcctggggacatgtgaaattagctccctagctatgcaaagaatgttataaagaaaagatattttatataaaaaaggatcttgtatggtaaattcttgtcctaaaataaagtgattggttctttaaaaaacgggatgtttaggacaagtcagaaaatctaagcatgtcacagatggtctgtgtaagttgtgaaaggatttctgaaagggaatttatgcaaga

SEQ ID NO: 935708 - DNA, 607 bp, Homo sapiens
aatctggattacaaggaagctcacggagatcctggagaaagttcaaacccaatccaaggaagccaagcaatcattataataattctagagctgaaagatgaaatttctattttaagaaagacctaaacttaaccttttgagctgaaaaattccctatgggaatttcatagtacaattggtagtattaagatcagaatagaccaagctgagaaaagaaactcacagctcaaagactagttctttgaatcwactcattcagacaaaaataaagaaaaattaattttaaaaaataaacaaaaccctgaagaaatatgggataatgcaaagagaccaaatctataacttcttggcacatctgaaagatgtgccattttatgctagataaggcctggggacatgtgaaattagctccctagctatgcaaagaatgttataaagaaaagatattttatataaaaaaggatcttgtatggtaaattcttgtcctaaaataaagtgattggttctttaaaaaacgggatgtttaggacaagtcagaaaatctaagcatgtcacagatggtctgtgtaagttgtgaaaggatttctgaaagggaatttatgcaaga

SEQ ID NO: 935709 - DNA, 607 bp, Homo sapiens
aatctggattacaaggaagctcacggagatcctggagaaagttcaaacccaatccaaggaagccaagcaatcattataataattctagagctgaaagatgaaatttctattttaagaaagacctaaacttaaccttttgagctgaaaaattccctatgggaatttcatagtacaattggtagtattaagatcagaatagaccaagctgagaaaagaaactcacagctcaaagactagttctttgaatcaactyattcagacaaaaataaagaaaaattaattttaaaaaataaacaaaaccctgaagaaatatgggataatgcaaagagaccaaatctataacttcttggcacatctgaaagatgtgccattttatgctagataaggcctggggacatgtgaaattagctccctagctatgcaaagaatgttataaagaaaagatattttatataaaaaaggatcttgtatggtaaattcttgtcctaaaataaagtgattggttctttaaaaaacgggatgtttaggacaagtcagaaaatctaagcatgtcacagatggtctgtgtaagttgtgaaaggatttctgaaagggaatttatgcaaga

SEQ ID NO: 935710 - DNA, 555 bp, Homo sapiens
tggctgttatcaaaaagacaagagatagcaaatgttgtgagggtgtgaaacaagggaaccctgtgcactgttggtgggaatgtaggttggtgcagccatctggaaaacagtatagagaacagtgacagtagaactatagtatgacccagcagtccttctggtatatgctcaaaggagaggcaatcarcaccacttaaagtcacctgccctcccatgttcattagcattagtcacaacagccaagctatagaaacaacctaaaagctcatcaatgaacaaattaataaaaaatatgatataggagtgtgtgtgcctatgtctgtacacacatgtacacacaacggtatagcctgccatttgccacagtgtggatggacctggaggacattatgttaagtgaaataaaccagacacaaaaagaaaaagactgcaggatctcacttctgtgtgaaatctgtatcttaacaagagctcaaagacacaagatagatgatggaaggaagtgtggttaacagggtagacataggcggggagggggagatgtgggtcaaagga

SEQ ID NO: 935711 - DNA, 572 bp, Homo sapiens
agttcatgtcctttgcaggaacatggatgaagctggaaaccatcattctcagcaaactaacacaagaacagaaagccaaacaccacatgttctcactcataggtgggagttgaacaacgagaacacatggacacggggaggggaacatcacacactggggcctgttgggggcgggtggggggttagggaagggatagcattagaagaaatacctaatgtagatgatgggttgatgggtgcagcaaaccaccatggcacatgtataccyatgtaacaaacctgcacgtactgcacatgtatcccagaacttaaaatataatacattaaaaaaaaaaactatggagatagtaagacatagtctttctgagggcaaaatagatggtgagtcaacaagagcattgcttgatatatacaataacaacaacaaaaaaagaggatggatgttcagaagactgagggcagccacttcaataaaaagccaaaatcccttgcccagtttctgtaacttagccaagttttaagtccagagctcatggtctacaagagaggtcaggtgaccagagaggaggaac

SEQ ID NO: 935712 - DNA, 618 bp, Homo sapiens
tatgccccctccaagtcgtgggaggaagagaattcggcccagccggagtgcatgtacctttttctctctcagatttgaagcaaattaaaatagacctaggtaaattatcagataaccctgatggctatattgatgttttacaaaggtacgacactcctttgatctgacatggagagatataatgttactgctggatcagatactaatcacaaatgagagaagtgccaccataactgcagccygagagtttggcgatctctgatatctcagtcaggtcaatgataggatgacaacagaggaaagaacaattccccacaggccagcaggcagttctcagtgtagaccctgactgggacacagaatcagaacatggagattggtgccgcagacatttgttaacttgcatgctagaaggactaaggaaaactaggaaaaagcctataaattattcaataatgtccactataacacagggagaggaagaaaatcctactgcctttctggagagactaagggaggcattgaggaagcatacctctctgtcatctgactctattgaaggccaacctatcttaaaggataagtttatcactcagtcagctgcaaacattaggaaaa

SEQ ID NO: 935713 - DNA, 575 bp, Homo sapiens
aactattcaagtctttaaatgactacaaatcaagaaaactgaattggtcattttgtgttggtataagcatgggtggagcaactgccatgactggacagctttctggtttcactacttgggtcaaagaggttgcttctgaatgtgtctgtgcactgtgtcgtccatggggaaatgctggctagctgaaaaatgtcacctgaacttcacaacgttttgcaggatgtgattaaaattatcagctatattgaagtacatgyccttaactcacgtctgtttgcacagctctgtgaggagatggacacagagcgcattcatctttcttatacacagaggtgagatggctttctaaaggtagatcactggccagagtttttgagttaggagggctgctacagagatttcttttagaaaaatagtcaccactggaagcacatttcagtgacacaggataggtggcaaaacttgcttacttgtgtgacatattcaacctgctcagagaattcaatctgtcactttagaggagaacaactgtgttcaagttggcagataaagtggctgcattcaaatccaactgg

SEQ ID NO: 935714 - DNA, 839 bp, Homo sapiens
aggtttggctgtatccctacccaaatctcatcttgaattgtagctcccataatccccacatgtcgtgggagggacctggtggggggtaattgaatcatgggggtggttatcctcatgctgttatgatagtgactgagttctcacaatatctgatggttttataaggggctgttcaccctttgctcagcacttctttgctgccaccatgtgaagaaggacatgtttgcttctccttctgccatgattgtaagtttcctgaggctttcccagccatgtggaactgcaagttaattcctttataaattacctttataaattacctttataaattacccagtctcgggtatttcttcataacagcgtgaaaatggactaacacagtaaattggtaccaggagtgaggtgctgctataaggacacctgaaaaggtggaagcagctttggaactgggtaacagaggttggaacagtttggagtgttcagaagaagacaggaaaatgtgggaaagtttggaacttcctagagacttggagggctcagaagacagsaagatgtgggaaagtttggaacttcctagagacttgttgaatggctttgaccaaaatgctgatagtgatatggacaatgaagtccaggctgaagtggtctcagatggagatgcagaacttgttgggaactggagcaaaggtgactcttgctatgctttagcaaagagactaggccaggcatggtggctcatgcctgtaatcccagcactttgggaggctgaggtgggcagatcacttgaggccaggagttcaagaccagcctgggcaacatagtaaaaccctgtctctacc

SEQ ID NO: 935715 - DNA, 741 bp, Homo sapiens
tctggcagagctgggatttgaacctaggcagctctaaggtagagtctgtacacataacccattaggctgtaacttatcggaaaggggtcttgatccagaccccaagagagggttcttggttcttgtacaagaaagaatttggggcgagttcatggagtgaagtgaaaacaagttgattaggaaagtaaaggaataaagaagagctactccataggcagagcagcagcactggctgcttgtctaaggacatttatagtcatttcttgattatatgttaaacaaggggcagattattcatgagttttctgggaaaggagtggtcaattcctggaactgagggttcctccctgttttagaccatatagggtaacttccggatgttgccatgacacctgtaaaccgttatggcactggtgagagtgtcttttagcatgctaatgtatcataatcagtgaataatgagcactgaggacgaccagaggtcacttttattgcygtcttggttttggtgagatttggctggcttcttcactgcatgctgttttctcagcaaggtctttatgatctgtaccttgagctgacctcctatctcatcctgtgacttagaatgcctaacctcctgggaatgcagcccagtaggtctcagcctcattttacccagcccctattcaagatggagtcactctggttcaaaggcctctgatgtaaccgtctcccttccatggctgctttcctctctta

SEQ ID NO: 935716 - DNA, 724 bp, Homo sapiens
ctgtccactccctctgtcttcaaagccaaccatgttacttattatatcacatcactctgaccttctcttctgcttccctcttgcacttattttttaagagatggggtcttgctgtgttgcccaggctggaatgcagtggcacaatcatggcccactgcagccttgaactcctgggctcaagtaatcctcccacctcagcctcctgagtagctgagactgcagttacatgccagcatgcttggctccctcttgcacttttaaagacctttgtgattacctcgggcccaccctgataataaggacagcctccccatctcaaggtcatctgattagcaatcttaatttcatctgcatctttacttctcctttgccatgtaacctaacctaacacaatcatagattctgtgcatgagaatgcagaaatctttgtgcaggtatttttctgtctaccataacccgtaggaaaataatttccttttccttctctataatctttatttaatgttaccatggtatttaggatacttmtggcctcaaaatagtactgctttggttttctagaggccacttcattattttccctttgggcccataagggttctgcctctggctttttgctgaggatacgacatttggcatcagatcaaagagtgcaagtatctcttcttccgggctttctaagcctctctgctccttagcatggatatttctatctggttgccca

SEQ ID NO: 935717 - DNA, 724 bp, Homo sapiens
ctgtccactccctctgtcttcaaagccaaccatgttacttattatatcacatcactctgaccttctcttctgcttccctcttgcacttattttttaagagatggggtcttgctgtgttgcccaggctggaatgcagtggcacaatcatggcccactgcagccttgaactcctgggctcaagtaatcctcccacctcagcctcctgagtagctgagactgcagttacatgccagcatgcttggctccctcttgcacttttaaagacctttgtgattacctcgggcccaccctgataataaggacagcctccccatctcaaggtcatctgattagcaatcttaatttcatctgcatctttacttctcctttgccatgtaacctaacctaacacaatcatagattctgtgcatgagaatgcagaaatctttgtgcaggtatttttctgtctaccataacccgtaggaaaataatttccttttccttctctataatctttatttaatgttaccatggtatttaggatacttctggcctcaaaatagtactgctttggttttctagaggccacttcattattttmcctttgggcccataagggttctgcctctggctttttgctgaggatacgacatttggcatcagatcaaagagtgcaagtatctcttcttccgggctttctaagcctctctgctccttagcatggatatttctatctggttgccca

SEQ ID NO: 935718 - DNA, 596 bp, Homo sapiens
tagttatctcattagcacacacaaaatactcttatgactccagagactcaaaggattttaggagctgtacataaggaaactgggaaaaagatcaaatatatatatatattttacatcatcacatacacatataaaaagatatttgttataagaaatcagctcacatctcacatgattatggagattgagaagtcccgaagtctgcagttggcaagccgcagacccagaagaccggatggtgcaattccagtctgggtctaaaggcctgagaatcagaagagctgacagtgtgagctccagcctgaaagccagcargcttgagatccgggaagagccaatgtttcagtttgagtccaaaggcaagaaaaaatccaatgtcccagctcacaggcagtcagacaggatgagttcctgctgtctcaatctttctgttccattcaggtcttcagccgattgcatgaggcccattcacatgaatctgctgtactcaggctactgatccaaatgttaatctcatcacagaaacacccagaataatgtttggcaaaatgtctgggcatcccgtggcccagtcaaattgacacatacaattcacc

SEQ ID NO: 935719 - DNA, 699 bp, Homo sapiens
ggcttgcagaactgttatgactagctggaggattgtatatgcaccaatcagcactctgtctagcttggggtttgtggatgcaccaatcagcactctgtgtctagctcagggattgtaaatgcaccaatcagcacgctgtcaaaactgaccaatcagctctctgtaaaacggaccaatcagctctctgtaaaatgaaccaatcagcaggatgtgggtggggccaaataagggaataaaagcagactgcccaaagggacagtggcaatcagattgggtctggttactgattgtggagcctttgttgtttggctgttcttgttactgctcactgtttgggttggcagtgaccttgtgagctgtaacactcaccacgaaggtttgtagcttcacttttgaagccagtgagtcyacgaacccacctgaaggaatgaagaactctggacgtgctgtttttatgagctgaagcctcatggtgaaggtctgcagcttcactcttgaagtcagtgagaccgtgaacccaccagaaggaaaaaactccggtcgtaccatctttaagaactgtaacaccacgagggtctgcggcttcattcctgaagtcatgttgaagtcagcgagaccaagaacccaccaattctggacacactaggaatggacatagctctctaaagttgctaccaccatgattctttcgagttttac

SEQ ID NO: 935720 - DNA, 801 bp, Homo sapiens
tgtttttatgagctgaagcctcatggtgaaggtctgcagcttcactcttgaagtcagtgagaccgtgaacccaccagaaggaaaaaactccggtcgtaccatctttaagaactgtaacaccacgagggtctgcggcttcattcctgaagtcatgttgaagtcagcgagaccaagaacccaccaattctggacacactaggaatggacatagctctctaaagttgctaccaccatgattctttcgagttttacctgttcagttactctggtaatagctttatgtctaagtaacaaattcttttttcttgtttgagaggagatctcactctgttgcccaggctgcagtgcagtggtacgatcacagckcattgcaaccttgaactcctgggtgtacggaatcttcatacctcagccttctgaatggccaggactacccatacacgccaccacacctggctaattaaaatttttttttcgcagagatggggtgtctgttgccaaggctggtctcgaactcctggccttgagggatagtctcttgcctgggcctcccaaaattctaggattacaggcacaagccactgctcctggccaacaattctttatattaaattctttctgtttaactcactaatgtgatttctgtctcttcactaaaccctgatggacacttgagaaaactcagactcatttgaatcggtgggctgctcaagccgctgcccatttttaatgttccattttctcctttgctctctgcctgccccttcttccttctgattatggccatctagctcttatttt

SEQ ID NO: 935721 - DNA, 801 bp, Homo sapiens
tgtttttatgagctgaagcctcatggtgaaggtctgcagcttcactcttgaagtcagtgagaccgtgaacccaccagaaggaaaaaactccggtcgtaccatctttaagaactgtaacaccacgagggtctgcggcttcattcctgaagtcatgttgaagtcagcgagaccaagaacccaccaattctggacacactaggaatggacatagctctctaaagttgctaccaccatgattctttcgagttttacctgttcagttactctggtaatagctttatgtctaagtaacaaattcttttttcttgtttgagaggagatctcactctgttgcccaggctgcagtgcagtggtacgatcacagctcattgcaaccttgaactcctgggtgtacggaatcttcatacckcagccttctgaatggccaggactacccatacacgccaccacacctggctaattaaaatttttttttcgcagagatggggtgtctgttgccaaggctggtctcgaactcctggccttgagggatagtctcttgcctgggcctcccaaaattctaggattacaggcacaagccactgctcctggccaacaattctttatattaaattctttctgtttaactcactaatgtgatttctgtctcttcactaaaccctgatggacacttgagaaaactcagactcatttgaatcggtgggctgctcaagccgctgcccatttttaatgttccattttctcctttgctctctgcctgccccttcttccttctgattatggccatctagctcttatttt

SEQ ID NO: 935722 - DNA, 738 bp, Homo sapiens
gaattttgtgggttatctccttttatccttacaaccacattatgaggtgttcttatcctggttcaccaaggatgactttgaacccactgggagttaagtgacctcccttcccccaggcccacagggctggtgagcagggaaagtggaggttccatggtactgactttggggcctacgctaatcaatccactgcccacgctgcctccatggcctcttcaggggacgtgatcagccrttccctgccctaatggtggcctcctgagctttggtcatatccagccatcctctcacggctgggctttacattttttggccagtaacatgagactaaaaactccagggagaattcatatctgcactgatgcttcctgcaccctgaagaaagcagatccagaaaagcatttctgtagctgtaactctgcccaagaatgggaagcccatcaactccaacccaagacagatgagggcaggtctccccctgcatggcacgcgtgtgttcccgagaaagaaacatggcggcaagtcaccgccgctccacgtagccgtggagagctaaagaggattagttctgatgtggacaaagtcctaagggaaggtgcatgcagatggggtcacctcaggggtctactgacctcaggaacccgtgtagctcctgtccctctcttccctccagggacacaggagaaaacagaactggaatttgagaaactggattttggatatttcctcaacactctg

SEQ ID NO: 935723 - DNA, 581 bp, Homo sapiens
ctgtctccaaataatttaactgcatctcagaacaaagcacaagaatatttatgggactacaaaaatagcacctaagaggtaaaattcaaaatacctggcattgataaaaaattaataggaggaagaaggaaaaatatacttcaaagtggggagaaaataaatgatcaaaaccaactcagaaatgatacagatgatagaattagtggagaagarcattataactgctgcactaactgtatttcatatgttcaagaagccagagaaaagactgaacatattaagtagatatggaagatataatgacaagatccaaatcgaactaccagatgtgaaaactaaatgtctgagattaaaaatacactagatgagatgaatagcaaattagacattagaggaaaaaaagattagtaaacttgaagacctagaaataaaactatacaaaataaaacagaaaaaggacaagaaaaaggattagtgagctgtgtggaaactttgaggagcctaatatatatgtaatcaggctctcaaaaaaagaaatatgaggagagaagaaatagaaaaaaatagttcaagaaaaaatg

SEQ ID NO: 935724 - DNA, 599 bp, Homo sapiens
gccactacgcccggccaattttctgcattttttagtagagacggggtttcaccgttttagccgggatggtctcgatctcctgaccccgtgatccgcccgcctcggcctcccaaagtgctgggattacaggcgtgagtaaatttttgtatttttagtacagatagggtttcaccatgttggccaggctggtctcgaactcctgacctcaagtggtctgcccacctcggcctcccaaagtgctgggattacagatgtgagccaccgtgcccggctcagttgccatctttattggctagggaggaggggtgcctaaggtgctagtgtcagggatcactgagttggcaatagatctgattaastccagagagatctctgcttgccatcaaggctgggaaagaacgtgatgctctggaagcctatgaccacagttttagtaggcaggtagtttcctgctgcctccatagttacagtttaacttgctaaggttggtaggatgaaggtaatagattgcttcaggcacctgcactatgagagctgggtggatatgtcaacagaatggcacatctgtcagtgccaggaaacagacaccctggagtcct

SEQ ID NO: 935725 - DNA, 588 bp, Homo sapiens
cattcctctaggattctgaagtagaattcttggcactgttccggattctcctgcatgacttttatcaccctcacagctcatacttagttggtcatcaaagctgctgagtctttctcctttctctgaaacatctttcatagacatcccctcttccccatattcactaccttgtggttctggttctttaatycccctttaggattgtagtaataacctcccatctgatctccctgattctactcttgcctctaatccatcttccacttgtcatcagctttcttttcctaaaacacagatttaatcatgctgttttttacttaaaaacgatttgtagctctccactgcctacaagaggcattcaaatccctaagcatgatttacaatgtgagactcttcattatttgccttcaatctgttttctctgctctatcatctgccatttcctccccacactccatctgtcctaaactattttccattcctagaacattccttgagttctttcctgcatctatgcttttgcacatgctgtttcttctatttctgatgttcatgcctgtctacctggcaagttactagttttccttt

SEQ ID NO: 935726 - DNA, 541 bp, Homo sapiens
gaagagagcgggggtgactaaactaataccagacaaaatagactttaagtaaaaaacttaggctgggaatggtggctcatgcctgtaatcccagcactttgggaggccaaggtgggtggatcacctgaggtcaggagttcaagaccagcctggccaacatrgcaaaaccccatctttactagaaatacaaaaattagctgggtgtggtggcaggcacctgtaatcccagctactcaggaggctgaggcagacagaattgcttgaacctaggagacaaagattgtagtaagctgagatcatgccactgcactccagcctgggccacagagtgagactccatctcaaaaaaaaaaaagtaaaaaacataaaaaagatgtagaatattatataatgaaaaagggttaattaaccaaaaatatacaataattataaatatatatgcatcaaacttcaaatattgcagaattgaaaagagaagcaggcatctgtataataataggaggaaacttcaatactccaatagccccactttcaacaatgg

SEQ ID NO: 935727 - DNA, 622 bp, Homo sapiens
aggctgaggcaggaggatcacctgagcctggaggtcgaagctgcagtgagctgtgatcatgccactgccctccagcctgggtgacagagctagagcctgtcttagaaaaaaaaggaacagaccaggcgtggtggctcacacttgtaatcccagcactttgggaggctgaggcaggaggatcatgaggtcaggagattgagaccacagtgaaaccccgtctctactaaaaatacaacaaaaattagctggagtagtggggcacctgtagtcccagctactcagacaggctgagacaggagaatggtgtgaacctgggaggcggaggttgcagtgagccgagatcaygccactgcattccagcctgggtgacagagtgagactccatctcaaaaaaaaaaaaaaaaaaaaggaactaatataaaataattcagcacagttgcaggatacaaaactaacacacaaaaatcagttgtatttcttcacataaacaatgaaaaatctgaaaagaaagaaaattaagaaaacaattccatctacgatagaatcaagaagagtaaaatacttaggaataaatgtaacaaaaaaggcaagagacttctacaccaaaaaactgcaaaatatt

SEQ ID NO: 935728 - DNA, 842 bp, Homo sapiens
agaaatttgcagaagtaacgaggagacaaatgttaattgccaagacaattgggaaaatgcctccagggcatgtcagagaacttcacagccgcccctaccataacagggctggacgactccgaggagaaaatgattttctgagctcacggggcccagggccccacttctgtgtgcagcctagggacttggtgccctgcatcccagccactctagccatggctaaaagagtccaaggtacagcttgggttgtggcttcagagggtgcaagtcccaggccttagaagcttccacatggtattgagcctgtaggtgcacagaagtcaataattgagatttgggaacctcygcctagatttcagaggatgtacggaaacatctggatatccagggagaaatttgctgcaggggtggcgccctcacggagaacttttgctagggcagtatggaagggaactatggggttgaaactcccacacagagtctcccactggggcactgcctagtagatctgtgagaagagggtcaccctcctgcagaacccagaatggtagatccactgacagcctccactatccacctggaaaagctgcagacacaataccagtctgtgaaggcagccaggagggaggctgtaccctgcaaagccacaggggcagagctgctcaagaccatgggaacccacctcttgcatcaacatgacctgaatgtgagacatggagtcaatggagatcattttggagctgtaagatttgactaccctgctggattttggacatgcatgttgcctgtagcctctttgttttggccaatttctcccatttggaatggctgcatttacccaa

SEQ ID NO: 935729 - DNA, 604 bp, Homo sapiens
ccaagaacagtttaatactcttcctaaatgactcctttggattaactgaataattttattattgcattttaatgactgtattattttagctatgtctgtttattatttttcaatcatcattctaaagattccaatatccacccttattcattagcatcttagaataaatattgtactagtttatgtaaaaggaaagaatcataaaactgtataattctatttatttcccagcctttgtgctacattttacttttaaaaatatggtgaaatccctgtaatacgrtattacttttctttatcatgtcttttaaagaattaagaagttaaaaaattaatgatttatatgtgctcatatatttaactatatccaaagtgctattccaatctgataccactaccctcttgcctgaaaatgatcctccaatatttctcgtagtgcaggactcctggtgacaaattttttcaaatttcagttttctgaaaatatagtttttggccctcattttccaaggctgttttcactgaatatagaaatgtgggttattttttttcctctgggcactttaaacatatgccattgttttagggcctcaattatttctaa

SEQ ID NO: 935730 - DNA, 686 bp, Homo sapiens
ggcagcttaggggaaggggcttgtcaaggttgcccagcttaggaactgacaacgacaatgggaccaagtcttctcattccagattccttgtcattttcctctgtgatccaggccattgccccagaccagggctgggcaggaagggagctcagcccacccatcttactgctctcacccggtttactgctgtcccttaaaggtaaaaatggggtgatccagtmagaatttagcgtttgtctgagcttgaaggatcctcctcgccgacataaggttttcttattcttcgctgatgtcacttgttaatgaaaatgggagccgagtgatgatgagctgagctggggatccagagaccagagttcaaggctggcccttgccccatttaccagtgagactgggataagctaagtaaccttcccatgcctcaatctcctgtctgtaaaatgagaatcacgatacctgccatgtcacaaggataaaaagggccgggcacagtggctcacgactgtaatcccagcactttgggaggccgaggcaggtggatcacgaggtcaggagatcaagaccatcctggctaacatgatgaaaccccgtctctactaaaaatacaaaaaattagctgggcatggtggcgggcgcctgtagtcccagctactcaggaggctgaggcaggagaatggcgtgaaccc

SEQ ID NO: 935731 - DNA, 581 bp, Homo sapiens
tactttcctgcagcttttctgtgagtttgaaactatataaaagtaaaatgttaagaggcgagtcagatctgtgatccccaagaaaagggtggcaagtgaggtgagccctaccctggtcttggctttctgcctggacataattcctggactgtgctgtagtgagggggacccagacagagccaggtctcactgatttaaggagacaaagatcagagcttgcagagattacgcttattaaaaacagacatcaaaagaatatttctgccagaaaaattccaacacttcttaaagaaatgcaacaaaattcagcacgcracgacataaaaatttaatgtctagcattcaataaaacattattataaagaagcaggaaactgtgacccacaatcgggagaaaaatcagtccacagaagcagaccaggaaatgacagaagtgatagattctacaggacaactgacctggatgtttaaaaaatgttagtgtcgtgaaagattgttctagattacagggctctaaagagacatgaaaaccaaatgcaatcacatgtgctgtgtgatgcctgaatggatcttggattaaa

SEQ ID NO: 935732 - DNA, 619 bp, Homo sapiens
aaggacttaaataaatggagggcttaacaatgtttatggattagaagactcaatgttatgaagatatcatttcttcccagactggtctgtagattcagtgcagtgccaatcaaattggtacagaataatttagaggaagttgaaaaaaattgacaatctgattctaaaatttatctgtaaataaaattggctgagaatagccaaggccactttgaggaagagctgaggtgggaggacttggttggctggatgtcaaggcttgttatagagccactgtaattaggagagtgtgtcattaagagtggccaaggatagccagataggccagcggaatggaagagagagcccagaaaacaggctcaacatatttaacagtgtagccagtcaagtcacaaggaataamgaaatcatagagctgaattgtcctccgcgagggtagattgtgtgtctgcctttttttctgaatctgtttcattcttaatattcttttttgacctgttttccagtttactagcttgcttagctgggtacaatctcatcttactcggagaagtaaggtattagtgtgttctcacactgataataaagacatacctgagactaggtaatatataaagaa

SEQ ID NO: 935733 - DNA, 860 bp, Homo sapiens
cagcctttctgcacaggagggccttcgggctcgggggtaggagcggcttgacgcaggttggtccctggagatgagtcagcatttcagaggcactgctgacaagcatgggggtcgggacagacctgagtccagcaggtcattttggagggagagaagctcccaggattcagcaaaaccccgggagcgtccgtcggcggatgctgcaccagccgcaggtgtgagcatgcgagactccgggcaaggagaagaggaagatggagatagtggcacaggggcacgcagagggaggccgagggtcacctgctgctctggccattgaggtggctggatgaggagcctggctgggtgctggatagcacttttagacctggagcctggaatgttccagactggccctggtcgttcctgactccctgggcctgcggtgagcagtggctgaagagcctgagagctctgagcaggacctgctgcagggctgggttgggctcgttgctgtgtttactaagacgtctcatcttcggctgggcackgtggctcacacctgtaatcccagcgctttgggaggccgaggcggacagatcacaaggtcaggagttcgagaccagcctggctaacatggtgaaaccccgtctctactaaaaataccaaaaaaaaaaaaattttagctgggcatggtggcacgcacctgtaatcccagctacttgggaggctgaggcaggagaatcgcttgaacccgggaggcagaggttgcagtgagccgagatcgcaccactgcactttagactgggcgacagtgtgagactccatctcaaaaaaaaaaaaaaattctcatctttattgtccacagctctcttgggctg

SEQ ID NO: 935734 - DNA, 770 bp, Homo sapiens
tctgtctctgtggattctgggtgtttcatatcaatgaaatcatgattatgtggcctttcgtgtctggcttctttcacttggcggaaagtttgtgagtttcatgcacgttgtagcctggtcagtacttcctcttttttttttttttttttgagacggagtcttactctgttgcccacgctggagtgaagtggcaccatctcagtttactgcaacctctgcctcycaggttcaagcgattctcccacctcagcctcctgagtagctgggaccacaggtgtgcaccaccacgcctggctaattttttatattttggtagagatggggtttcaccatgttgcccaggctggtctcgaactcctgagctcaggcaatccacccaccttggtctctcaaaatgctgggattacaggcatgagccaccgcgcccagcctacttcctctttatggctgaataatattccattgtatgaatggaacatactgggtttgtccattcatacattggtggacgtttgggtttccactttgggttattgtgaataatgctgtggtgagcatttgtggacaagttgtgtggatgtatgttttcaatttttttgcattgcacctagggatagaattctgggtcatgtgttaattctatgttgagctttgtgaggaagcaatccttaactcttaaatgaaagttctgcctcctgacaagaatgcacttgctcaacgtctcagcccacaacttctttaggctggcgttgggctggctatgttgatgt

SEQ ID NO: 935735 - DNA, 770 bp, Homo sapiens
tctgtctctgtggattctgggtgtttcatatcaatgaaatcatgattatgtggcctttcgtgtctggcttctttcacttggcggaaagtttgtgagtttcatgcacgttgtagcctggtcagtacttcctcttttttttttttttttttgagacggagtcttactctgttgcccacgctggagtgaagtggcaccatctcagtttactgcaacctctgcctcccaggttcaagcgattctcccacctcagcctcctgagtagctgggaccacaggtgtgcaccaccaygcctggctaattttttatattttggtagagatggggtttcaccatgttgcccaggctggtctcgaactcctgagctcaggcaatccacccaccttggtctctcaaaatgctgggattacaggcatgagccaccgcgcccagcctacttcctctttatggctgaataatattccattgtatgaatggaacatactgggtttgtccattcatacattggtggacgtttgggtttccactttgggttattgtgaataatgctgtggtgagcatttgtggacaagttgtgtggatgtatgttttcaatttttttgcattgcacctagggatagaattctgggtcatgtgttaattctatgttgagctttgtgaggaagcaatccttaactcttaaatgaaagttctgcctcctgacaagaatgcacttgctcaacgtctcagcccacaacttctttaggctggcgttgggctggctatgttgatgt

SEQ ID NO: 935736 - DNA, 770 bp, Homo sapiens
tctgtctctgtggattctgggtgtttcatatcaatgaaatcatgattatgtggcctttcgtgtctggcttctttcacttggcggaaagtttgtgagtttcatgcacgttgtagcctggtcagtacttcctcttttttttttttttttttgagacggagtcttactctgttgcccacgctggagtgaagtggcaccatctcagtttactgcaacctctgcctcccaggttcaagcgattctcccacctcagcctcctgagtagctgggaccacaggtgtgcaccaccacgcctggctaattttttatattttggtagagatggggtttcaccatgttgcccaggctggtctcgaactcctgagctcrggcaatccacccaccttggtctctcaaaatgctgggattacaggcatgagccaccgcgcccagcctacttcctctttatggctgaataatattccattgtatgaatggaacatactgggtttgtccattcatacattggtggacgtttgggtttccactttgggttattgtgaataatgctgtggtgagcatttgtggacaagttgtgtggatgtatgttttcaatttttttgcattgcacctagggatagaattctgggtcatgtgttaattctatgttgagctttgtgaggaagcaatccttaactcttaaatgaaagttctgcctcctgacaagaatgcacttgctcaacgtctcagcccacaacttctttaggctggcgttgggctggctatgttgatgt

SEQ ID NO: 935737 - DNA, 582 bp, Homo sapiens
gggagaggctcctctgcctgtggaacagggaaggaagagcaggaaagactttgtattgtggtatgagtgccaacttagctgcagtagaatagaatattaagtaaattgctaaggtttttgactccaattcctggcttctagatagcatctctggacatgcccaggactagggggaactgaagggaagggccttgygacagtgttgtgttgtcttcaggtctgacacaatgcagtcccagtgatggtggccacaggggtgcttacctcatcacacctccagttccaggtggttcagcacagagagagaggcttcatatgttttggagaaagtaagcgaaaagaacaagggtctctcctggtaacccagataattattccagattttatccaagacaaccaaggtggtacctctacgagtctggaaaaagcacagcattattgagtttggggttcaagtcccttcaaatacctagaaagccttcccaagaacgataggtacaaataagcccagactgtgaagactataataaatacctaactcctcaatgcccagacactgaagaacatctgcaagcattaaca

SEQ ID NO: 935738 - DNA, 612 bp, Homo sapiens
aggaaaacagcatgaataaaggcatggactgtctttttattttaaactgctctattgagatataattcatatatcgtgaagtccgcctgtttgaagtgtacaattcaatggttttaagtatacttaagagtcgtgtgaccatcaccataatttaattttagaacattttcatcatcctaaaagaaaactactcattaagtcattccttatcctcctgcctctcccaccaccacagccacaagcaaccactaatctatcttctatctgtttatttattctgaacatttcatataaatgaaatcgtacaatatgcrgtcttttgtgactggcatttttcatttacaataaagttttcatgtttcatccatgttgtagcatatatcagtactttattcctttttattgcagaataatattccattgcatgaatatactgtattttgtttactcctttattcactgcattcaaagaatggatgtttactatcatccattgatagacacttgggttgtttctactttttggctcctgtgaatatttgtgtacaacttttatgtgggcatatgttttttattctgtaattccaccaggaatgggattgataggtaaaa

SEQ ID NO: 935739 - DNA, 612 bp, Homo sapiens
aggaaaacagcatgaataaaggcatggactgtctttttattttaaactgctctattgagatataattcatatatcgtgaagtccgcctgtttgaagtgtacaattcaatggttttaagtatacttaagagtcgtgtgaccatcaccataatttaattttagaacattttcatcatcctaaaagaaaactactcattaagtcattccttatcctcctgcctctcccaccaccacagccacaagcaaccactaatctatcttctatctgtttatttattctgaacatttcatataaatgaaatcgtacaatatgcagtcttttgtgactggcatttttcatttacaataamgttttcatgtttcatccatgttgtagcatatatcagtactttattcctttttattgcagaataatattccattgcatgaatatactgtattttgtttactcctttattcactgcattcaaagaatggatgtttactatcatccattgatagacacttgggttgtttctactttttggctcctgtgaatatttgtgtacaacttttatgtgggcatatgttttttattctgtaattccaccaggaatgggattgataggtaaaa

SEQ ID NO: 935740 - DNA, 582 bp, Homo sapiens
ggttctgaagaagaagacaaatggtgcgggatgtcacagtgtgtgttctgcaaaaagtagagcctcggacaaaaatttgagtgcaagtattttatctggaggtgatcccaggaaatagaatgagggtttgggggatggaagtaaaacaataaaggaataattacggagaatgttacctctgtgggcgatgggcacaatccccctagatattcggcaggatggtgtagcacacacctcagaattgtcccaccagggtggagacaaggggtatttatccatcagcattcccttctctttggatgggagtttttcttgagggtagtgactccctagtagctagctccagccagcccctcatgggccaagcaagctcctggagccagagaagccctcagrgagagagctgcatgtgccagaggcaggaagtcttaggcatgaatgagatagtactaaagctatgggaggttgaggagacaagggaatatgagtggggcaccaaaagtgtctactgcagtgggctccccttcaactttggagagttagcagcattgggagagaacattcaaagtagacttactttgt

SEQ ID NO: 935741 - DNA, 573 bp, Homo sapiens
gcttctcacagtgtttgccattagagtaaatgtaaactctatctttccaaatgctcaggccaaaatccttggagtcattcttgatttcactctgttgaataccctctatccaatatgttagtgaattctgttggctctacctgtccataatttactacattttacatttcactgctactgtcataacccaagacaccataatttctttcctgaattattataataaactttttttttttttttttttttttttttgagatggagtcttactctgtcgcccaggctggagtgcagtggcacgatctcggctcactgcaagctccgcctcccgggttcacgccattctcgtgcctcagcctcccgagtagctgggactacaggcgcccgctaccacgccygcctaatttttttgtatttttagtagagacggggtttcacagtgttagccaggatggtcttgatctcctgacctcgtgatccgcccgcctctgcctcccaaagtgctgggattacaggcgtcagccatcgcgcccggactataataaacttctacttggtcttcttgcttctgtc

SEQ ID NO: 935742 - DNA, 591 bp, Homo sapiens
tgtaggtgcatgcctgtcatcccagctacttgggtggctgaggagggtagatccaagctccaggagtttgaggctgcagtgagctatggttgtgccactgtactccagcctgggccacagagcaagaacctgtcccattaaaaaaaaaattgcttgggacttttttttttttccaaactttttttctgcctgttccctctctcttcttctgtgattccataatagactgagtaatgcacctccccattccctaatctctggaacctgtaaatatgttgctttaaatggtaaagtgaacttttcagatgtggttagcttaaggattttaatatgggacagttatcctggattatctgggcaagtccagcataatmacaaggatcgctataagagggagacaggaggatgagagtgagaaggtgatgtcatgaccaaagcagaagttggagtgatacactttaaaaatggaagaagaggtcagaagcccagaaatgcaagtgacctctagatggaaaaggccaagaagtcgactcctttctagaatgtgcagaagtcatgcagctctgccaattccttgattttagcccaaaa

SEQ ID NO: 935743 - DNA, 552 bp, Homo sapiens
tccacagggtgactccacccagcgtaggtccctcaactaccccgcctcatggcctctactggatcacgtggcggctcacttcacaattctttattatagagttgtttccttgtttattgttaatcttccccacaagactgtgcgcaccacctggcaaggtattctgtttcctcctgtatcactggcatccaacatggtctctgacacagagataacctcaacacatacatgttggaagaaaaaatatataaaatctttttaattttgataagtccaaaaaatgtatatatakagaatttcgtgtcttttagcatattcacaaagttgtgtaatcatcaccactttttttttcccccacatacctgctgtgtcaaaaccactatctaattccagaacattttcatcatctcaggaagaaaccccatacccactagcagtcattcccatttctccctccctccagcctctgtcttgggccttgtctctatttatctattctggacacatcatgtaagtggaattatacaatatgtaacctttttcctgtcttct

SEQ ID NO: 935744 - DNA, 583 bp, Homo sapiens
taggcaaattctggaaggacatgcctcagataaacagtgggcaacccttttgaagcaagtttacttagaactttaactctctgctttcggtctttatgtagcatttgaacactccacaatcagtatagattgcttctataggcgtgagtataggtatgcttctgattgcacaggtagcattcagagaaccaatctgaaactggtctaagtccatactagtgtgcaaaaagcaattacttgctgattggttgggaaactcctgaaaatcatcttcctccagaatccttctcccacacattatcagaagcctgctttcagaaacactgagtcaattctcaaccactccttcagtcagtaagcccgggagcacytacagcacgccaagtgatgagtgagccaccagggtgacaggtgataggcagggaaacaggtggtagccagagtcagtggggcctgcattcaaaccattgctgacatagatggcactggaccatgggccagacactgtgctaaacgccccacaaggattatcacgtttaatccacacgacaagttgatgaggcaggcactattattatcctgt

SEQ ID NO: 935745 - DNA, 624 bp, Homo sapiens
tgagaggccgaggcgggtggatcacgaggtcaggagatcgagaccatcctggctaacagggtgaagccccgtctctactaaaaatacaaaaaaaattagccgggtatggtggcgggcacctgtagtcccagctactcrggaggctgaggcaggagaatggtgtgaatccgggaggcggagcttgcagtgagtggagatcgcgccactgcactccagcctgggtgacagagcgagactccatctcaaaaaaaaaaaaaaaaaaaaaaaatcatatccaaaatcctttccatggtctacaaggtgcttttagtctctctcctccccatcccccatctgctacctcatttcttactacttcatccattagcttctgttgctgatcttcaagcaggctaagtgtgttctcatctgaaggctttctcacttactgtctcctctacctaaacacattttccccagaaagttctttggcttgatccttcacttaattcaggtctctgttcaatgctaccttctcaaaaagagacatttctaatactttatctaaaaaatgactcaatcactgtttcttcatgctgtttcatttttaaacaaaacggtattctagacggcagggtactccaa

SEQ ID NO: 935746 - DNA, 589 bp, Homo sapiens
actctccctgcattccttccatcctctttctcagtgacctcttctttgtcattgcattcttgggttttcttttacttcattaccctaaaaaattatccttcttaattttgtcctctatttgatgaaaatatctttgttgatttttttctggttataaagcacaggacaatggaacagaataggaaacgcaaaaataaagctgcacacctatagctatctgatccttgacaaggctgaaaaaaaaaaaaagcaatgggaaagggctccctattcaattaatggtgtgtgataacctgcctagccatatgtaggatgaaactggatgcccaactttcaccatatacaaaaattaactcacaattaaatattttaatgtaagacctcaaacagtaagaatcctrgaagaaaacctaggaaatggtattctggacatcaaccttgggaaagaatttatgagtaagtcctcaaaagcaattgcaacaaaaaacagacttgacaagtggaaactaaaccaaagagcttctatacagtaaaagaaactatcaacagggtaaacagatatgctacagaataggagaaaagattcaca

SEQ ID NO: 935747 - DNA, 553 bp, Homo sapiens
acttcctgagtacagaaagaagggatgaaggagaaatgaggccagaagagaaaataagttaataagcagagaccactattcgatgaaacaaatactgtgatatccattgtactgacaaactaaaacctggggaggttacatgacacatgcgataccagtaacggggaaacagatgatctgggatttgacattggtgtttcgactcttaatccagtgcttattctactatagcgcaactggagcaactgaagatgaaaaccagccatatgaggttatgatgagacacatgtgggaacatatgcccttcttggagttcataaaattccaggagttgaatgaacccaccgaaattgaatgcmaagttatgatgtcgtggtgtatgtgtttattttatacttatatacacatgtgtatgtgtgtatttgtgtgtatatatgtacacacacaggtatatacacatatataaatctgtattagtcagtgctctccagagaaatagaaccaagaggttctatatatatattttttgtttgtttgtttgtttgtttgtttt

SEQ ID NO: 935748 - DNA, 621 bp, Homo sapiens
ctgtagatgtctattaggtctgcttggtccagagctgagttcaagtcttggatatctttgttaattttccgtctcattgatctgtctaatattgacagtgggggttaaagtttcccactattattatgtcggagtctaagtctctttgtaggtctctaagaacttgctttatgaatcagggtgctcctgtattaggtgcatatatatttagcataattagctcttcttgttgcattgatccctttaccattgtgtaatgcccttctttgtctcttttgatctttgttggtttaaagtctgttttatcagagaatagaattgcaacccctgatttttttttgctttccatttgcttggtaaatattcctctatccctttattttgagcctatgtgtctttgcacttgagatgggtctcctgaatacagcacaccaatgggtcttgactctttatccaatttgccagtctttgtcttttaaytggggcatttagcctgtttacatttaaggttaatattgttatgtgtgagtttgatcctgtcattatgatgctagctggttattttgtctattagttgatgcagtttcttcatagtgtcgatggtctttacaatttggtatg

SEQ ID NO: 935749 - DNA, 628 bp, Homo sapiens
aatactcctgttttctactgggcctattcccttgatgttatgacactaagttatgggactagaggttgcactgtaaaatgaatgttcttagcccaagaaggttgcgggtggtagaggagaaacaagttttgaaatgtrtggagccaggaaaacaagcctgtgtagcattctttcaaatatcagatacatcaattttttttttgagatggagtctcactccaccgcccaggctagagtgcaatggcacgatcttggctcactgcaacctccacctcccgggttcaagcaattctcctgcctcagcctcctgagtagctggggctacaagtgtgcaccaccacacctggctaatttcttgtatttttagtagagatggggtttcaccacgttggccagtctggtcttgaactcttgacatcaggtgatctgcccccttcggcctcccaaagtgctgggattacaggcatgaaccactgagtctggtcagatacatcacattttaattagaaaaaaaaaatcagctcttatggaagcctgttcagaagttcttttgtagtaagcatatacttgataattcaatatgtacaattttaaatgtaccatgcattttttctttttttaatagagt

SEQ ID NO: 935750 - DNA, 615 bp, Homo sapiens
gggcggttcccactttgcaattttaaaaagtgactttctttacttccctgtcacagaaactctcagtccatgcaatttagggaactagaattacctgtcctttcctctccacctgtccgaagtgcttcctccggggctcttacgggtatatgtgcacttatttgaaggagaggcttccagcttccagctccaagcccaggcactattctcccatcgtccgcccagcgtctcccagactgagcccgcagagccacgtggagggcttaaacaaggcgcaccggcccgccccagagctcctgggtcagtggtctggggtgcctgtgaatytgcatttctgacaagttcccaggtggtgcccccgctgctgggacggggacctcaccctgacgacccctgctgtggagagttcgggaagcttcggacgccctaaccataggcggaacccgctgccacggccctggtgctagcagacgctctctctcggcccgccctccaccgagttccggccacagagcgggccctgcccggcggtgtgcggccacatcttccttcagctctagcttagctgctacattgggaagccactaaaacctttaaaaccagcaaaaacccagc

SEQ ID NO: 935751 - DNA, 622 bp, Homo sapiens
gacaaccagaaggggaattcgggtgacgctagaaggtcttgaaagtgacaactgattcatgaacgtctttccacaacttgaggaaatgcagccacccagggcaaccctggcacaccttttgctggctctgatgactacatcccaacttcttcttaatcactcttcagagttgctgctggagggaatattttaggaatatttaaagacaaggctacaaaaattytctaaggtacagatgagacagcgcattgattgtttactccctaaggggctgcaaagggcaaagcacagaactcaggtcttcttccagctggaatgtatggacagggaccacttacaagaaaaccaccatccaggaaagcaggggacagagagctgcctggggagacagtgattaatcaggcatgggcgaggggaggccacagtgcctcctgctgaaatttaatcagagccacgggtcgtacaccatggcggcgagtgccagggcctctggcagacgatgaatgcctcctgccaaggagctctcacgaatactctgtgagcccagatttatgctctgcagccagatgaaggtcgcaactgagcagaactgctgcagcgtggaatctgcagttcagccttg

SEQ ID NO: 935752 - DNA, 622 bp, Homo sapiens
gacaaccagaaggggaattcgggtgacgctagaaggtcttgaaagtgacaactgattcatgaacgtctttccacaacttgaggaaatgcagccacccagggcaaccctggcacaccttttgctggctctgatgactacatcccaacttcttcttaatcactcttcagagttgctgctggagggaatattttaggaatatttaaagacaaggctacaaaaattctctaaggtacagatgagacagcgcattgattgtttactccctaaggggctgcaaagggcaaagcacagaactcaggtyttcttccagctggaatgtatggacagggaccacttacaagaaaaccaccatccaggaaagcaggggacagagagctgcctggggagacagtgattaatcaggcatgggcgaggggaggccacagtgcctcctgctgaaatttaatcagagccacgggtcgtacaccatggcggcgagtgccagggcctctggcagacgatgaatgcctcctgccaaggagctctcacgaatactctgtgagcccagatttatgctctgcagccagatgaaggtcgcaactgagcagaactgctgcagcgtggaatctgcagttcagccttg

SEQ ID NO: 935753 - DNA, 622 bp, Homo sapiens
gacaaccagaaggggaattcgggtgacgctagaaggtcttgaaagtgacaactgattcatgaacgtctttccacaacttgaggaaatgcagccacccagggcaaccctggcacaccttttgctggctctgatgactacatcccaacttcttcttaatcactcttcagagttgctgctggagggaatattttaggaatatttaaagacaaggctacaaaaattctctaaggtacagatgagacagcgcattgattgtttactccctaaggggctgcaaagggcaaagcacagaactcaggtcttyttccagctggaatgtatggacagggaccacttacaagaaaaccaccatccaggaaagcaggggacagagagctgcctggggagacagtgattaatcaggcatgggcgaggggaggccacagtgcctcctgctgaaatttaatcagagccacgggtcgtacaccatggcggcgagtgccagggcctctggcagacgatgaatgcctcctgccaaggagctctcacgaatactctgtgagcccagatttatgctctgcagccagatgaaggtcgcaactgagcagaactgctgcagcgtggaatctgcagttcagccttg

SEQ ID NO: 935754 - DNA, 791 bp, Homo sapiens
ctgtgcctctccaaattttgtgttcctaaagtttccttgagacaaccagattcttgaaccccttctgcagagattctggatgagaaggtctgaggaagagtgcatgtatgttgactacattctggatgacactaaagctagtggctgtggaactcctctctgagatgtactgcctgtggcataaagctatttgccctttctactgagaagttctgcactttcagtcttycctgcttttgcttgctctgtcccttctgtttgtaatgcccttatccaattatggaaaatttctacagattcattccatcaataaactttcataggctgggctgccatgaaccatagtgcagggtgtccacttaaggtgcctacttagtggcagcccattcctaagtgcctactgtgggccagacacagatgaacaggttcctgtccctatagagctcactgtctagtgtttaaaaaaaaaaaaaagtactggccaggcatggtggctcacacctgtaatcccagcactttgggaggctgaggcaggtggatcacgaggtcaggagttcaagaccagcctggccaacatggtgaaaccctgtctctactaaaaatacaaaaattagccgggcgtggtggcaggcacctgtaatcccagctattcgggaggctgaggcaggagaatcgcttgaacccgggaggtagaggttgcagtgagccgagatcaagccactgcactctagcctgggtgataaagagagactgtctcaaaaaaaaaaaaaaagtggattaaggatcaaaag

SEQ ID NO: 935755 - DNA, 565 bp, Homo sapiens
ttttcctaagtcataataaacaacaaatattaacctaactcaaagtattatgtggcatactgggaagatgagaggacaggaagttgtatacatgacggtatgaggagcagtgaaagaaggctaaacattcatcttccacagtgagaacggataatacctacaactgaaaaatatcaagaaattacaactaatatcattatttagatacagctataaataccaaaagaaayagcataaagagttgaaagtaaatgcttctgggatatgagaaactgggggaaggtagagagtgaattagcaaataatttttcattaagtgtaatagaatgatatggctctttaaattatgtgcacatacaactttaatgaaaataaaaactaaactaaaaagagaaaggcaatgataatattaaggccagaagaaccctgttggatgcagcttgggtgaagaagccataaacatgaaaagaagagctgggtatggtgatctatgcctataatccagctactcaggaggctgagatgggaggaccacttcagcctaggagtttgaggccacagtgac

SEQ ID NO: 935756 - DNA, 617 bp, Homo sapiens
caaatatgtcttaccaggctaaactcacctttctgtgactcccttctttgctttacacatctcttgattggctcacccctgtaatcctagcacttagggaggctgaggatggcttgagcccagaagatcaagaccatactgggcaacataaggacgccccatctctaaaaaaaaataaaaaattagagaacccaggtgtagtggtgcatgcctgtggtcccagctacttggaaggctgagacaggaggattacataagcctgggaggtcaaagttgcaatgagacgtgattatgcctgggtgacacagtgaaacccagtctcaaaaaaaaaaaaaaaaaggaaaagacaacaaaaaatacatctattgaacatgttttggccaataatggtaaaaaggagacactataaaaacaacaataaatgatgtcttacctttaggtaagaatgaatatagttttaacatacarttcaaaataagctataaaatgaagtacatttggttgtagtgaaagctaatctgggaaatttatttctctattgatcttattcccctaggaatagggcagattgttcctaaggtaagacagaagagacaacattattgctagcaaagttg

SEQ ID NO: 935757 - DNA, 731 bp, Homo sapiens
aattctaggttggaaattatttgctttaagggtgtttaaaattggcccccgatctcttctggcttgtagggtttctgctgagatgtctgctgttagtctgatgggcttccctttacaggtaacctggtccttctctctggctgcccttaacattttttttttcattttgaccttgkagaatctgatgattatgtgtcagggctgatcttctcatggagtattttactggggttctctggatttcctgagtttgaatgttggcctgtcttgctaggttgggtgagttttcctggatgatacactgaagtgtattttcctacttggtttcattctcccagtctctttcaggtaccccatcatttctaggttcagtcttttaacatagtcccatagttcttggaggttttgttcattccttttcattctttttttctctaatcttgtctgcctgccttatttcagcaagatagtcttcaagctctgatatcctttcttccacttggtctattcagctattgatacttgtgtttgcattatgaagttctcatgttgtgtttttcagctccatcagatcatttatgttcctctctaaagtggtgattctgattaacagcacctgtgatgttttatcatagttcttagcttctttgctgtgagttagaacataatcctttagcttggtgaagttctttattacccatcttcctaagcctacttctgtcaattcatcc

SEQ ID NO: 935758 - DNA, 731 bp, Homo sapiens
aattctaggttggaaattatttgctttaagggtgtttaaaattggcccccgatctcttctggcttgtagggtttctgctgagatgtctgctgttagtctgatgggcttccctttacaggtaacctggtccttctctctggctgcccttaacattttttttttcattttgaccttgtagaatctgatgattatgtgtcagggctgatcttctcatggagtattttactggggttctctggatttcctgagtttgaatgttggcctgtcttgctaggttgggtgagttttcctggatgatacactgaagtgtattttcctacttggtttcattctcccagtctctttcaggtaccccatcatttstaggttcagtcttttaacatagtcccatagttcttggaggttttgttcattccttttcattctttttttctctaatcttgtctgcctgccttatttcagcaagatagtcttcaagctctgatatcctttcttccacttggtctattcagctattgatacttgtgtttgcattatgaagttctcatgttgtgtttttcagctccatcagatcatttatgttcctctctaaagtggtgattctgattaacagcacctgtgatgttttatcatagttcttagcttctttgctgtgagttagaacataatcctttagcttggtgaagttctttattacccatcttcctaagcctacttctgtcaattcatcc

SEQ ID NO: 935759 - DNA, 619 bp, Homo sapiens
ctctgatatcctttcttccacttggtctattcagctattgatacttgtgtttgcattatgaagttctcatgttgtgtttttcagctccatcagatcatttatgttcctctctaaagtggtgattctgattaacagcacctgtgatgttttatcatagttcttagcttctttgctgtgagttagaacataatcctttagcttggtgaagttckttattacccatcttcctaagcctacttctgtcaattcatccatctcagtctcagcccatttctgtgcccttgctagagaggtgttgcaactctctgaaggagaagaggcactctggctttttgagttttcagcattttttctcatcttcatgggtttatctacctttgatctttgaggctgctgacatttgaatggagttttttatggtgcctttttcattgatgctgttgcattctgtttgcttttattttagcagtcaggctcctcttctgcagggctgctgcagtttgcttgtggtccactccagttcctatttgcctgggtccctcccatccctggagttatcaccagtggaggctgcagaccagcaaagatgccaagctgctccttcctctgagagctctgt

SEQ ID NO: 935760 - DNA, 589 bp, Homo sapiens
gactacttaataaaaatatagccaatgatgggcaaatgtatatataacatgaaaattaaaaacatttttttcttatgtatttaaaaactttttcccccagaatcagaactacaaggatcaattatcccagctcaatgtcagggttcttcaactgggacaggaggcttctacccaccaggcccaaaacgaggagcatcgtgtgaccattcagatgttaacacagagcctggaggaggtggttcgcagtgggcagcagcaggtgggtggcctcagccgcaggsagctgagctggaggctgggagctcagggtggggaggcggctgcaaataggtcaggacacgcgctgaggagcctggagggaagtgagggacttcccaagcatgccttggagaagtaggtggactgtgctgtgttggcaaatcccagtatctaaagaaaatagcagaatagctttatatgctgctgacagaggagtgaattggtacaaagttccccgagggcagtttggcaaaatacacacttagaggctgaagaaagtccacatgccttgacttcacgattccgatggggatgttcccgagagccttgt

SEQ ID NO: 935761 - DNA, 605 bp, Homo sapiens
ttaggaggcagaggtcgcagtaagctgagatcatgacactgctctccagcctgggtgcgggtgacagagtgagactctctctctctcaatctctctctctctctctctctatatatatatatatatatacacacacacatatatagcttgaatttgttttataatgcagaataataatactttgttataattaaaaataaagtatgtcattatatgaagctaaawtaacattaacattcatttgagcattaactcaactgtcaagaactgttctatattttattgagactacatatagtaaaaagcataggtcttaagtgtattgatcagtgagttttgacaaatatatatatatccatgcaaccagcacctaatcaagatacagagcagaggctggcaaattgctatctgtgagccaattcgaccctgtggaatgttttctgtgtggcctatgagtgaagagtgttttttttacatttttagaaggttattctttaaaaaggcaaagaagaatatacaacaaaaaactatacatggccctcaatgcctcagctcatcaagtggcctcaaggggggcaccattttctattaataatttgcatgaa

SEQ ID NO: 935762 - DNA, 359 bp, Homo sapiens
tgaaagtaattgtatagaatttacagataagttagggagcattgccattttaaaaaatccgtgaacatgagatgcttttccatttatttagatctttaatttctttcagtgatgctttgtacttttcagtgtatacatcttgcacttcttttgttaaatttattccccagtattttacttatttgatattattttaaattgacttrtattcttaactttatgcttggattgttcattgcttgtgtatagaaatataattgattttgcatgttaatcttatattctgcaaccttgctgactcttttgtcaattctaataatttttctggattcattataaatttctatgtacaagatatg

SEQ ID NO: 935763 - DNA, 636 bp, Homo sapiens
ataaaaagctggaggaagagtgacgtctctgggtctcccagagccaggagcgtttcttctcctgcccttgaacatgagaatttcaggttctctagcctttggactctaggatcactccagcaaccctctgggctctcaaaactttggtctcagattgacagattgatagtaacaccctcggcttctttggttctgaggccttcagacgtggaccaatccctgggtctccagcttgctctcagcctccataaytgagtgagtgaattcccctaacaaatcccctctcctctccctctctttctatatatatgtgagtgtgtatgtgtgtgtgtgtgtgtgtatatatatatatatatacatatgcatgtgtgtgtacatatgtgcatgtgtgtttgtctctatataattacatatataagtaatatgtaattatatatgatatttaattatgtaatatatatatatatatttatgttatatatatatttggttctttttggatagcccagactaaaacaatattcaaaagaaaaaaatgtagaacaaaatacatagatattatgatcccttttaagaatacatgtttatgtgtgcctgtgtatttatacgtagggaaacagacctagaggcacagac

SEQ ID NO: 935764 - DNA, 720 bp, Homo sapiens
attcacaacataaaaattgccatttaaaccattttaaaatgtacaattcaggggcatttagtacactcacaatatgcaattatctccactatctagtggcagagctttttcatcactcctcaaagaatcccccaactccattagcaggaactccccatttccgcctatccccagcccctgccaaccccaactctttctgtctctgtggatttgcctattctgggcatttctttttcttttttttcttttctttttttttgagatggagtctccctctgtcgcccaggctggagtgcagaggtacgatcttggctcactgcaacctccgccttccgggttcaagtgattctcctgcctcagcctcctgagtagctgggattacaggcatgcaccaccacgcccggctaatttttttgtatttttaatagagacagggtttcgccatgttggccatcctgttgtcgaactcccgacctcaaatgatccgcccacctcagcctccaaagtgctgggattacagtygtgagccacctcgctcggccctattctgggcatttcataaattaacaaatggaaccacacaatatgtgatttgggtctgacttattttacttagcataatgttttcaaggttcggtcatgttggaggatgcatcagtagctcattcttttcttatggctgaatgagagtctattatatgaatattccatgttttgtcg

SEQ ID NO: 935765 - DNA, 720 bp, Homo sapiens
attcacaacataaaaattgccatttaaaccattttaaaatgtacaattcaggggcatttagtacactcacaatatgcaattatctccactatctagtggcagagctttttcatcactcctcaaagaatcccccaactccattagcaggaactccccatttccgcctatccccagcccctgccaaccccaactctttctgtctctgtggatttgcctattctgggcatttctttttcttttttttcttttctttttttttgagatggagtctccctctgtcgcccaggctggagtgcagaggtacgatcttggctcactgcaacctccgccttccgggttcaagtgattctcctgcctcagcctcctgagtagctgggattacaggcatgcaccaccacgcccggctaatttttttgtatttttaatagagacagggtttcgccatgttggccatcctgttgtcgaactcccgacctcaaatgatccgcccacctcagcctccaaagtgctgggattacagtcgtgagccacctcgctcrgccctattctgggcatttcataaattaacaaatggaaccacacaatatgtgatttgggtctgacttattttacttagcataatgttttcaaggttcggtcatgttggaggatgcatcagtagctcattcttttcttatggctgaatgagagtctattatatgaatattccatgttttgtcg

SEQ ID NO: 935766 - DNA, 728 bp, Homo sapiens
aaattcacaacataaaaattgccatttaaaccattttaaaatgtacaattcaggggcatttagtacactcacaatatgcaattatctccactatctagtggcagagctttttcatcactcctcaaagaatcccccaactccattagcaggaactccccatttccgcctatccccagcccctgccaaccccaactctttctgtctctgtggatttgcctattctgggcatttctttttcttttttttcttttctttttttttgagatggagtctccctctgtcgcccaggctggagtgcagaggtacgatcttggctcactgcaacctccgccttccgggttcaagtgattctcctgcctcagcctcctgagtagctgggattacaggcatgcaccaccacgcccggctaatttttttgtatttttaatagagacagggtttcgccatgttggccatcctgttgtcgaactcccgacctcaaatgatccgcccacctcagcctccaaagtgctgggattacagtcgtgagccacctcgctcggccctrttctgggcatttcataaattaacaaatggaaccacacaatatgtgatttgggtctgacttattttacttagcataatgttttcaaggttcggtcatgttggaggatgcatcagtagctcattcttttcttatggctgaatgagagtctattatatgaatattccatgttttgtcgatgcat

SEQ ID NO: 935767 - DNA, 517 bp, Homo sapiens
tggaatcctagcactttgggaggccgaggtgggcggattgcctaagctcaggagctcgagaccaccctggggccaacatggtgaaacctcatctctactataatacaaaaaatgagccaggcgtggtggcgggtgcctgtaatcccagccactcaagcaggagaatcgcttgaacccgggaggtggaagttgccgtgagctcagattgcaccactgcactctagcctgggccacagagcgagactctccctctcaaaacaaacaaacataatttaatatatattgwtgattcattaatattgaacttgtggccagcagcgctatagttcatgcctgaatgttcacctaacacatatttttagtgtaaggcgtgtcgcagctttcctgctcctaggaacatgagacagcacttcagtcctatgctcagcggccattttaaacagagaaatcaccaacaaaaaaagcacaaaaatgcaaaaaaaaccctagttttaaatgaacagagaaaggttatttg

SEQ ID NO: 935768 - DNA, 612 bp, Homo sapiens
gcacagttgctaagaaaacgtcatttgatgaattgagaaaaatgaaaaactgaaagccaaattggaagcagaatttcattcagatcttttttattaaatatatgtgtgtatgtctgtgtgtatctgtgaggggcataatacgtggataacatatattatttagatccagtaagtctttcattatacatatgtgtgtgtgtgtgtgtgtgtgtgtatgtattagactagaggatacatattcaattttcctaatttgtcaacatatttttaaatggatttttgtttgctctttttcagtattatgtggaagcttatgttatttgggcacaattcttcattttcttctgtctttatgtgtctagcatggatggagaagattagcttgtcttattgactttgggcctggtygtgtaacttgagctctccagtggaatacatgcaagtaggccagctctcagggagattatgagaagcatttttgtttctactgcccattgagctttggcatgtaaatgtcacaagagcaaggcattccagatggggtggggcttcagcctgggtaaaaaaatgagaagctaaatggaacagttcgaaacctgctgtgcacttgga

SEQ ID NO: 935769 - DNA, 569 bp, Homo sapiens
cttgcctctgccttccaaaatgctaggattacagggtaagccaccacacctggcccccagattgctttttaaaagtcagtaatggtaatatggctttagcagagatatatgggtaaagtcttcttaatggcatattttaagagaaagaaatatgagaggagagttttagtgatgatttgagaatgtcttaaagtaattttatgatatctaatatttacttgattaatttggctatttgyagcataaatagaaaattaaaagtagtacgaatccttagaaaataaactcaaaatggttaattatatagaaaatgtaatataatgatgctaacaaaatacagaaatttacaaaatgcatttagttttatttttctggatcaaagtattacttctgtcaaatatattgaattatcttattattatgcagtagacccacatgattatatcaattttaaaactgtattccatgacaggtgacttgtctgctgatactctgaactgtttgaatagggtatcaaaagatgcagaaaagaaattacatctacttatattttagcctattttgaacta

SEQ ID NO: 935770 - DNA, 575 bp, Homo sapiens
tgagaagtagctctatccttttcatgtacatttcattttagggacataagttcaataaaagataagcaaacaaataacaacacaaaaacaacccaaagatacgattgtcacctattaagtggacagcagtgaaaaaarttgttgggtaagcatacattacagtgggcctcttttgccctatggatgactttgtaaagtgtttggaaggccattgtgcaatatgtattacagtttaaaattgcacaccttttattcaagaatcatactttttagaatgtattttttctaaaagtggctgagatagatatctataaaggatgacttcactacttatctagtttttattccatggatcatcagtataatcatggtcttgcaaatactttttaattctttcctttcccttctttgcatttatgcaaagctctccctagatttatgattctcaaacgtttaagatccatcagaatcacctgaatggtgaatcttgttaaaaaatattgctgtgtcctatacccaggtattctgatattagtagatctggggtggggcccaagaattaccatttttagtaa

SEQ ID NO: 935771 - DNA, 674 bp, Homo sapiens
taaattgtgataaattcctagcatggaacaggaggcaactgcaggaataaataaactcaagtcacacacaacatggataaaactcaagcataatgttgaggaaaaaagtcagacacaaaagaacatattctgtaggattccatatacaccaacttcaaagacaaaactaatctgtgctgtagaaacctggatttggattatacttggtgggagacaggaaccaaaaaggaaggcttctgggatgctggccaaattctaactttgacctaagtgatggatattgaagcacattgactttgggaaaatttacaaggctatacttttatgatttatgcactttgatgcgtatatttgcatttcatcaagaaatgcataaaatatgcgtagaaaaattayttgaggaaagtattaaaagaaaacaaaacatggtttggttttgttttgtttttgagacaaagtctcactctgccacccaggctggaacacagtggtacaatctcggctgaccgcaacctccacctcccgggttcaagcaattctcctgcctcagcctcccaaatagctaggattacaagcacgtgccaccacacccggctaattttgtatttttagtagagacggtgattctccacgttggccaggctggtctcgaactcctgacctcaggtgatcca

SEQ ID NO: 935772 - DNA, 532 bp, Homo sapiens
caggtggatcacctgagttcaggagttcaagaccagcctgggaaacatagtgaaaccctgtctctactaaaaatacaaaaattagccaggcatggtggtgggtgcctgtaatcccagctactctggaggctgaggtrtgagaatcgcttgaacccaggaggtggaggttgcagtgagccgagatcatgccattacacttcagcctgggtgacagagcaagactccatctcaaaaaaaaaaaaaaagaagtctggacaccccaatattagtccatttccatgcttctaataaagacatacctaagactgggcaatatgaaggaggtttaactggacttaaacttcaccgtgactggggaagcctcacagtcatggcagaagacaagtcatgtcttacatggatggcagcaggcacagaaagagtgcttgtgcagggacatttctctttttaaaactgtcagatctcctgagactcactatcatgagaacagcatgggaaagacttgcccccatgattcattacctcccaccag

SEQ ID NO: 935773 - DNA, 589 bp, Homo sapiens
ttaaccaaatatataaattatatcaacattagatctctgcaaacaggtcaaaactgattaatctgtttttttttttttttttttgagatggagttttgctcttgttgcccaggctggagtgcaatggcacgaactcggctcactgcgaactcggctcactgcaacctcggccccctgggttcaagcgattctcctgcctcagcctcccgagtagctgggattacaggcgtcyataaccacaccagctaattttgtatttttagcagagatggggtttctccatgttggtcaggttggtctcgaactcctgaccttagatgatccacccgccttggcctcccaaagtgctgggattacaggtttgagccaccgagcccagtctaatctgtttttaaataacaaaagaaaacagcgatttgcaaagagcaactcatagattgaaagccctttgttttgaaaaaccaaatcattgtgttttaaaattctttgtgcagtaaagattgatatgccaaacaaaggaattgaatgtcagatgataggcagccaagtcaaaattgcagcttctaggaggtgggcttagtggggcagt

SEQ ID NO: 935774 - DNA, 589 bp, Homo sapiens
ttaaccaaatatataaattatatcaacattagatctctgcaaacaggtcaaaactgattaatctgtttttttttttttttttttgagatggagttttgctcttgttgcccaggctggagtgcaatggcacgaactcggctcactgcgaactcggctcactgcaacctcggccccctgggttcaagcgattctcctgcctcagcctcccgagtagctgggattacaggcgtctataaccacaccagctaattttgtatttttagyagagatggggtttctccatgttggtcaggttggtctcgaactcctgaccttagatgatccacccgccttggcctcccaaagtgctgggattacaggtttgagccaccgagcccagtctaatctgtttttaaataacaaaagaaaacagcgatttgcaaagagcaactcatagattgaaagccctttgttttgaaaaaccaaatcattgtgttttaaaattctttgtgcagtaaagattgatatgccaaacaaaggaattgaatgtcagatgataggcagccaagtcaaaattgcagcttctaggaggtgggcttagtggggcagt

SEQ ID NO: 935775 - DNA, 601 bp, Homo sapiens
attactggtgatagggagtgggaagcgtttcttttttttttctttttagcatttctttaatgtttgaatgttttataaaatgtattacttttttggggagaaaaaataatgaagatactttgtgtgagaaaatacaattacaactgtgctcatggattggaatcctctcccttctcccccagacaaaggaaacasacaaacaaaaacccaaaacccaaatccatcaactccccccaaccccacttcccagctttgcccttagaatgaaatccaagctccttagcctggctcacaccagcacagtcaggcccctgccaccctctcgacgtcacctctcaacaaacctgattgccgaagcctgagctgcttacaattcccctcatgccccaggctgttccacttctcccaacttttgcctgagccataccctgtacctggaatgcccttctctgaaatcttggtctggcaacaccttcttcttcttcttcttcttcttcttcttcttcttcttcttcttcttcttcttcttcttctttttttttttgagacagggtcttgctctgttgctcaggctagagtgtgatggtgccatcatagctca

SEQ ID NO: 935776 - DNA, 711 bp, Homo sapiens
cgagcctccagtgctcagccctcggcggggcctgcctggcagccccacacacagagggcatcggggtggcgggggcatgtgttacacgggggccctgggtctgagtcatccacttcctccgagtctggatgggaggacccagcgcccctcctccgccccctcctgatctggaagcataaatggggaggggagagcccgctgggtagaaggaacagggagtggccagggtaagtccctactctcagagaccctgacatcagygtcacctggagcagagtggcccagcctcagactcagagcaccaagacccaggcccgcaggcctggacccaccccggtccccccgtcccagctccattcttcaccccacaatctgtagcccccagccctgccctgtgaggcccggccaggcccacgatgctcctccttgctccccagatgctgagcctgctgctgctggcgctgcccgtcctggcgagcccggcctacgtggcccctggtgagtcccagccggggtccaccctgcccctcaccacattccacagatcagggcctgggtgggttctggggaggccgggctggcccccacacagggaagggctggtcccaggcgtggggcggcttcttggtcctgacctggcacctgccccagccccaggccaggccctgcagcaaacgggcattgttggggggcaggaggcccccaggagca

SEQ ID NO: 935777 - DNA, 725 bp, Homo sapiens
  misc_feature 169, 185, 187, 190, 197, 204, 277, 286, 288, 293, 316, 334,345, 358, 398, 404, 407, 408, 413, 537, 538, 543, 579, 618,622, 623, 624, 630, 640, 647, 650, 652, 653, 654, 657, 658,659, 660, 661, 662, 664, 665, 667, 671, 693: n = A,T,C or G
ctgagaaccgagctcacgggacaaagcactgcccccaaaccggacagaccggtggctactcgggaggctgaggtgggaggatcgcttgagcctgggaggttgaagcttcagcgagctaggattgcacccctgcattccagcctgrgcaacagagcaagaccccatctcnaaaaaaattttttttnanacnctgcttnacaaganacattgttaagagaatgaaaagacaagccacagactgggagaatatctctgcaaaactcatatctgataaagnatgattatncnaaatnataccaagaacccttaaagtcanacattaaagagaacaagncaacccggccnggcagggagtcanacctgtcatcccagcacaagcaacctggccgggtgtggtngctcancanntgtcntcccagcactgtgggaggccagggtgggaggatcacgaggtcaggagatcgagaccatcctggcccacatggtgaaaccccgtctctactaaaaatataaaaattagctgggtgtggtgacacnngcctngttatcccagctacttgggaggctgaggcaagagantcacctgaaccagggagtcggaggttgtggtgagccaanctcnnnccactngctctccagncctggtnacngnnntgnnnnnntnngnctcnaaaaaaaaaaaaaaagaaaaangaaaaagaaaacaagcaacacaattaaaaagt

SEQ ID NO: 935778 - DNA, 625 bp, Homo sapiens
cccagatgtccaccagcggatgaacagataaacgaactgcggtccatccatacaacgtgacatgctttggcaacaacgcagatgaaacgctgagacatgccgcggcgtggacgaagcttgaaaaccttgtgctaattaaaagaagccagacacaaacagacaattgcttttggtttatttgtatgcagtgtccagaacaggcaaatccatagagacagaaaacaggcaggtggctgccagaggctggggagggtgcgggggacccaggagcaattgctacactttttaaggaagggaacagaaaggtcctaaaactgggttgttaacgatggctgtacaactctgtaaattcactacaaatctttgaactatgcgcttgaaacgtgaattttatgatatgtaaattttacctcaataaggttttgttttgttttgttttttgagacagggtctcactccggttgccctggctggagtgcrgtggcgcgatctcggctcactgcagcctcagcctcccaggctcaagtgattctcccacctcagcctcccaagaagctggaactacaggcacagaccaccacacctggctaaattttttgtattttttttaagtagagatggggtt

SEQ ID NO: 935779 - DNA, 596 bp, Homo sapiens
gccccactgaccagccttaacattaaaacagattttttttttttttttttttttttgagagggagtctcgctctattgcccgggctacagtgcagtcacatgatctcggctcactgtaacatccacctcccgggttcaagtgattctcatgccttagcctcctgagtagctggaattacacgtgcccaccatcatgcctggctaatttttgtatttttagtagatatggggtctcgccatgttgcccaggctagtctcgaactcctgacctcaagtgatctgcccaccttggcctcccaragtgctgagattataggcgtcagccactatgtccagccccaaaatatatttatttgatatatttttaaatggccctgcaaagctgcctcttgtgggggaaatttacactctgcagagaatcgtcttcccttaacaggtctcttttttttttttttttttttgagatggagtttcactcttgttgcccaggctggagtgcaatggcgcgatcttggctcactgcaacctctgcctcccaggttcaagcaattctcctgcctcagcctccgaagtagctgggattacaggcatgtgcc

SEQ ID NO: 935780 - DNA, 583 bp, Homo sapiens
atccctctttgatgtggggaaactgaggcactggtgggggggagttgcctgaccacccaccaggatgtggcctcccgggcacagacgtggctgtctgcacgccagcacgtggggtagccaaggctcagaactggaggttcagtgtttttcctggtgaccaataaggacaacaccagcatgcggggccagcagtgcacccacggccggacaccctcctccctcacggcagccgcacacctggagggggcgcctcaggggaggcaggacagtcccaccccacataagggagcgrggtctgagtcacaagtctccggcccagggtgcccctcacagggcgatgtcaccagtggggagggagcctgaggggcagggtcttcatggaaccaggtcctctagtcctgacctctagggctgtccccaggtccccacaggcggggacttcagggccctcacctgtcccaactcaattcacctgcagcactggggaccccgtctttctgcctgtgccccagcacgccactccccgcagagtgctccacacgacccagattgcaggcctgctggggaggaagaagctccaggc

SEQ ID NO: 935781 - DNA, 632 bp, Homo sapiens
cccacctcagccttccaaagtgctgggattacagtgtgagccaccgtgcctggcctgaacatgtgttttgttttgttttttttccttgagatggagtctcgctctgtcctccaagctggagtgcagtggcgtgatctcggctcactctaagctctgcctcccgggttcaagcgatcctcacgtctcagcctcccaagttcaagtgctcctcgcgtctcagcctcccgagtagctaggactacrggcgcgcaccaccacacccagctaattttggtatttttagtacagacatgttgaccaggctggtttcgaacccctgacctcaagtgatttgcccgcctctgcctcccaaagtgctgagattacagtgtgagccaccgtgcctggcctgaatatatatatttttttctttttcttttttttcctgaggcagagtcttgctctgttgcccaggccagagtgcagtggcacgatctcagctcactgcaagctccgcctcctgggttcacgccattctcctgcctcagcctcctgagtagctgggactacagacgcccgccaccacgcctggctgattttttgcatttttagtagaaacggggttttgccaggatggtcttgatctcttgatc

SEQ ID NO: 935782 - DNA, 612 bp, Homo sapiens
ttgcccaggctggagtgccgtggcgcaatcttggctcactgcaacctccacctcccaggttcaagtgatcttcttgcctcagcctcctgagtagctgggattacaggcgtgtgccaccatgccagtaattttttgtatctttagtagagaaggggtttcaccatattggccaggctggtctcgaactcctggcctcaagtgatccactggccttagcctcccaaagtgttgggattacaggygtgagccactgtgcccggcagctttttttttttttttttttttttttaagggatgggctttttgttaaaatagcatgagaaaaaagaaaaatgaaaacagagagagagagagatgggttctctctctctcgtccaggctggagtgcagtggtacaaccatagctcactgcagccttgacctcttgggctctagtgattctcccacctcagcctcctgagtagctgggattacacgtgcatgctaccatgactggctaatttttaaatgttgtagagatggggtctcctatgttgcccaggtcttgaactcttggcctcaagaaatcctgctgtctcagcctcccaaagtgctgggattacaggcctgagg

SEQ ID NO: 935783 - DNA, 779 bp, Homo sapiens
tggcacctgctatctcctctggggaggaagctctcatagctagaagtaaacaagcaaaagccgagtattcttgaaagtccctctttaccctgaaatttttttttgtttgttttttgttttgttttgtttttgagacggagtcttgcgctgtcggccaggctggagtgcagtggtgcaatctcggctcactgcaagctccgcctcccgggttcacgccattctcctgcctcagcctcctgagtagctgggactacaggcrcccgccaccatacccggctaatttttttgcatttttagtagagatggggtttcactgtgttagccaggatggtcttgatctcctgacctcatgatccgcccacctcagcctcccaaagtcctgggattacaggcgtgagccaccgcgcctggccaaccctgaaatgttaagaggtctaggacttcgttatttcatgacccaaatgacagttataggagagcacacatgaagcgtctataaaggtcccagccaggtgcgggcctcatgcctgtaactctagtgctttgagaggctgaggcaggaggatcacttgaggccaggagtttgagaccagcctgggcaatacagcaagaccttgtctctacaaaaaacttaaaaaatttagctgggtgtggtagcgcacacctctagtcctacctacttgggaggctgaggtgggaaggtagcttgaacacaggagtgcgaggttacactgagctatgatagcatcactgcctccagcctgggccacagaacgaga

SEQ ID NO: 935784 - DNA, 779 bp, Homo sapiens
tggcacctgctatctcctctggggaggaagctctcatagctagaagtaaacaagcaaaagccgagtattcttgaaagtccctctttaccctgaaatttttttttgtttgttttttgttttgttttgtttttgagacggagtcttgcgctgtcggccaggctggagtgcagtggtgcaatctcggctcactgcaagctccgcctcccgggttcacgccattctcctgcctcagcctcctgagtagctgggactacaggcgcccgccaccatacccggctaatttttttgyatttttagtagagatggggtttcactgtgttagccaggatggtcttgatctcctgacctcatgatccgcccacctcagcctcccaaagtcctgggattacaggcgtgagccaccgcgcctggccaaccctgaaatgttaagaggtctaggacttcgttatttcatgacccaaatgacagttataggagagcacacatgaagcgtctataaaggtcccagccaggtgcgggcctcatgcctgtaactctagtgctttgagaggctgaggcaggaggatcacttgaggccaggagtttgagaccagcctgggcaatacagcaagaccttgtctctacaaaaaacttaaaaaatttagctgggtgtggtagcgcacacctctagtcctacctacttgggaggctgaggtgggaaggtagcttgaacacaggagtgcgaggttacactgagctatgatagcatcactgcctccagcctgggccacagaacgaga

SEQ ID NO: 935785 - DNA, 450 bp, Homo sapiens
ctagctgacctcaccaaatactattcagcaatttacctgctaatttatctatctctcccacaggcctgggagctcctggaaggcacagacactgccatgcctggcacaggaaacgtactcagcaaatgttgcttcagtttgaatkccaactttttcagccttctgagtttcctttctctccccattaaatgcttcctaggctaatccttcttcctccccctgactcaggtcctttcctttctgggtcttaaacttccacacccccttccttgaaggtccctatccgctcacccctgagctgatgctgaacacaggctgtacaggaagacctaagattaatttcttccctttgctggctgcaaaggactctcatggaaggtgaggcactcagagtccatgagactggctgatcataaggactacgaccagctgggtagaagtcagttatgg

SEQ ID NO: 935786 - DNA, 572 bp, Homo sapiens
acaggtgcacaccaccacgtccagctaagtttttaaaaaaattttttgtagagatgaggtctcactgtgttgcccaggctggtctcaaactcttcaaatgaccctcccacctcagtctcccaaagggttgggattacaggcatgagtcatggcacccagctaaatggaggtgtttaaatgatgcctgggatttgcttcaaactcacgtaggaacaggggctggggaagggaatctaggtgtggatagggcaagactggccaagggttgatggttattgagaccataggccacgagggcattcattttactgggctgctgacttccctgcatgtttgaaattctccacaatcaaaagtaaaagagacagagagataccaagtaatagacaaagtaaagtaaattttaytttacaaaggtatgctcattgggaaaagaacatcaccaatccagagtgcaatgttttgaaaggaatactttttcatatttattgaaaacaaaacacggttataacgaatgtatatttcttctcatccaacaaacaaaccttgaccctgaatgatgttcttcttct

SEQ ID NO: 935787 - DNA, 620 bp, Homo sapiens
acacaggtgcacaccaccacgtccagctaagtttttaaaaaaattttttgtagagatgaggtctcactgtgttgcccaggctggtctcaaactcttcaaatgaccctcccacctcagtctcccaaagggttgggattacaggcatgagtcatggcacccagctaaatggaggtgtttaaatgatgcctgggatttgcttcaaactcacgtaggaacaggggctggggaagggaatctaggtgtggatagggcaagactggccaagggttgatggttattgagaccataggccacgagggcattcattttactgggctgctgacttccctgcatgtttgaaattctccacaatcaaaagtaaaagagacagagagataccaagtaatagacaaagtaaagtaaattttattttacaaaggtatgctcattgggaaaagaacatcaccaatccagagtgyaatgttttgaaaggaatactttttcatatttattgaaaacaaaacacggttataacgaatgtatatttcttctcatccaacaaacaaaccttgaccctgaatgatgttcttcttctgggttttaaattgaattttttatgttaattagatagaatattataa

SEQ ID NO: 935788 - DNA, 637 bp, Homo sapiens
agtggaatttctgggccatatgtttaatagacactgctggccgggcacggtggctcatacctgtaatcccagcactttgggaagctgaggcggggggatcatgaggtcaggagattgagaccatcttggccaacatggtgaaaccccatctctactaaaaatataaaaaattagctggatgtggtggtgtgtgcctgtaatcccagctactcgggaggctgaggcaggagaattgcttgaaccagggagtcggaggttgcagtgagctgagatcacgccactgcactccagcctggtgacagagtgagactccatctcaaaaaaaatagatactgccaatcagtttccaacctggctgcagcagttcacatttcyaccagcggtatgtgaaagtccccactgtttcacattctcaccaacacttggattttagctattccggtgggtatgtagtcacatcacattgcgattttaatctgcatctcatgagtcattatgccattgccccacttccgatggaccatatacactccagaactccttaggaagaggggctttgtcaggcctgcactgcaggttcgcttctctctctgcccaatcctgctgccaccctttttttcccccacagatattgatc

SEQ ID NO: 935789 - DNA, 637 bp, Homo sapiens
agtggaatttctgggccatatgtttaatagacactgctggccgggcacggtggctcatacctgtaatcccagcactttgggaagctgaggcggggggatcatgaggtcaggagattgagaccatcttggccaacatggtgaaaccccatctctactaaaaatataaaaaattagctggatgtggtggtgtgtgcctgtaatcccagctactcgggaggctgaggcaggagaattgcttgaaccagggagtcggaggttgcagtgagctgagatcacgccactgcactccagcctggtgacagagtgagactccatctcaaaaaaaatagatactgccaatcagtttccaacctggctgcagcagttcacatttccrccagcggtatgtgaaagtccccactgtttcacattctcaccaacacttggattttagctattccggtgggtatgtagtcacatcacattgcgattttaatctgcatctcatgagtcattatgccattgccccacttccgatggaccatatacactccagaactccttaggaagaggggctttgtcaggcctgcactgcaggttcgcttctctctctgcccaatcctgctgccaccctttttttcccccacagatattgatc

SEQ ID NO: 935790 - DNA, 637 bp, Homo sapiens
agtggaatttctgggccatatgtttaatagacactgctggccgggcacggtggctcatacctgtaatcccagcactttgggaagctgaggcggggggatcatgaggtcaggagattgagaccatcttggccaacatggtgaaaccccatctctactaaaaatataaaaaattagctggatgtggtggtgtgtgcctgtaatcccagctactcgggaggctgaggcaggagaattgcttgaaccagggagtcggaggttgcagtgagctgagatcacgccactgcactccagcctggtgacagagtgagactccatctcaaaaaaaatagatactgccaatcagtttccaacctggctgcagcagttcacatttccaccagcggtatgtgaaagtccccactgtttcacattctcaccaacacttggattttagctattccggtgggtatgtagtcacatcacattgcgattttaatctgcatctcatgagtcatyatgccattgccccacttccgatggaccatatacactccagaactccttaggaagaggggctttgtcaggcctgcactgcaggttcgcttctctctctgcccaatcctgctgccaccctttttttcccccacagatattgatc

SEQ ID NO: 935791 - DNA, 607 bp, Homo sapiens
ttcatcagtttcccttaaaaaattctgtggagattttggttggaagtcactgaattaataggataacttggggagaacagatatcttcataaaattatatttctttctttctttctttttctttctttctttctttctttctttctttctttctttctttctttcttccttccttccttcctttctctttctttctctttttctgtctttctttctttctttctttctttgtttctttttctttctttcttcctttctttttcttttttgttgagacaaggtctaactctgtcacctaggctggagtacagtggtacaatcttggctcactgcaacctccgccttctgagctcaagggatcctcccacctcagcctccccagtagctgatactacaggcatgcaccaccatgcccagctaatttttttttgtattttttggtagagaygggatttcaccattttgtctaggctggtcttgaacccctgagctcaagtgatacacctgccttggcctcccagtgctgggattacaggcatgagccatcatgcctgaattgatctttctaacatatgaattttctatggcttcccaaaatcaaaatctc

SEQ ID NO: 935792 - DNA, 809 bp, Homo sapiens
accagaggtagaaggaggagctggtaccattctttctgaaactattccaatcaatagaaaaagagggaatccttcctaactcatcttatgaggccagcatcatcctgataccaaagcctggcacagacacaacaaacaagagaattttagaccaatatccctgatgaacatcgatgcaaaaatcctcaacaaaatactggcaaactgaatctagcagcacatcaaaaagcttatycaccacaatcaaactggtttcatccctgggatgcaagcctggttcaacacacgcaaatcaataaaagtaatccagcatataaacagaaccaaagaaaaaaaccacatgattatctcaatagaggcagaaaagaccttcgacaaaattcaacagcacttcatgctaaaaactctcaataaactaggtattgatgggatgtatctcaaaataatcagagctatttatgacaaacccatagccgatatcatcctgaatgggtaaaaactggaagcattccctttgaaaactggcacaaaacagggatgccctctctcaccactcctattcaacatagtgttagaagttctggccgggcaatcaggctggagaaagaaataaagggtattcaattaggaaaagaggaaatcaaattgtccctgtttgcagatgacatgcttgtatatctagaaaaccccattgtctcagcccaaaatctccttaagttgataagcaacttcagcaaagtctcaggatacaaaatcaatgtgcaaaaaatcacaagcattcctctacaccaataacagactaacagaaa

SEQ ID NO: 935793 - DNA, 809 bp, Homo sapiens
accagaggtagaaggaggagctggtaccattctttctgaaactattccaatcaatagaaaaagagggaatccttcctaactcatcttatgaggccagcatcatcctgataccaaagcctggcacagacacaacaaacaagagaattttagaccaatatccctgatgaacatcgatgcaaaaatcctcaacaaaatactggcaaactgaatctagcagcacatcaaaaagcttatccaccacaatcaaactggtttcatccctgggatgcaagcctggttcaacacacgcaaatcaataaaagtaatccagcatataaacagaaccaaagaaaaaaaccacatgattatctcaatagaggcagaaaagaccttcgacaaaattcaacagcacttcatgctaaaaactctcaataaactaggtattgatgggaygtatctcaaaataatcagagctatttatgacaaacccatagccgatatcatcctgaatgggtaaaaactggaagcattccctttgaaaactggcacaaaacagggatgccctctctcaccactcctattcaacatagtgttagaagttctggccgggcaatcaggctggagaaagaaataaagggtattcaattaggaaaagaggaaatcaaattgtccctgtttgcagatgacatgcttgtatatctagaaaaccccattgtctcagcccaaaatctccttaagttgataagcaacttcagcaaagtctcaggatacaaaatcaatgtgcaaaaaatcacaagcattcctctacaccaataacagactaacagaaa

SEQ ID NO: 935794 - DNA, 661 bp, Homo sapiens
cctttaaaaactcacttttggaggctaggtgcagtggctcacacctgtaatcccagcactttgggaggccaaggctggcagatcacctgaggtcgagagttcaagaccagcctgaccaacatggagaaaccccatctctactaaaaatacaaaactagccaggcatggtgacacaggcctgtaatcccagctactcgggaggctgaggcaggagaatcacttgaacccgggaggcagagattgcggtgagccgagattgctccattgcactccagcctgggcaacaagagggaaactctgtcaaaacaaaacaaaacaaaacmaaaactcacttttgggctgggcacagtggctaacacctgtaatcccagcactttgggaggccaaggtgggcggatcacctgaggtcagcagttcgagactagcctggccaacatggtgacacccccgtgtctctactaaaaatacaaaaattagctgggcgtagtggcaggcacctgtagtcccagctacttgggaggctgaggcaggagaatcccttgaacccgggaggcagaggttgcagtgagctgagattgtgccatacactccagcctgggtaacagagtgagaccctgtctcaaaaagaaaaaagaaaaaaaaaacctcaattttaactgct

SEQ ID NO: 935795 - DNA, 629 bp, Homo sapiens
ggtgctgacacttgcttctggtgagggcctgagggagcttttgattgtggcagaaggtaaaggggaagcaggcacatcacacagtgagaatgggagcaagagagggagtgggggctgccacacacttttaaacaaccagatctcaccagaactcactcaccctcatgaggacagcaccaagacatgagggattcacccgccatgacccaatcaccgcccaccaggccccacctccaacattgggaatcatatgttaacatgatattttaaggggacaaacatccaaactgtatcatctgtgaaggctgacagagctgaggaagctgcaaaagaaaastctgaagctatcagagactggatcgtgaggtttaaggaaagaagccatcttcataacataaaagtgcaaggtgaagcagcaagtgctgatggagaagctccagcaaattgtccagaagacgtagctcagatcactgatgaaggtgattacactaaacaatagatttctaaggtggataaatcagccttgcattggaaaaagatgtcatctaggactttcatagctagagaagagaagtcaatgcctggcttccaagcttcaaggggcaggctggctcttttgttaggggcta

SEQ ID NO: 935796 - DNA, 583 bp, Homo sapiens
tgtggtgtcctaaccattcatgaccttgagcttaaactccgctagaaaagataaaaaacataaactgcccctaaaaactaaactttggctcgctccagataggatccacagatcacgatgaggacacatgcccgccaggtggagtgaagacagagccaactgctrcccgtgtcaccaggagatggggctgagacttgctttgaagagcaataaggaacagaaaaggtgtaattcacacagcccctgagaagcaacagacaagtcagacaagggaaggaaaactaatgagagcaaaactataaaagcagctcttttgacaatcaagacatcaaagcttcagaaaattcagaggcaaatctcagccctgggaaaccttctgaaggatttgaaagacaatataaggcaagatttgacaaaataatgattttcacacaaaactcagaaagccagataattctttcgtctttttggagcattctgtagagatcacaaagatgtttgttctatcaccttcactgtttgaaaattacatatcttgtctcccttgtccacataaaaatccgattagcagggtgcgtcgcag

SEQ ID NO: 935797 - DNA, 583 bp, Homo sapiens
tgtggtgtcctaaccattcatgaccttgagcttaaactccgctagaaaagataaaaaacataaactgcccctaaaaactaaactttggctcgctccagataggatccacagatcacgatgaggacacatgcccgccaggtggagtgaagacagagccaactgctgcccgtgtcaccaggagatggggctgagacttgctttgaagagcaataaggaacagaaaaggtgtaattcacasagcccctgagaagcaacagacaagtcagacaagggaaggaaaactaatgagagcaaaactataaaagcagctcttttgacaatcaagacatcaaagcttcagaaaattcagaggcaaatctcagccctgggaaaccttctgaaggatttgaaagacaatataaggcaagatttgacaaaataatgattttcacacaaaactcagaaagccagataattctttcgtctttttggagcattctgtagagatcacaaagatgtttgttctatcaccttcactgtttgaaaattacatatcttgtctcccttgtccacataaaaatccgattagcagggtgcgtcgcag

SEQ ID NO: 935798 - DNA, 566 bp, Homo sapiens
gttaactcattataggtttaatttgttgtttcctagttttgtacaagcagaataataacattttaagtcacttaatgaacagttcaacttaaaagacaaattcagtcattgagttactagcatttaaaaaaaacttttatactataaacccatgttagtataaagtgtaaatgtaacaataaaatccagcaaagtaagttactgcttttaaggtkttggcccatttatagtaagtataaggaaaaagtattacatgaaagataaacatatgcaacaatgcatttaaaattttatgatttttggctgggcacggtggctcacgcctgtaatcccagcattttgggaggctgaggcaggtggatcacgagatcaggagtttgagaccagccttaccaacatggtgaaacccagtctctactaaaaatacaaaaattagccgggtgtggtggcgtgcccttgtaatctcagctactcaggaggctgaggcaggagaatcgcttgaacccgggaggtggaggttgcagtgagctgagatcatgccattacactccagcctggatgacaga

SEQ ID NO: 935799 - DNA, 489 bp, Homo sapiens
ctttagtcagcgtatcttaaatttactctattcatttgtatattgcataggataatagctggtatgtagttggtgctcaataattacttgtggaataaattaatttttcttaacatacagcagggagacttggagaggaaagggcctagggagagtttcctatttctttttttttttttttttttttttttttttgagacggagtctcrctctgtcgcccaggctggagtgcagtggcacgatctcggctcactgcaagctccgcctcccgggttcacgccattctcctgcctcagcctcccgagtagctgggactacaggcgcccgctacaacgcccggctaattttttgtatttttagtagagacggggtttcaccgtgttagccaggatggtctcgatctcctgacctcgtgatccgcccgcctcggcctcccaaagtgctgggattacaggcgtgagccaccgcgcccggccgagtttcctattt

SEQ ID NO: 935800 - DNA, 556 bp, Homo sapiens
gtatttatttgcttctcagtttattgtctcatgccctctaccaaaatgtaagctccttgagtgcaggaagtgactccattttgttcattgctgtatcttctgcacattggaccaatagcacccggtagcacccaataaataaatattcattgaacaaatcagttatctctttcactaactaattcttyaggcttaaattagtcatttaattcttctaggtttcagtcttcctctactttctagaatgagggattggacaatctttcagattaaaagactttaattttattaaaatgctttgatcccatagactttcccctataaattatggtatgtttccatgaatctatttagactagtattaatttcccaaacaacactggttatggctattccatagccataaccagattagagccagaacaagtgtcatacttttccattgtaataatacaaattcgtcttcagttacttaaattaaaaaaaaacatagttttgtgccagctatcaatttattgctcctcaagtccaaatccctcattgtactgccttgtga

SEQ ID NO: 935801 - DNA, 581 bp, Homo sapiens
caccatgcaaactaagtgggaaaccaaggagtcaatgaatcaagaaactggaaacctcagggttatctgtatggcaagaaataaaatatgtattaatatctctaactgtggcaagaaaaattagttttgttatccagatttcaattgttatgttcaagaatgctaacagtattttctcaccaaaatttgtattttttatttatctttttttttttggagagagacctacaaaagctactagtctggtattatttggtgggcctaaaagtgcacctatttgactaaacgcatatatatgagggacttctgyttccaggcaagatatagtaacaggaaccagattcaccttcctgctgaaacaaccaaaaaactggcaaaacgtatcaacaagtttcaagccactggacatcagacaactaaggacaaatgacacagagttgggaacaactgaggtgagcctataactgcccccactcactggcttgagagtctccagacaactccatgaggagactaagcaagagtccagggaaaccgaggcagccaaagctcagagagtcctgggagagctgccactcaaa

SEQ ID NO: 935802 - DNA, 604 bp, Homo sapiens
tggtgggcgcctgtagtcccaggtactcaggaggctgagccaggagacttgcttgaacccaggaggcggaagttgcagtgagccaagatcgagccactgcactccagcctgagtgacagagcaagactctgtctccaaaaaataacagtttaaaaaaaacctcaaaacagattaaagattaaaatgtaagacctcaaactgtaagaatcctagaagaaaacctaggaaccatcattctggacatcagccttgggaaagaatttataactaaaccctcaaaagcaaatgcaacaaaaacaaaaattgacaagtgggacttaattaaactaaagagtttccgcacagyaaaagaaactatcaggacagtaaacagacaacctacagagtgggagaaaatattcacaggctacgcatccaacaagggtctaatatctggaatctataaggaacttaaacaattcaacaagcaaaaaaacgactccattaaaaagtgggccaaagcaatggggaaaagaccccctatattcaatcaatggtgctgggagagctggctagccacatgcagaagaatgaaattagacccacatctttcactatatacaaa

SEQ ID NO: 935803 - DNA, 638 bp, Homo sapiens
taaaacttgagtggatgagaggtggctttttatggataagcaaagaaagtggtttcctgagatggaatctgttcctgttgaagatgctgtgaacatcactgaaatgatgataaagtatttagaagatgatataaagttagttgataaagcagcagcagggtttgagaagattgattgcaactttgaaagaagttcaactgtggataaaaatatatcaaacaatatcacttgctatacagaaatcttttgcgaaaggaagaatcaattgatgtggcaaactacaytgttgtcttagtttaagaaattggcacaaccaccccaaccttcagcaaccaccaccctggtcaatcagcagctatcaacatcgaggcaagaccctccatcagcaaaaagatgatggcacactgaaggctcagatggtcagtagcatttttagcaataaaatatgttaaaattatgtatgtacattgttttctcagacataatgctattgcacacttaatagactacagtatagtgtaaacataacatatattttttgagacagaatctcactcggtcacccaggttggagtgaaatggcacaattatagctcactgcagccttgacctcctggacttaagcaatcctcccacct

SEQ ID NO: 935804 - DNA, 626 bp, Homo sapiens
tcctggctaacacagtgaaaccctgtctctactaacaatataaaaaattagccgggcatggtggcgggcgcctgtagtctcagctacttgggaggctgaggcaggagaatggcgtgaacccgggaggcagagcttgcagtgagccgagatcgtgccactgcactccagcctgggtgacagaccaagaccccgtctcaaaaraaagaaagaaagaaagaaagaaatacattagattggtccagaaaggcgggacaactcaaaggtaggagggcttccaggctatgataaatttaaacattttctggtgaagcaggggttaaaagagaaaaacaagtttcctcttgctaggctgacccactccaagacctggtgataggcagcagagctctggcaaagatttgataactatctgcaaaaccagagccctcaaaggatgtgctccagagccccctcccctcccagttatgggcaaggacgagaaaacaggttcttctcctatcccagctccccactcccctcttagtaacccttccttagtgaaactcaaggttactttacaaagttttacggattcctgtttctcctctgtgtaacataacaaggtcatcagacatgctcaggtaaga

SEQ ID NO: 935805 - DNA, 706 bp, Homo sapiens
agactgctcaatagagacagtagaagtaggaggacgatagaggaatcccttcacattcctggaaaaacatcatttcaacttaggattctatacctaaccaaactaccaaagaagtatgaggagggacacaaaaacatttcagacacgcaaagtctcccaaattttattgcccatgcactctttctcaggaagatactgcaggatttttgccaccaaaaagatggagtaaaacaaataagaagtcatgggaggctgggcgtggtggctcatgcctgtaatcccagcactttgggaggctgaggtgggtggatcacctgaggtcaggagttcgagaccagcttggccaacatggcaaaaccctgtctctactaaaaatacaaaaattagccgggcatggtggtaggcacctgtaatttcagctacttgggaggctgaggcaacagaatttattcaatccaggagrtgaaggttgcagtgagccaagatcatgccactgcactccagcctgggtgacagagtgagactctgtctcaaaaaaacaaaacaaagcaacaacaacaacaaaaagaagtcatgagagccagggggaaaggagagaactgaaggagatttccagaacaacgggtatagcctgggtgcagaggagagtcggttcaaaccacagcaacttaggaggcactgggagagctgccttcaggaagatgaa

SEQ ID NO: 935806 - DNA, 635 bp, Homo sapiens
aggctctgatgtcttctctctcttttccgggacacttcctggattattcctaaagggacagcctcatgtaagcccagcccgctcccccatttcaccatatccctgcactaaaatccacttgggccaaagcactcagaatggaacrtcttcctggaaggcctcagtgagtgagaaccaggaaggctctgtctccaaaaggaccttgtctacttctgagtaggagcccatccccaggggatggctgtgagttgctgaaccatcagcctgtgtcagcggtttctggtgacactgcattttgaatttggaagcatctgagctaataaatggcggctgtgcaggggaggctggggccagactctgctctgtcaccagccgcgctgtgactctggccacttcagcaaccctctgcacacccctaggctcttctggttctcattctacagtgctgtcctctgccctgtgactatgttttcctgaaagcaaaatacacaaagatcagcctgtgactgtgtcgtaggtgttaatgcacagccgtcttcctctggcaggtactggggcgcatgcgctggctctggggaacagtcctcggtcactttctcatttcagtgacccgagtcccctagcataagcacgtg

SEQ ID NO: 935807 - DNA, 625 bp, Homo sapiens
ttaggctctgatgtcttctctctcttttccgggacacttcctggattattcctaaagggacagcctcatgtaagcccagcccgctcccccatttcaccatatccctgcactaaaatccacttgggccaaagcactcagaatggaacgtcttcctggaaggcctcagtgagtgagaaccaggaaggctctgtctccaaaaggaccttgtctacttctgagtaggagcccrtccccaggggatggctgtgagttgctgaaccatcagcctgtgtcagcggtttctggtgacactgcattttgaatttggaagcatctgagctaataaatggcggctgtgcaggggaggctggggccagactctgctctgtcaccagccgcgctgtgactctggccacttcagcaaccctctgcacacccctaggctcttctggttctcattctacagtgctgtcctctgccctgtgactatgttttcctgaaagcaaaatacacaaagatcagcctgtgactgtgtcgtaggtgttaatgcacagccgtcttcctctggcaggtactggggcgcatgcgctggctctggggaacagtcctcggtcactttctcatttcagtgacccgagtcccctag

SEQ ID NO: 935808 - DNA, 603 bp, Homo sapiens
ccagcactttgccttacagattcaaatagaggctactaaagtaatgaatcggtcttaatgtaaaactttcctctagtcctcccttgacctagtacctggattcagtaactagacttttacccaactgatcctgttactaaatacccattagacttttctccaattctgaagattaagatgcttcctttatgcttccttcttcagagttcatagaaaatatgctacctattaatctctgatatggtctgagtgtttttgtgtcccccaaattcawgttgaattcctaacgtcttaggtgatagggttaaacaacaaaaatatagtgatagtattaatgtgagagtattaagaggtgggccttttggatgtgatcagggggatctgccctcaggaatgggattattgcccttataaagaagcctgagagagcttgtttgccactttcaccacatgaggacacagtgaaaaaatatcatctgtgaaccaggaaatgggttttacctaacaacaaatctgccagtaacttggtcttgggcttctcagcctctagaactgtgaaaaataaatttttgttgttcagaagctacccagtctaggatgttt

SEQ ID NO: 935809 - DNA, 592 bp, Homo sapiens
aaattaacacatctatcagcacacagttaccattgtgtgtgtgtggtgagggcagttaatatctactctcttggaaaatttcaagtaaataatacggtactattaatgatagtcaccatgctatacactaggtctccagaagttattcatcttaaaactgaaagtctgatcctttgactaacatctccccatttcctsaatcccctagctcctggcaaccagttttccactctcggcttttatgagagtgactgttttagattctacatatatgctagatcataaaatatttgtctattcagccactgtgctaccctcagtttttatgagtttcagtgttttagattctacatgtatgttagacaatagaatatttgtctatctgtttggcttatttcatttattatgttgtccttcagtttcatctgcattgttgaaatggcagaatttgctttttattaggctggtaatattcaatcacacacacacacaccctcaaattttcttcatctatctaggagcatgaactaggctgttttcatatattagcaactgtgaataatattaaaatgaacttgtgattgcacatgtc

SEQ ID NO: 935810 - DNA, 604 bp, Homo sapiens
taaggccattttgaactttattttcttgttattctagttaactaataatataaaataatatcgaagcaagaaattacccttgaccccttcgtgggccttgtgacaggtatgcctcacttactcagcccacagctctcaatccctcgtgggagggggagcatgcaggtgagtgggtgagggagccagagtgagcacttttgggcaccgaaataagcaaaactctgtgcaggacccttggcagtgtgtatgggggtgtacctgcaacccccaaagccccagagggcatgggttacaggcagcactcttaactttgccatccatggatacattaagtgtttaagggctcartggaccttctgtcatttcacgagggcagtgggtcagtgtgacagctttctgtatcctaagctcttgtccagcgtccaggaaaaatcaggtcacatgaacaaatttaaggatagtaaatgtgaaggattttattgccgatggaagtggcattaggcgggaaggggagctagaaaagggatggaatgggaaggtattcttccctggaagtaccaccttcaaactgtccctctgaaggaaagctgcttctgtctgatgt

SEQ ID NO: 935811 - DNA, 651 bp, Homo sapiens
cagcaaatattgctgaacagaaaatgttgctgcctgatcgttcctctggaagctttgtctcagaggggtacccggccatgtgaggtgtcagtctgcccctactggggggtgcctcccagttaggctcctcaggggtcagggactcacttgaggaggtagtctgtcygttctcagatctcaaactccgttctgggagaaccagtactctcttcaaagctgtcagacagggacatttaagtctgcagaggtttctgctgccttttgttcggctattccctgcccccagaggtggagtctacataggcaggcaggccttcttgagctgtggtgggctccacccagtttgagcttcccagcagctttgtttacctactcaagcctcagcaatggtgggcgcccctcccccagcctccctgccgccttgcagttcaatctcagactgctgtgctagcaatgagcaaggctctgtgggcgtgggaccctcagagccaggcacgggatataatctcctggtgtgccatttgctaagaccattggtaaagtgcagtattagagtgagagtgacctgattttccatttgccatctgttaccccttcccttggctaggaaagggaattccctgaccccttgcacttcccaggtgaggtgat

SEQ ID NO: 935812 - DNA, 657 bp, Homo sapiens
aggccactgggggttgaatttttgttctggggctccttcagctttcagggcaatcctgtttccagtggctaagcttgtggcagagtggataagctgtgtacagcttttccccatttattttattgggtaagttgccttttagtggcctgggcttttgcacagatggcagttatttggaggagtgtccttagggaaacctggagaagctgggggcttgtaaagcagccaaccattggacctgcctcttgtccctgcattttgtttttttcttttccttagccctgttttccttaatttgctttcgattataaagactgaggaggttaatmtgaggatttccttcataggggccatgctgtgttacaaaagaaaattagatatttctttttttgagagtctgagggttaaatttgtcttattgctttaggatgcagcctatcagtgagtctgaaggaatagacggggtttgttccatggcggaactggaaagcacacccctcgggggcagtgccagtcagggtcacgaaccacacttctgcttggggcatcctgccaagatgaatgccgagatgtttgccaagttccacatatgtctgctgagggacttggggtgcactgtataaaggggcatcccacctattagtaaagatcatccag

SEQ ID NO: 935813 - DNA, 608 bp, Homo sapiens
  misc_feature 559, 593: n = A,T,C or G
atgatagtagcgtggccagctcctgccgcagggccccaaccttgaactccctatgggcaccagaggccgaggctggctgtcgggtgtgctcgggggtagggccaggaccggggacaaaggccactcccacagccaccacagggttaaggaggctcgagggggctcagccctgtcacccctccagtggggaaggtgggggtccccaacggggggtagagggaggggctggaggcgcctcagaggctgcaccagggtggcagggtgagcccggtgctgggccaggcccgggctcagggggaacaggtctgtcacgayaccaggggattgtggagagtagcgtggggaccggcccagcccagtaacggtcagcagagcccctgcccctctcccagggcctggaggctgtacctggccttgccttcggcggaaatcctgaggtctgagtcgctcttatgaagcaggcacttgtcggagacactctctatctgaacacagagccgggagcggcgggcagccccagggcgccatctaggaccagccttggcctcgacccacacanggagagggaggaggggagaggacaaggtgcaggnagaagggtcccacgc

SEQ ID NO: 935814 - DNA, 655 bp, Homo sapiens
agttcattcatgatttggctttctgcttgcctgttgttggtgcatacgaatgctagtgatttctgcacattgattttgtatcctgagactttgctgaagttgcttatcagcttaagaagcttttgggctgagacgggagggttttctagatttaggatcatgtcatctgcaaacaaagataatttcacttcctctcttcctatttgaataccctttacttatttgtcttgactgattgccctggccagaacttccaatactatgttaaataggagtggtgagagagggcatccttatcttatgctggttttcaacaggggtcctttcagattttccccattcagtatgatattggctgtgggtttgtcatacatgrctcttattttgaggtatgttccttcaatacctagtttattgagagtttttaacatgaggggatgttgaattttatcgaaggccttttctgcatcttaaaatacattaataactgaagaaattaagtacctttcaaatattttttaagatttggaaacatgcaaaaaacaaggtcagaaggagccaagtcagaactgtaaggttaatgcctagcgatttcccatcaaaactcttgcaaaattgtcctcatttgatgaggaattggcagaagcattgttgt

SEQ ID NO: 935815 - DNA, 602 bp, Homo sapiens
taaaataaaaagataatgtctatctgtcagatcattccagttccaaagataactatttacatattgatctctcttcccagatacatttattctccctagtaattccctcaacagaactcctcttctctgtgccccatcttgccacataatatgttttgccaggatgggacatgagcttctgaaccccaatggggaatggataatcactttccttgtgtacamgttaataaaatctgtatgccttttctccagttaatctgccttttgtgagttgattttccagtgaaccttccaaggagaagttccccttggcccatacagtatcaatataagaaaatgtgcacacagcaaagaaaacaaacaacagagtgaagatacaacctgttgaaggtcgagcacggtggctcatgcctgtaatcccagcactttgggaggccaaggtgagaggattgcttgagcccaggagttgaagacgagcctgggcaacatagcaagaccctcatctcaaaaaaataaataagtaaaagaaaaagagaagatacaacctgttgaatgggagaaaatatcagcaaactatttatccaagaagggactaatattca

SEQ ID NO: 935816 - DNA, 602 bp, Homo sapiens
taaaataaaaagataatgtctatctgtcagatcattccagttccaaagataactatttacatattgatctctcttcccagatacatttattctccctagtaattccctcaacagaactcctcttctctgtgccccatcttgccacataatatgttttgccaggatgggacatgagcttctgaaccccaatggggaatggataatcactttccttgtgtacacgttaataaaatctgtatgccttttctccagttaatctgccttttgtgagttgattttccagtgaaccttccaaggagaagttccccttggcccatacagtatcaatataagaaaatgtgcacacagcaaagaaaacaawcaacagagtgaagatacaacctgttgaaggtcgagcacggtggctcatgcctgtaatcccagcactttgggaggccaaggtgagaggattgcttgagcccaggagttgaagacgagcctgggcaacatagcaagaccctcatctcaaaaaaataaataagtaaaagaaaaagagaagatacaacctgttgaatgggagaaaatatcagcaaactatttatccaagaagggactaatattca

SEQ ID NO: 935817 - DNA, 492 bp, Homo sapiens
aaaaatacactttcagaaagaaaaaaaaaatgaaaattatccgtaatcccaacactgtgaaaaactttttaaagatccgtctagtgctgggcgtgatagtgcacacctgtaatcctagttacttgggaggcagaagcaggaggattgcttgagcccagaattttgatgccggcctgggcaacatagtgagaccccatctcttaagaaataaaataaaatccgtctgaatgacacagtttcagttagaagcataacttccaaagatctattgttcaacatggtgactacagttaataacaatgtatacttgaaaattgcwaggacagcagatcttaagtgttctcaccacaaaatatagtatatgaggtaatgcatatgtcaaatagcttgatttagccattccacaatgtgtacatttatcaacacaccacgttttacaccataaatacacacaatttttacttgtccattaaaactctgtctagtcatttc

SEQ ID NO: 935818 - DNA, 753 bp, Homo sapiens
tgatcacaaggtgaagtcccttttagccaggcgtggtggtgtgttcctgtagtcccagctactcaggaggctgaggcaggagaattgcttgagcctgggaggcggaggttgcagtgagccaagattgagccattgcactccagcctgggcgacagagtgagaccttgtctcaaaaacaaaacaaaacgaaacaaaaaaaactaaggtgaagtcccacaacaggccatctgctagctgaggaacaaggaagccagtctgaatcccaaaacttcaaaagtagggaagccgacgacgcagccttcggtctgcctgagagtcttgccaggcctgagagtccctggcaaatcactggcgtaagtccagagtccaagagtccaaaagctgaagaacttggaatctgatgttcgagggcgggaagcatccagcacaggagaaagatgaaggccggaggactcagcaagtctgctccttyaccttcttctgcctgctttattctagcctagccatgctggcagattgagggtgggtctgcctctcccagtccactgactcaaatgattcaaatctcctttggcaacaccctcacagacacacccaggaacaatactttgcatccttcaatccaatcaagttgacaatcaatattaaccatcacatagggtccataggaagtgacacaatgacttgatggtaaatcctaaaagctcaggccacttccgcctggtgtgctggaaaactcactcgggagcccta

SEQ ID NO: 935819 - DNA, 702 bp, Homo sapiens
cagtggagtggtggaggggagaggcagagacacacagccatggccccaggcagaggaagaggaagaggggaggtcaggaaggttggggagagatgaagagagaggggagaggataatgggaaagtggaagagaggaaagtgggacagggaaagagagaagtaagggagcagagaaagaggaaaagcaggkgaaaaggatgaggcagaggcacttggaggaggaatgaagccagggcctgggtctcatgagatgaaaaggtcaaccacggcccctctaaagaaggctgccaacatcctttggcccatgagtagagaagtattttaaaatataagcttaatgagggcagggactttttaaaaattgtttctttttcttttggtgttgtatcttcagctcctagaatcatgcctgcccaggaatttaatagctatttgttgaatgataatattttagcgctggcagtcaactaaccacattttagacaagtagcttctgtgggctccatcctgcactcttgacaatggggagactccagagagagggaccaggctgcctggctgtttttgaggatcacagcttggctgggcaaaacgggctgagagaggggaggtaaagggaatttgcatgacaacgcacagtcagcgggtgattggctggctctggctacaggcagcacaggaggaacagcccagagaagcggg

SEQ ID NO: 935820 - DNA, 702 bp, Homo sapiens
cagtggagtggtggaggggagaggcagagacacacagccatggccccaggcagaggaagaggaagaggggaggtcaggaaggttggggagagatgaagagagaggggagaggataatgggaaagtggaagagaggaaagtgggacagggaaagagagaagtaagggagcagagaaagaggaaaagcaggggaaaaggatgaggcagaggcacttggaggaggaatgaagccagggcctgggtctcatgagatgaaaaggtcaaccacggcccctctaaagaaggctgccaacatcctttggcccatgagtagagaagtattttaaaatataagcttaatgagggcagggactttttaaaaattgtttctttttcttttggtgttgtatcttcagctcctagaatcakgcctgcccaggaatttaatagctatttgttgaatgataatattttagcgctggcagtcaactaaccacattttagacaagtagcttctgtgggctccatcctgcactcttgacaatggggagactccagagagagggaccaggctgcctggctgtttttgaggatcacagcttggctgggcaaaacgggctgagagaggggaggtaaagggaatttgcatgacaacgcacagtcagcgggtgattggctggctctggctacaggcagcacaggaggaacagcccagagaagcggg

SEQ ID NO: 935821 - DNA, 520 bp, Homo sapiens
ggagaatatgtctagctaagtgattgtaaatacaccaatcagcactctgtatctagctcaaggtttgtaaacacaccaatcagcaccctgtgtctagctcagggtttgtgaatgcaccaatcggcactctgtgtctagttaatctggtggggacttggagaacctttatgtctagctaagggattgtgaatgcatcaattggcactctgtatctagctcaaggtttgtaaatgcaccaatcagcactctgtgtctagctcagggtttgtaaatacaccagttgacactctgtatctagttaatctagtggggaggtrgagaacttttgtgtctcgctcagggattgtaaatgcaccaatcagcaccttgtcaaaacggaccaatcagttctctgtacaacagaccaattggctctctgtaaaatggaccaattagcaggatgtgggtggggccagataagagaataaaagcaggcggcccgagccagctatggcaacttgctggggtccttttgcacgct

SEQ ID NO: 935822 - DNA, 533 bp, Homo sapiens
tcaccacaaactagaagggaatgatggtggtcttgtttgggactctttacctgcagcaagaacctgggaaatgtgggggtgattttggtgtgtcatgtacagttgggctggggaaagcgaaaaaagtgaagaagaggaggtgaggagggggaggtcagcacaggaagaagggtcctggccacctttgacccatacktggggtaaaggacctgcatctggccaggctctgtggcttatgtctgtaatcccagcactttgggaggctgaggtgggaggatcacttgaagccaggagttcaagaccagcctgggcaacatagccagttcctccatctctacaaaaacaaacacaaaacaaaaacagaaaagggatctgcatctttacatggtgcaaataaagaaaactagaagatagggagttaacttgagacatactattatgtgctccttttctccccttgaaatgttgatgcaggaagtcagggtggtaaaaaataggcacaatgtcacattcagcttcacaagatttgaaag

SEQ ID NO: 935823 - DNA, 561 bp, Homo sapiens
cagccttgacttgacttcctgggctcaggtgatcctcctgcctcagcgtcctgagtagctgggactacagatgcatgccaccacacccacagctagtttttgtattttttgtagagatgggatttcaccatgttgcccaggctggttttgaactcctgagctcaagcaatccactcgcctcagcctcccaaagtgtagggrttacaggtgttatccaccatacctggcctttttttaaatatttttgatacaaacttttatgaacacctattggatcattagatactacaagatataaaacttaatttatataacttagtataaatttactatatattatattcctggaaagaaaccttgtattgattaaaaataaatagaatttaaatatgtactaaaatttttttcctataaatatggcatctagaaggccaagttgtgcaatgttcaggaaaaaaacatccatactgaaatgaatcaaaattatgtggggcagttacgagtttggctggaaaacacagtacttaaaccactgaacatgattacgtgtctaatgttgac

SEQ ID NO: 935824 - DNA, 561 bp, Homo sapiens
cagccttgacttgacttcctgggctcaggtgatcctcctgcctcagcgtcctgagtagctgggactacagatgcatgccaccacacccacagctagtttttgtattttttgtagagatgggatttcaccatgttgcccaggctggttttgaactcctgagctcaagcaatccactcgcctcagcctcccaaagtgtaggggttacaggtgttatccaccatacctggccttttttwaaatatttttgatacaaacttttatgaacacctattggatcattagatactacaagatataaaacttaatttatataacttagtataaatttactatatattatattcctggaaagaaaccttgtattgattaaaaataaatagaatttaaatatgtactaaaatttttttcctataaatatggcatctagaaggccaagttgtgcaatgttcaggaaaaaaacatccatactgaaatgaatcaaaattatgtggggcagttacgagtttggctggaaaacacagtacttaaaccactgaacatgattacgtgtctaatgttgac

SEQ ID NO: 935825 - DNA, 634 bp, Homo sapiens
atcgattctaggtccttaggtaaactcaaccaattgccattcagaaaacctttgaatccacctattcaaatattagcggggacctggaactgaccctctgatacggtttggctgcgtccccacccaaatctcaacttgaattgtatctcccagaattcccacctgttttgagagggacccacgaggaggtagttgaatcatgggggctggtctttcctgtgctattctcacgatagtgaataagtctcacaagatctgatgggtttatcagrggtttccccttttgcttcttcctcattttctcttgctaccacgctgtaagaagtgcctttcacctcccaccgtgattctaaggccctcccagccatgtggaactgtaagtccagttaaacctcttttttttttccagtctcagttatgtttttatcagcagtgtgaagatggactaatacagtaaattggtaccagtagagtggtgtgttgctgaaaagatacctgaaaaggtagaatcaacattggaactgggtaacaggcagaggttggaacagtttggagggctcagaagaagacaggaaaatgtgggaaagtttggagcttcctagagacttgttgaatggctttgcccaacatgctg

SEQ ID NO: 935826 - DNA, 634 bp, Homo sapiens
atcgattctaggtccttaggtaaactcaaccaattgccattcagaaaacctttgaatccacctattcaaatattagcggggacctggaactgaccctctgatacggtttggctgcgtccccacccaaatctcaacttgaattgtatctcccagaattcccacctgttttgagagggacccacgaggaggtagttgaatcatgggggctggtctttcctgtgctattctcacgatagtgaataagtctcacaagatctgatgggtttatcagaggtttccccttttgcttcttcctcattttctcttgctaccacgctgtaagaagtgcctttcacctcccaccgtgattctaaggccctcccagccatgtggaactgtaagtccagttaaacytcttttttttttccagtctcagttatgtttttatcagcagtgtgaagatggactaatacagtaaattggtaccagtagagtggtgtgttgctgaaaagatacctgaaaaggtagaatcaacattggaactgggtaacaggcagaggttggaacagtttggagggctcagaagaagacaggaaaatgtgggaaagtttggagcttcctagagacttgttgaatggctttgcccaacatgctg

SEQ ID NO: 935827 - DNA, 625 bp, Homo sapiens
gctgaggtggtctcagatggagatgagaaacttgttgggaactggagtaaaagtgactcttgttacgttttagcaaagagactggtggcatcgtgcccctgccctagagatttgtggaactttgaacttgagaaagatgatttaggatacctggtggaagaaatttctaagcagcaaagcattcaataagtgacttgggtactgttaaagttttataagggaagcagatcataaaagtttggaaaatttgcaggttgactatgtgatagaaaagaaaaaaccatcttctggggagaaattcaagctggtgtcagaaatttgcataagtmgcaaggagcctaatgttaatccccgagaccatggggaaaatgtctccaggccatgtcagagaccttcatggcagccccttccaccataggcctggaggcccaggagaaaaaagtggttttgtgggccaggcccagggtctccgtgctgtgtgcagcccagggacttggtgccctgtgtcccagtcactccagccatgattgaaaggggccaacatacagctcaggctgtggcttcagagggtggaagccccaagccttggcagcttccatgtggtgttgagcctataggtgcacag

SEQ ID NO: 935828 - DNA, 491 bp, Homo sapiens
tactatgtgattttatcttttgacacagaaatgaaaaatgaggctgggtgtggtggctcacgcctgtaatcccagcactttgggaggccgaggtgggctgatcacttgaggtcaggagttcgagaaaccagcctggccaacatggcaaaaccccgtctctactaaaaaatacaaaaaattagccggatgtggtggcagttgcctgtaatcacagctactcgggaagctgaggcaggagaatcacttgaacctgggaggtggaggttgcagtgagctgagattgcaccactgcactccagcctgggtgacagagtgagactccatcttaaaaaaaaaaaaaamaaaaaaaacagtatatgagattgtgcagcggctgttgtgtttggaccagtttcatcatctggtttctttgagaagctgtgagcctctggctccagttccaggctctcccatagtgacatcttccctctcaaagggggcatcagttttcc

SEQ ID NO: 935829 - DNA, 658 bp, Homo sapiens
tcatgaacaagtttttgtgtggacatgtgttttcatttttcttgggtatgtatcttgaagtagaatttttggatcatatcacacctctctatttaaccacctgaggaactgccaggttgttttccaaagtggccacacctttgaacattccyacaagcagtatataggggttccagtttcttcacattttcatcaacagttgctgttatctttttttaatttttaattttattgatacatagtgttttacatatttatgggctacatgtgaatgctttttacatgcatagaatgtgtaatgaccaagtcaggttatttggagtattcatcatcttgagtatttatcatttctatgtgttggtagcatttcaagtccttttagctactttgaaatatacaatacattgttgctaactatagtcaccctagtctgctatggaacattagaacttatttcttctaactaactgtaaattcctacctattcacccccctttcttcatttcccccttccaccttcacacccttcccaccctttggcatctatcattctgttctctatcttcatatgatcaagttttttagctcctacatatgagagaaaacatgtggggtttgtctttctgggcctgaatgatatcacttaacataatgacct

SEQ ID NO: 935830 - DNA, 744 bp, Homo sapiens
cattgattctgcatatttttcctgacaacagccccggcaggagttcagttaggaatttaaagtgcagttcatggttctgtgccaccgtggcttttattattataatattaaattagaagttgtcctagtgcctggtgtttgctcagagtttccagaagagagggaagggcaaggtttaaatggcatgcaggacaactggaatgcccccatctctctcgctgacacggatccagtcatacctggggctggaygggatttggaggccctggtcatttgcagagtgaatggtgaagggcgcggaaaaggtttgcttggaggaaagaccggttgcagaggcgaggcggagggaggaggggcggaggcagcaggtctttgtttgtggtaggtctctggcttccatcagggaggaggaaagaggctgtgcccttcctggctcttggctgcaccactgaggacgctccgagggacagcgtgctcacccatcctttgcacagtgctggccccaagccccacggccttccagctaggattttctgctgggctcatgcagaggcaggggacaggtgcatggaagagccgccccacccgacacaccattgtttgaaaatcactgttctctttactcacttaaaaaagtgtacagggaacacctgttcctggcataatgctccaacctcgcggaaggggccaggtgcccttcatctggctctggctgcttccgacctgggcccacgtcatcgttca

SEQ ID NO: 935831 - DNA, 655 bp, Homo sapiens
atagattttggtgggtacaatcattttagaacactggattataattatgcaaatattatgcattacatgccaaaatatcttttttcccttagagaaatttgcaaatattccaaaatctgaaaaactccaagatccaaaacacttcttgtcccaagcattttggataaatgatacttgacaacctgcagtacttttggcagcataattgaataattaaaactcaaaccatcactaaagaagtcagcaaractatgatggattttaaaagatctacagcacttagaaagtgtctgaagttagtgtactattcccctcattgtcttttaataccataccataccattgttcaaataaaactacttactgctgttttaccccctgaagcaacctgaatccttctctggcactttctttcttgactttatgcattgccttttttgtttgtttgttttgctttttgagatggagtcttgatcttgtcgcccaggctagagtgcaatggcacgatctcagatcacagcaacctccacttcccgggttcaagcgattctcctgcctcagcctcctgagtagctgggattacaggcatgcgccaccacgcctggctaattttatgcattgcctcttatctctcataagctgtatccagctctgt

SEQ ID NO: 935832 - DNA, 510 bp, Homo sapiens
ttttttgttgttgttttgttttttaagagacagggtcttgctctgacacctaggctagtgagcctcctgccccaacctcccgagtagctaggactacaggtgagtaccaccgcactcgactaatttttaaattttttctagagatggggtcttactgtgctgcccaggctggtcttaaactcctgggcttaagcartcctcctgcatcagcctcccaaagggcagggattacaggcatgctgtatctttgtttttttttcttttggttagcaagtaacagtttgggtttttatattcccaagatgtctagaggatttctttcttctacttcagcttgattgatgaaaatgtcataatgaagtgaaagaaaaggcttgctgtacttccattttgaggtggaccatcatgtttttgaagccttgttctctgagccactctattttgtttggggttcactcctagtttaaggcagagctggtactctttgttcccatcttctcagagaaagta

SEQ ID NO: 935833 - DNA, 624 bp, Homo sapiens
accatagcaccagcccaaagtaggcctattctgttgataacaggacgccaagtcaccttgtaggcataacagagtgaaaacttcaagtcacataggccaggcatgcgcaatagaaaaaggtttgacctttaacaacacctggtacaaggattcgtctctggggaaccaaaagactgggaaatgactggaacctgaatgctggagctctttcaaaagggatctgttggcccagaagatctgggactaaaatccttactgtaaatggtttgtttgaagttctcccatcagactctgccaagtcaacattcctaaatcctttctcttgccctcccaacccttagaacttgccccagatcccaaatcagtcagatagatatgaactgcatctcctgtctccttgctggctggtcttgcaataaagcctttcttttctcaaaagytagtgccacagtattggcttcccatgtgtgtcaggcagcaagtccatttattcaataccatcttcaccaaccagaaagttccaatgagctttggtgtctagagtttttattggtgtttcatgatgtaagcatgatagattgaataattggccacatagttgaattcaatcttgaggcctccatt

SEQ ID NO: 935834 - DNA, 618 bp, Homo sapiens
aatgaccctcggtttttggtgagaattgctaacttgtataagtgctgaagggaagtccaaagcctttctctttgagggtcaaacgacaaagtggaagcatgtgtgtgtgtgtgtttgtgcacatccatgtctgtgtgtatatgtgtgtgactgtgtgagtgtattaataaatgtaatgagtgtgttcttgtgtatatatgtgtatgcacatgtgtacacacaaatgcgtgtgtttgcaagctcgtgtgtgtattaaggggtgtagtggcattgggactgagctgttcctagtgagtgctytgcagaggagggggcgctacacaggcagtctgttttgctgggtgaccttgcagcctcccacagggctgttgtgagacttcttcaccatggctcacgtgcagaggtgtctgccacacggtaccctgctggctgttccgagctggggaatcagtcacccttccttggtgagggcaaacattcagggaaagtagaaggaggaggtcctgggaaggggaagtggcaggaagtaaaacaaatgggagctttatcctggctttggcaaattacgtggcctcttcgtgcctcagtttcctcatctgaaaatgggatatcattagt

SEQ ID NO: 935835 - DNA, 749 bp, Homo sapiens
aaagagttggggaaagggcactccaagcagaaggaacagccagtgcaagaaatgcaaggtaggagtaggcttcatcacccaacaagcgagctggtgtggctgaagcagagtgactagggaaaagagtggtgtaggagggtcactgccttctgaggactgtgatagagaatctgtttcatgcctctcacttagcttccagtggtttgctggtaatggttgacattccttggcttgtagaggcatcatcctaaagtctgcctccatcttcatttggttttctcccwgtcagcatgtgcatgtctgtgtccaaatctcccccagttgtaaggacttattggattaagagcccacactattctagtatgatctcattttaacttaactaatgacatctgcaatgactctatttccaaataaatttgcactctgactactactttaacatatggggactactactttaacatatgaatttttcagggacacactttaacccataacatcccccagctagaatataaacttcctgagggcagaaacttgttttttgtttactgccatatctcaagtatttagaagactcctcggcacatggcatatactgaattaatatctgctgaattaatgaatgtacagggaaaattcgtgaagaataatccatacaggtacaaataaagtgtctcattttagacttgataagttgagatacttattagaagcccaagtagaaatgtcaagtaggcaactga

SEQ ID NO: 935836 - DNA, 749 bp, Homo sapiens
aaagagttggggaaagggcactccaagcagaaggaacagccagtgcaagaaatgcaaggtaggagtaggcttcatcacccaacaagcgagctggtgtggctgaagcagagtgactagggaaaagagtggtgtaggagggtcactgccttctgaggactgtgatagagaatctgtttcatgcctctcacttagcttccagtggtttgctggtaatggttgacattccttggcttgtagaggcatcatcctaaagtctgcctccatcttcatttggttttctccctgtcagcatgtgcatgtctgtgtccaaatctcccccarttgtaaggacttattggattaagagcccacactattctagtatgatctcattttaacttaactaatgacatctgcaatgactctatttccaaataaatttgcactctgactactactttaacatatggggactactactttaacatatgaatttttcagggacacactttaacccataacatcccccagctagaatataaacttcctgagggcagaaacttgttttttgtttactgccatatctcaagtatttagaagactcctcggcacatggcatatactgaattaatatctgctgaattaatgaatgtacagggaaaattcgtgaagaataatccatacaggtacaaataaagtgtctcattttagacttgataagttgagatacttattagaagcccaagtagaaatgtcaagtaggcaactga

SEQ ID NO: 935837 - DNA, 749 bp, Homo sapiens
aaagagttggggaaagggcactccaagcagaaggaacagccagtgcaagaaatgcaaggtaggagtaggcttcatcacccaacaagcgagctggtgtggctgaagcagagtgactagggaaaagagtggtgtaggagggtcactgccttctgaggactgtgatagagaatctgtttcatgcctctcacttagcttccagtggtttgctggtaatggttgacattccttggcttgtagaggcatcatcctaaagtctgcctccatcttcatttggttttctccctgtcagcatgtgcatgtctgtgtccaaatctcccccagttgtaaggacttattggattaagagcccacactattcyagtatgatctcattttaacttaactaatgacatctgcaatgactctatttccaaataaatttgcactctgactactactttaacatatggggactactactttaacatatgaatttttcagggacacactttaacccataacatcccccagctagaatataaacttcctgagggcagaaacttgttttttgtttactgccatatctcaagtatttagaagactcctcggcacatggcatatactgaattaatatctgctgaattaatgaatgtacagggaaaattcgtgaagaataatccatacaggtacaaataaagtgtctcattttagacttgataagttgagatacttattagaagcccaagtagaaatgtcaagtaggcaactga

SEQ ID NO: 935838 - DNA, 749 bp, Homo sapiens
aaagagttggggaaagggcactccaagcagaaggaacagccagtgcaagaaatgcaaggtaggagtaggcttcatcacccaacaagcgagctggtgtggctgaagcagagtgactagggaaaagagtggtgtaggagggtcactgccttctgaggactgtgatagagaatctgtttcatgcctctcacttagcttccagtggtttgctggtaatggttgacattccttggcttgtagaggcatcatcctaaagtctgcctccatcttcatttggttttctccctgtcagcatgtgcatgtctgtgtccaaatctcccccagttgtaaggacttattggattaagagcccacactattctagtatgatctcattttaacttaactaatgacatctgcaatgactctatttccaaataaatttgcactctgactactactttaacatatggggactactactttaacatatgaatttttcagggacacactttaacccataacatcccccagctagaatataaacttcctgagggcagaaacttgttttttgtttactgccatatctcaagtatttagaagactcctcrgcacatggcatatactgaattaatatctgctgaattaatgaatgtacagggaaaattcgtgaagaataatccatacaggtacaaataaagtgtctcattttagacttgataagttgagatacttattagaagcccaagtagaaatgtcaagtaggcaactga

SEQ ID NO: 935839 - DNA, 563 bp, Homo sapiens
gcagaggaaagtgtgataccaactgccttagttctctactgttgggtaacaagctaccaaaaacatagctgctcatgacagcacccatccattattgcacagttctgtaggtcaggagtccaggtgtggcttagctgggttctccactccagtgtctcactggacggcaatcaaggtgttggctgggctacaatctcgtcgtctcctctgatggttcarcctgggaagggctgcttccaagctcactcaggttgttggcaaaattccatttctcatggtagtagaactacatttcatgccacgtgggcctgcccactggctctctcacaacatggccacttgcttcttcaaggccagtgggagaacaacagcaactctagaaaaacagagccctgtgtgatgtaatgtcacaggagtaagatcccgtgaccactgccatgtaacatcacagactcacggggtggcatcccaccaccttcgctgtgttctactggttagaagtgaggcaccggccctgcccacactcaaggggcagggaatacacaagggcacagacaccaggg

SEQ ID NO: 935840 - DNA, 563 bp, Homo sapiens
gcagaggaaagtgtgataccaactgccttagttctctactgttgggtaacaagctaccaaaaacatagctgctcatgacagcacccatccattattgcacagttctgtaggtcaggagtccaggtgtggcttagctgggttctccactccagtgtctcactggacggcaatcaaggtgttggctgggctacaatctcgtcgtctcctctgatggttcaacctgggaagggctgcttccaagctcactcaggttgttggmaaaattccatttctcatggtagtagaactacatttcatgccacgtgggcctgcccactggctctctcacaacatggccacttgcttcttcaaggccagtgggagaacaacagcaactctagaaaaacagagccctgtgtgatgtaatgtcacaggagtaagatcccgtgaccactgccatgtaacatcacagactcacggggtggcatcccaccaccttcgctgtgttctactggttagaagtgaggcaccggccctgcccacactcaaggggcagggaatacacaagggcacagacaccaggg

SEQ ID NO: 935841 - DNA, 466 bp, Homo sapiens
gtggaagatgtccacatcctaatccccagaacctgtgactgtcattttaaatgacaaaagggaccttgcagatgtgactaaattaatgatctagagatgaggagattattttaggttatccaggggcccagtgtaatcayaggggtcctccacaacagtgagtaggaggaaggcaacatgacggcagacacagagatccaagtgatgtggctataagccgaggaatgcaggccacctggaaaagctggagggcggggagtggactctcccccagagcctccagaggaactgaccccgccgacagcttaagtttagtgcacaaaattcgtttcagatttctgatcaccacacctgtaagaacgatcctaaatttgtgttgtgttaagccataaagtttgtggttaagagttgtccctcactatctgtgggggattgtttccaggaccccctaagtatgcccaaatcc

SEQ ID NO: 935842 - DNA, 637 bp, Homo sapiens
agacttgcatggggtctgtggtccctttgttttggccaatttctcccatttggaatgggaacatttacccaatgcctgtacccccattgtattttggaagtaactaacttgcttttgattttacaggctcataggcagaagggacttgccttgtcttacgtgagactttggacttggactttttggttaatgctggaataagttaagaccatgggggactgttgggaagggataattggttttgaaatgtgaaaaggacattagatttgggaggggccgggggaagaatgatatggtttggctctgtgtccccacccaaatctcatctcgaatcataatccccacatgtcgagagagggacctggtgggaggcgattggatcatggaggcgatttccctcatgctgttctcgtgatagtgggggagttctcaggagatctgayggttttaaaagtggcagtttcccctaagtgctcactctctcctgctgccttgtgaagaaggtagtcacttctactttgccttctgccataattataagtttcctgaggactcccccgcatgcagaactgtgattcaattaaacctctttcctttataaattacccagtctcaggtatttctttatagcagtgtg

SEQ ID NO: 935843 - DNA, 648 bp, Homo sapiens
cagctcgaggaattacccactcaagtgtccatttcctttcagatttcagggtctgtggcctctcctcaggggtctgtgtgtgggttcacagagtgacactcactgaaagctggttctgcccctgctgtctggtggacctcaggaggtcaaatcaaggacgcaagaagggcggagcaggaagaggggaggcagagcagagaaggggacgggccgccrgtccagcagcagtgcgcacccgcgggggcgccgcagcccgtgtggctccgtttgacagcacgtgcaccccgagctcagagcctgcccaggggaactcgggggtgggtgggttgaggggctcacctgacaacagttgctacttaaagtagtactcaccattccaaccatatttttaacagccttcggccagcagattataagaaaaagaaagaaagagagaaagaagagagtttagactcaagcacaggctgttatgcaacatgagctgatcactgtttaggaagcgccacaccaggcccgcggctctgactgggaggggagaggagcaagagtcagcaggggacacacaggagaacggacagccacacccaggccagccgcgtgcggatccaggggctcaggggcagcatcagccaggcctcccttcccagc

SEQ ID NO: 935844 - DNA, 851 bp, Homo sapiens
gccaggcagggtgggttttgatacctgcagcggcagcatccttggccatttcctggaagggccagttgccagacactgagatgcctgttactgcaactgtcccaccagcctggagcacgtgtttctggagacaggcaaattctggaaggctccacctgctctcagactgcrggttgcgtctcaaagcaggctggcagacattttccactcttgatcaatcattttccaaaataagcatagacacagcaacccggagagcagcttcggtttggctgtcggtggcgtgttagttactgtagtggtggcacagaggcgatatacgttaaatattagttctcactgactatagccttttaaacagagcagcgtgtgggtggcagcaggtgagttggctatactgagcttgggctgcccttggttgattcttgtttgtcaggcatgcagggggctctctgtgcgtccaggcatattccctgtctggatttgcttgtgttcatggattttcagcacctcctttcttctggtttgggaatgagtcaggtcctcactacacaaggccagagcagtatgcgtgtgtgggtaggggtgagcaggtgtcattccctgcctcccctcctccttcactgccccagccaccctgaccaccttgctgttctgaggacacactgagccagtgcccactgggcatcaggtgaaaggggacatcccacaagcccaccctcacttctgacaccaatggcaagttcaggatctccaacactgccctgaggtttggtcatttgctagagggactcccagaacccacttaaagctgtcaccctcacagttacagtttctgatggtgaagggat

SEQ ID NO: 935845 - DNA, 794 bp, Homo sapiens
tagtggtggcacagaggcgatatacgttaaatattagttctcactgactatagccttttaaacagagcagcgtgtgggtggcagcaggtgagttggctatactgagcttgggctgcccttggttgattcttgtttgtcaggcatgcagggggctctctgtgcgtccaggcatattccctgtctggatttgcttgtgttcatggattttcagcacctcctttcttctggtttgggaatgagtcaggtcctcactacacaaggccagagcagtatgcgtgtgtgggtaggggtgagcaggtgtcattccctgcctcccctcctccttcactgccccagccaccctgaccaccttgctgttctgaggacacactgagccagtgcccactgggcatcaggtgaaaggggacatcccacaagcccaccctcacttctgacaccaatggcaagttcaggatctccaacactgcmctgaggtttggtcatttgctagagggactcccagaacccacttaaagctgtcaccctcacagttacagtttctgatggtgaagggatacacatgaaaatcagccgagggaagagttgcccagggcagagttgaacgcacccacacagcacctccattgtcctttcaccatggggtcataggcagcgttactctcccggtgatgtgggacaatgcgcatgcagtattgccagccggggaggtcatctgagcctccgtgtccagagtttctgctggagctcacttgcatgggtgtggctgactgtccacatggctcatctgtctccag

SEQ ID NO: 935846 - DNA, 555 bp, Homo sapiens
cagtgctttgggaagcatttcaaaagagaaacctcttgacccccagataccctgttctccagtgagcagggaggggagaacagctcttaaaaggaaaaatggaaaccagatagaagtctcccacctgcctctctagcggagctgatatctgtcttttgggggccctctgggtgggggtgccaccccctgagtcctatacaatgagggctgggccagcttggccatggggctctgtaacctcaagttattatggggaccagctaggatgccattgctgcttatctattgtattagggttctctagagggacagaastaatacgatagatagatatatataaaggggagtttactaagggtattaactcacacgatcacaaggtcccacaatagtccttctgcaagctgaggagcagggaagccagtttgagtcccaaagctgtagaacctggagtttgatgttcgaaggcaggaagcatccagtatgggagaaagatggaggctgggagactaagccagtctagtcttttcatgttcttctgcctgctttttattt

SEQ ID NO: 935847 - DNA, 798 bp, Homo sapiens
ttgtgttggtggtttcaagtccagggtagccccaaacacagtgctgagctatgtagtgtttctgagcacagaaggcgagaagccaggtgtgtcggtgaaactccattcaggcacaagtgctggtggtgtcactctgagtttaatgttcatgaatcaaaatcatatattaaatatagtgaccttaaacaagaacacacataaaacaaagtgtaggtcaggcatggtggctcacgcctataatcccagcattttgggaggtcgaggcaggaggattgcatgagcccaggagtttgagaccagcctaggcaatatagtgagccatcatctctatgaaaaaaawtttttttttattagccaggcatggtggtgtgtgcctgtagtcccagctactcgggaggctgaggtgggaggatcacctgagcttgggagacagaggctgtagtgagccatgatagtgccactgcactacaatctgggcagcatagtgagtccctgtctcaagaaaaacaacaacagaaaaaaaactaacaaacaaaaacaaagtgtagtggtcagtggacaaaaatgtgaccagaggcttgcaggaacccaaccctgtgcttctcctaggagcaatggctcatgatgtgctgagtcagtgttcgtggtgactttgcagaacgtaactaccgcgatcatgagaatcaggtgttgtatttggatagcaatgaacaaagtttctgtcaagaaaatgtcttacagaagttgaacaggatggtttcaagaaagtgaacagactatgggtgagcctgggtgctg

SEQ ID NO: 935848 - DNA, 612 bp, Homo sapiens
cccagtaggggggtgggggagccatcctaagcaaggctctgtttcagagacaaacacagctttccttttaaaccctgtctgctaaccagaaattaaggtattcctcccagggatacagaaattgacataatttgctatcacatacattcttactcaagagatttgtatatatcagtgattaaaacaaagctcagagaggctttgctgtaatgcagtggaaggaacactgactttggagttccaggcccaggctgctggccagctttgtcacttgccccagcgtgacttgtagccagtcacccagtctctgagcyttagtttcctcacctcaaaaggaggatgatgatacctgggccacttggtgggtgacaagatggtacctgcgaggtctgtaacaaacagatgcagggtttagtcactgtagacgtggtggtggtctatgccatgagaatagtttccagaagcagaagtggggtatccaagaaagagttttggagaggagccttcctgctgatataacttaagaaggcccccaagctgcttatctttctggagttcagggtctacaggggcagtatgcagacccctacagagagggaaggcttccagtca

SEQ ID NO: 935849 - DNA, 612 bp, Homo sapiens
cccagtaggggggtgggggagccatcctaagcaaggctctgtttcagagacaaacacagctttccttttaaaccctgtctgctaaccagaaattaaggtattcctcccagggatacagaaattgacataatttgctatcacatacattcttactcaagagatttgtatatatcagtgattaaaacaaagctcagagaggctttgctgtaatgcagtggaaggaacactgactttggagttccaggcccaggctgctggccagctttgtcacttgccccagcgtgacttgtagccagtcacccagtctctgagccttagtttcctcacctcaaaaggaggatgatgatacmtgggccacttggtgggtgacaagatggtacctgcgaggtctgtaacaaacagatgcagggtttagtcactgtagacgtggtggtggtctatgccatgagaatagtttccagaagcagaagtggggtatccaagaaagagttttggagaggagccttcctgctgatataacttaagaaggcccccaagctgcttatctttctggagttcagggtctacaggggcagtatgcagacccctacagagagggaaggcttccagtca

SEQ ID NO: 935850 - DNA, 589 bp, Homo sapiens
gtgggggagccatcctaagcaaggctctgtttcagagacaaacacagctttccttttaaaccctgtctgctaaccagaaattaaggtattcctcccagggatacagaaattgacataatttgctatcacatacattcttactcaagagatttgtatatatcagtgattaaaacaaagctcagagaggctttgctgtaatgcagtggaaggaacactgactttggagttccaggcccaggctgctggccagctttgtcacttgccccagcgtgacttgtagccagtcacccagtctctgagccttagtttcctcacctcaaaaggaggatgatgatacctgggccacttggtgggtgacaagatggtacctgcgaggtctgtaacaaacagatgcagggtttagtcactgtagacgtggtggtgktctatgccatgagaatagtttccagaagcagaagtggggtatccaagaaagagttttggagaggagccttcctgctgatataacttaagaaggcccccaagctgcttatctttctggagttcagggtctacaggggcagtatgcagacccctacagagagggaag

SEQ ID NO: 935851 - DNA, 653 bp, Homo sapiens
ttatccaaggtaaatttcaaatttttatattatccacctcatatatttaaaaagctacagaaataatttcctgaattatttttgaagagtttcaagaactgtcaagttttgaactggaacactatgaaaaatgagactgagtgtctgagttggcttttaagaataaggtgaatctgttccaaaagagatggataaaatgatctacacccaggtctattgatcacgggcactaatacacatagggaagatggcaattatttagcaagatatttccccagattggtggcacattttttatttacttataccctaaatcctgttctgttatggctcttaactttaaatggatgactgcaagtgtgtcccagtgagatgatttctcagttcatggttgaattccacaggactaacagaaaagctccctgccattctctgctrgagttgtgcttctcttccagatcgcaacactttccagttctgacacactggtatatccttccagacctgtctcttggatgctcacaagcttgagcatttatctttgacccatcaaaagtcatgcaaaagcccatgcatataatgcctgtgtagcctgactctactctcaggatctgtttgctgctttatctcagcacattaggtgaatcctgaac

SEQ ID NO: 935852 - DNA, 653 bp, Homo sapiens
ttatccaaggtaaatttcaaatttttatattatccacctcatatatttaaaaagctacagaaataatttcctgaattatttttgaagagtttcaagaactgtcaagttttgaactggaacactatgaaaaatgagactgagtgtctgagttggcttttaagaataaggtgaatctgttccaaaagagatggataaaatgatctacacccaggtctattgatcacgggcactaatacacatagggaagatggcaattatttagcaagatatttccccagattggtggcacattttttatttacttataccctaaatcctgttctgttatggctcttaactttaaatggatgactgcaagtgtgtcccagtgagatgatttctcagttcatggttgaattccacaggactaacagaaaagctccctgccattctctgctggagttgtgcttctcttccagatcgcaacactttccagttctgacacactggtatatccttccagacctgtctctyggatgctcacaagcttgagcatttatctttgacccatcaaaagtcatgcaaaagcccatgcatataatgcctgtgtagcctgactctactctcaggatctgtttgctgctttatctcagcacattaggtgaatcctgaac

SEQ ID NO: 935853 - DNA, 653 bp, Homo sapiens
ttatccaaggtaaatttcaaatttttatattatccacctcatatatttaaaaagctacagaaataatttcctgaattatttttgaagagtttcaagaactgtcaagttttgaactggaacactatgaaaaatgagactgagtgtctgagttggcttttaagaataaggtgaatctgttccaaaagagatggataaaatgatctacacccaggtctattgatcacgggcactaatacacatagggaagatggcaattatttagcaagatatttccccagattggtggcacattttttatttacttataccctaaatcctgttctgttatggctcttaactttaaatggatgactgcaagtgtgtcccagtgagatgatttctcagttcatggttgaattccacaggactaacagaaaagctccctgccattctctgctggagttgtgcttctcttccagatcgcaacactttccagttctgacacactggtatatccttccagacctgtctcttggmtgctcacaagcttgagcatttatctttgacccatcaaaagtcatgcaaaagcccatgcatataatgcctgtgtagcctgactctactctcaggatctgtttgctgctttatctcagcacattaggtgaatcctgaac

SEQ ID NO: 935854 - DNA, 716 bp, Homo sapiens
tgttcatcaagatattggcctaaagttttctttctttgttatgtttttgccagattttcgtataagaatgattctggccccacagaatgagttatgaagaagtccctcttcctcaatttttgggagcagtttcagtaggaatgatatcaactctgctttatacatctagtagaattcaactatgaatctgcctggtcttgggctttttctggttggtaggcttgttgttactgtttcaattttggaacttgttactagtctggtcacagattaaatttgttcttggttcaatctgggaaggttgtatttttccagaaattcattcatttcttctaggttttctagtttgtgtacataaaggtgttagtagtagtctctgagtggttttcatatatccatggggttggtggtaatgtcccctttgtttttttctgattgattgtgtttatttggatcttctttcctttttttattttttagtmtatctagttgtctatccatcttatttattctcttaaataacaaattcctagatttgttgatctttgcatggtgtttcatgtcaaattccttcagttcagcttcaattttggttatttcttttatactgctagttttggatttggcttgctttgttttttactctatctgtgatgttaggttgttaatttgagatatttctaactttggatgtgggcatttagcactataaactt

SEQ ID NO: 935855 - DNA, 588 bp, Homo sapiens
tagttttgtttcattactcttttaggttaagacaatctttaagaccctctgaactagtcaaaattatattccctctaacaaaagccatattcctgtgcctttttataatcttttaacaaaaacacgttttacacaccttgcatgtaaaactgtttctccagttgtcttaattgtatgttataatgttaacttttagcaacttttattttkagtgaaaaacttgataagtaagtgatttttaactatataccggggtggatcctaggacgtcagacagaaatgaagataaggtttgactgttttcagcatagctagcgggcatagctcttcgtatgtccccaggccttatttataatctaatgctccaaagtaggtaaatcaaacaattttcaaaagttaaagaaacactttgaccttaaagcatttagcaaatcggatatctgaccttcatttagaccaaatgtttacattttcaagacattttattttactaataatttttaaaactgtccttatttccaaaagatgaccgaggtcatgtgaacaaaacggcattaaagtttttatttttctgacaaaatatttgac

SEQ ID NO: 935856 - DNA, 602 bp, Homo sapiens
aaacaaatgggatatatcaaactaaaaagcttctgcaaagaaaaggaaacaacagagtgaaaagacaacttacagaataggagaaaatatttgcaaactacttatccaacaggtgattaatatccagaatatacaaggaactcagacatctcaacagcaaactaaacaatctgatttaaaaatgggctaatgatctgaacagatattttctcaaaagaaatggtcaataaatatgtgaaaagctcaatatcactaatcatgagggaaatgcaaatcagagccacaatgggawatcatctcaccccagagttaggatgactattatgaaagtggccaaaaaaataacaaatggtgatgaggatgaagagaaaagtaaattcttacacattgttggtgggaatgcaaactagtatagccgctatggggaacagtatggaagtccttcaaaaaactacaaatagaactaccatatgatccagcaatcccagtactgtgaatttatccaacgaaaaggagatcattatattcaagagacatctataccccatgtttactgtagcactattcacaacagccaagatatgtaatcaacctaggtgtcc

SEQ ID NO: 935857 - DNA, 623 bp, Homo sapiens
gctcacagctgaaggggaatttgcataaggatgaatcataccttgagtatcacacacatctgacttagatgatatttaaatgagactttggatttcagacacttgagttggtgctggaacaagttaatactattggggctattaggatggaatgagtgtattttgcatgtaaggaggccattaattttcagggggcaggggcaaaatattattaattgaatgtttacatccctcyaaaaattcctatgttgaaatcctaacccccaaggtaatggtactaggagatggtgcctttaggaagtaattaggtcatgagggcattcttcatggttgggaatagcacccttataaaagagacgccaaagagttagaccccttccaccacaaaagcacacagtgacaggtaccatcctgtgaaccaggaagcaggcccttaccagacatcaaatctggcagtgtcttgatcttggacttcccagcctctagaactgtgagaaataaatttctgatgctcagaagccatccagtttatgatattttgttatagccgtctgaatggactaagatacatactatccattagtctgtagaggctagaggagttcacaccaaggttaagacat

SEQ ID NO: 935858 - DNA, 656 bp, Homo sapiens
ccctgacactatatgtgaaacaaagctcatccccaaatctctctgctacttgcagagcagcctgcttctcattgtctgttagggtctgattcaaaagtaacattacatctctccaggagagttcaaatatttgagtgaaatcmtggaaagcctctatatatctatcagggtcatctgaaaacttgccaagatctcccttaatttgccctaagttctatagggagaagggaatttgaaccctactgggcccaaattcactgggcatctgttgaggtgggggcaagagagagactgggcttgtttagggcaaggatttttaggagggggtaagtgagaggctggaacactatagactggtaggggtgaacctggaggggcagggctggagagagctggctcctctgctgggggtgcttctgggactcctatctttacttcccggggcttgccccttgcagcctacctgagatagcaaacaggagggctggatcaatcctacactgtcggcaaaggtctggattgccttgcaagttatagaaagcctgcacatatggggtctcagaccatctgtcctcaggtctacagaaaagttcctctttttccactgcactatgtacccatgaagcagtgaaactctggagaataggaattaacca

SEQ ID NO: 935859 - DNA, 681 bp, Homo sapiens
tccctgacactatatgtgaaacaaagctcatccccaaatctctctgctacttgcagagcagcctgcttctcattgtctgttagggtctgattcaaaagtaacattacatctctccaggagagttcaaatatttgagtgaaatcatggaaagcctctrtatatctatcagggtcatctgaaaacttgccaagatctcccttaatttgccctaagttctatagggagaagggaatttgaaccctactgggcccaaattcactgggcatctgttgaggtgggggcaagagagagactgggcttgtttagggcaaggatttttaggagggggtaagtgagaggctggaacactatagactggtaggggtgaacctggaggggcagggctggagagagctggctcctctgctgggggtgcttctgggactcctatctttacttcccggggcttgccccttgcagcctacctgagatagcaaacaggagggctggatcaatcctacactgtcggcaaaggtctggattgccttgcaagttatagaaagcctgcacatatggggtctcagaccatctgtcctcaggtctacagaaaagttcctctttttccactgcactatgtacccatgaagcagtgaaactctggagaataggaattaaccaccctcacctgtgcctccatttctt

SEQ ID NO: 935860 - DNA, 778 bp, Homo sapiens
acatatggggtctcagaccatctgtcctcaggtctacagaaaagttcctctttttccactgcactatgtacccatgaagcagtgaaactctggagaataggaattaaccaccctcacctgtgcctccatttcttcctgctgttggcaaactttgagttttctgggcctgtttatgccatgaagcatggcctccttctttggggtggagggttcagttggcaggaattggtcatgcccgtttacattgtgcctgttgcctggctttggacccactaagacctggtttttctttctagggcctctgcctgaagcttggaatagagttaggtattgaaaaggcattttagaggctgtttgtatctgtttggagtgtctcaaatgtgtcccgtcaaagttctcagccagcaggcgtcattcctctgttaagttccctatcagaaacacagttgggtgttgcggggtggggggccctttcacttagaaaaggaaaaaagagaaaaacagtttaaagggaaagaggggaagattctgggggaagaaaaccttgcttagtgcaagtgggtgcccctaatctctatatcwtttccccaaaccgggttgaattccatggccaggagagaaaaggttccatcggcttggcaggctagaagcaccctgtagggtcatggctaccatctccgctttctcccgccccgctcatagctgttgggctcggcctttgcctgctgtgggcacggctaggcacctgtgggaaaggataaggagaggtgtcctaagc

SEQ ID NO: 935861 - DNA, 618 bp, Homo sapiens
gggtttcaccatgttggccaggctggtcttgagcccctgacctcaagtgatctgcccatctcggcctcccaaagtgctgggattacaggtgtgagccactgcgcgtggccgtgatttgcttttaacaagaagaatgtggcagaagcattgggatgacccaacattcaataacaaaatgaatgtggcttctatcttaggcatctttctttcttcctcttgccctctcacttgtttgctctgacagaagccagctctgaggtgaactgatctatggagaggtccatgtggcaagaaatgaatatctttggccatgagccagtgaggacctgagatgtactaacaaccgtgtgagtgagtttggaaggagatcctccccaagtcaacccttgagatawctgcaaagggctggcatcttcattgcagcctgtgagacaccttgagcagaggcacccagcagaggcactcagctaaggctatctggtttcttgacccacagaaactgcaagataatacatgtctgttgctaagctgcaaaatttgggggtaacttattatgcagacagcaataactaatatacctacatagccccaatcctattaatcccagtaggtacttct

SEQ ID NO: 935862 - DNA, 613 bp, Homo sapiens
tatctgttgtcatgcatgagcagccagatgcaaatcacaaacaaatgagtgtagctgtgttctaataaaactttatttacaaaaacaggcagctggctggatttgatccacaggccatagtttgctgactcctgttttaaacgtattgggaaattattaaaaggttttagaaagaggagttctgagagcaaatttgaaaaattatcccaggctagagaatggattggagggtggagactatggcagaaggatggagagccctcagaaggctgctgtagtgcccaggaaggagatgacagtggctctggacagatggtaacaacagatatgggggaaatttgatacattaaaaacgcatgcagaggtggaaattagaagctgcagaagggttggatgtgggtgaygcacagttgcaaagcggtgggtgcaggtgactgggtgcaggatgatgtaatttacccagatagtcaaggcttgagcatgggtgggtaaccagaagatgggactgagaattcgtctatgtgtcagaaaaagagggcgacaaatactggagattcatagccgggtgaatgaatggccaaatgtcactggtccatggtggggccaatgatat

SEQ ID NO: 935863 - DNA, 599 bp, Homo sapiens
cacctctaattttaattgtcagcaagtgaggaaaaaacatcacccaatttgtggattttagaattctatatctggaaggaacctcaaagttcatgcttgctttgaacttaaatgttgaactgtattaaactggcatttgattgatgcctacaatcccagcactttgagaggccaaggtacgaggatcacttgagcccgagagtttgagatcagcctgggcaacaaagcgagaccctatctgaacaaaaagtaaaaaaaaaacatatctgggtgtggtagcacatgcctgcagtcctaggcatgtgctttgggaggccaaagccggagggtcacttgagtccaggagtttgaggcttcagtgagctatgattgtgccaccrcactccagcacctgagcaacagaataagactctatctctaaaaaaaaaaaaaaaaaaaaccagaaagaaaaaagttcatgcttagtcaaacaggcttgttttacagatgaagacactgagacccagagagacaatttaacttgcccagatgacctacacatggagtagcaattcttactattactatgatttgtttctgtttgtttaagtgagcccagg

SEQ ID NO: 935864 - DNA, 634 bp, Homo sapiens
cctttgcaaagattataaagtgagacagtaaaagagatctgaccaaactgactccattttccctttaagctccaagctgcccttgttccttcctgggcataagtcaaactaactttgggaggaatttagtctatagtttaactttgaaacaaagatgataacagtccctccctgaaacaaactccctccttgcttggggaccagatcatgtttataaaactaacaatttagccacaagattagaaattatggctcaagagtcatgtagctagagmccacaagattcctaactttctcaattgctcctatggataacatcactattgtaaaaccaaagattggtgtttgaggtatttttcagaccctgcattctgatggattagctggtgccacccggactggtaaactgggtcctctgctcttgtggctcacacccaggaactgactcagtgcaagaatacaagctccgactccctgtgatttcatccatgagccgaccaatcagcattctccatttccaagccttttgcccgccaaactatctttaaaaaagcctagcctctgagttttgggggaggctgatttgagtaataattaaactctagtctcgtgtttagccagctctctgtgtatt

SEQ ID NO: 935865 - DNA, 793 bp, Homo sapiens
tgagctataattgcaccactgctctccagcttgaatgagagagcaaaacactgtctttaaataaagaaatacataaatacataaataagatatattacacaatccaaattaaaaacaaaaatcatataatcatctcaacacatgcagaaaatgcgtttaaaaaaaatccaacttcccttcatgataaaagagctcaatgaactaaggttctgtaaaaggaaaatacctcaaaacaatgagaaccattatgacaaacccacaaccagtatcatactgactggagaaaagttgaaagtattctaagaactggaacaagacaaagatgcctatgctcaccagtctgattcaacatagtactggagtcccagtaataaggtctggctctgtgtccccacacaaatcttaccttgaatagtaataatccccaagtgtcaagggcaggaccaggtggaggtaatcraatcatgggggtggtttcccccatgctgttcttatgatactgagtgagtctcaggatatctggaagttttataagcatcgggcattcatttccactgctggcagtcattctctctcctcctgccccgtgaagagctgctttctgccatgattgtaagtttcctgaggcctccccagtcatgtggaactgtgagtcaattaaacctcttttctttataaattactcagtctcatagcatcatgagaatgagctaatatagtaaattgtatggagatagtgcggcactgctgtaaacatacccaaacatgtggaagcaactttggaactgtctgg

SEQ ID NO: 935866 - DNA, 766 bp, Homo sapiens
tgttttatggctgtgtagtattccatggtgtatatgtacaacacttcctttatctagtctactgttgacgggcatttgggttaatttcatgatgtagaattatgtcatctgcaattagggatagtttgacatcctctcttactttttggatgcctttgatttcttccccctgcctgattgctctggccaggacttccagtactatgttgaataagagtggtgagataaggcatccttgccttgtgctggttttcaaagggaatgtttccagcttttgccagttcagtgtgatgttggctgtgggtttgtcagagatggctcttattattttgcggtagctccttcratgcctagtttactgagggtttttaacatgaagggatcttcaattttaccaaaagccttttgtgcatctattgagataaccatgtggtttttgtttttacttctctttatatgatgaatcacatgtatttatttgcatatattgaaacagtcttggatgccagggataaagcatacttgatcatggtggattagctttctacgtgttgctcaatttggtttgctagtattttcttgaagatttttccaactgtgttcatcaaggatattgtcctgaacttttctttttaccttttactggttttggtgtgcatctgcaaggatttggtatcaggatgatcctgacctcacagaacaagttagaaaggtccctcctcctcaattttttggaacattttctgtataaatggtaccagccctt

SEQ ID NO: 935867 - DNA, 567 bp, Homo sapiens
tcgtccacaaacagagatcgtttgacttcctctcttcctattcagatgcccttttttctttcctttgcctgattgctctggctaggacttccaatactatgttgaatagatgtgatgaaagagggcatccttgtcttgttccagttttcaaggagaatacttccagcttttgcacgttcagtataatgtttactgtgggtttgtcatagaaggttcttattattttgaagtatgttccttcaaaacctacttcattgagagttcttaacatgcagargtgttgaattttatcaaaaaccttttctacgtctatagagataatcatttggtttttgtctttagttccgtttatgtgatgaatcacatttattgatttttgtatgttgaaccaaccttgcatcctggggatgaagcctacttgattatggtggattagctttttgatgtgttgcaagatttggtttgcaaatatttttgtggaggtttttttttgcatcaatattcatcaaggatattcacctgaagttttcttttttgttgtgtgtctgccaggttttggtttcagga

SEQ ID NO: 935868 - DNA, 595 bp, Homo sapiens
gacacttgtgactgcattgtgaaattcttccattgtgttattcagctctgcctgacacgttaggttcttctttacactgactgttttgtccttcagctcctgtatcactttattgtgattcatattgtcctgggattgggttttgccatcctcctaaatctcaatgatctttgttcctatccatattctgaattctatttctgttattccaggcagttttgccttgttaagaactcttgttggagggctggtgtgatcatttggagaatataygacactctggccattttagttattagagttcttaggctggttctttctcatctctgtgtgtgattgttcctttaattgcagtgtaaattgaatacagtcaatagacttcttttttggatgttttcaccaggccaaggctttgtgtagagtctttatttgaagctgactttttgtctctggtttcagatggggaaatgttagtaaagtattgttggggttgaagctttgggatgtgatccagcaggtgacacttagccttactggtcagttggtagacccttgcttggttgtgtggctcccctatgtttcctcacagttgcag

SEQ ID NO: 935869 - DNA, 624 bp, Homo sapiens
tgtggcacctttccctgcccattttcctcctgctctggccatgtgaagtgcctcactccccatttgccttccaccatgactggaagtttcctgaggcctccccagaaccagaagccactatgcttcctgtacagcctgcagaacggtgagccaattaaacttcttttctttataaattacccagtctcggttatttatttatagcagtgtgaaaaggggctaatgaaccctcagtaggggacacccaacttcatatctcaagtaccatgacctttttcctgagttcaaatttagaacttccaattgccctctgacagttctacttgcatgttcctgctagcacattaaaggcatcatggcccaaaacaaactcatctttcacactgtctcacaacccccttgcattttcccacctctatcacttgctctttctcaagtttttcctatcyctactaattgcaccaccatatacccagttactcagactcaaaaccttgtttccatgctgtttaggatagtggaaagagtgtgtggactctagtcagacaaggttcaaattttggtttagcaatatgctaataatacatggccctgggcaaattacacaaactctctgtgccttag

SEQ ID NO: 935870 - DNA, 626 bp, Homo sapiens
atcagacattcaaagaagaattggcactaatcctattgacactattccaaagatagagaaagagggaatcctccctaaatcattctatgaagccagcatcaccctaacaccaaaaccaggaaagaacataacaaaaaaagaaaactacagaccaatatccctgatgaacataaatgcaaaaatcttcaccaaaatactagttaacaaaatccaacagcatatgaaaaagataatccaccataatgaagtgggttttataccaacaattcaggaatggtttaacatatgtaagtcaataaatgtgatacwccacataaacagaattaaaaacaaaaatcacatgatcatcttaatagatgcagaaaaagcatttgacaaaatccagtatccctttatggttaagaccctcagcaaaatcggcatagaagggacatgccttaaggtaataaaagccatctatgacaaatccacagccaaccttatactgaatggggaaaagttaaaagcatttcccctgagaactggaacaagacaaggatgcccactttcaccatgcctattcaacatagtactagaagtcctagccagagcaatcagagaagagaaagaaagaaaggacatccaaa

SEQ ID NO: 935871 - DNA, 646 bp, Homo sapiens
attgcccttggctgaagagagctgtccagccctagtcaagcctccttctggagggtagcctgcatacaaatgaggagagtataaaagatccagctccctcatcccaacttgcgatgaccttgaaggtcatctccactgcagagcatcccttatggttggctgaggctttgttgagactgtattgcaacccartgtctcccaccgcccagtccggccttcttcccttccccacaagtgttgatccagagggtgctccctgtacatttcctgcatgttaatcttcatctctaagtctgcttcctggggaactcacctcacaataggattgtgagccacctgacctgcactgtcgttcctaacccttagaccaacttgtctttatagatgagatcattgagattagagaagaaaatggatctggccaaggacatacaactaagaaatggcggtgccacagatggagaaactgacactcagacaggccaactgatctgcccacatcaacgagctaaaaaaatggcaaggccaggatttggccctaggcctgcttaactctgaagaccatgtgcccagtctcctgccaggccatttacatcctcaggaggattgctgcagccccaggacaggcgattgccttttaccaccc

SEQ ID NO: 935872 - DNA, 617 bp, Homo sapiens
taggtgaacagtggcccccagtgtagtttatttgaaaaatgtgtatcacagctttactgagataaaattcccataccatacaatttatctatttaaagtatacaattcagtggtttttagtagagtcacggaattgtacaatcgtcaccacagtcaaatttagaacattttcattactccagaaasaaacttcacccattacagtcactccccacttccccctaaacttcccttccctaggcctaggcagcaactaatctagtttctgtttctatagatttgcctattctggacatttaatagaaatggaatcattcaagtgtgctcttttgtggctggcttctttcacttagcataatgttttcaagattcactcatgttgtagcatggatcaatatttcatttttttttcttgccaaataatattctatcatatggatataccatattttatttatccattcatcagttgatggacatttgggctttctggctattatgggtaatgctgttctggacattcatgcacaagtttttgtatagacatatgtttttcatttctttcgagtgtgtacctaggagtagaattgctagatcatatggtaattccgtgttta

SEQ ID NO: 935873 - DNA, 710 bp, Homo sapiens
tatcccaaagtgctcatgggctaataggggagactaacatgaaaacatgtaactggctgggcgcggtggctcacgcctgtaatcccagcactttgggaggccgaatcgggcagatcacgaggtcaggagatcgagaccatcttggctaacayggtgaaaccccgtctctactaaaaacataaaaattagccagtagcgggtgcctgtagccccagctactcgggaggctgaggcaggagaatggcatgaacccaggaggcggaacttgcaatgagccgagatcgagccactgcactccagcctgggcgacagagcgagactccgtctcaaaaaaaaacaaagaaaacatgtaactatgggaaaataatagtggcattatgggctgggcgcagtggctcacgcctgtaatcccagcactgtgggaggctgaggcgggtggatcactggaggttaggagtttgagaccagcttggccaacatgataaaaccccatctctactaaaaatataaaaaattagctgtgcgtggtggcgggtgcctgtaattctagctactcaggaggctgaggcaggagaatcacttgaacctggaaggcggaggttgcaatgagctaatatcgagccactgcactccagcctgggcaaaagagtgagaccttgtcttaaaaagaatggtggcattataaggttcctgggtgcctaggggcccga

SEQ ID NO: 935874 - DNA, 710 bp, Homo sapiens
tatcccaaagtgctcatgggctaataggggagactaacatgaaaacatgtaactggctgggcgcggtggctcacgcctgtaatcccagcactttgggaggccgaatcgggcagatcacgaggtcaggagatcgagaccatcttggctaacatggtgaaaccccgtctctactaaaaacataaaaattagccagtagcgggtgcctgtagycccagctactcgggaggctgaggcaggagaatggcatgaacccaggaggcggaacttgcaatgagccgagatcgagccactgcactccagcctgggcgacagagcgagactccgtctcaaaaaaaaacaaagaaaacatgtaactatgggaaaataatagtggcattatgggctgggcgcagtggctcacgcctgtaatcccagcactgtgggaggctgaggcgggtggatcactggaggttaggagtttgagaccagcttggccaacatgataaaaccccatctctactaaaaatataaaaaattagctgtgcgtggtggcgggtgcctgtaattctagctactcaggaggctgaggcaggagaatcacttgaacctggaaggcggaggttgcaatgagctaatatcgagccactgcactccagcctgggcaaaagagtgagaccttgtcttaaaaagaatggtggcattataaggttcctgggtgcctaggggcccga

SEQ ID NO: 935875 - DNA, 710 bp, Homo sapiens
tatcccaaagtgctcatgggctaataggggagactaacatgaaaacatgtaactggctgggcgcggtggctcacgcctgtaatcccagcactttgggaggccgaatcgggcagatcacgaggtcaggagatcgagaccatcttggctaacatggtgaaaccccgtctctactaaaaacataaaaattagccagtagcgggtgcctgtagccccagctactcgggaggctgaggcaggagaatggcrtgaacccaggaggcggaacttgcaatgagccgagatcgagccactgcactccagcctgggcgacagagcgagactccgtctcaaaaaaaaacaaagaaaacatgtaactatgggaaaataatagtggcattatgggctgggcgcagtggctcacgcctgtaatcccagcactgtgggaggctgaggcgggtggatcactggaggttaggagtttgagaccagcttggccaacatgataaaaccccatctctactaaaaatataaaaaattagctgtgcgtggtggcgggtgcctgtaattctagctactcaggaggctgaggcaggagaatcacttgaacctggaaggcggaggttgcaatgagctaatatcgagccactgcactccagcctgggcaaaagagtgagaccttgtcttaaaaagaatggtggcattataaggttcctgggtgcctaggggcccga

SEQ ID NO: 935876 - DNA, 772 bp, Homo sapiens
tgcccaggtattcatagccaaactgagcagcaggacacccatcaggttcatcaggaggcctgtccgcacctgaaatagagcccagacagagggaggggtcagcacctgacccaccatacagatggaaacattcagactcagagacaggaagtcactcacccaagatcgcacagccaggaagtgatggagccaggacacagacccaggtcggtaaatgcctgggacccttcaatctttacactaccctaggctgtcactcaaagagctgcaagtgtccccattcattgatggcctctaggttccaggcactgtgtgctacgcagttgtcacagggttatgctgtttaacccagaaagcaaccttacaaaggtcattcttattaatccccattttatagaagagaaaaatgagacctagagaagttgacttgtccaaggtcacctaacttgaaaataatcttgtctgatcactaaacacccccatcccacacacatatacacacacgcatgcacacacacacgcatgcatgtaggaacayacatatgtacacataggtacacacacacacttcaggtccagtccagtcaggtagtcctagtcaagactacccttgtccattgggaagcatttttcttctgtcggtggagaatgtgcccatctgctccctaccctggctggcctcttggaccattcagtccaccttgggctgaaaatccttgttttcccacctgggtcttctggctgccccgccttcacatagcccaggctgaat

SEQ ID NO: 935877 - DNA, 588 bp, Homo sapiens
gcaaatgtgctgttttgttatatgtgtgtggacagcagaattattgataagcttctaaaactgtggattaatccactgatattaaagttgtgcatgaatacacagagcgaaacataaactatcctctggaaatgaagagcctgttccctgacgggagataaaagcccctttccagacaacctctacaggtcccactggttcccactgcctggagtccctcctccsagcctccagcaaatacttttttccaggagagatctttatcctctctgggtcagcccaggacaggcctgggaggaggacaagtcggagggcggggcctgtaataggcagaggcacggcagtgggaatggactccgggttcccgatagcagcttgtttcacagggagcgtcttcacacctcatttttggggccaaggctgcatccacctaccttttcccccagcccccagtggaacactaaagcgcaaatggtatttgaaaagtcaagaaacataaaatcgatttctttctaaacagtatttacatttttacataatatgctcaatatatttttttcagcctccagatgcctcttcagatgaaat

SEQ ID NO: 935878 - DNA, 612 bp, Homo sapiens
agtcaagggtacaaatagaacatcaaattaattgtgtctggaagctagggtataaaactcttccccaggctgttgacacgtggttgagattctgaaggaagaacaaggatttgtcagagacaagaggtggggagagggtggtgggcagaatgattcagaaatatggagcagaagtgygaagtcatggagacctgcagcatcttcagatctggaagagccactgggaacactcaacaaactgagaagtgacgagggaaagggtcctggagattctctgaattgtttcttataagttgccaccatccaacacagcagacacgagcctcacatgatcactgagttcgtgtaacctggagcgtccacagtcagaggtgctgttggtgtaaagtgcaccttggattttgaagacttaatatgaaagaagtttgtataacagctcataaacctttttatattgatgatatcaaaataacaaggttttggatattctacacttaaataaaacttggtattaaaattaatttcagagacaggcacggtggctcacttctgtaataccagccctttgggaggccaaagcaggcagatctcttgagtccaggagttcgagac

SEQ ID NO: 935879 - DNA, 623 bp, Homo sapiens
ccctttaatatcaatctgaaaaacctgcagtggactttatagtttttaaaagctatcatgtcattaatctgcataaaccactaaggaaagccagagagtataaatcaagtgtgatgtagcttataatttgccttcaagaaccaagaaggatgtcttattttctaaaatcttcatgtatcatgcttgaagaaaaaatgaaattataatttcttgtttccaaatatttattagcaatgttctaaatacataatccagacagttaactgtttgggggagactgaatgccacctggtctctggtctygacagctcaattaccctagtagttatcatacatgcatgatgaataatgtgcaggttacactgctcgaatgcaggttgtgtttagcctgcagtatctcttgcatagatttccacatgaagcacttaggatcagacacagagggttattcttttttttattcttttttttttttcttttttattttgaggcagagtctcactctgtcacggaggctaaattgcagtggcacgatcttggctcactgaaacctctgtctcctgggttcagcaagattctcctgcctcagcgtcccgagtagctggaattacaggtgcccacca

SEQ ID NO: 935880 - DNA, 560 bp, Homo sapiens
aaaaagacagtctggtcttgtcttttcatttccctaatggtgtcttttgaaggaaaatagttcttaattttgcagaagtccaattcatcaaacttctatttctggatcagtcttttggcatcataggtaaaaactttttgccaaacaaactgtcatgaagattttctcgtctgttttcttctaaaagttttatacttttaactcttacattttgtctatgactcattttgggttgttttatgaatccatattgtgatgtaaggatctaaactcattttttaacatgtggatttttaattttcccaacacagtttgttaacaagactattcttttctccattgtcaaaaatccgtagaccatgaatgtagggatttagttttrgattctcaaatatgttccattgatctatatgtctatccttataccagcttcacactgtcttgattattttagctttataataagttttgaaatagagaaatttaagtcctccaattttatttatcttttaaaattgttttggctatgttgggtcctctgcatttctttatacatttta

SEQ ID NO: 935881 - DNA, 654 bp, Homo sapiens
cctattaggatgaggaagttcctgcctagtaaattttagtcagaccggttgtctgctctcaaaccctgtctcctgataagatattatcaatgacaatgcatgcccagtgggacatgaaacttcattagcaattttaattttgccctggtcctgtgatctcactctgccctcatttgccttgtgatattttattgcattgtgaagcatgtgatctctgtgatccacaccctatttgtacactccctcccttttgaaatccataataaaaacctgctggctttgcggcttggggggcatcacggaacctgccgacatgtgatgtctcccccagacacccagctttaaaatttatccttttgtactctttccctttatttctcagactggccgacacttagagaaaatagaaaagaacctccattgaaatattgggggctggttcccccgatacggagactcaggcragatggttaaactcagctggggccactggaaagatcttataagtgaggcaacaaaagtcaggccttgaaggatggggagaatctggccaagaagccaggaaagaggctcagggaatcataacccattcatctttccagtttgagttccttcccttcagccttcctcaggtgcacatttctcaggaaaaaa

SEQ ID NO: 935882 - DNA, 592 bp, Homo sapiens
cgcctgcctcggcctctcaaagtgctgagattacaaactgagccaccgcgcccgaccccaaccattcttaaaaaagaaatgcttaggttcttgctacccaaaatgcggtatgggaccagcagcatcagcatcatccgggagtttgctacaaatgcagcttctcagcactggattaagatatctggggaatgcccaagaaatcaacaatatatcacttttgaaattacacaatcagggcctgacagtctttttttttttttaaagctgttctttttaaattttgtgttttcaaactgtcctaaggcttaagactcaaaaaaaattacagggattaatcataggggaagcaaaacccattatatttaaaagttgtgtgtgcataatattttatttcatgggagcatctcatgggactgaaatcttaattttctagtctcaaagagaacgacagttgtrtgatgctactttagctcctttagggaagggcaggtgatacaatactgagcacaacctacatgtctcacaaaaagttcaccaaaaaagttcaggttttccccacacttctttggattaatgatcaggtcctcaaaga

SEQ ID NO: 935883 - DNA, 662 bp, Homo sapiens
ctgggcacttaggtttatggtgatggccaggacgagatgggagtcgtgggttatttccccaggaacttggtcaaggaacagcgtgtgtaccaggaagctaccaaggaagttcccaccacggtaagcatctcaaaagtgactagacaaggactcagatcttggggcaatgtaggccggtgttaaaaatgcatcatgcaacttacaagttgtatagaacaaagcctccaactttcagtggcgacttttctgagataatgaggtttgggggaccatttataactactgtcaaagttgaaagatgagtaaactttctctataccacccccttttgttttatttcagtttactactttttgtctcatcttttttctatattttttcagctttattgggttataattgacaaataaaaattgcatacatttaatgcmtacattatgttttgatatacattgtgaaatgatcatcacattcaagctagttaacacatacatcacctcacatagttacctttgtgtgtgtgtgtgtgtgtgtgtgtgaaaacattaagatctgccctcttagtaaatttcaagtatacaatacagtacctcttttgttttagatgcaagttgtcttgcaaagcagtctatgtaacaaataaagaaaccaaagtcagcact

SEQ ID NO: 935884 - DNA, 564 bp, Homo sapiens
ggaaatctataatatctcttagtagcttaacaactctcaccgtcaataaataatttgttatatgcctttataaacttttcttgttgcaacctaaggccagatccttttgttgggtcctcagaggtaatggagaacagctagccaccatcttccaaatgagagccyttcatcaactcagattgctagcaggagacctttagcctttttccccataatgagcattctccctctccctgtggtgtccaattgccaagcctttaatcatttgttctcacttttttcactttcttgtatacctactaatgtatgggcacttacaatgaagtatcaatgaaagtgaaacgttgcttttatatttctcttggtggagaaaaacaaagctattccttcctgtatcacctcctccccagtacccacagaaaaagacacaaatccttttgtttccacttgagcttgttgtgcaacttctgagttaaggaaagcactgcctttcccagggtaagagggtacaggcaaaacagtaagcaaattaaagactagaacatgaagtggtaagaaagggag

SEQ ID NO: 935885 - DNA, 662 bp, Homo sapiens
tcacttccaatggagtcaaaattcattggaatctggaggctttcaggggcagtcctggggaggacctttttatagccttgcagcttgggaactccagcccaagtgtcagccatgacaattacccccaggagggggtctgaaggggagcggagggtgaggctctctcattccagatatggagactaaaaagttcaagatggaagtaatagcaaaaaaattacagtactaatcacaacagctaccatttctcagcatyagacacagtaactgtatgaaagaagtatgattattaggtctgttttacagatgaggaaactgagacccagaaaggtggaagcacttgtctaaggtcacgcctccaggaagcagtgtgtccacgactccagtccaagtggtcaggctccagagcccacagtcccaggtactgggtggcctccagagtaaacatgcacatttattgacacctccaattgccaggcactgggctaaggccttcagtgcattggctcattcgcagtgtgctttgggaaggacaggctgggattccaaaaggccagactgtgctatgcgtgtagggtgtctcgagtgggaggagaagcgggtggggcacaaagatttagggggcttatgaaggtcaccatgagcagctcccactaatccct

SEQ ID NO: 935886 - DNA, 733 bp, Homo sapiens
gggctcttcaccactaggccgcactgcctctagcaaagggacgcggggaagctcagcagaccttaggcctcccaagggcgccacggtggttcctttgagcccagagtcagctcttaagtccataggccttcctgaagcttctgaaccacttgcccatagctgggcctcaggctggctctcagtagaatgtggagaatggagattcccgcatgtccacttctcctaaaggttttataaggcagtgctgggaatgtgctttataaaaaaggggaagcaccccgacaacagtcactgtttgctcttttaagcaccatcctgagaaggaggaatgttcttcccatttcataggtggggaaaccgaggctcagaagagcaaatttttggccgggcgcggtggctcacgcctgtaatcccagcactttgggaggccgaggcgggtggatcacgaggtcaggagatcgagaccatcctggctaacaaggtgaaaccccgtctctactaaaaatacaaaaaattagccgggcgyggtgcgggcgcctgtagtcccagctactcgggaggctgaggcaggagaatggcgtgaacccgggaggcggagcttgcagtgagccgagatcgcgccaccgccctccagcctgggcgacagagcaagactctgtctcaaaaaaaaaaaaaaaaagagcaaattttttttccaaggtgatagggagagtccgtggctgatgtctgcact

SEQ ID NO: 935887 - DNA, 650 bp, Homo sapiens
accccaaggtgatgtttatttcctaccctgaatgttccacattctacgttccctgcattttcagctcttttttttttttaagacttaattcttgattcttttgacagcttacatcatcctgaaagtaaagtgaaaaagccataccacactacccacttttaatacagatctttgtagattgggaagcataaaccaaccaaaagagtgataattagttctgaattcaagtgaggtttatggaatgtgaaccatttgggtaatcggctggggtggtgccatgaagtggtaattaatttgtttttttccctaaaatgttttacttaattaagggaggtgttgatttatatacacctgtcccctggggatggtttgtaaggcaggagaaaattccaactgtctccccgccacgtttctcatcaaattatttcattacattcagatacacttttgcarcactgattgtgacagattctggagttatgagctcataaatactggggggtggggggaagctggagatgcacacttaatgggaaatgttctcataatcaaaagaatatttcaagctgtgacaatgcaggccaagagagggagggggagccacttcaaagaataacaggatgctgaataacccagcacctgcagctctg

SEQ ID NO: 935888 - DNA, 583 bp, Homo sapiens
ttgggatggccctttggagttgacctgaactagggcaactggaccaggtctctgtaccacagctttggtcagttgttggatgaaggctgcctctggaaggaggcatgaccttggtatgagaccgttttcttctcttgagacaatctccaaagaaggctaatagctgagggctgtcttctggcagcgttcccagaagcyatgggaataaatccttcatttctgtctcagtccatttgtgctgctggaacaaaaaacctcaacctcagtaatttataaaaaaacaaaaatatacttcttatagttctggaggctgagaagtccaagatcaaggtgccagcagattcagtgtctggtgagggctgctctctacttccgagacggtgccttgaatgttgcatcctccagaggggacaaacaccttgtcctcacatggcagaaggaatgaatgggtgaacacacaccctcaagcctttttataaagcactaatcccatccacgcaggcagagccctcatggcctaaccacctctcaaaggcttctcctcttagtactgttgcattggagattaagtttcaacatgaat

SEQ ID NO: 935889 - DNA, 583 bp, Homo sapiens
ttgggatggccctttggagttgacctgaactagggcaactggaccaggtctctgtaccacagctttggtcagttgttggatgaaggctgcctctggaaggaggcatgaccttggtatgagaccgttttcttctcttgagacaatctccaaagaaggctaatagctgagggctgtcttctggcagcgttcccagaagccatgggaataaatccttcatttctgtctcagtccatttgtgctgctggaacaaaaaacctcaacctcagtaatttataaaaaaacaaaaatatacttcttrtagttctggaggctgagaagtccaagatcaaggtgccagcagattcagtgtctggtgagggctgctctctacttccgagacggtgccttgaatgttgcatcctccagaggggacaaacaccttgtcctcacatggcagaaggaatgaatgggtgaacacacaccctcaagcctttttataaagcactaatcccatccacgcaggcagagccctcatggcctaaccacctctcaaaggcttctcctcttagtactgttgcattggagattaagtttcaacatgaat

SEQ ID NO: 935890 - DNA, 682 bp, Homo sapiens
gggaggggctctccagttgggatggccctttggagttgacctgaactagggcaactggaccaggtctctgtaccacagctttggtcagttgttggatgaaggctgcctctggaaggaggcatgaccttggtatgagaccgttttcttctcttgagacaatctccaaagaaggctaatagctgagggctgtcttctggcagcgttcccagaagccatgggaataaatccttcatttctgtctcagtccatttgtgctgctggaacaaaaaacctcaacctcagtaatttataaaaaaacaaaaatatacttcttatagttctggaggctgagaagtccaagatsaaggtgccagcagattcagtgtctggtgagggctgctctctacttccgagacggtgccttgaatgttgcatcctccagaggggacaaacaccttgtcctcacatggcagaaggaatgaatgggtgaacacacaccctcaagcctttttataaagcactaatcccatccacgcaggcagagccctcatggcctaaccacctctcaaaggcttctcctcttagtactgttgcattggagattaagtttcaacatgaattttggagcggacgtgaacattcaaaccatagcaattcctaaaggggtcctggggagcacattacaatgtctgtcacaaaagcg

SEQ ID NO: 935891 - DNA, 604 bp, Homo sapiens
ttttatgttataggttttttaaccacaatcaaaaataacaataaggtaggtcatgatggttcatgcctgtaatcccagagctttgggaggctgaggtcagaggattgcttgaggccaggagtttgaggctgtagtgagtgacaatcgcaccacagcacttcagcctgggcagcagaacgagatcttgtctttaaaaataatttttaaaataaaaataaaacactgcacctggcatataatagagattctataaaggctgacttttatacaaatctcttttcctaattaaggaaacaggagttttaagaggctgagtaacatgccccaaatcatacagctagtaagtaagtggtgatgtgggaatttcaactcagtccaacccaaagtccatgcatgaccttaaccatcagagcacaasgtttcatgcctcgcatctgtttgccatacaggaggctgcgaatgcagagaacttcctcttctatcagtcatctagcacagggaacagaatcgaggctgaaggacagcttcaagccccttctccatccaagctttgagatcaataggctttagcccctctgaaccaaccatgcttaaagtttcagaa

SEQ ID NO: 935892 - DNA, 603 bp, Homo sapiens
aaaaatctatggtggaaaaatttagaacatgaattacatttgagggggttgggggcagaaaatagctggaaagggggaataggaggggacattatatggtgatgatcatgttgtatcacttcataggggtttggtttgcatgggtatatgcatttctcaaaactcagtgaatgcacatcaaaaagaaaaacagaatgggaaagaaaatgaaaaatacatgtcatgttgggggcaggggggatgttggacattatcagatttgaatttttaaaagtcagtctgaaacaaccaattaaaagtgggtaaaatctttttttttcttttttttattattattatactttaagttttagggtacatgtgcacaatgtgcaggttagttacatatgtatacatgtgccatgytggtgtgctgcacccattaactcatcatttagcattagatatatctcctaatgctatccctcccccctccccccaccccacaacagtccccagagtgtgatgttccccttcctgtgtccatgtgttctcattgttcaattcccatctatgagtgagaacatgcagtgtttggttttttgtccttgtgatagtttactg

SEQ ID NO: 935893 - DNA, 803 bp, Homo sapiens
acagtcatgccttcccagtagtctcccaaagtgttaacttgttccagtattaactgaaaagtccaaagcccaaaatcttatgagacaaggcaaggcccttccacctatgagctggtaaaatcaaaaccaagtaatttatttccaggataccatgtgggtacagacattgagtaaacattgccattataaaaggaagaaatcaaccaaaaggaaggtgctacaggcgccacacaagtctgaaacccagcagggcagttattaaatcttagagctccaaaataatctctcttttttgactccatattctgcattcagagcacactggtgcaggggataggttcccatagtcttgggcagctccacttctgtggtcttttcatggatcagccctgactactgctctcacaggttgagtgcttatgatttttccaggtgcatgctgcaagtggctggtggatctaccattctggggtctggagggtggtggcccccttcccatagttacactaggcagtaccccagtggggactctgtgtgggggctccaaccccacattttcccaccacrctgccctagtagaggttactgtgagggctctgcccctgaagcaggcttctgcctgggcacccaggttttctcatacatcctctgaaatctaggcaggggctgtcaagccttcactcttgcactctgtgtgcccacaggcttaacaccacgtgaaagccaccaaagcttacagcttgcgctctcccgagtagcagcccaagctgtatctggggccctttgaatcatgactgatgcca

SEQ ID NO: 935894 - DNA, 568 bp, Homo sapiens
gtgtttggagcaggaaagccacatactccgagcagccttttacaatggcccacctgctgtactgggaccttatcactccatgctgggctcagattaacaccagtgaaaaacatctcaagatctgctcctgtgtggtttctcctggtcagtcacccaagaaccagccctgcagctttctccactggcccacggcacagactccagagtggccgccgcactcgccctgtatgggccctgcagcttctgtgccatcacttccccgagctcactcacaccttgcaccccagcaccrggccacccagcaccgtccacactgtgcagtcgtgtgcttcccgagagttggttatatttgttcccaaacctgtttactccagtcgtacttgctagtgtaaatacaccctgcaattaaatattacataaaaaaatgaacatctgagtgcaaataagaaggccgtcgcttctataaataaaggttgaatttttggaaagactcaaacaaggcaaggtactaaaactttcttcaaatttttttttctgtgaaacagcaataaagcactgagggaaaaat

SEQ ID NO: 935895 - DNA, 568 bp, Homo sapiens
gtgtttggagcaggaaagccacatactccgagcagccttttacaatggcccacctgctgtactgggaccttatcactccatgctgggctcagattaacaccagtgaaaaacatctcaagatctgctcctgtgtggtttctcctggtcagtcacccaagaaccagccctgcagctttctccactggcccacggcacagactccagagtggccgccgcactcgccctgtatgggccctgcagcttctgtgccatcacttccccgagctcactcacaccttgcaccccagcaccgggccacccagcaccgtccacactgtgcagtcgtgtgcttcccgagagtyggttatatttgttcccaaacctgtttactccagtcgtacttgctagtgtaaatacaccctgcaattaaatattacataaaaaaatgaacatctgagtgcaaataagaaggccgtcgcttctataaataaaggttgaatttttggaaagactcaaacaaggcaaggtactaaaactttcttcaaatttttttttctgtgaaacagcaataaagcactgagggaaaaat

SEQ ID NO: 935896 - DNA, 568 bp, Homo sapiens
gtgtttggagcaggaaagccacatactccgagcagccttttacaatggcccacctgctgtactgggaccttatcactccatgctgggctcagattaacaccagtgaaaaacatctcaagatctgctcctgtgtggtttctcctggtcagtcacccaagaaccagccctgcagctttctccactggcccacggcacagactccagagtggccgccgcactcgccctgtatgggccctgcagcttctgtgccatcacttccccgagctcactcacaccttgcaccccagcaccgggccacccagcaccgtccacactgtgcagtcgtgtgcttcccgagagttggttatatttgttcccaaacctgtttactccagtcgtacttgctagtgtaaatacaccctgcaattaaatattacataaaamaatgaacatctgagtgcaaataagaaggccgtcgcttctataaataaaggttgaatttttggaaagactcaaacaaggcaaggtactaaaactttcttcaaatttttttttctgtgaaacagcaataaagcactgagggaaaaat

SEQ ID NO: 935897 - DNA, 529 bp, Homo sapiens
cagtcctttttccattattaactgaagaaaaatgggtttcctttacaatttttttaatattaggagacaaaaaaaaagtcaaaaggagacaaatcaggtctgtaaggtgcatgcctaatgattttccatcaaaatattccccaaattgcccttgtttgatgaaaggaatgagcaggaacattctygtggtggagaaggactctctggtaggctttcctgggtttttttgctgctgacgctttggctttctcaaaacactgtcataacaagcagatgttattgttctttggcctcataggagtcagtaagcaaatttgagcagcccaaaaagctgttgtcatgacttttggtctagcccagtgctcttgtattttgactgggtcactcttggtagctgttgctttggttgtgctttgtcttcgggatggtactggtgaagccatgtttcacttcctgttacaattctttaaagaagtgcttcaggagcttgattccacttgtttaaaattttcattgaaagctcgtcact

SEQ ID NO: 935898 - DNA, 529 bp, Homo sapiens
cagtcctttttccattattaactgaagaaaaatgggtttcctttacaatttttttaatattaggagacaaaaaaaaagtcaaaaggagacaaatcaggtctgtaaggtgcatgcctaatgattttccatcaaaatattccccaaattgcccttgtttgatgaaaggaatgagcaggaacattcttgtggtggagaaggactctctggtaggctttcctgggtttttttgctgctgacgctttggctttctcaaaacactgtcataacaagcagatgttattgttctttggcctcataggagtcagtaagcaaatttgagcagcccaaaaagctgttgtcatgacttttggtctagcccagtgcycttgtattttgactgggtcactcttggtagctgttgctttggttgtgctttgtcttcgggatggtactggtgaagccatgtttcacttcctgttacaattctttaaagaagtgcttcaggagcttgattccacttgtttaaaattttcattgaaagctcgtcact

SEQ ID NO: 935899 - DNA, 675 bp, Homo sapiens
atgatttttttaatgggaaaatatgtacatgccactgtaaatcagttaactagggggttggggatgaagagaggatggttaatggatgcaagcacataatcagatagaaggagtaagttctagtgttctatagcacagtagggtgactgtagttaacaagaatgtattgtgtatttcaaaacagccacaagaaaagatttgaaatatttccaacacacacacatacaaataagttaactagtatgaaaatattgaaatacctaacgcctctttttttttttttttgagatggactgttgctctgtcacccagggtggagtgtagtggcgcgatctcagctcactgcaacctccacctcctgggttcaagcaattctcctgcctcagcctcccgagtagctgggattacaggcgcacggcaccatgccyggctaatttttgtgttttcagtataaacgggttttccaccacattggccaggctggtcttgaactcctgacctcgtgacccgcccacctcggcctcccaaagtgctgggattacaggtgtgagccaccatgtctgaccatgcctcttcttttccttagtccttccatacctcggagataactcttattaataggagcccctcatcttccatccactcctcaccactttaaccatcttcatggttaga

SEQ ID NO: 935900 - DNA, 569 bp, Homo sapiens
gatccagaaaatgtatttaatacaattcagcaaacgatgtcagaaaccctcagcagactatgaagagaaggaacctagcctgaaataaatgttttctactaagcttacagagcaaatatcatccctaattttgaaaattataaaatgatgaaagtttcaccgtttcttttttttttttttttttttactggaaaccaaacaaccatgccaaactcagtctttactrtttcactggaaataagtgcaataaggcaagtaaaactaaatggtaatagaattggaactggagaatcaaattgtcatttttcaaagatagtatgattatattcatataacttccaaaataatgtacagaaaaacttatcaaattgataagaaagtttaccaaggctatgcatacaaaacttgtacaaaatcaatacataaaaataacagatatttagaaaattagattaaaatacattatttacagtagtatcaaaaataatctatcacctggaaataattctcacaaaagatatgcaaggtttttacaaaaaaaattataaagctctattgagagacactaa

SEQ ID NO: 935901 - DNA, 702 bp, Homo sapiens
gagagaagtctcaacatctcacttagagctgagaaagaaaagggctgcatgtagagcagggacgaaacctcttctggttgtgggatttatttagtgatgagattgtaggatgaatttctactgagagaagcaactgaagcagcaagggttgattgagcttgtcaggtggtgtttaatcagtttccacacctgggtagtctgaaggatgagggctgcttcctatctctttaaccattttattaaagccaagagagttggtaaaactgaaacagagcaagctttggaaatgaaaaatttttttttctcgcacgcctgagaaaggcaaccctagccttaagtagtaagaggaacaaggtagagttgttccacttcctcctmctgaaagctctacctgactcccccagctggaagagccacccctttgtgatgtttcctcagcacccaggacatattcttaaatcatttcctgcttgtgtgtgtctctcccataaaactgtgcacttcataggcattgctgtcttccctgtacctctcatggtgtctacaatatgtgctctataaatgatgggcaaatgatagatcccgccatacaggtttaaaatttgtatttgaattcctttgatatatcagaaccgtccccatttctaccaaggcagaaaatttccaagttgttctcaatgaatagagtcagcattttggggc

SEQ ID NO: 935902 - DNA, 610 bp, Homo sapiens
gtgtctagcgggcaataggatcatcatggcagatgggaggcaagactagattgcagctccggacatagaagcttgcggagacacacgttgtgaattttagctccaaattaactgtaagaacaaaccagcaatcccaagaggacccacagaccctctgaaggaagcggactgctcctgcaggacatgggagacaccccaaatactgtgggtgccccaactgtggaagtgggaaagggagagcctcctctcctgaayacacacccccccactggagaagctgaaagtatgtttgcaggagaagtttccaactttacctagagctgagtcaatttagagagccgagcaaaatataggggtagaggaagcagcagaaaggccctggtagctcactgggtccccgagagggccattcctgcctggcaccatggggatccatcggcagagcagccagaggagtggggttgtgggggtaaaactccacagggagaaggaaatctctagctgaactgtgaaacgatttgaatagggcgaaaagcctcctggccagaacttgggggagggcacaaatccagtgtgcagattccacagttgggggaagaaccaagccctt

SEQ ID NO: 935903 - DNA, 585 bp, Homo sapiens
ggggatccctgctcaactatggcagactagtgtaaactagccatcagaactgggcaagcctgggttcaaatgtccatttgttgcttagtgacctagggcaaatgatttttagctcattttttactgagatgtgatttacatacaataacatgaagattttaagtgtacagttccatgagttttgataaatattaacactcatgtaaccagcatcccagtccagatagagaacatttccgtcatcccaggaagttccctcacatccctttatagacagcacgccttatccccacctccagaggcaamtacttacctgatttctgttaccaatgctttctttaagttcaatttaggtatattaaccatgcttaagttctagaacttgatatgcagcataaacatttgtgtgtctgtcttctttttgctcaatgtaatgtcttcaacattcatccacgatgttgtatatatccatagtttgttccatttaattgctgagtaatattatattgtataaatataatacaattggtttatccattcacctgcaggtggacatttgggtttgtttccaagttggagctatta

SEQ ID NO: 935904 - DNA, 585 bp, Homo sapiens
ggggatccctgctcaactatggcagactagtgtaaactagccatcagaactgggcaagcctgggttcaaatgtccatttgttgcttagtgacctagggcaaatgatttttagctcattttttactgagatgtgatttacatacaataacatgaagattttaagtgtacagttccatgagttttgataaatattaacactcatgtaaccagcatcccagtccagatagagaacatttccgtcatcccaggaagttccctcacatccctttatagacagcacgccttatccccacctccagaggcaactacttacctgatttctgttaccaatgctttctttamgttcaatttaggtatattaaccatgcttaagttctagaacttgatatgcagcataaacatttgtgtgtctgtcttctttttgctcaatgtaatgtcttcaacattcatccacgatgttgtatatatccatagtttgttccatttaattgctgagtaatattatattgtataaatataatacaattggtttatccattcacctgcaggtggacatttgggtttgtttccaagttggagctatta

SEQ ID NO: 935905 - DNA, 585 bp, Homo sapiens
ggggatccctgctcaactatggcagactagtgtaaactagccatcagaactgggcaagcctgggttcaaatgtccatttgttgcttagtgacctagggcaaatgatttttagctcattttttactgagatgtgatttacatacaataacatgaagattttaagtgtacagttccatgagttttgataaatattaacactcatgtaaccagcatcccagtccagatagagaacatttccgtcatcccaggaagttccctcacatccctttatagacagcacgccttatccccacctccagaggcaactacttacctgatttctgttaccaatgctttctttaagttcamtttaggtatattaaccatgcttaagttctagaacttgatatgcagcataaacatttgtgtgtctgtcttctttttgctcaatgtaatgtcttcaacattcatccacgatgttgtatatatccatagtttgttccatttaattgctgagtaatattatattgtataaatataatacaattggtttatccattcacctgcaggtggacatttgggtttgtttccaagttggagctatta

SEQ ID NO: 935906 - DNA, 587 bp, Homo sapiens
caaatgaatgcagttttgctgttagattcattcctgggtaactactgcttgccattaccaatgatatctaaataatttgttgtgtcgtataggaagaaacccatttttgtacattcatacaatcagcaacttggaacttggatttattttaaatatacacaatcaaatcaacagtgaatatgacagttttatctcttcttttacatttatttctttttcttttcttgctgcgctggccagaacagaaagcatgatgttaaatagaagcaatgaatctggacatctttgttctgttcctgattttaaaggaaatatttctgacatttcaccaggaagaataatttcctttaagtttagaccaatgkttctcaaacttctgtgtgttttagaatttccttgaccactcaatcacaacaatcacagattgctggatcccagctccaggattcctgattcagtaggtctaaggtaggattggagaattttcatttctaacaaatttccaggtgctactgatgctgctggcccaggggccatgttttgagactcactggattagacataaattttgctggagactgacagct

SEQ ID NO: 935907 - DNA, 452 bp, Homo sapiens
agctgcagattcagtgtctccacctggatgtccaaactcagcctgtccaacacttaattaatgacctttcccaaactcacaccgaactcttccccacttaatggcacctctgtctttcaagggctctagccaaaacccactagccrtcctcagcccctctcctctgacactccatttccaatacatcagcaaatgttaccagctttacctgaatactacaaccactggtccccatctccacagccaccacccccccagtccaagccatcatcatctcctgcctggactaacacagccatttccctcctggtccccttcaccctcccaaaagtctgttctctacacacacagccagggagatccctttaaatatgtacaggagatcagtcaatccatgcctttaaaatctccatggcttcccactgcacttaaaatccaaatctttccatggt

SEQ ID NO: 935908 - DNA, 646 bp, Homo sapiens
acagagtctgagagcagagccgacaggacctcctcatggcgagacatgggggtggggaaagagggacaccaaatgtaatcccaaggtttggcctgagcaaccagaaggacagaggggctgtctgctgagctggggatggaggggktggtggggaggtggtctggggaaaggcatgagtatgcttggtaagagatgcctgccagacactcaaatgcagaaactcaacgggccggaagacaagcccagggtctaggggagaggtccgggctgaagtcatccaggtggaaacggagtttaaggccatgggaatgtccacacaaatcctgtacatggaccttcagagcaacatgactcacaatagccagaaagtggaaacgacccaaatgtccatcagctaatgagtgcataaacacaacgtggtccagccacacaacggaagatgattcagccacaaaaaggaaggaggcaccgacacgctccaatgtggctgaaccttgaggacatgagcctaagtgaagccagccaggcacgaaagaccagcactgtgtgattccacttggaggaaatatccagaataggtgaactgacagaggcagaaagtagacaagtggtcggcaggggctggaggaggggaggatggacagta

SEQ ID NO: 935909 - DNA, 646 bp, Homo sapiens
acagagtctgagagcagagccgacaggacctcctcatggcgagacatgggggtggggaaagagggacaccaaatgtaatcccaaggtttggcctgagcaaccagaaggacagaggggctgtctgctgagctggggatggagggggtggtggggaggtggtctggggaaaggcatgagtatgcttggtaagagatgcctgccagacactcaaatgcagaaactcaacgggccggaagacaagcccagggtctaggggagaggtccgggctgaagtcatccaggtggaracggagtttaaggccatgggaatgtccacacaaatcctgtacatggaccttcagagcaacatgactcacaatagccagaaagtggaaacgacccaaatgtccatcagctaatgagtgcataaacacaacgtggtccagccacacaacggaagatgattcagccacaaaaaggaaggaggcaccgacacgctccaatgtggctgaaccttgaggacatgagcctaagtgaagccagccaggcacgaaagaccagcactgtgtgattccacttggaggaaatatccagaataggtgaactgacagaggcagaaagtagacaagtggtcggcaggggctggaggaggggaggatggacagta

SEQ ID NO: 935910 - DNA, 594 bp, Homo sapiens
actactctgaacaatatacctgtggatgtaatttacaagatggagtaataaacttttatcatgtttaaaccatacatatttgaggtttttctggtatgtgaaatcaaactatgaagcaaactgcaaaaattgccctccaaattattggtggtagtttcctatgggagtaggaatgagattagagagtggtgataagaaagatggtcatattttgcctttgatacaagtgtattgttaaaatastttacaaaaaacatttatccacgcattagttttataataaaaaataataatgaaataaaagagcaaggtattgcaagtcactgaaaaagattacccaaacattttgtggatatggtcatgtaccacataatgacatttcagtgaatgatggactgcataaatggttgtggtcccattaggattataaggagctgaaccttttccattgtcgagtgacctagccatggtaactgataaagtttggctgtgtctccacccaaattgcatcttgaattatagctcccataattcccacatgttgtgggagggacctggtggaagataattgaatcatgggggctgtttccccca

SEQ ID NO: 935911 - DNA, 637 bp, Homo sapiens
gtccagttttatagccatttatagcagaagggcaaatttggtatagttaactctgccattgccagaggctgttcacttagatttgtcttgtaacatttttctgtagtaagtaaaggcagggatcctgtacccattttataggttaaataatgcagagttgccaagaaataagagggttggaatcacatactgggttggttggtaggtaggtcatatgatccaggaactcttggtccttgcaaggagataggaggaaatgctcaaatttgtctccccaaatgggggcctgggttgaggtttataagcatatggtaatgaggcgtgaatgaggtgactggattgatcttggaatgaggtgattgattggatcttacaataaggygatgatgttgggggtcatgatctaactggaatccaccatggggtgactccagggctcaatctgattggatcctggatcctgccatgcagtgtccacttctgttttgttttgttttgttgagatggagtcttgctccattgtccaggctggagtgcagtggcatgatctcagctcactgcaacctctgcctcctgggttcaagcaattcttgggcctcagcctcccaagtagctgggactacaggtgtgcgccatc

SEQ ID NO: 935912 - DNA, 613 bp, Homo sapiens
acacaaaggccgaggcgcggacctgctgttcctttcatgccaatcagtcctggggttgtaatgactacaattttctgatttgaagtcaaaaccaaatggcccagaagagtgattcagactccacgtggccctcttcctgagaagaagaagcacaaatggatttttctttcttaagcccaattgtgtgctgctcatcgacccctcatcatttctgagctctattttcttccctcctgcttgaggcacaattaacggaggcccaraaagttttttgcttcctgtgtcttggctttgtgggtatagcttggccttggtgctgagaaaatgccgaggagcccaaagccctggagttgccttgggagagtcgctcacccttctgggcctcaggatggagggtccaggggctacagagctgtcagcctatgccctgagctgggactctgtggaaatgtgggtagcccagtctgcccagggtgactgactcagactctccaggggtcattgactctttgggtcaaacatctgctcttcaccatgtgaattttaaagtgtaaaccagctgggcacagtggctcacacctgtaatcccagcacttcggaaggccaaggcgag

SEQ ID NO: 935913 - DNA, 613 bp, Homo sapiens
acacaaaggccgaggcgcggacctgctgttcctttcatgccaatcagtcctggggttgtaatgactacaattttctgatttgaagtcaaaaccaaatggcccagaagagtgattcagactccacgtggccctcttcctgagaagaagaagcacaaatggatttttctttcttaagcccaattgtgtgctgctcatcgacccctcatcatttctgagctctattttcttccctcctgcttgaggcacaattaacggaggcccagaaagttttttgcttcctgtgtcttggctttgtgggtatagcttggccttggtgctgaraaaatgccgaggagcccaaagccctggagttgccttgggagagtcgctcacccttctgggcctcaggatggagggtccaggggctacagagctgtcagcctatgccctgagctgggactctgtggaaatgtgggtagcccagtctgcccagggtgactgactcagactctccaggggtcattgactctttgggtcaaacatctgctcttcaccatgtgaattttaaagtgtaaaccagctgggcacagtggctcacacctgtaatcccagcacttcggaaggccaaggcgag

SEQ ID NO: 935914 - DNA, 628 bp, Homo sapiens
attctcctggctcagcctcccgagtaactggcattacggacacctgccaccacgcctggctaatttttgtatttttagtagagacagggtttctccatggtggccaggctggtctcaaactcctgacctcaagtcatctacctgccttggcctcccaaagtgctgggattcagatgtgagccactgtgcccggcctacattgacagttttaaaaggtatagtcaggtgttttgtggaatgtccctcaatttgggtttttgcaagatgttttcctcgtattagactgagcttattgattttggggaggaagatgtcagaagggaagtgtgcttctcattagcctatcagaggtccagsctgtcaatggtaatgttggccttgatcatataggattatattgagaattcagtgacatcacccaagtaaggtgcttagggcacacagcaaacccatggttagacaaatgggttgagtgagtggttattgaggattttgactttgtcaggtaatgtgtcgatttcagacaaagaagaatcagacctgattcctgtcttcaaggacccttcggcctgaggtgtcgatgcatccttcatctcccatccagtgaccttgatcacctttgctttgt

SEQ ID NO: 935915 - DNA, 614 bp, Homo sapiens
aagtgcaaaagacaattcaatgaggacagggtagccttttaaacaaatagtgcttgaagcatttggatatccatatgcaaaaatatctaaactttgatctgtaccttctaccatatataaaaattwaaaaaaatggatcatggatccaaatataaaacataaactataaactatgaatatatacatataagtataaatccaaatataaaacataaacctataaaacttctagaagagacaggagagaatctttgtgactttggattaggcaaagagttcttagataagacaacaaaagcataagtcaaagaagacatggaccaactgcctttcatcaacattaaaaacatttggtcttcaaaagatactgtcaagagagaacacaaagataagccacaggctgagaggaaagctttgtagaacaaatatccgctaaaggacttatatccagtatatttaaggagctcttaaaattttatattaagaatacaaagaccccccaaaaattgaacagaatatgtaaacagagactttatcaaaaaagataaatagatggtgaataggtacatgaaaagatgttcaacatcatgagccattagggaagtggaaattac

SEQ ID NO: 935916 - DNA, 604 bp, Homo sapiens
gcatgtttgaaataagaatttgattgttgaaaacagattgaaagcctctacaacagtggttttcaactggaggcaattttgttctccagcgtacatttggcaatgtctggagacacttttggttgtcacaactgggtgggggtcggtgggagggatggtaggatagtggcatctaatggtagaggccagggatgtgmtaaacatcagaatgtaccagacaatcccccggagtaaagaattatctggcttaaaatgtcagcagtgctgaggttgagaaaccctgatctaaaatctaagatcatttgaatctttaccaccaaacatctaccctccctccttccctctctgtctccctttcttctttcattcttccctcctctcctcttttcttttttttcccctccctccttctctttctttcctacctcctcccttctaaacaagatagatatatgcccaggccctcagggaatttatcttgagaggaacatctcagacaatataggcataaaccagtgaagtaatgatgacaaatgctatgcaggatgcggtaaggaagaattacaggggggaccacccttggatggggtgatcagggaaggcc

SEQ ID NO: 935917 - DNA, 713 bp, Homo sapiens
agacagagagattgagtctatggtaagcagtcatggctcatggaaagaggggacaatgagaaattccctgtggcaggaatgaccaatatactcctaggaagtatcgtgtccagcattaaatttgaagttgttctttgttctataattgttttcctacccataaacgtttaataagtctcctatgtacaacagccttgtattaatgaagtcttgaaggactgaaggaaggaagaagtgtgcaagttagagttcttatttagcttcaggcagggaaaaatggaaaaatggattctgactaagcagcagaggaatttattattgggtaagccagtgacwctgtgacacagggactcatacaagtcacccttcaaccactgggtggatgtggctggcctttagataacctcttactcggtctcttcaaaacatctctttccttccgtccttctgatatgatgcgcaagagcagatgagggcagggatggcaaacgtgagcccttctacttcatccttggcagacatcactaactgatctctgtgcaagttcttatggagctcaggggcagctccctggaccctttatatttcctgttccgggcagtcattactaacagatcacagatgatatgtgaaatacaatttacttctgttccagggtccatatgacacctctttcaaggcaatgtgtgtgcaatttaaatgacactatctgt

SEQ ID NO: 935918 - DNA, 628 bp, Homo sapiens
catgtatctggtaagagtctagtatccaaaatatataaagtaggctgggcatggtggctcatgcctgtaatcccagtactttgggaggccgaggtggacagattgcctgcctgagttcaggagtttgagaccagcctgagcaacatggcgaaaccctgtctctataaaaaaatmcaaaaattagcagggcgtggtggtgcatgacagtagtcacagctacttagggggctgaggtgagaggatcacttgggcccgggaggtcaaggctccagtgagccacgactgcaccactgcactccagcctgggtgagagagtgaggccctgtcgcaaaaaaaaaaaagaaaattatatatatatatatgcgccatatgccaaaatatataaagaacttttataattcaacaaaaaaagacaaacctagttcaaaaatgggcaaaggatttcaacagatatttctccaaagaagatatacaaatgaagtcattagccattagggaaatgtttatcaaaatcacaatgagatgccactttatgcccactgggctggctacaataaaaagtagaaaataagtgttgatgaggatgtggagaaactgaaatctttgtacattactggtaggaatataa

SEQ ID NO: 935919 - DNA, 593 bp, Homo sapiens
aattattacaaacatatttagaagaaaacaaaatgcttttcaagatcacacagaaggtctaaaatgttaaaacagggaaaaagggctcagcaaaagttaaaaccatataagggaagaaagttattttttcaccagcaaaggaaaaaacttytcttccagcgaatcttacagcacaaaagacactggcctcaatcacctgtttaagtcaggaatcttcaaatttttttacgaagagaaactatttaaaattttcccagagcctcgacattattcagagaaggagggaaagagagtagagaaaaagaaggaaaagagcctagtggtgccagtggtacctccaaggcagaaggaagtttcagtccaataccagccactatttcctgagcctgtactgtgccaggcaccatgcaaaatgcttcacatacatcaactcatttaatcctcacaagagccacacccttcattgctatcctagagattctagtcttaattctattttacatcttacataactttccccaggccacacagctcataaatggcagagctacaattcaaaccagggcctgtctaataccaaggctcaggttttt

SEQ ID NO: 935920 - DNA, 478 bp, Homo sapiens
caccatttctggtgactatcattttgctgcactgtaaataagaggaataatatataaccaccacaattgctaccaaacttttactccaacccatgactcccaggatggtttgaaaataggagaaaaagaggctaagcatcattttatgagatcttaatgagcttttatgctttgggtatccagaaactcaaagaattaaaaaaaaaaaaaaaaaaaaaaaccttcgtttttkgttttttgttttttttttaaacttacttggaccttgatttttctcatacgtaaaatcaattagtattctcaacctcataggttttgagaagaattaaatatgaaaatgaatataaacatgtgacactgagtaggtttcaataatcacttgttgaatgaaaaaccataagctctatgggggtaggagatattaatatgtcgattttattcattaaaagatagcacagtatctaccacataactaatg

SEQ ID NO: 935921 - DNA, 478 bp, Homo sapiens
caccatttctggtgactatcattttgctgcactgtaaataagaggaataatatataaccaccacaattgctaccaaacttttactccaacccatgactcccaggatggtttgaaaataggagaaaaagaggctaagcatcattttatgagatcttaatgagcttttatgctttgggtatccagaaactcaaagaattaaaaaaaaaaaaaaaaaaaaaaaccttcgttttttgtttttkgttttttttttaaacttacttggaccttgatttttctcatacgtaaaatcaattagtattctcaacctcataggttttgagaagaattaaatatgaaaatgaatataaacatgtgacactgagtaggtttcaataatcacttgttgaatgaaaaaccataagctctatgggggtaggagatattaatatgtcgattttattcattaaaagatagcacagtatctaccacataactaatg

SEQ ID NO: 935922 - DNA, 478 bp, Homo sapiens
caccatttctggtgactatcattttgctgcactgtaaataagaggaataatatataaccaccacaattgctaccaaacttttactccaacccatgactcccaggatggtttgaaaataggagaaaaagaggctaagcatcattttatgagatcttaatgagcttttatgctttgggtatccagaaactcaaagaattaaaaaaaaaaaaaaaaaaaaaaaccttcgttttttgttttttgttttttttttaaacttacttggaccttgatttttctcatacgtaaaatcaattagtattctcaacctcataggttttgagaagaattaaatwtgaaaatgaatataaacatgtgacactgagtaggtttcaataatcacttgttgaatgaaaaaccataagctctatgggggtaggagatattaatatgtcgattttattcattaaaagatagcacagtatctaccacataactaatg

SEQ ID NO: 935923 - DNA, 671 bp, Homo sapiens
agcagcgaggctgggggaggggcgtctgccattgctgagtcttgagtaggtaaacaaagctgcccagaagctcgaactgggtggagcccaccacagctcaaggaggcctgcctgcctctgcagactccacctctggggagcagggcatagctgaacaaaaggcagcagaaacttctgcagacttaaacttccctgtctgacactttgaagagagtagtggttctctcagcacggagtttgagatctgaaaacacacagactgcctcctcaagtgggttcctaacccmtgagtagtctaactgagagacacctcccagtaggggccgactgacacctcatacagacaggtgcccctctgagacgaagcttccagaggaaggatcaggcagcaacatttgctgtactgcaatatttgctgttcggcagcctccaatggagataccctggcaaacagggtctgcagtgaacctccagcaaactccaacagacctgcaggttagggtcctcagtgttagaaggcaaactaacaaacagaaaggacatccacaccaaaaccccatctatatgtcaccatcaccaaagaccaaaggtagataaaaccacaaagatgcggagacaccagagcagaaaagctgaaaattctaaaaatcagagtgcctcttctccaccaa

SEQ ID NO: 935924 - DNA, 591 bp, Homo sapiens
gagtttgagaccagactgggtgaaaccccatctctactaaaaaatgcaaaaattagctgggcatggtggcgggcacctgtaatcccagcaaccagggaggctgaggcaggagaatcacttgaacccaggaggtggaggttgcagtgacccgagatgcagtgagactccacctcaaaaaaaaaaaaaaaaaaaaaaaaaaagactaaggatatatatcaaaacccttatggcagactgttatttgtaattgtattttatttgtcrtgcttatatgtgttgcccaagtttctatggtgaacggtatgcatcactttcagcatgagaaaataactcctaataaacgtgattcttaaaggactctccctgtgtacatcctttccaaggagccccgatgtaccctgcttccctcacagccaagctcctctaggacagtcctccctagggggttacggccttgctcctttgatggccctgccacagcccaggggctctttcctgggcactgtggaccagaccctcctagaatccctctccttcctcaaccccagactctcaggcaccccatctctatcctggacaccgagcttgtca

SEQ ID NO: 935925 - DNA, 591 bp, Homo sapiens
gagtttgagaccagactgggtgaaaccccatctctactaaaaaatgcaaaaattagctgggcatggtggcgggcacctgtaatcccagcaaccagggaggctgaggcaggagaatcacttgaacccaggaggtggaggttgcagtgacccgagatgcagtgagactccacctcaaaaaaaaaaaaaaaaaaaaaaaaaaagactaaggatatatatcaaaacccttatggcagactgttatttgtaattgtattttatttgtcgtgcttatatgtgttgcccaagtttctatggtgaacggtatgcatcactttcagcatgagaaaataactcctaataaacgtgattcttaaaggactctccctgtstacatcctttccaaggagccccgatgtaccctgcttccctcacagccaagctcctctaggacagtcctccctagggggttacggccttgctcctttgatggccctgccacagcccaggggctctttcctgggcactgtggaccagaccctcctagaatccctctccttcctcaaccccagactctcaggcaccccatctctatcctggacaccgagcttgtca

SEQ ID NO: 935926 - DNA, 627 bp, Homo sapiens
ggtgaccaacggctgtgttccttctggaggcttcagggaagaaatccatttccttgcctcttccagcttctagaggccacctgcccttgttggctgctggaaccttcttccaccttcaaagcatatgcatccagcttctgctttggtcaccacacctccttctctgactccggcctgcctgcctcctccttataagaactcttgtggggccgggagcagtggctcacgcctgtaatcccagcactttgggaggccaaggctggcagatcaccaggtcaggagatcaagaccatcctggctagcacggtgaaaccccatctctactaaaaatacaaaaaattagccgggygtggtggcacgtgcctataattccatcttctggggaggctgaggcaggagaattgcttgaacccgggaggtggaggtcgcagtgaaccgaaatagggccactgcactccagcttgggcgacagagtgagactctgtctcaaaaaacaaaaacaaaaacaaaacaaaaaaccaaaaaccaaaaacaaaacaaaaaaactcttgggactacatcatgctcacttggataacctgggatcatgttcctgtctcaagagccctaacttaatcacacctgcaa

SEQ ID NO: 935927 - DNA, 627 bp, Homo sapiens
ggtgaccaacggctgtgttccttctggaggcttcagggaagaaatccatttccttgcctcttccagcttctagaggccacctgcccttgttggctgctggaaccttcttccaccttcaaagcatatgcatccagcttctgctttggtcaccacacctccttctctgactccggcctgcctgcctcctccttataagaactcttgtggggccgggagcagtggctcacgcctgtaatcccagcactttgggaggccaaggctggcagatcaccaggtcaggagatcaagaccatcctggctagcacggtgaaaccccatctctactaaaaatacaaaaaattagccgggtgtggtggcacgtgcctataattccatcttctggggaggctgaggcaggagaattgcttgaacccgggaggtggaggtcgcagtgaaccraaatagggccactgcactccagcttgggcgacagagtgagactctgtctcaaaaaacaaaaacaaaaacaaaacaaaaaaccaaaaaccaaaaacaaaacaaaaaaactcttgggactacatcatgctcacttggataacctgggatcatgttcctgtctcaagagccctaacttaatcacacctgcaa

SEQ ID NO: 935928 - DNA, 774 bp, Homo sapiens
ctgcagctgccctggccctagcaagtctttacgcagcagccaaaatgagcttctagaagcatccttcagtcatgtcactcctctgcctggcttcctactatcctgagaataaaatccaaactccccacttgccttcaaggtactctgtcgtctggacctggatccaccctctgccccctgtcctctgctagtccctggccactcacagtgtggtcctgcagtgtcaacagccctgagagctggtgagaaaggcaaggccaggcgtggtggttcacacctgtaatcccagaattttgggaggccgaggtgggcggatcacgaggtcaagagatcaagatcatcctggccaacatggtgaaaccccgtctctactaaaaatacaaatattatcctggtgtggtggcgcacgcctgactcgggaggctgtgcaggagaatcacttgaacctgggaggcagagttgcagtgaactgagatcgtgccactgcactccagcctggtgacaaagygagactccgtcaaaaaaaagaaaggcggaaggaaggaaggaaagaagaaggaaaggaaagaaggaaagaaagaaatgcagacactcagggccaccccggacctgctgagttggatcttgcaggaggcacgtgcaccttcatgtttgaaatgagcggctgcggccccactgtccttctcgctggcttcttctcatctgtcacttaaatgtgacctccacagtgaggctttccaaaccggacatttgcaagtagttgtccatgcagtt

SEQ ID NO: 935929 - DNA, 646 bp, Homo sapiens
ggcggacatagctatcccatggtgatgggtgaggccaggccctgagaagctgcacctccaagcacaagggagcccttggaggtggacacatcttggtttgcttcttggctttggcctgaactctgtctaaccttgggcaagtcacctaacctctgtgggcctccgctttcccggctgtgcccacctcccggggcttctcagagctgtgtaagtgaccagcactttgcagtgtgttggcggctggcttggcagggaggaaattcaccccctgtccagaggcacacaccagccagcccgcccgaaagctgggaccagagcgggtgtcgtggctcccaatctgggcctccatctgcctcacttccctgcctccagatgagcagccacggctgtgtgcggycccgtcctgacagcccctcactttggtcttactgggttcaaggtcctccaagcactcctgagtcaaaggcctggcctggcctctctgacttagccggggatcctgcttgtctctcctggaggtgcttggctgcagtggagcctcccgaaggccaagcccccatctctcctctctgccaccccactccctgccctactccttcccgtctgagcccacctgtctcagctctttcccttgatctttcagaca

SEQ ID NO: 935930 - DNA, 696 bp, Homo sapiens
cggtgccctaggagccctcagtgtcccctacctgacctgtctgcacctgtgtgacagccccttctgatttggccccctgcccgcttggagcctcccagcaccagacagggcaggtttggggagccgctgtccagccctatggtgagaccctggctgacatttcccctccttcctgccaaggctggaggccgccaggtgtttgctctctccttgtggggaggtggatcctctgccagcaggtgtctgtccccggcccagcgcatcttgaaggccctggactctgttaccagtggggggcctgtggccccggctcttcacagcaggcagaagcgtatgatcccagggagggtgggctggggggggkgcagcacttgcctcggagccactgctgcgttgggtttgccttctgccagaggtgtggttaagggcagtgatagctgcgccccagcaaggagggtcatgggccctgagctggcccaggagaccctggccctgccctgtgccctgggatgcctaccctgcccacctccggaggtggaaccgggctgcccctgggggcctggacttgtcccattcccctgtccctggaaaggccttcccgggggctttttgcctgaggctgcactcttggaaggcgtggggagagttctgcctggagggggactggacccagtgccctctgcagacccctcccag

SEQ ID NO: 935931 - DNA, 581 bp, Homo sapiens
tgccagaggtgtggttaagggcagtgatagctgcgccccagcaaggagggtcatgggccctgagctggcccaggagaccctggccctgccctgtgccctgggatgcctaccctgcccacctccggaggtggaaccgggctgcccctgggggcctggacttgtcccattcccctgtccctggaaaggccttcccgggggctttttgcctgaggctgcactcttggaaggygtggggagagttctgcctggagggggactggacccagtgccctctgcagacccctcccagccgcagcaccaagggcttgctgccttgtttcctgccaggagcgccctgacatcccaaaaccatcttcccacatgtgggttgttggaatcccacccactcccccggaccctgcccctccaagttggggacggagatggggagcaggtcaggccctccctaggcctgtttgtgtgtgatccttctcctggccccaggtcgacctggaaggcgtttctgagtcttgtactgggaccttcccagggaaggtgccttggggtgcagaatcctgggaatgttaggaaagggctgcgtg

SEQ ID NO: 935932 - DNA, 500 bp, Homo sapiens
catgctagggatgaagctgacttgatcgtagtgcataagctttttgatgtgctgttgtatttggtttgccagtattttattgaggatatttgcattgatgttcattgggaatattcatctaaaattctctttttctgttgtgtctctgccagcctttggtatcaggatgrtgttggcctcataaaatgagttagggaggattccctctttttctattgattagaatactttcagaaggaatggtaacagctcctctttgtacctctaatagaatttggctgtgaatccttctggtcctggaatttttttctttggtaggctattaattattgcctcaatttcagagcctgttattggtctattcagagattcaacttcttcctagtttagtcttgggagggtgtgtgtgtccaggaatttatccatttcttctagactttccagtttatttttgtagaggtgtttatagtattctctgatggtagtttgtatttctgtgg

SEQ ID NO: 935933 - DNA, 500 bp, Homo sapiens
catgctagggatgaagctgacttgatcgtagtgcataagctttttgatgtgctgttgtatttggtttgccagtattttattgaggatatttgcattgatgttcattgggaatattcatctaaaattctctttttctgttgtgtctctgccagcctttggtatcaggatgatgttggcctcataaaatgagttagggaggattccctctttttctattgattagaatactttcagaaggaatggtaacagctcctctttgtacctctaatagaattyggctgtgaatccttctggtcctggaatttttttctttggtaggctattaattattgcctcaatttcagagcctgttattggtctattcagagattcaacttcttcctagtttagtcttgggagggtgtgtgtgtccaggaatttatccatttcttctagactttccagtttatttttgtagaggtgtttatagtattctctgatggtagtttgtatttctgtgg

SEQ ID NO: 935934 - DNA, 601 bp, Homo sapiens
tttttcttctttattagtcttgctagcagtctatcaattttgttaatcttttcaaaaaaccagctcctgaattcattaattttttgaagggttttttgtgtctctatctctttcagtgctgctctgatcttagttatttcttgccttctgctagcattttaatttgtttgctcttgcttctgtagttcttctaattttgatgttagggtgtcaattttagatctttcctgctttctcttgtgggcagttagtgctataaatttccctctacacactgctttaaatgtgtcccagagattctgacacrttgtgtctttgttctcattgatttgaaagaacatctttatttctgccttcatttcattatttacccagtagtcattcaggagcaggttgttcagtttccatgtagttgtgtggttttgagtgagtttcttaatcctgagttctaatttgattgcagtgtggtctgagagacagtttgttgtgatttctgttcttttacatttgctgaggagtgctttacttccaactatgtggtcaattttggaataagtgcgacgtggtgctgagaagaatgtatatcctgttgatttggggt

SEQ ID NO: 935935 - DNA, 573 bp, Homo sapiens
tttcatgtcatcacccataacctctcattgctgctgtcatctaaaaacccttgggtcattccccttcatctctcaaaggtttttttccctaactcagtggtaaactgtagaatgctactattaagtcctagcaattttaatatatgtggatttgatccttcagacactctagtctttgtgttstttgacctcctttccagtgttcttgtcatttacactgctgtagccactcatatgcatagtcatatactagatcttatcatttgtaataattctattcaattttaagcattcctctctgtggccacatctgttactccagctcattctgcttagtacgaaacttctacaattattcaaccacacagtgacttttattttaatccattgatcctactaccctttcactttacctcatccctttgtgatctcatttaactccttccttatttaatgtcatagctaatcagtttaatcactcccttgcatttagccttgactcccatatcccactttttgaattcacttggcataactacagtcctgattaaacccgacttccttcctatcata

SEQ ID NO: 935936 - DNA, 619 bp, Homo sapiens
gtagtgagtcctgggcccattcctccctccctgcagagttgggagattttgaaattatcaggcatgggcaggggccagggcagggcggattaattcctctgcagcctgctctcagcgcttggccacatttgatcattcactcacatggaagtacaaggcctgagagtgagtcgctggcgatggtagagccaccttattgaaatagcatgttagcatttaaacaatattaatactatttgactcattaaatatacaaagaccagttaaactgcttccatgtatgtgctgttaattctggcgggcgactcctcagatggctttatgtggtttcagacaacgttttagcacattcttaaaatacccacaaaagcctttatgtaaaaactcataaatgcaaaccacataaaaattattttttccttgtttcatrtcattatgatcaaagtacagtaggtaagaaataaattttcaaaaacgtgttgtggtccccctttaattaatgcttcacgcgcagagcaaagccataaaccatgtagcgggggcgctgtctgtgcgccctgcagtcacctccctcctgaaggtgccggagcgccctgatggcactcgcaggagaggctgg

SEQ ID NO: 935937 - DNA, 567 bp, Homo sapiens
tgtgtttggtaacgagtgtgggggagtgagtatgagtgggttctgcgctgggatggcatcctgtccagggctggttcctgctttgcatcctgagctgctggaatgggctcagctaccagagaccctaaattggaacaagtggggtggaaaatgaatgaatgaatacaaattaataaaaatttgtaaagtctatgataatcatacaaatgcatgacaaaaaaaatgtagtatgaaagcgctcagtgagcccaccctaattgtaaatgttttgaactgcatggtggcaggaggtgctccttataatttttgctttgcaaacattttattccttggtttaacygaccaccatcacaactgccatcacttgctgattcaccaaacttgggtaaataatgatcttacctgtgcttattaatctttaagtgtatgtgtatagctcttgtttatttcagtgtttactattagaagtgttttggtctttatttagatgtatgatgtttttgtgaccagaaatatgcagtaggaacttactttttgcttatatcaattagcctattgtaaaattag

SEQ ID NO: 935938 - DNA, 602 bp, Homo sapiens
gtgtttggtaacgagtgtgggggagtgagtatgagtgggttctgcgctgggatggcatcctgtccagggctggttcctgctttgcatcctgagctgctggaatgggctcagctaccagagaccctaaattggaacaagtggggtggaaaatgaatgaatgaatacaaattaataaaaatttgtaaagtctatgataatcatacaaatgcatgacaaaaaaaatgtagtatgaaagcgctcagtgagcccaccctaattgtaaatgttttgaactgcatggtggcaggaggtgctccttataatttttgctttgcaaacattttattccttggtttaaccsaccaccatcacaactgccatcacttgctgattcaccaaacttgggtaaataatgatcttacctgtgcttattaatctttaagtgtatgtgtatagctcttgtttatttcagtgtttactattagaagtgttttggtctttatttagatgtatgatgtttttgtgaccagaaatatgcagtaggaacttactttttgcttatatcaattagcctattgtaaaattagtagcattatacattgttttgtttaaagttacaattt

SEQ ID NO: 935939 - DNA, 602 bp, Homo sapiens
gtgtttggtaacgagtgtgggggagtgagtatgagtgggttctgcgctgggatggcatcctgtccagggctggttcctgctttgcatcctgagctgctggaatgggctcagctaccagagaccctaaattggaacaagtggggtggaaaatgaatgaatgaatacaaattaataaaaatttgtaaagtctatgataatcatacaaatgcatgacaaaaaaaatgtagtatgaaagcgctcagtgagcccaccctaattgtaaatgttttgaactgcatggtggcaggaggtgctccttataatttttgctttgcaaacattttattccttggtttaaccgaccaccaycacaactgccatcacttgctgattcaccaaacttgggtaaataatgatcttacctgtgcttattaatctttaagtgtatgtgtatagctcttgtttatttcagtgtttactattagaagtgttttggtctttatttagatgtatgatgtttttgtgaccagaaatatgcagtaggaacttactttttgcttatatcaattagcctattgtaaaattagtagcattatacattgttttgtttaaagttacaattt

SEQ ID NO: 935940 - DNA, 614 bp, Homo sapiens
ttcccatcatcttcttgatatgcacacctgtgtcggggaccgattttcccctttcagagggacaccagtcttattgggttagggcccaccctaccaaccacattttaacttgattatctctgtcaaaaccctatttccaaataaagtcactttcatgcgcgtccatgtgaagagaccaccaaacagcctttgtgtgagcaacarggctgtttatttcacctgggtgcaggtgggctgagtccgaaaggagagtcagcaaagggagatgggggtggggccgttttataagatttgggtaggtaaaggaaaattacagtcaaaggggggttgttctctggcgggcaggagtgggggtcacaaggtgctcagtaggggaatttttgagccaggatgagtcagaaggaatttcacaagataatgtcatcagttaaggcaggaacaggccattttcacttcttttgtggtggaatgtcatcagttaaggcaggaacaggccatctggatgtgtacatgcaggtcacaggggatatgatggcttagcttgggctcagaggcctgacattcctgtcttcttatattaataagaaaaataaaaggaaatagtggtatagtgt

SEQ ID NO: 935941 - DNA, 720 bp, Homo sapiens
cgtggctttctctctgtttcatttcctcttctaaggacaccagtcatatgggatttagaacccaccctagtccagtatgacctcatttgaacttgagtaattgcatctgcaaagaccctgtttccaaatatggtcacattatgaagttttaggtagacataaatttgggttgggaggggacactgttcaacccaatacatgcaggaagttggggaggagtgcatgccttttagttccacagggctacatccaaatttaggctttgcagtggagcctctatgaaatggagacagtaggccaggcatggttgctcacgcctgtaatcccagcactttgggaggccgaggtgggcagatcatctgatcagatttgtatttcaaatttgagtgatctgaggcggattattcctgaggtcaggmgtttgagaccagcctggccaacatggtgaaacgctgtctctactaaaaatacaaaaattagccaggcgtggtggcgggcacctgtaatcccagctactcgggaggctgagacaggagaattgcttgaacctgggaggcggacattgcagtgagctgagattgtgccactgcactctagcctgggtgacagagcaagactccgtctcgaaaaaacaaaacaaaacaaaacaaagaaatgggacagtagcacctacagtagtgtcatggtcatgagacttgatcaaaataacagatatgagca

SEQ ID NO: 935942 - DNA, 720 bp, Homo sapiens
cgtggctttctctctgtttcatttcctcttctaaggacaccagtcatatgggatttagaacccaccctagtccagtatgacctcatttgaacttgagtaattgcatctgcaaagaccctgtttccaaatatggtcacattatgaagttttaggtagacataaatttgggttgggaggggacactgttcaacccaatacatgcaggaagttggggaggagtgcatgccttttagttccacagggctacatccaaatttaggctttgcagtggagcctctatgaaatggagacagtaggccaggcatggttgctcacgcctgtaatcccagcactttgggaggccgaggtgggcagatcatctgatcagatttgtatttcaaatttgagtgatctgaggcggattattcctgaggtcaggagtttgagaccagcctggccamcatggtgaaacgctgtctctactaaaaatacaaaaattagccaggcgtggtggcgggcacctgtaatcccagctactcgggaggctgagacaggagaattgcttgaacctgggaggcggacattgcagtgagctgagattgtgccactgcactctagcctgggtgacagagcaagactccgtctcgaaaaaacaaaacaaaacaaaacaaagaaatgggacagtagcacctacagtagtgtcatggtcatgagacttgatcaaaataacagatatgagca

SEQ ID NO: 935943 - DNA, 641 bp, Homo sapiens
atcatagatggatggatggatggatggatggatggatggatggaaagatggatgggtggatgggcaggtagatgtatgaatggctggatgggtagatgaatggttgggtggaagcatgaatgcgtgggtgggtagatggatggatgggcaggcaggtgggtggatggatgaatggatggatggacgggtgggtggattggtgtgtggatagatgatgagtggatagttggatgggtggatggatggatgggtgggtggatgaatactcctcatgatctattgcttgaaaataattttcatggcaaagttaagactagaccctaattctgctagagtatattccatggctgtttatgttggggcataccgaacatgctaatggtaktagttatattttattgtgtgttgagtgtgcacttacatggcaggctttgtactaagcactgccactaatcctctcaataacccctttattagctccatctttactacaagaaaatggaagctcagaaaggtagagcagcttgcccaaaaccacacagcaaatcacttcctagcccatctgattctgtgccaattgccggtcgcctttcccaccctccaccagggtttctcaccctccctggctccaccccacctct

SEQ ID NO: 935944 - DNA, 670 bp, Homo sapiens
atagtagcccagtttctttgggttagagctccatctgttgatcaaaaagaagctcatctaaaagagattctgagcttactttcagccagcactgaaggcactaaccaaactattgaatatttagcagacctaccagcgattcagaattccctcccaatccattttgctagctcgtgaagttcagggtctatcatttccacattccatgatttcaaagcatgtgccatatcaaaccaaggatgaatttttttaaaaatgagtcagttctgctgggacagatggatatccatatgcaaaagaatgaagttgtgcccgggcacagtggctcacacctgtaatcccagcattttgggaggccaaggtaggtggatcacgaggtcaagagataagaccatcctggccaacatggtgatrcctcatctctactaaaaatacaaaaattagctggatgtggtggtgggcgcctgtaatcccagctacttgggaggctgagacaggagaattgcttgaacctgggaggtggaggttgcagtgagcggagatcacgctactgcactccagcctggtgacagagcgagactctatctcaaaaaaaaaaaaaaaaaaaaggaatgaagttgtacccctacttcacaccttatctaaaaattaacttaattagccaggtgtg

SEQ ID NO: 935945 - DNA, 731 bp, Homo sapiens
ccaggatggacgtttagatcagatgtgctttgaaaagcacatgacaaatttgagcttaaaacccttcataatttttaaaatcatgacattttccaaggactagaagctaaatgactccaaaacccatttggaagttctacagtggaatactatatggagtttagaaatgatagatttgattttcttaaagaagaccactagaggtcacaagagatcttgaaaagaaaaagggtgcttggttttgcatacctgaagkgaaagaaaaatctagttgacgccgatcttaggttctcctaccccatgttgagatggtgttcatggtaaaaagttggcttaactagaacacactgcattctctatcactaccactaaattagattttctatgacttgttttcttaattcactggtttcttaaaatacacacacacacaggtttgaagaaatatatttatggtgtttgaagtgacaacattcagttgtacattttacaactgtacattttaaagtccagctttaaatacaaatcctctctggatatggagaatatcatcagacaggaatgaggaggctgtgccaggattctggatgcggaggtggcctgctgctgctgctgctgctgctgctgctgctgctgctgtcactccagtccttaagtgtgagttttccatctgtgcatttgcagtggtttctgtgctggcagggaagtgatgcacacctctcagactcgag

SEQ ID NO: 935946 - DNA, 543 bp, Homo sapiens
gtggtggcaggcacctactgtagtccgagctactcgagaggctgaggcaggagaatagtgtgaacctgggaggtggctcttgcagtgagccaagattgtgccactgcactccagcctgggtgacagaatgagactccgtctcagaaaaaaaagaaagtgctaggatgaaagttaaatgctctcttctctctttgaccttcaggcaccctcttggatctcttctaagtgaactttccttgctttcctgttctaaagcctttttaaacaaacttccactcctgctctgaaacttgccttggtctcgttttctgctttatgcacgtcagtctaattctttcttctgaagaggcaaggactgaagttcctgcagacccctrcagatttgccaccagtaactcggggtaactcggatctcttccaccgctaacgttaccagtgtattacaaggatattacaagggatacagataatgagatgcagagggtggagtataaggaagggatgtggagctctcatgtcctctccaggcaccaccctccaggg

SEQ ID NO: 935947 - DNA, 753 bp, Homo sapiens
aactcctgtcagagaatgaaacctgcggcaggcagagccacaaagagagaaaagactgattcctggaattcttgatgacatcgttcacaatgctggatccagccccaactgaaaccattgtgaaactgtctccacagggttgacaattgcatcctgggttctggacagaaataattataattaagcattcatcaggctgcccttaggcccacttccttgttactaaaagtcacttagcactagatactgatcatttgcataccattgttcctataggcgagatcccggacattagaatcataaggcttttatttaattcagatgtatttcagacctgaattccagcgaccagtttgaagacccccagagaagaaacaaaatcggctttgcaaaattatagctgaggaaattatgacagtgaaagaaataagacctgactgactccatcttgcttctaacctttaagctgtccttgttcattcctgggcgtgggctaaactaactttgggaaggaattcagttcrtggtttgactctgcaacaaaattggtaacagccctttcctgaaaagacccccttcttgcctggggtctagtttgcctttccaggactaacaaattagctacaagattagaaagtacagtttagggctcatgcagcctctggcttcaagagtcttaattgccccaaattgctcctggagaaaacatcactattgtaaaatctaagatcagtgcctgaggtattttgcaga

SEQ ID NO: 935948 - DNA, 780 bp, Homo sapiens
acggcagcaagaaagttcaggccgggcgcagtggctcacacctgtaatcccagcactttgggaggccgaggtgggcggatcacttaaggtcgggactttgagaccagcctggccaacatggtgaaaccccgtctctactaaaaatgtgaaaaaaaaaaaaaaaatggcacctgtagtcccagctactcaggaggctgaggcaggagaatcacttgaacccaggaggcagaggttgcagtgagccgagatcgygccattgcactccagcctgggcaacagagcgagactccatttcaaaaaaaaaaaaaaaagttcagtgggaaccaaggaggaacgtcctgcctccagaaccagagcccacagtcaggggtagacatcccaggctggggatgggtctttctctgaataggaagggggacattctcacttaatcttctgtctgttctctctgccctgggtgcttggtgaattgtagaagatgccaggccttgctaatacccgctacccacctctcacctgattcatagataagaggtgccaaggtctctggtcttagagcctgggtctcatctacaccaccacctctgcccaaggccagaggaacccacaacttctttccttcagactcccaccttctcctttaaatctctttctgacttgcaagcaccccttccagctctgtggcttctgctgccgtccatgccccatcccccctcctccctcctttttctctatctctccttctcttctgttcgtggactctgatagcctgcattgaca

SEQ ID NO: 935949 - DNA, 752 bp, Homo sapiens
ctaaaggccaaccccgaagccaggaagaatctgaggaaggtgaggaagatgccacctctgaggtggacaaacgacgcacgaggcccagacaccaccacgggaggagcaggcccgacaggtcctctcaaggagggagtcttccctctgaggaaaagggacacccccaggaggaatctgaggagtcaaacgtcagcatggccagtttaggggaaaagagggaccaccattcaacccactacagggcttcagaggaagaacctgaatatggagaagaaataaagggttatccaggcgtccaggcccctgaggacctggagtgggagcgctataggggcagaggaagtgaagaatacagggctccaagacctcagagtgaggagagttgggatgaggaggacaagagaaactaccccagcttagagcttgataagatggcacatggatatggtgaagaaagtgaggaagagaggggccttgagcygggaaagggacgccatcacagaggcaggggaggggagccacgtgcctatttcatgtctgacaccagagaagagaaaaggttcttgggtgaaggacaccaccgtgtccaagaaaaccagatggacaaggcaaggaggcatccacaaggtgcgtggaaagagctggacagaaattatctcaactacggtgaggaaggagccccagggaagtggcagcagcagggagacctgcaggacactaaagaaaacagggaggaagctaggtttcaagat

SEQ ID NO: 935950 - DNA, 552 bp, Homo sapiens
catgagttcatgccagtaatgaaattcctcacagttcaagtaatcatggggccactaacttatgaggttgttactaagaaacacaggacagagcctaatttttcttattagccaccctttgggtcaaatgtctgactttcccaaagtttgttgcttcattattcattgtcatcagccaaagaagaatagcagatacataggagacttcttgtttcggtcagtatcacttatttcacagaaacatttctcaygtggcattcattgagcagttacacaactagaagctcagatggctggtaagaagccctgagaccacttcatgccaaaccttgtaaacacaggttcctgtctggggactccctgggtaaccctgtcctgcccatggcttccctaggcacatttcaaaactttcttggctgagctgggctttcagcctccaaagcatcatgtttccttgctgagttaggaaagcaaaggtttcacaatgtttgtgcataaaagatttgagttggccaggtgcggcggctcacacctgtaatctcagcactttgg

SEQ ID NO: 935951 - DNA, 580 bp, Homo sapiens
atgccccacatcaagtgcatgagaattttatgactcatgatttctagagagggaaaaatgaaattaagatggactaccagcttcccaatcattttagattccctggcaggagacctgtccttacttcaacccacagaaatcaccaacagtgtctgaagggaggaatatccctgagaatcaycctaaacaaaggagggaggtaggactaccatcccctgctctggaaactctgctctataactctgctaaaggagttgccaaatcagagtggctgttcagaagcatcacattgtagaaagtttgttccacaggtcccctgaacacacatctgtagccagccttcccacactaatggaatacccgcttagggaccttcccattctgaccttcagcattctgattgtttactagaactgagacaaacctaggctttaaggccatcaagtgctgaaaaggagacagtgaccttgttggggtaaaaataaaaacatcaacaggcaaattacaaaaaaaaaaatctaagcaaacatatcctataaaaaacaaaacagacagcaaacactagaagaagtaactaatt

SEQ ID NO: 935952 - DNA, 586 bp, Homo sapiens
gctgggagaaccactgctctcttcaaagctgtcagacagggacattgaagtctgcacaggttactgctgtctttttgtttgtctgtgccctgcccccagaggtggagcctacagaggcaggcaggcctccttgagctgtggtgggctccacccagtttgagcttccctggctggctttgtttacctaakcaagcctgggcaatggtgggcgcccctcccccagcctcgctgccgccttgcagtttgatcgcagactgctgtgctagcaatcagcgagactccgtggggtaggaccctccgagccaggtgcggggtataatctcgtggtgtgccgttttttaagccagtccgaaaagcgcaatattcgggtgggagtgacctgattttccaggtgcgtctgtcacccctttctttgactcggaaagggaactccctgaccccttgcgcttcccaagtgaggcaatgcctcgccctgctttggctggcgcagggtgcgtgcacccactgacctgcgcccactgtctggcactccctagtgagatgaacccggtacctcagatggaaatgcagaaatcacccgtcttct

SEQ ID NO: 935953 - DNA, 602 bp, Homo sapiens
attaagatgcaaaaaatccattaaaaatcaatgaaaccaaacttagtttattgaaaggatgaaaaagattaatagaccactagctagattaataaagaaaaaaaaagatccaaataagcacaatcagaaatgacaaaggaggcattacaactgatcccacagaaatacaaaaaccctcagacactattatgaacacttctatgcatataaatcagaaaatctagaggaattgcataaattcctggaaacacacaacctcccaagattgaatcggaagaaattcaaaccctgaacagacaaataayaagctcctaattgaatcattaattaaaaaaaaaaaactagcaaccaaaaaaaccctagaccatatggattcatagcagaattctatgagatgtacaagtaagagctggtaccatttctactgaaactattccaaaaaaaatgaagaggaaggactctccataactcactctatgaagccagcattatcctggtaccgaaacctggcaaacacaaaatgaataacaataataataaaactataggccaatatccctgaagacaatagacacaaaaatcctcaacaaaatgccatcaaa

SEQ ID NO: 935954 - DNA, 602 bp, Homo sapiens
attaagatgcaaaaaatccattaaaaatcaatgaaaccaaacttagtttattgaaaggatgaaaaagattaatagaccactagctagattaataaagaaaaaaaaagatccaaataagcacaatcagaaatgacaaaggaggcattacaactgatcccacagaaatacaaaaaccctcagacactattatgaacacttctatgcatataaatcagaaaatctagaggaattgcataaattcctggaaacacacaacctcccaagattgaatcggaagaaattcaaaccctgaacagacaaataacaagctcctaattgaatcattaattaaaaaaaaaaaactagcaaccaaaaaaaccctagaccatatggattcatagcagaawtctatgagatgtacaagtaagagctggtaccatttctactgaaactattccaaaaaaaatgaagaggaaggactctccataactcactctatgaagccagcattatcctggtaccgaaacctggcaaacacaaaatgaataacaataataataaaactataggccaatatccctgaagacaatagacacaaaaatcctcaacaaaatgccatcaaa

SEQ ID NO: 935955 - DNA, 701 bp, Homo sapiens
tgttttacataatggttgtactagtttacattcctatcagcagtgtagaagtactccctgttcaccgcatccacgccaacatctattattttttgatttttttattatggccattcttgcaggagtaaggtgctattattgcattgtggttttgatttgcatttccctgatcattagtgatgttgagcattttttcatatgtttcttggccatttgaatatcttcttttgagaattgtctattcatgtccttagcccactttttgatgatattgtttttttcttggtgatttgtttgagtttgttgtagattctggatattaatcctttatcagatatatagattgtgaagattttctcccactctgtgggttgtctgtttactctgckgactgttccttttgctgtgcaaaagctctttagtttaattcagtcccagctatttatttttgtttttgttgcatttgcttttggattgttggtcatgaaatgcttgcctaagccaatgtctagaagggtttttctgatgttatcttctagaaattgtagactttcaggtcctagatttaaatccttaatccatcttgaattgatttttatataaggtgagagatgaggatccagtttcattctcctacatgtggcttaccaattatcccagcaccatttgttgaatagggtgtcctttccccacttcatgtt

SEQ ID NO: 935956 - DNA, 701 bp, Homo sapiens
tgttttacataatggttgtactagtttacattcctatcagcagtgtagaagtactccctgttcaccgcatccacgccaacatctattattttttgatttttttattatggccattcttgcaggagtaaggtgctattattgcattgtggttttgatttgcatttccctgatcattagtgatgttgagcattttttcatatgtttcttggccatttgaatatcttcttttgagaattgtctattcatgtccttagcccactttttgatgatattgtttttttcttggtgatttgtttgagtttgttgtagattctggatattaatcctttatcagatatatagattgtgaagattttctcccactctgtgggttgtctgtttactctgctgactgttccttttgctgtgcaaaagctctttagtttaattcagtcccagctatttatttttgtttttgttgcatttgcttttggattgttggtcatgaaatgcttgcctaagccaatgtctagaagggtttttctgatgttatcttctagaaattrtagactttcaggtcctagatttaaatccttaatccatcttgaattgatttttatataaggtgagagatgaggatccagtttcattctcctacatgtggcttaccaattatcccagcaccatttgttgaatagggtgtcctttccccacttcatgtt

SEQ ID NO: 935957 - DNA, 606 bp, Homo sapiens
tgggctggcactgagtgtgacttttccagcacacagtgcaagcagtcggtggatctacgattctggggtctggaggatggtggccctcgtctcacagctccactaggcagtgcttcagtgtgggagcttcaaccctacatttcctctgcactgccctagcaaaggttctccatgagggctccttccctgcagcaaacttctgtctggacatcctggaatttccatacatcctctgacatctaggtgsagattcccaaacctcaattcttgacttctgtgtgcccacaggctcaataccacatggaagctgccaaggtttggggcttgcactctctgaaaccatggccggaactgtatcttggccccttttagccatggctggagcacctaggacacagggcacgaagtccctaggctgcacacagcaggggaccatgggaccatcccatgaaaccatttttatctcctaggcctcctggcctgtgatgggaggggctgctgtgaaagtccctgatatgccgtggaaacattttccccattgtcttggtgattaacatttggctcctcattacttatgcaaatttctgcagcatacttgaatttcgc

SEQ ID NO: 935958 - DNA, 606 bp, Homo sapiens
tgggctggcactgagtgtgacttttccagcacacagtgcaagcagtcggtggatctacgattctggggtctggaggatggtggccctcgtctcacagctccactaggcagtgcttcagtgtgggagcttcaaccctacatttcctctgcactgccctagcaaaggttctccatgagggctccttccctgcagcaaacttctgtctggacatcctggaatttccatacatcctctgacatctaggtgcagattcccaaacctcaattcttgacttctgtgtgcccacaggctcaataccacatggaagctgccaaggtttggggcttgcactctctgaaaccatggccrgaactgtatcttggccccttttagccatggctggagcacctaggacacagggcacgaagtccctaggctgcacacagcaggggaccatgggaccatcccatgaaaccatttttatctcctaggcctcctggcctgtgatgggaggggctgctgtgaaagtccctgatatgccgtggaaacattttccccattgtcttggtgattaacatttggctcctcattacttatgcaaatttctgcagcatacttgaatttcgc

SEQ ID NO: 935959 - DNA, 630 bp, Homo sapiens
ttctgtatgcgttcccaccctccgactatccagtgcctacacacagccagaaagatctttccaacgtttaaatcagatcatgtgcctcctctagccacaaatcctccaatgactttccattaccttcagggctttttgtgattagccccttcctrtatctctgattttaccatgctcaactttctccccaattcaccatcctccagccaaattgggtagctttctgtgcttcaaacatgccaatcttcctgactcagggtctttgtccctactcctgcttctttctgggtttcttttccttcagatcttttcatgattgattttttttaagagacagggtctcgctatgttggccaagttgttcttgaggtcttgaactcctggcctcaagcaattctcccacctcggtctcccaaagtgctaggattacaggaatgagccaccgcacccagccatgattgcttctttatgctcagtcttgtctcaagtgttacttcctcagagaggttcccagtcttagcaaagcagcttttcccccattcctctatcatattgttctcctttatcttcttcataacactattgacatctgaaattattttatttattatgtgtttatcacttcctcaa

SEQ ID NO: 935960 - DNA, 630 bp, Homo sapiens
ttctgtatgcgttcccaccctccgactatccagtgcctacacacagccagaaagatctttccaacgtttaaatcagatcatgtgcctcctctagccacaaatcctccaatgactttccattaccttcagggctttttgtgattagccccttcctgtatctctgattttaccatgctcaactttctccccaattcaccatcctccagccaaattgggtagctttctgtgcttcaaacatgccaatcttcctgactcagggtctttgtccctactcctgcttctttctgggtttcttttccttcagatcttttcatgattgattttttttaagagacagggtctcgctatgttggccaagttgttcttgaggtcttgaactcctggcctcaagcaattctcccacctcggtctcccaaagtgctaggattacaggaatgagccaccgcacccagccatgattgcttctttatgctcagtcttrtctcaagtgttacttcctcagagaggttcccagtcttagcaaagcagcttttcccccattcctctatcatattgttctcctttatcttcttcataacactattgacatctgaaattattttatttattatgtgtttatcacttcctcaa

SEQ ID NO: 935961 - DNA, 627 bp, Homo sapiens
cagatcttttcatgattgattttttttaagagacagggtctcgctatgttggccaagttgttcttgaggtcttgaactcctggcctcaagcaattctcccacctcggtctcccaaagtgctaggattacaggaatgagccaccgcacccagccatgattgcttctttatgctcagtcttgtctcaagtgttacttcctcagagaggttcccagtcttagcaaagcagcttttcccccattcctctatcatattgttctcctttatcttcttcataacactattgrcatctgaaattattttatttattatgtgtttatcacttcctcaatattagttatcaatcactgcataattatgtaaaacttcgcagcttgaaacaacaacaatcatttattatctcacatacttttttgtgagttaagaatttgggagtggcttagttgggttgttctgcctcagagtctcatacaaggttgcagttagatgtcagccagggctgcagtcatctgaagacttgactggggctagaaaatctgattttaagatggctgacacacatggtaggcaggtttatgctggtgaccagacagaggtctcaattccttgccacatggatttctccacag

SEQ ID NO: 935962 - DNA, 565 bp, Homo sapiens
atcatgtgggacttgtaatccaaagccaagttgggattttggattttattatgcgtgagataagaagtcttttgatgaatttgagcagagaagtgactctctctctcccttccttccttccattgacaaataaaaattgtacatatttatggcatacaatatgttttgaagtatgtataaattgtgaaatagttaaatcaggctaattaacatatgcattacttcacatagttatgaatttttttgtaataagaacacttaaaacatactttcttaacaattttcaataatatattgctagtagttgtagtcaccatgttktttaatagatgtcttggatctctttctctagtctaattgaaattttgtatcttctgagcaacatttccccaaaccccaccctccagtctctggtaaccaccattctactctctacttctatgagttcaacttttttagatttcatatataagtaagatcattcatactcccctctttggcgaccccatgggatctttaaatagcttctatgtgctaatgtctaggcctctcttgtgaacaccag

SEQ ID NO: 935963 - DNA, 722 bp, Homo sapiens
gttgaatagacacctctgactccacgtgaccaaaactgaactccttgttttatttgcaagcctgagtatcctcactcttccttatcaattgatggcaactcaatttttccagttgctcagacaagaccttggagtcagccttgactccttctgtttctcatcttcccacatcctgttaagaaaacctagttgtcatgatcccttctcgctactatgactgtccaagacatccctctctttcacccagtttattacagtgcctcataactcgtcattctacttctgttgttatcctttcggtctattttcaatacakcagccagggtaattattttaaaatatggttcaaattgtttaacttctctgcttaaatccttactggctccccatttcactcatagtaaacatcaacatttttggtaatttcctggaactttgctctctgttagttacaaccccattggcctctctgcctctgtgctgcctttgggcctctgtgctggttggctgttcaccctacctgaaacactcttcttttcctgttgacttgcatacttcaaggttttgctcaaatgttgccttttcaaagaggcccttccttcctcaaaaatccctctatttacaattaacagcccttctttccacccctggaaatcgtcatccccttacttggctctctacattttggaagtatagtgtttatcacgctctagcgtacaata

SEQ ID NO: 935964 - DNA, 722 bp, Homo sapiens
gttgaatagacacctctgactccacgtgaccaaaactgaactccttgttttatttgcaagcctgagtatcctcactcttccttatcaattgatggcaactcaatttttccagttgctcagacaagaccttggagtcagccttgactccttctgtttctcatcttcccacatcctgttaagaaaacctagttgtcatgatcccttctcgctactatgactgtccaagacatccctctctttcacccagtttattacagtgcctcataactcgtcattctacttctgttgttatcctttcggtctattttcaatacatcagccagggtaattattttaaaatatggttcaaattgtttaacttctctgcttaaatccttactggctccccatttcactcatagtaaacatcaacatttttggtaatttcctggractttgctctctgttagttacaaccccattggcctctctgcctctgtgctgcctttgggcctctgtgctggttggctgttcaccctacctgaaacactcttcttttcctgttgacttgcatacttcaaggttttgctcaaatgttgccttttcaaagaggcccttccttcctcaaaaatccctctatttacaattaacagcccttctttccacccctggaaatcgtcatccccttacttggctctctacattttggaagtatagtgtttatcacgctctagcgtacaata

SEQ ID NO: 935965 - DNA, 582 bp, Homo sapiens
aaaggggccaatgtgtatctcaggctgttgcttcagaggttgcaagctcctgggcttgatgacttacacatggtgttgggcttgtggatacacagaagtcaagaattgagtttagggaacctccacctagattacagaggatgtatggaaattctcggatgtccaggcagaagtctgttgcaaggttggtagcctcatggagaacttctactagggcagtagggaagggaaatgtcaaatggaagcccccatactgagttcccaatggggcactgcctgatggagctgtgagaagagggccaccatcctccagaccycaaaatggtagacccaccaacagcctgcactgtgtgtatggaaaagccatagacccacaacaccagcctgtgaaagcagccagggttgggggactgtaccctgcaaagccacagggtgaagctgcctaaggccatgggagcccagctcttgcatcggcatgactgggatgtgagacatggagtcaaaggagattattttggaactttaaggtttaatgactaccctataggggcctgtagtccctttgttttggccaatttctcc

SEQ ID NO: 935966 - DNA, 582 bp, Homo sapiens
aaaggggccaatgtgtatctcaggctgttgcttcagaggttgcaagctcctgggcttgatgacttacacatggtgttgggcttgtggatacacagaagtcaagaattgagtttagggaacctccacctagattacagaggatgtatggaaattctcggatgtccaggcagaagtctgttgcaaggttggtagcctcatggagaacttctactagggcagtagggaagggaaatgtcaaatggaagcccccatactgagttcccaatggggcactgcctgatggagctgtgagaagagggccaccatcctccagacctcaaaatggtagacccaccaacagcctgcactgtgtgyatggaaaagccatagacccacaacaccagcctgtgaaagcagccagggttgggggactgtaccctgcaaagccacagggtgaagctgcctaaggccatgggagcccagctcttgcatcggcatgactgggatgtgagacatggagtcaaaggagattattttggaactttaaggtttaatgactaccctataggggcctgtagtccctttgttttggccaatttctcc

SEQ ID NO: 935967 - DNA, 573 bp, Homo sapiens
gttggagtttgctggaggtccactccagaccctgtttgcctgggtatcagcagcggaggccgcagaacagtgaatattgctgaacagcaatgttgctgcctgatcattcctctggaagtttcgtctgagaggggtacccagccatgtgagttgtcagtctgcccctactagggggtgcctcccagttaggctactcaggggtcaggaacccacttgagaaggcagtctgtccgttctcagatctcaaactccatgaaggragaaccagtactcacttcaaagctgtctgacagggacgtttaagtctgcagaggtttcttctgccttttgtttggctatgtcctgcccacagaggtggagtctactgaggcagcacgcctccttgagctgtggtggggtccacccagttcaagcttcctggccactttgtttacctactcaagcctcagcaatggcgggcgccccttccccagcctcgttgccaccttgcagtttgacctcagactgctgtgctagcaatgagcgaggctctgtgggcgtgggaccctctgagccatgcgcgggatataatct

SEQ ID NO: 935968 - DNA, 766 bp, Homo sapiens
atttttttatttttttataagttttttaaattatactttaagttctagggtacatgtgcacaacttgcaggtttgttacatatgtatacatgtgccatgttggtgcactgcacccatttactcgtcatttacattaggtatttctcctaatgctatccctcccccctccccccaccccacaacagaccccagtgtgtgatgttccccaccatgtgtccaagtgttctcattgttcaattcccacctataagtgagaacatgcggtgtttggttttctatccttgcaaaagtttgctcagaatgatggtttccagcttcatatgtgtccctacaaagggcatgaactcatccttttttatggctgcayagtattccatggtgtatatatgccacattttcttaatccagtctatcattgttggacatttgagttggttccaagtctttgttattgtgaatagtgccgcaataaacatacgtgtatatgtgtctttatagtagcatgatttctaatcctttggttatatacccagtaacgggatcactgggtcaaatggtatttctaattctagatccttaaggaatcgccacactgtcttccacaatggttgcactagtttacactcccaccaacagtgtaaaagtgttcctatttctccacatcctctccagcatctgttgtttcctgactttttattgatcaccattctaactggcgtgagatggtatctcattgtggttttgatttgcatttctctgatggcca

SEQ ID NO: 935969 - DNA, 766 bp, Homo sapiens
atttttttatttttttataagttttttaaattatactttaagttctagggtacatgtgcacaacttgcaggtttgttacatatgtatacatgtgccatgttggtgcactgcacccatttactcgtcatttacattaggtatttctcctaatgctatccctcccccctccccccaccccacaacagaccccagtgtgtgatgttccccaccatgtgtccaagtgttctcattgttcaattcccacctataagtgagaacatgcggtgtttggttttctatccttgcaaaagtttgctcagaatgatggtttccagcttcatatgtgtccctacaaagggcatgaactcatccttttttatggctgcatastattccatggtgtatatatgccacattttcttaatccagtctatcattgttggacatttgagttggttccaagtctttgttattgtgaatagtgccgcaataaacatacgtgtatatgtgtctttatagtagcatgatttctaatcctttggttatatacccagtaacgggatcactgggtcaaatggtatttctaattctagatccttaaggaatcgccacactgtcttccacaatggttgcactagtttacactcccaccaacagtgtaaaagtgttcctatttctccacatcctctccagcatctgttgtttcctgactttttattgatcaccattctaactggcgtgagatggtatctcattgtggttttgatttgcatttctctgatggcca

SEQ ID NO: 935970 - DNA, 614 bp, Homo sapiens
gtctgagtcatagaaggagatgtgtcattagaagcaaaggtcagaatcacacaaatgctgactggaaggcgaccacaagccacggaatgagggcagtctctagaggctggaaaaggcaaagaaacattctccccaggacctccaggaggagtgcagycctgttgacacccattttggacatctaaattgcagaattctgagaataaatgcgttattttaagccaactatgtagttagtagtaccatttaatgaaataggaaacactgaagaagtaatgagttggaatgggagagtgataattagttcaattctgaggttgccttccaggtaacatagtgagatgtcattgggtaactggatatgcctagagttgagagaagagttctcagctaaaaataaaaattgagagttttgggtatatggattataattgaggtcttgaagatggatgaggtcaactaaggataagagaaggctgagcccggaggaaatcctccagtatgggaggaactgcaaacaaaggctaagaaaaaggtgttagagaagtagtagaaaaacaatcagaagattatagtggtaacacagaggcctaggaaagagaatgcttcagtga

SEQ ID NO: 935971 - DNA, 590 bp, Homo sapiens
ggtgcgatcatagttcactccagcctcaactcctgggctcaagcgatcttcctatctcaacctccagagtaactgggactacaggcatgcaacatcacaccaagctaatatatttattttcctgtagagatggggtctcactatgttgcagactggtcttaaactgctagcctcaagctatcctctcctgtggcctctcaaagcgyggggattacagacatgagccaccacacttacctattctttcttttttttcctttaatttttaaattgacaaataataataattgtgcttattcatggaaggtacctaacattgtttcaatacatataatgtatagtaatcagattagggtaattagcatacctattatatcaaacatttgtcatttctttatgttgggaatgttcaatgcattcctcgttttagccatttgactctatataatatatagtaatatattattgtcaattatagtcatcttacaatggtatagaatattagaatgtattcctcctatctaactgtaattttgtaccctttaacaaatctcttcctttccttctatctttcccagcctctggtatcc

SEQ ID NO: 935972 - DNA, 547 bp, Homo sapiens
ttttttaaagattaggaggttgagggaatctcagggtgaaatgcagaatgtgaccgaacaatctaactgcattacaaatgtagggaacaacctcaccgaaagggaaagggtgctaacccaagtaactttggaaatgagtggagtctgtaagactaaagacaaaagraactgtacataaaaactggatgctagttgataaaattatttcctatgaggataccagttaacaattctgatactgctacctaagtacacaggaactggataattaaataaatggatgatgagtgatgggacccatgtttctcactgctggggtgagagattgcagataagtaaggggagaaggctagaataattcatgcggtgacagattaggattggagatagcagtatgaattcatgtttagtttaatttaaatacagatggttacatatacaaatatttataaatatatgtatatgtatatataaatataaatatttataaatataaaatattgataaatatatgtataaatatgggctactatacacacatatattt

SEQ ID NO: 935973 - DNA, 547 bp, Homo sapiens
ttttttaaagattaggaggttgagggaatctcagggtgaaatgcagaatgtgaccgaacaatctaactgcattacaaatgtagggaacaacctcaccgaaagggaaagggtgctaacccaagtaactttggaaatgagtggagtctgtaagactaaagacaaaagaaactgtacataaaaactggatgctagttgataaaattayttcctatgaggataccagttaacaattctgatactgctacctaagtacacaggaactggataattaaataaatggatgatgagtgatgggacccatgtttctcactgctggggtgagagattgcagataagtaaggggagaaggctagaataattcatgcggtgacagattaggattggagatagcagtatgaattcatgtttagtttaatttaaatacagatggttacatatacaaatatttataaatatatgtatatgtatatataaatataaatatttataaatataaaatattgataaatatatgtataaatatgggctactatacacacatatattt

SEQ ID NO: 935974 - DNA, 547 bp, Homo sapiens
ttttttaaagattaggaggttgagggaatctcagggtgaaatgcagaatgtgaccgaacaatctaactgcattacaaatgtagggaacaacctcaccgaaagggaaagggtgctaacccaagtaactttggaaatgagtggagtctgtaagactaaagacaaaagaaactgtacataaaaactggatgctagttgataaaattatttcctatgaggataccagttaacaattctgatactgctacctaagtacacaggaactggataattaaataaatggatgatgagtgatgggacccatgtttctcactgctggggtgagagattgcagataagtamggggagaaggctagaataattcatgcggtgacagattaggattggagatagcagtatgaattcatgtttagtttaatttaaatacagatggttacatatacaaatatttataaatatatgtatatgtatatataaatataaatatttataaatataaaatattgataaatatatgtataaatatgggctactatacacacatatattt

SEQ ID NO: 935975 - DNA, 613 bp, Homo sapiens
caagggtcttgggtgagcctctgagactttctggcttcaggtgagactcagcacatgactagccgtggggactacaaggtgaagctccttctgcttgagaaaagcagaggaaaaaataaagggaaatttgtctagcatcttaggtaccagcatggccacaactgggtagagcacaaagagggcccttgaggtctctgattctaggacttgactcttctrtgaaatttctggactttccctgagccagaggggagtgcacttccctgaaagttgagtctcagaccaggcagcattcaccataaactgacttaacagcgcttgggtcctaagggaatgttggcagtagtctggcagtacttccatggtctgtggtgttgggggctacaggatgagaggatgaggctcttttgcctttggcaagggtagggaaaagtgggaaggactgcatcttgtatttcttttgcactattgccacagtacaatagaacaacaggtaaatttattgactaaagttattgactctagtcccagattcctggatggcacctctggacccacctggggcctggagaacctccctgccctgaagggaaggaccccgggttggcttgtt

SEQ ID NO: 935976 - DNA, 564 bp, Homo sapiens
cacaccagaatcttagcaatggaacctgtatatcagttgttacacaaatgttccaagtgattcctcaatttgagaaatatgttgacaccacctggttgtctagtggttaggatttggtgttctctcaatttaaggaatatgtggacatagtctggtaacctatctcawgccagacttcccaatatgaaacactgttccttttagtttcttaaatatatgaaaatatcaggtatcgcaggtctgtcagtcctcatccctcaaccaggaagaatgtgattctatcagaaatactcattttttcccagaaagccaaagtctattcatttcttttcccaaaagcttttgtagcttcaaatgaagtaaaataaaatgctgttgttttcagtcattttataaggactgtgagtaactgctaaatgctaacaatctgttaaaaccagcagagttcacaccctaactttcagcatttttcctaaaacctataacagatttgtaatggcagtagtttcagaagaatgcaaaactcaggattatgaagacagagatacatgatttaggcagggt

SEQ ID NO: 935977 - DNA, 564 bp, Homo sapiens
cacaccagaatcttagcaatggaacctgtatatcagttgttacacaaatgttccaagtgattcctcaatttgagaaatatgttgacaccacctggttgtctagtggttaggatttggtgttctctcaatttaaggaatatgtggacatagtctggtaacctatctcatgccagacttcccaatatgaaacactgttccttttagtttyttaaatatatgaaaatatcaggtatcgcaggtctgtcagtcctcatccctcaaccaggaagaatgtgattctatcagaaatactcattttttcccagaaagccaaagtctattcatttcttttcccaaaagcttttgtagcttcaaatgaagtaaaataaaatgctgttgttttcagtcattttataaggactgtgagtaactgctaaatgctaacaatctgttaaaaccagcagagttcacaccctaactttcagcatttttcctaaaacctataacagatttgtaatggcagtagtttcagaagaatgcaaaactcaggattatgaagacagagatacatgatttaggcagggt

SEQ ID NO: 935978 - DNA, 657 bp, Homo sapiens
gacctgaatagccatcagtgatacccaggtatgaagttgagggtttttgatgagaccctgagagttgctagcttcaggtgagactcagcatatcctcaagtggctgcggtgtctacagggtgcgactccttctgcttcagaaatgagaaagtaaaagtaaagggctcttgtcttgcaacttaggcaacagcttagccacaggggaaaagagcacaaaarggcctcttggggttcccgattcaaggactcaactctttgaaggcatttctggacctgccgtgggcaagacgagtgcccactgccctgaaaggtgagtccaaggccaggtgacttttacacaagccgaaggaactgccctagggccttagggaaacattggcagaagtctggcggtaatctctgcgggcctgaggtggccgtggccatggggtgaggctcctgtgcctttggaaaggggagggaagcatggggaaggactgcatcttgtggtttgagtgccagatcagttacagtacagtagaacaccacgtagaattgtaaggcttttgactctaggacctggctcctggatggcaccattagacctgcctgaggcctggggtaccttgttgccctgaagggaaggacacagtcctggctggcattgccacctgctga

SEQ ID NO: 935979 - DNA, 657 bp, Homo sapiens
gacctgaatagccatcagtgatacccaggtatgaagttgagggtttttgatgagaccctgagagttgctagcttcaggtgagactcagcatatcctcaagtggctgcggtgtctacagggtgcgactccttctgcttcagaaatgagaaagtaaaagtaaagggctcttgtcttgcaacttaggcaacagcttagccacaggggaaaagagcacaaaaaggcctcttggggtycccgattcaaggactcaactctttgaaggcatttctggacctgccgtgggcaagacgagtgcccactgccctgaaaggtgagtccaaggccaggtgacttttacacaagccgaaggaactgccctagggccttagggaaacattggcagaagtctggcggtaatctctgcgggcctgaggtggccgtggccatggggtgaggctcctgtgcctttggaaaggggagggaagcatggggaaggactgcatcttgtggtttgagtgccagatcagttacagtacagtagaacaccacgtagaattgtaaggcttttgactctaggacctggctcctggatggcaccattagacctgcctgaggcctggggtaccttgttgccctgaagggaaggacacagtcctggctggcattgccacctgctga

SEQ ID NO: 935980 - DNA, 610 bp, Homo sapiens
gagtaatattatggtccccatttcacagcagagaaaactgaggctcagaaagagtaagaaattttcccaggtcacacagtagttggaaaaactatttgaaaccagttttgtctgattcaaaatgcctgcactttgtctttctaaactcttctactagcaaatgctttaggaagaagttgagaactagtcaaattcagaaaagaaaactagtttataaagttcaataagtcttttgacatgcccacaaaatacactcattttaggacaaagaaaagtagttggatgcagtgtcttgtgcctataatcccagctactcaggaggctgaagcaagaggattgctcatgcccaggagttcaaggctgcaggagccatgatcgygccactgcactccagcctgggtgacagcacaagacctcatctctaaaaaaaaaacgtaaaagtaaatcagggccgggtgcagtggctcatacctgtaatcctaacccttttggaggctgaggatggaggattgcttgagcccaggaatttgagaccagcctgggcaacatggcgagaccccatctctacaataaattttttagaattttgccaggcatggtggtgcgtgcc

SEQ ID NO: 935981 - DNA, 610 bp, Homo sapiens
gagtaatattatggtccccatttcacagcagagaaaactgaggctcagaaagagtaagaaattttcccaggtcacacagtagttggaaaaactatttgaaaccagttttgtctgattcaaaatgcctgcactttgtctttctaaactcttctactagcaaatgctttaggaagaagttgagaactagtcaaattcagaaaagaaaactagtttataaagttcaataagtcttttgacatgcccacaaaatacactcattttaggacaaagaaaagtagttggatgcagtgtcttgtgcctataatcccagctactcaggaggctgaagcaagaggattgctcatgcccaggagttcaaggctgcaggagccatgatcgcgccactgcactccagcctgggtgacagcacaagacctcatctctaaaaaaaaaasgtaaaagtaaatcagggccgggtgcagtggctcatacctgtaatcctaacccttttggaggctgaggatggaggattgcttgagcccaggaatttgagaccagcctgggcaacatggcgagaccccatctctacaataaattttttagaattttgccaggcatggtggtgcgtgcc

SEQ ID NO: 935982 - DNA, 613 bp, Homo sapiens
cttcatcaaaattaaaaacttttgtgcatcaaagaacaccataaagaaattgaaaagaaaacccaaagactgggagaaaaaaaactgtaaatcatatatctgataaggaactagtatctataaaacattattacaactcaaaaataaaaagacaaatatccaattttaaaatgagcaaatgatctgaatacctacttctgaaggaaagcatacaaaaggttaataagcacaggaggcagggcacggtggctcacgtctgtaatcccagcactttgggaggcacttgagggggaggcagatcattcgaggtcaggggtttgagcccagcctggccaacatggcgaaaccccctctctactaaaaatacaaacattaaccgggcatggtggcacatacctgtaattccagctacttggtaggctgaggcaggagaatcgcttgaacccaggaggcagagrttgcagtgagccaagatggcgccactgcactccagcctgagggacagagtgagaccctgtctcaaaaacataaaaataagcacatgaaagatgctcaacatcactagctaatagggaaacatttgtcaaaaccaccctgagataccacttcacac

SEQ ID NO: 935983 - DNA, 436 bp, Homo sapiens
tgttcgctaccctggaaatgtttattatcgaaaatgagtcgggtcagctgtggtggatggagcaccgtttccgctgacactggccactaccagcgagcaacgtccttggcaatgcatggcgagagaagccaggacaacttttttcattttcstaaagtgaaatgaataaaaaagaataggtgaacattttcaatgtgattaacaaaacggtggaagaccagtgctcctcaattctgttcagagatgtaagaaaaaagcaaattagaaaacagatttgctgtgaaacctgcactagaaataaatagggggaaattgagtattggcaacgaagatctgagatactttctaccctgcaatgcagggatctgactactacattaataacatttactttggagtagatatattttaaacgtggaatttggctgataaaaat

SEQ ID NO: 935984 - DNA, 760 bp, Homo sapiens
ggtgcaggacagtgggtgcagagcactgagcgtgagctgaagctgggtgaggcattgcctcaccgaggaaacacaataggtcagggaattccctttcatagccaaggaaagctgtgacagatggcacctggaaaattgggtcactcctaccctaatactgcacttttacaatggtcttagcaaatgacataccaggacattatatcccatgccaggctcggagggtcccatgcccacagagcctcactcattgttagcacagcagtctgagatcgaactgcaaggtggcagtgagactgggggaggggtgcccgccattgccgaggcttgagtagataaacaaagtggcgggaagctcaaactgggtggaggccaccgtagctctaggaggcctgcctgcctctgtagactccacctctggggacagggcatagccaaacaaaaggcagcagaaacctctgcagacttaaatattcctgtctgacagctttgaagagagtagttgttctcccaacacagagtttgagatctgagaacggacagactgcctcctcaagtgggtccctgacccccgagtagcgtaactgggaggcatccccagtaggggyatactgacacctcacacggccgggtacccctctgagaggaaacctccagaggaacgatcagacagcaacatttgctgttcagcaatactcgctgttctgcagcctccgctgctgatacccaggcaaacagggtctggagtggacctccagca

SEQ ID NO: 935985 - DNA, 737 bp, Homo sapiens
ttatacttactgtgcctatgtgcctttcccacccttaatttgggcagtcacatggatggataatcctgttgaagtatatgttaataatagggcatgggtaccaggccccacagacgattgttgccctgcccaacctaaagaagaaggaatgatgataaatgtttccactgggtatcattatcctcctatttgcctagggaaggcaccaggatgtttaatgcctacaacccaaaactggttggtagaagtacctacygtcagtgccaccagtaaatttacttatcacatggtaagtggaatgtcactcgggccacagataaataatttagaggacgcttcttatcaaagatcattaaaatctgggcctaaggggaagccttgccccaaggaaattcccaaagaatcaaaaagcccagaagccttagtttgggaagaatgtgtggctaatactgcggtggtattacaaaacaatgaatttggaactactataatattatataatagttatatattatattatattatatacaattatattatatataattgtatgggccagactcactcatgtttacaggccccatccatctggcccattaatccggcctatgatagtgatttaattgaaaggctggaccaggtttatagaaggctagaatcaccctatccctggaaatggggtgaaaagggaatttcatcacctcgaccaaagttagttagtcctgttactggtccta

SEQ ID NO: 935986 - DNA, 737 bp, Homo sapiens
ttatacttactgtgcctatgtgcctttcccacccttaatttgggcagtcacatggatggataatcctgttgaagtatatgttaataatagggcatgggtaccaggccccacagacgattgttgccctgcccaacctaaagaagaaggaatgatgataaatgtttccactgggtatcattatcctcctatttgcctagggaaggcaccaggatgtttaatgcctacaacccaaaactggttggtagaagtacctaccgtcagtgccaccagtaaatttacttatcacatggtaagtggaatgtcactcgggccacagataaataatttagaggacscttcttatcaaagatcattaaaatctgggcctaaggggaagccttgccccaaggaaattcccaaagaatcaaaaagcccagaagccttagtttgggaagaatgtgtggctaatactgcggtggtattacaaaacaatgaatttggaactactataatattatataatagttatatattatattatattatatacaattatattatatataattgtatgggccagactcactcatgtttacaggccccatccatctggcccattaatccggcctatgatagtgatttaattgaaaggctggaccaggtttatagaaggctagaatcaccctatccctggaaatggggtgaaaagggaatttcatcacctcgaccaaagttagttagtcctgttactggtccta

SEQ ID NO: 935987 - DNA, 574 bp, Homo sapiens
ggggatacagggcccatggatgtccgaaatccagcggggcactcaaatctcaaaggtccaaaatgatcttctttgactccatgtctcacatctgggtcacactgatgcaagaggtgggttcccatggtcttgggcagctccacgcctgtggttctgcagggtacagtctctctcctggctgctttcacaggctggcattragtgcctgcagtttttccaggcacacagtgcaagccctcagtggatctactattctggggtctggaggatggtgatcctcttctcacagttccactaggcagtgccccaacagggactctgtgtgggggctctgactccaaatctcccttctgaactgccctagcagaggttctccatgagggccctgcccctgaagcacacctctgcctcagcatccaggtatttccatacatcttctgaaatctaggcagatgttcccaaacctcaatccttgatttctgtgcacccacaggctcaacaccacatgggagcttccaaggctgtggcttgcaccatttgaaaccatggtctgagttctacgttggcccctttc

SEQ ID NO: 935988 - DNA, 588 bp, Homo sapiens
aacaatgtagaagaaaagatcagtgaactttaggatgtagaaactatccaaaatgaagcctaaagaaaaaaaaatggttaagacaaatggacgtaacatcagtgacctgtgggacaatatcaaacagtctaacatgttattacatctaattggagataaagaggtgggagacataaaaatattcaacaaaaaatggccaaatatgattccaatttgattataaacagaaattttgagaagaagccagagggggaaaaaatcttatyatatacggaagaacaaagaattgtcacagatttcttgtcaggaactgtgcaaactaaaagacaaatttaaagttctgaaagaaaaaaacttgaattttgtactgttgaatatatgtttcaaacaaatgcaaaaggaagactttttacacacacacacacatacacacacacacacgctctcttgagaaaatttgtcaaaagtacacctgtacaagaaatgttaaaggaagttctttagggcagaaaattcataactgtttttttttttattcattatgcctttttataaatgttgacatttttctttattgtaatgtatttt

SEQ ID NO: 935989 - DNA, 588 bp, Homo sapiens
aacaatgtagaagaaaagatcagtgaactttaggatgtagaaactatccaaaatgaagcctaaagaaaaaaaaatggttaagacaaatggacgtaacatcagtgacctgtgggacaatatcaaacagtctaacatgttattacatctaattggagataaagaggtgggagacataaaaatattcaacaaaaaatggccaaatatgattccaatttgattataaacagaaattttgagaagaagccagagggggaaaaaatcttatcatatacggaagaacaaagaattgtcacagatttcttgtcaggaactgtgcaaactaaaagasaaatttaaagttctgaaagaaaaaaacttgaattttgtactgttgaatatatgtttcaaacaaatgcaaaaggaagactttttacacacacacacacatacacacacacacacgctctcttgagaaaatttgtcaaaagtacacctgtacaagaaatgttaaaggaagttctttagggcagaaaattcataactgtttttttttttattcattatgcctttttataaatgttgacatttttctttattgtaatgtatttt

SEQ ID NO: 935990 - DNA, 397 bp, Homo sapiens
ttcctttcatgtgaaggtttttcctgacatcactttctctcagacatcttcataactgccttcacaatgactttcatttatttatttatttatttatttatttatttatttatttattatctttttttgagatggagtctcacactgtcacccaggctggagtgcagtggtgtgatcttggctcactgcaacctccacctcccgggttcaagcgattctcctgcctcagcctccagwgtagctgggattacagtcgcccgccaccacgtctggctaatttttgtatttttagtagagatggggtttcaccatcttggccaggctggtcttgaactcctgacttcgtgatccacccctccctcggcctcccaaagtgctgggattacaggcatgaacc

SEQ ID NO: 935991 - DNA, 747 bp, Homo sapiens
taatttgtctcccatggacttgtctctcaatggcttggctgtgggcctactaaaggaaaaaagaaattgtgttttttaccttctctaaaaattgcacattatttgcacttttgaaatctcattttgtttccattcagtggttatcaaaattattaacaaaagccagatgacaatattaatcatattaaagactgtgtttaatttatatttataatgctcatataatgtcataatgttctatgactatactacataggcctcctacagatgatcaaatctttaggtgaaatgtttattttttgtttgtttatgaactgtcaatagccatccatgtgctgttaaagataaaggttttgcagcccggctcagtggctcacgcctataatcccagcactttgggaggctgaggcgggcagatcacgaggtcaagagttcaagaccagcctggccaacatggtgaaaccccatctctactaagaatacaaaaattagctgggcatggtggcaggcgcctgtaatcccagctactcrggaggctgaggcaggagaatctcttgaacctgagaggcggaggttgcagtaagccatgatcgcaccattgcactccagtctaggcaacaagagcaaaactctgtctcagaaaaaaaaaagaaaaagaaaaagataaagttttttataatataggttgttataaagaaaacaaagaagaattatagaaatatctttcttattttgacttcataaaag

SEQ ID NO: 935992 - DNA, 747 bp, Homo sapiens
ggaagacaaatataaaacaaacaaacaaacaaacaaacaaacagcaataactgaacttccagggagacagacttcagagatttaatcttaggcaagttacttaacaaataaaaagcagaaacaacaaccttcagagaggtaaactcagaatctggagttgctaaaatatattctcaaaaatgtccagttttcaacaaaaaattaagagataygcaaagaaatagcaagatatgaaccatactgagaaaaaaacaaacagtcaatagacactatctctgagtgtccgcagatgttgaatttggcagaaaaaaacaatgtggcagataaagcagattctataaggattttcaaagaactaaaggaagcctaaaaaattaaagaaaaatatgacagagaatcaacacacagagtttcaaaaaggagagagaagttaccaaaaaagaatcacatggaaattctggagttgaaagtatagtaattgaaataaaaaattcactgcagataaggctcaacataagatttaaggtagcagaagaaaaaaaacacctagtgaatttgaagatagatcaacagaagttaactaacatgaagaacacagagaaaaaaaacttaaacgtaaaatattagaatacatcaagcacaccaaacacttgtaatgagaatcccagaggaagaagagagagtgagacaaaaaatatctgaatgactgatcatgcatagtagagtgggcacgtgagataaacagca

SEQ ID NO: 935993 - DNA, 587 bp, Homo sapiens
ccaaactcctgttaatgttgacattttgaccttcttccatgaatcatgaatgttcttcatggcatccagaacgatgaatccttttcagaaggttttcgatgtactttgcccagatccatcagaggaatcactatttatggcarccatagccttgcgaaatgtatttcttataggacttagaagtcaaaattactcctcgatccaagggctgtagaataagtgctgtattagcaggcatgaaaacatcaatcttcatgtacatctccatcagcgctcttaggtgaccaggggcattgtcaatgagcagtaatattttgaaagaaatctttttttctcagcagttggtctcaacagtgggcttgaaatattcagtaaatcatattgcaaacagatgtgctgtcatccaggcttggctattcaatttacagaagacaggcagagtagattccgcataattctaaggacccttaggattttcagaatggtaaacgagcactggtttcaacataaagttaccagccgcattagccccttaaagagagtcagcctgttctttgaaactttgaagcaggcactggcttcccctc

SEQ ID NO: 935994 - DNA, 587 bp, Homo sapiens
ccaaactcctgttaatgttgacattttgaccttcttccatgaatcatgaatgttcttcatggcatccagaacgatgaatccttttcagaaggttttcgatgtactttgcccagatccatcagaggaatcactatttatggcagccatagccttgcgaaatgtatttcttataggacttagaagtcaaaattactcctcgatccamgggctgtagaataagtgctgtattagcaggcatgaaaacatcaatcttcatgtacatctccatcagcgctcttaggtgaccaggggcattgtcaatgagcagtaatattttgaaagaaatctttttttctcagcagttggtctcaacagtgggcttgaaatattcagtaaatcatattgcaaacagatgtgctgtcatccaggcttggctattcaatttacagaagacaggcagagtagattccgcataattctaaggacccttaggattttcagaatggtaaacgagcactggtttcaacataaagttaccagccgcattagccccttaaagagagtcagcctgttctttgaaactttgaagcaggcactggcttcccctc

SEQ ID NO: 935995 - DNA, 607 bp, Homo sapiens
ggtggctggcgcctgtagtcccagctacttgggaggctgaggcaaggagaattgcttgaacctgggaggcagaggtttcactgagccgagatggcgccattgcactccggccctgggcgacagagtgagactccgtctcaaaaaaaaaaaaaaaaaaaaagagtaaggctctattgctactccctgatttaataaacgtctctgggacaaaatttcttcatctgtaaaaaaggtaaataaaaaaaacgcttacttggcaagttcattgtgacgaattatctacgacaccrgaatggaaagtgctttacagattgcaaagcactccttacacatgagtaattagtgttcacaggtccagccacttttggggaggaggaaagtgtggtcttttagagaccaaacgtctttctaaagtcctgacagccaacgaagggctcggtgatctctgcgcttcaaactctgcccaattctcaaagcctggtttaagtacacttttccctcagcctaagggagtggcccaagggcaaaccgtcccgggttcgtgtcccacctctgcctcaaagattacaccctcttaggacaggtgcgtgtccctggtggcctgggc

SEQ ID NO: 935996 - DNA, 630 bp, Homo sapiens
atagcaactgtgtcaggtagacattttctagataagaaaccttaggccgaattgtgtgtcttgctggaaagtcagacagcagaggtaggattcccacccagttttctggctccaaatcgtcaccctttcccagagtcctgggccaccttagcaagttacttttcatttattttattttattttattttacttttttgagacggagtctcgctctgtcgcccaggctggagtgcagtggcgcgatcttggctcactgcaagctccgcctcccgggttcacgccattctcctgcctcagcctcctgagtagctgggactacaggctcccgccactacgcccagctaattttttgtatttttagtagagacggggtttcaccgtgttagccaggatggtcttgatctcctgacctcgtgatccagccacttcggcctcccaaagtgctgsgattacaggcgtgagccaccatgcccagccttctttttattttttgagacaaggtctcactctgtcacccaggctggagtacagtagcacaattgtagctcagtctgccaggctcaggcaatcctcctgccttggcctcccaaagggatagggttacaggcatgagccaccacacctggctgc

SEQ ID NO: 935997 - DNA, 629 bp, Homo sapiens
ccagaggtacaaagaggcgctgctaccattccttctgaaactattccaaacaagagaaaaagagggaatcctccctaactcattttatgaggccagcatcatcctaataccaaaacctggcagaaacacaacaaaaagaaaatttcaggccaatatccctgatgtcccatcaatgtgaaaatcctcaataaaatatggcaaactgaatccagcagcacatcaaaacttatccaccatgatcaagtcagcttcatacctggaatgcaaggctggttcaacatatgcaaatcaataaacgtaatccagcatataaacagaaccaatgagaaaaaccacatgattatcttaatagatgcagaaaaggccttcaacaaaattcaacaccccytcatgctaaaaactctgaataaagtaggttttgatgaactgtatcttaaaataataagagctatttatgacaaacccacagccaatatcatactgaatggacaaaaacttgaagcattccctttgaaaactggcacaagactaggatgccctctctcaccactcctattcaacatagtgttggaagttctggccagggcaattaggcaggagaaggaaataaagagtattcaaataggaaa

SEQ ID NO: 935998 - DNA, 565 bp, Homo sapiens
gaggtcaggagttttagatcagcctggccaacatggtgaaaccctgtctctactaaaaatacataaattagccgggcatagtggtacacacctgtaatcccagctactcaggaggctgaggctggagaattgcttgaacccaggagatagaggttgcagtgggctgagatgatgccactgcactccagcctgggcgatggagcgagactctgtctcaaaaaataaaataaaagtattgaaattaacaataagtaattaatagcatgggtggtacctggatgtagtaaaatggtgaagatgaaacacaagttgatggagagaggagcattgagacctgagttctcatttggactctgtcactgtgagactctgggcaagtgaccctcctctttggtgctcagtctcaactatctgtaaaatgaaagtktgagtttacccttccagctttacattctagcattttatgagggaagggctggatgaacagatgatgaggagttggaggaagaaaacatgatgggctttggaaaggagcaggaagggaagcagaagaataggaggaaga

SEQ ID NO: 935999 - DNA, 726 bp, Homo sapiens
tggactgacctgattttttatgcacaatgcagaacagaaccctgtccagagttgggtactgcccctgtgaccagggctggtgtgggcaaccgagcttgactctgtacctctggcctggaggctgcagtgcctgaaacccacttctatcaccacctcttactgctgtatgakttgggacaagccctttgagcaacgtgagcctcagtttcctcatctgtcaggtagaaatgattatttcccccatacctcagtcattgatccttggtggctgtgcctcaaccacatcactaagccctctgaggttcagcttgctcatctgtaaaacagggacaataacagcaaatgagatcacgtggagaaaagcacttcaaaatttaaaaattatctggtgcttgagagaaatcacctgtgagatggaaagactcggccagattttcaattcttggctccatctgcaaccctggctggcatttcttagaggatgcaggcctctgggtgttgcttcagtggccaaggaggctcagacagagagctccaggaccccaaggacaggaaggcccatggacggagtctgccggtcagaaggcaccggcccgtggctccctggagctgcacagcaatgattcaggaaaaggctgacaaggatatcagcagcgtgggtttttttaatcctgagtccagagaaaatgcacaatcaggaataaaggcgcccaagagagcaaggag

SEQ ID NO: 936000 - DNA, 863 bp, Homo sapiens
gtgagaaggcagctgtctgcaagcgaaggagagagccctcgccaagaacaaaccctgttggtgccttgttcttggacttccagcctccaaaactatgggaaaataaatttttgttgtctaagcctcccagtctgtagtacttttgttgtgcagctccgtctgattaatgtactgcctaatgaagacttattttaaaaataagaaagcatccaggcacggtggctcctgcctgttgtaatcccagcactttgggaggctgaggcgagtggatcacctgaggtcgggagtttgagaccagcctggccaacatggtgaaaccccgtctctactaaaaatacaaaaacttagccaggtgtggtggtgtgtgcctataatcccagctcctcaggaggctgaggggggagaattgcttgaacctgggaagaggaggctgcagtgagccgagaatgtgccascctgggcaacagagaaagactccatctcaaaaaaaaagaaagcttagctggtgatatggtttggctgtgtctctacccaaatctaatgttgaattgtagctcccataattctgacatgttgtgggagggacctggtgggagataactgaatcatggtggcagtttcccccatactgttctcatggtagtgaataagtctcatgagatccactgtttttctaacaggtatccccttttgcttggttctcatttctttcttgtctgctgccatgtaagacgtgttttttgccttccagcatgattgtgaggcctcctcagccacatagaactgtgagtccattaaacctctttttctatataggttacccaatctcatgtatatctttatcagcagcatgaaaatgggct

SEQ ID NO: 936001 - DNA, 616 bp, Homo sapiens
acttctcattcaaaacaaaggagaccagaggcactgggatgacatactgaaaaatgctgtaagaatatgcctgtcaactaagaattctgcatccattaacactatctgtcataattaaaggtgaaataaagacattcccaggtaaatgaaagatgtgtgaatttgttgctagcagacgtgttttacaagaaatacttaaggaaggccttcaggctgaaagtaaattattctaaaatggtaatccacatgaagaaataaaagcatggcaaaagataaatataccaataaatgtgtaagactttaagtatatatacacatttctgcttttttctcttaactggcttaaaatatataagattgcataaamcaatacctatgaaactgcatttctgggcttttaaactataaagttgtaatatatataaataatagtgcaacattttaatttcttattttttcatatatatatgaggtgtgcatgtatatatatgtgtggttatgtgtgtgtgcatgtgtgtgtgtgtgtatatatatatatatatatatatatatatatatatataaaatggttgatttaagactttcaagacagaccttagttcattataacctactt

SEQ ID NO: 936002 - DNA, 735 bp, Homo sapiens
ctgtaaactagttcaacccctgtggaagacagtgtggtgattcctcagggatctagaactagaaataccatttgacccagccatcccattactgggtatatgcccaaaggattataaatcatgctgctataaagacacatgcacatgtatgtttattgtggcactattcacaatagcaaagacttggaaccaacccaaatgtccatcaatgatggactggattaagaaaatgtggcacatatacaccatagaatactatgcagccataaaaaatgatgagttcatgtcctttgtagggacatggatgaagctggaaaccatcattcattcagcaaactatcacaaggacaaaaaaaccaaacaccgcatgttctcactcataggtgggaattgaacaatgagaacacttaaatacaggaaggggaacatcacacaccagggcctgttgtggggtggggggaggggggagggatagcactaggagatatacctaatgtaaatgacgagttaatgggtgcagcacaccarcatggcacatgtatacatatgtaaaagacctgcacgttgtgcgcatgtatcctagaacttaaagtataataaaaaaatttaaaaaaataaaaataaaaaaatgcaaagagagaaaaaaaaaagaagttgcctggtttgagttatcctttgcctaatcccttgtgtctgttcctcacaaccagaatcatttttctctcttccagtggc

SEQ ID NO: 936003 - DNA, 638 bp, Homo sapiens
atttctctattgtattccataaaatcatgcatcatacacttctccacagtctgattcaggcccctttgcagaaatagtctttgaggctaggcagtgagatttttttccgaccccagaagggctcttcttagctgtttctttccctggttctctctgttaaacttctagctggtcttcagtttagcttgttgctatcatgaagctctcctcttaattgattaccaccaaaatcaccattaatttaaacatcacccttaggtttgaacctccccatgtctgttcttaggcctccccatcccctgaaygaaacctctgcaccacagctctcgtgctagaggtagagacaatggcacccttatcttagagtagcactcctgatttacaagtgggatactgaatgggggaggtagctctcatggcttactttagggtcacttttggtgtcctgcatggtaaggatttgagcaaatgtacagtgacatgtatgcaccattacagtattatccagaatagtttcactgccttaaaatcctgtgtgccccacctatgtatttcctccactaagcacctggcagtcactgatacttttactttctgcatagctttgccatttccagaatatcatatagtttaaatca

SEQ ID NO: 936004 - DNA, 638 bp, Homo sapiens
atttctctattgtattccataaaatcatgcatcatacacttctccacagtctgattcaggcccctttgcagaaatagtctttgaggctaggcagtgagatttttttccgaccccagaagggctcttcttagctgtttctttccctggttctctctgttaaacttctagctggtcttcagtttagcttgttgctatcatgaagctctcctcttaattgattaccaccaaaatcaccattaatttaaacatcacccttaggtttgaacctccccatgtctgttcttaggcctccccatcccctgaatgaaacctctgcaccacagctctcgtgctagaggtagagacaatggcacccttrtcttagagtagcactcctgatttacaagtgggatactgaatgggggaggtagctctcatggcttactttagggtcacttttggtgtcctgcatggtaaggatttgagcaaatgtacagtgacatgtatgcaccattacagtattatccagaatagtttcactgccttaaaatcctgtgtgccccacctatgtatttcctccactaagcacctggcagtcactgatacttttactttctgcatagctttgccatttccagaatatcatatagtttaaatca

SEQ ID NO: 936005 - DNA, 621 bp, Homo sapiens
aaaccagcctgggcagtatgccgaaaccctgtctccactaaaaatacaaaaactagctgggtgtggtggcaggtgcctgcagtcccagctacctgggatgtaaggtgggaggatcacttgagccccgtaggtggaggctmcagtgagctgagatcttgctgctgtacttctggagaccctgtttcaaaaaataaattaaccagaaaccagcccagtgcaataactcacacctgtaattccaacattttgggaggctaggcgggaagatcactttagaccagggttcgagacaagcctgggcaacagaatgagaccctgtctccacagaaaaatttaaaaattagccaggtgtgatggcatctgtagtccccatgacttgggaggttgaggtgggaggatcgcttgagcccaggaagccgacgctgcagttcagcggtgatcgttccactacactccagcctgggtgacagaaggagaccgtctctaaaaagataaaaaaatttaaagaaaaaccaacaaaaaaattaacctgaaaccccagcatctcttgcagttctgagatgggacaatttgagggtaaaaggtggtggtgaagcctccagatagaatagggacagaact

SEQ ID NO: 936006 - DNA, 778 bp, Homo sapiens
cagctgatgaggaaggagctgggaatatgggtgcagacaaggaatcaaacacaatcagagcaacacagcccagacagcattcccagtgccattgaccagaagttccgtataatccacctcccaacccacaccttgggtctgggactctgggcagacctacccccgtggaacaggactgagaagaccaagtatgcttctaccgctctgggctgagatgaaataaaggacttcggtctcttgagcagatgttcaggcaaaattaccccatccaaaattaacaaggactggcagccggtgtgaaaacagcccttccaagtcttagtcagaggggaagagaaaggagccaaccactttgggcaaaagggttaggtctagagaagacttagcacaactctgcaagttaaaaaaaaaaacaaaaaaaatagggtggggggatggctaaagtaacatcatagcctttgttttgtgtttgtttgtttttgaaacagggtctcacttcattgcccaggcaggagtccatggcgcgatctcagctcactgcaacctccacttcccaggttcaagagattctcctgcctcagcctcccaagtagctgggattacaggcacatgmcaccacggccggctaatttttgcatttcaagtagagatggagtttcaccatgttggccaggctggtcttgaactcctgacctcaggtgatccgcccgccttggcctcccaaagtgctgggattacaggcatgagccaccacgcccacctgacattatagcctctg

SEQ ID NO: 936007 - DNA, 613 bp, Homo sapiens
aagatgagcatttctgattcacaaagcgaagcacagtcaacatgccattcaggcctccctaattcttttgtttgttttgagatggagtctcactctgtcgcccaggctggagtgcagtggtgggatctcggctcactgcaacctccgcctcccgggttcaagtgattctcctgcctcagcctccagagtagctggggttacaggtgtgcaccaccacacctggctaacttttgtatttttagtagagacggggtttcgccatgttggccaggctggtctcgaactcctgacctcaagtgatctgcccacttcagcctcccaaggtgctgagattccaggcatgagccaccacacctggcccgggcctccctccctaattctaagggtttcctgaagcaatgctgcattagcacccaaccgccagctagacccagkagagtaaagtgagggataaaacggaaggtgtgcaagaagcatcggggtcgtaggttgtctaatcttttgctttcaggaaaaaaaaaggcatcagaaatagctgaatttccacagggaaaacaatggagctggaccctaccccacacgatacacaaaaaccaacctgcacggatcagag

SEQ ID NO: 936008 - DNA, 584 bp, Homo sapiens
gttctttcttcttaagtatttatttttatcagtcaagtgataggaagttcaatttcaagtacaagacatttggatcaagaagtgactattatttatttatttgagatggagtcttgctctgttgcccaagctggagtgcagtggtgtgatctcagctcactgcaacttcctcctcctgggttcaagcaattmcgctgcctcagcctcccgagtagctggaattacaggcacccaccggcccagtgaattttttgcacttttttttagtagagatgggttttcactatgttggccaggctggtcttgaggctccatacctcaggtgatccgcccacttcagcctcccaaggtgttgggattacaggcgtgagccactgcgcctggcaagaagtgaccttttatgccactgtctcttccgctgattcctagcaggctgtgttttgtttgtttcatgctatgttaaaaaaaaaaattgaagcagtatttaaaaatcacttgattttatgtcaaaattagtttttctcaagaaagatcaggtctggaaatagtaggcccaacttctacctggcagtggttggccaagc

SEQ ID NO: 936009 - DNA, 584 bp, Homo sapiens
gttctttcttcttaagtatttatttttatcagtcaagtgataggaagttcaatttcaagtacaagacatttggatcaagaagtgactattatttatttatttgagatggagtcttgctctgttgcccaagctggagtgcagtggtgtgatctcagctcactgcaacttcctcctcctgggttcaagcaattccgctgcctcagcctcccgagtagctggaattacaggcacccaccggcccagtgaattttttgcacttttttttagtagagatgggttttcactatgttggccaggctggtcttgaggctccatacctcaggtgatccgcccasttcagcctcccaaggtgttgggattacaggcgtgagccactgcgcctggcaagaagtgaccttttatgccactgtctcttccgctgattcctagcaggctgtgttttgtttgtttcatgctatgttaaaaaaaaaaattgaagcagtatttaaaaatcacttgattttatgtcaaaattagtttttctcaagaaagatcaggtctggaaatagtaggcccaacttctacctggcagtggttggccaagc

SEQ ID NO: 936010 - DNA, 584 bp, Homo sapiens
gttctttcttcttaagtatttatttttatcagtcaagtgataggaagttcaatttcaagtacaagacatttggatcaagaagtgactattatttatttatttgagatggagtcttgctctgttgcccaagctggagtgcagtggtgtgatctcagctcactgcaacttcctcctcctgggttcaagcaattccgctgcctcagcctcccgagtagctggaattacaggcacccaccggcccagtgaattttttgcacttttttttagtagagatgggttttcactatgttggccaggctggtcttgaggctccatacctcaggtgatccgcccacttcagcctcccaaggtgttgggattacaggcgtgagccactgcgccyggcaagaagtgaccttttatgccactgtctcttccgctgattcctagcaggctgtgttttgtttgtttcatgctatgttaaaaaaaaaaattgaagcagtatttaaaaatcacttgattttatgtcaaaattagtttttctcaagaaagatcaggtctggaaatagtaggcccaacttctacctggcagtggttggccaagc

SEQ ID NO: 936011 - DNA, 791 bp, Homo sapiens
gctgccagtgtggctagaataaaagcaggcagagaaacgtgaaaggactagactggctaagtcttctggcctccatctttctcccataattgatgcttcctgtcctctaacatcagactccaagttctttagcttttggaatcttgtacctacaccagtggtttgcaggggctcctgggccttcagtcacagactgaaggctgcactgttagctttcctacttttgaggttttgggacttgaattggcttccttgytcctcagcttgcagatggcattttgtggaacttcaccctgtgattgtgtgagtcaatactccttaataaactccctttcatatacatctatattagtccatcttcacaccgctggtaaagacatacccaagactgggaaatttacaaaagaaagagttttaatggatttatagttccaagtgactgggaggccttacaatcatggtggaaggcaaggaggagcaagccacgtcttacactgatggcagcaggcaaagaaagagagcttgtgcaggaaaactcccccttataaaaccatcagatctcatgagacatactcaccatcatgagaacagcacgggaaagacccacccccatgattcaaccacctcccaccaggtcccacccacaacatgtgagaattcaagatgagatttgggtgaggacacagccgaaccacataaacatctattctattagtcctgtccatctagagaaccctgactaatatgagaaccaagtgctcacacgtcttgttgcaagggatggagagcca

SEQ ID NO: 936012 - DNA, 590 bp, Homo sapiens
ttactcctttcttctttttaatgtgttgtttctgactttattttgtatttaatttttaaatttacaactgacacaatgttatggggtacaatgtgatgtttccatgcagaatacatagtataatgatcaaattgttgtaattatcacacttatcactttaaacwtttattatttatctgcagtgacaacacgtaacataatctcttctggctatcttgaaatatacaccataacgttatttgctgtagtcactctaatctgtgacaatgcctttttccattatataatgtccctctttgtctcttttaactgctattattttaaagtttttttttttttgtctgaatagctgaatagctacccctgctcgtttttcgtgtccatttgtgtgaatgctttttcccatttctttaagtttatgtaagtccttatgtgttaggtgagtttcttgaaggcagcaaatagttggatggtgagttcttatccattctgcagttctgtatcttttaagtggagcatttaggccatttacattcaatgttagtattgaaatgtgaggtaccattgcattcatcctgctatttgttgcc

SEQ ID NO: 936013 - DNA, 534 bp, Homo sapiens
gcttgtgtttggggaagtgctgacaaggcagccttctgctgcttcagccccctccagacattgggagccagtgagcatgggagggagactgaggggggagctaagggtggctcatcatgggcctgtaggcacccctcagcacagggagcctgggtgcttgggaaccatgargggcaggttagtggcagcaggatgcagacaggctcctgggaggaaaggggctggtcctcagtaaagccccttcttcaggcctgggatggtctgaagtcaggtgggcaggctgccagttctgtggaccgaagtgagaacttatagtgtttttctgggtttgcacatggctgcctgtggacaaattagcatgccctttctccccctgaagcccacagaaaccctggactcagccagacttgggcagatgtcaggacaacctgcctgtggagaggagctgcccactgtaggtctcctctctgctgtgagctggactctcatcaggatgacctgtctgcaaagaggagctaaccactgtgggtctct

SEQ ID NO: 936014 - DNA, 564 bp, Homo sapiens
aatcagggacctcaagctaacaatctcaaaagagaattactaacaattaaccctccatgaatatcctatgcttgctcttctcacttttcttccttgccatagggcatcttcatcaaggaccccttaatcctgaactcccaagggattatctactcccctaaacagttatttctcttttaaagtttaactgcctccatacaagatttaattccttttaccagggtgaaacagctctagccacaacactgttttcagaatgattagtctattttatttcttatttctgttatcttttggcactagattttttcctttgcatacttaacctccttgtaaaatttgtttcttctcacctagaarccatcaaactccaagtggacatgcaactggagcctcagaaaatggctctccttttaccaggggcctttagataggcctctgagagagatctgactgccatttttcccagaatgccccctgtcagcatgaaggagttaagagtggtcattgtctgtatcctaatggcagttagatgtacctcttcgggtgaagcagggtgatggc

SEQ ID NO: 936015 - DNA, 731 bp, Homo sapiens
gcccagtcatggctgtggactcaggcatctctgcactctcgggggcccaggaagccccccttccccacaggcttggaagtgcctgctcccactgcctggcctctgcccactcccagcacccactccaattttagartgaagttgtggctgagcctgggtgctgtcatgacctggccaggtgtgctcatgctcagggcagtgttgacacaccagcctgctgatgccttgaccctctctgaacattgagcactgatgagcatgggagagaggctgaagggggactaaggatgacttggcatgggcttgtaggcaccacttgacacagacagcctgggtgccatggccaccatgggtggcaggttaatggtgttaggaggaagacaagttcctggatggaaaggggtgggtccccagtgaagctccccctttaggcctgggatggcctgaagcctgggggccaggttgccagttccacagaccagagtgagaacttactgtgctttttctgggcctgccaatgtctgcctgtggactaatcaggacaccctcttcccctctgaagcccataaaagcccctgactgagccttactcaggcagacatcaagatgacctgccttcaaagaggagctacccactgtgggtattctctctgctgagagctgagcagacatttagacaacctgtctgcagagcagagctactcactgtgggtctcctctgagctgttctg

SEQ ID NO: 936016 - DNA, 579 bp, Homo sapiens
gaatctttctggtcctgtgctttttttggttagtaagctcttaattactgcctcaatttcagaactcgttattggtctattcagggattcaacttcttcttggtttagtcttgggagagtgtatgtatccaggaatttatccatttcttctaggttttctagtttatttgcacagaggtgtttatagtattctctgatggtagtttgtatttcagtgggatcagtggtgatatcccctatatcattttttattgcttgtatttgattcttctctcttttcttctttattagtcttgttagtggtctttctgttttgttgatsttttcaaaatacctgctcctggattcattgattttttgaagggattttgtgtctccatcttcagttctgctctgatcttagttatttcttgtcttctgctagcttttaaatttgtttgccattgcttctctagttcttttaattttgatgttaggatatcaattttagatttttcctgctttctcttgtgggcatttagtgctaaaaatttcccttgacagactgctttaaatgtgtcccagagattctggtatgct

SEQ ID NO: 936017 - DNA, 657 bp, Homo sapiens
acgcctgtaatcctagtgctttgggaggccaaggcaggtggatcacctgaggtcaggagttcaagaccagcctggccaaaatggtgaaaccccgtctctgctaaaaatacaaaattagccaggcatggtggcacatgcctgtaatcccagctacttgggaggctgaggcaggagaatcgctcaaacctgggaggtggaggttgtagtgagccgagatcacgccactgcactccagcctgggcaacaagagcgaaaytgtctcaaaaaaaaaataaaataaagtaaaataaaattattcactgtatatttaccaatatatttcattccaatggaatgttcgcaagtggttaagtagaaggcataaatctatattttgcctggaccattatgacagtactaaatcccatcttaattccctgtttttattaatatccccctacaatccaagttatctatttaaaaactaaatcatccttaataggcaaatccacagagattgacaagtggttgacagagataggggggtggtaactactaatgtctgtggggtacttctcgggggtgaggaaaatgttctggaattacctagtggtgatggtcacacaactttgtggataaactaaaaaccatgaagttgtatacgttaagggggtgaat

SEQ ID NO: 936018 - DNA, 599 bp, Homo sapiens
aaagctctttattattattttaaatagtattttttccaagaaatgtatacttagtataggtatcacaggaaatatataaattttcaaataaacttttaaaaaacaactataaggccaccaaaacattgtgtaatattctttcataggaatccaccacaatttataatttataaaaataattgatcatttatttgattctcccctagttaggttcatttagattggtaaacctatgctctttctactatatgacatcaaccaagagcagcaagcataagtaggaagagcagggtcctaggcaggtgcccaggtagaaagctactgagtaaaagggattcagatggacatagttcagcaccctggagagctccatgacagtattgctccattatggactcrgcagtaacactggctgggaaccctttagggttctgaactgctttcccagaatgggatgttaaaagagataatacacggctaagttttggggggtggaggtggtctctttgtccctgaagggattcatccttaccagtccccggttcaaagagcactgtggctgtgggtagtttttctcaccactctgctttttctcatgc

SEQ ID NO: 936019 - DNA, 577 bp, Homo sapiens
gtaaataaagttttgtgggaatacggccacacccatgtgtttatgtattatctagggctgcttttgcctgcaatgacacagttgagtcgttgcaacagagactgtatgacctgaaaatgctaacatattttaccatatggccctccgcagaaaaagcttgccaacctctgttctagatcagtggttttcaaaagtgcggtccttagacaagcaacttttgtgtcacctaccagcttgttagaaatgccatttcatgggtcctgcctcaacctattgaatgaaaatctctggagatgggcaccaggagattgctctagcaagctctccargagattctcatacacatggaagtttggcaccgggagattgctctagcaagctctccaggagattctcatacacgtggaagtttggcaccaggagattgctctagcaagctctccaggagattctcataaacgtggaagtttggcaccaggagattgctctagcaagctctccaggagattctcatacacatggaagtttgagaaccattgtcctaaattaaaggagactaaaaaggcatgacaaaatg

SEQ ID NO: 936020 - DNA, 710 bp, Homo sapiens
aggatgtatgtatatatacatatatatgaatatgaatatatatatattaatgaatacacacacacaccagcaggaacatgggattacatgcaggatgggatcttgagggggttaactggggtgaggtgaagcatatgggttgggtaagagagaattcatagggatttcacccagttcagtgttctaacgagtatgtctatagctagtcttaataatttgttgagataactccttgaaacttggatatgcagtggcctacagtaagtaaggtagtaatgccagaactttttttggcagagtattgaagaaggtcagaaggcttagtgtggtggaaatcttagaactgaattagcacctgagacccctgactatgtccctgagaggcaagagggaaaaatccattctctaaagcagtaagcactggtgaagggaacctccaatatctttgagacctttggctgtggttgtcctctgaaggtcatagaacttggatcccaatatcaatggggatggcgttattatataacaactgaggctggtakcagcattagttatcagaggtaaaaggaacatgattactataatgggcagtaagacaagagtggcaatcagtgagccttgaccacagacctatggtgatggctaatagattataaatttcttaggaccaagatggaggggaagttgacttgagtgttgcttgatttgca

SEQ ID NO: 936021 - DNA, 646 bp, Homo sapiens
tgctctgtgactagggaacttgacgtctccatttttcaactgaaaacacagaagtacaaaggggttcaccaccttgtccacggttgccctgcttctaactggtcatgttggaataaaaacaagcaactgtcatccgggatattaaccacgcaggctgtggtgttgcaaagcaggggagcacggagcagggagcataccaccctgctgagatcagctcactcacaagtggcagggctagggctgcagtgcagctcacttaygggcactgtgtaagcctgaaagcaaagtccacatccaaaggtcgtagtggccccaaaacagcttcctgacctgcttctgtggtcccagacctcttgctgctgaggtaccttagctttccaattactcttgccaattctgcctgcccagtactgctaaaaggccacttccctccgtcccatggcctcaaacacacttcagagagaatttctgggcactttcagaaggctggtcactacagcacaaaagaagtcaaagttatcgcgttagtgctcccaaatctgaggcacagtttggagatgggggctctgagtcaaggggcaggctggggactgttccggtgcctgtgactatgggactgagtcagtcacagcccctctcattttca

SEQ ID NO: 936022 - DNA, 609 bp, Homo sapiens
catctcttagaactgctaaactctttaaaaaatgacaaattgctggaggaaaaacaagaactcttttcattgccggtggaacacagtgtataagaccaaaatatgccaccccaaaatataatggtaggaaaccagaatatgccaccccaaaatatgtcccttttgcttaagaattattccaagctgattattttgaaaaaaaaaaatgctaacaaaggaagttctgaaaacagagtagaagttacccttgtgtaagggaaatttacayctataaaggaaatccccattcaaaagctacctctctcaacaccaagaagagaaggataactaaatcactaaagagtcttatcaatggagactgcatggacttaagtctgtataacaaaccttacccttgtctactgtgcttttgctggctaactccccactactgcacctcaaatcttctttctttaagttcaacatagtatttatgcttgaattgaaagccacctgttggagatttactcattttgccctgagtatctcccatgtatccataaggtatacatgtttttaaacttttctgtttttctcattttaatctgtcagtttttacagagggtccca

SEQ ID NO: 936023 - DNA, 721 bp, Homo sapiens
aactccagggtccccaggccacctgcacttctgaccaagtcaggggttcccctgaccccttcagagtcaataattcaccagaatgactctcagaactccggaaagtgctacatgtatgatgacagtgttattacaaaggacacagctcaggaccagccaaaggaagagacagcaggacacagtccaggagggcctggaaggcagagcttccaygtgctcaagaccggtcaccctcccactacatccatgcgttcaccacctggaagctccaccaagctttggggccagagcttccacttgggtttcatgacatactcgtgattgattgaatcactggcctgatggttgaacttcatctccagccacctcccttccctagaggtcaggctcagagccctgatcctctggtgacacgtgggtctttcctgtaagaccgtcacccgtcctgaaaccacgcaggcccccaccgtgagtgacctgttagcataaattatcagggcccaccatgaatagcagagacactcccatcacttgggaaattgtaaggctttagagagcctctcccagaagatggagacaaaggccagcatgagtcctcatcacacaggaggagtgtgggtgtcgtgagtgtgagcggtcttgctcacacaggcacatgcctctgttctctagagacaaaaaccacagctccttagcatttcatgcgaagcctgccatccac

SEQ ID NO: 936024 - DNA, 721 bp, Homo sapiens
aactccagggtccccaggccacctgcacttctgaccaagtcaggggttcccctgaccccttcagagtcaataattcaccagaatgactctcagaactccggaaagtgctacatgtatgatgacagtgttattacaaaggacacagctcaggaccagccaaaggaagagacagcaggacacagtccaggagggcctggaaggcagagcttccatgtgctcaagaccggtcaccctcccactacatccatgcgttcaccacctggaagctccaccaagctttggggccagagcttccacttgggtttcatgacatactcgtgattgattgaatcactggcctgatggttgaacttcatctccagccrcctcccttccctagaggtcaggctcagagccctgatcctctggtgacacgtgggtctttcctgtaagaccgtcacccgtcctgaaaccacgcaggcccccaccgtgagtgacctgttagcataaattatcagggcccaccatgaatagcagagacactcccatcacttgggaaattgtaaggctttagagagcctctcccagaagatggagacaaaggccagcatgagtcctcatcacacaggaggagtgtgggtgtcgtgagtgtgagcggtcttgctcacacaggcacatgcctctgttctctagagacaaaaaccacagctccttagcatttcatgcgaagcctgccatccac

SEQ ID NO: 936025 - DNA, 815 bp, Homo sapiens
aactccagggtccccaggccacctgcacttctgaccaagtcaggggttcccctgaccccttcagagtcaataattcaccagaatgactctcagaactccggaaagtgctacatgtatgatgacagtgttattacaaaggacacagctcaggaccagccaaaggaagagacagcaggacacagtccaggagggcctggaaggcagagcttccatgtgctcaagaccggtcaccctcccactacatccatgcgttcaccacctggaagctccaccaagctttggggccagagcttccacttgggtttcatgacatactcgtgattgattgaatcactggcctgatggttgaacttcatctccagccacctcccttccctagaggtcaggctcagagccctgatcctctggtgacacgtgggtctttcctgtaagaccgtcacccgtcctgaaacyacgcaggcccccaccgtgagtgacctgttagcataaattatcagggcccaccatgaatagcagagacactcccatcacttgggaaattgtaaggctttagagagcctctcccagaagatggagacaaaggccagcatgagtcctcatcacacaggaggagtgtgggtgtcgtgagtgtgagcggtcttgctcacacaggcacatgcctctgttctctagagacaaaaaccacagctccttagcatttcatgcgaagcctgccatccactggcctcatccctcgttgcctaacgtggggctttttctgcaaggccggtgctcgctgtcctcctcagggaaattctcaccagctccctggagca

SEQ ID NO: 936026 - DNA, 815 bp, Homo sapiens
aactccagggtccccaggccacctgcacttctgaccaagtcaggggttcccctgaccccttcagagtcaataattcaccagaatgactctcagaactccggaaagtgctacatgtatgatgacagtgttattacaaaggacacagctcaggaccagccaaaggaagagacagcaggacacagtccaggagggcctggaaggcagagcttccatgtgctcaagaccggtcaccctcccactacatccatgcgttcaccacctggaagctccaccaagctttggggccagagcttccacttgggtttcatgacatactcgtgattgattgaatcactggcctgatggttgaacttcatctccagccacctcccttccctagaggtcaggctcagagccctgatcctctggtgacacgtgggtctttcctgtaagaccgtcacccgtcctgaaaccacscaggcccccaccgtgagtgacctgttagcataaattatcagggcccaccatgaatagcagagacactcccatcacttgggaaattgtaaggctttagagagcctctcccagaagatggagacaaaggccagcatgagtcctcatcacacaggaggagtgtgggtgtcgtgagtgtgagcggtcttgctcacacaggcacatgcctctgttctctagagacaaaaaccacagctccttagcatttcatgcgaagcctgccatccactggcctcatccctcgttgcctaacgtggggctttttctgcaaggccggtgctcgctgtcctcctcagggaaattctcaccagctccctggagca

SEQ ID NO: 936027 - DNA, 815 bp, Homo sapiens
aactccagggtccccaggccacctgcacttctgaccaagtcaggggttcccctgaccccttcagagtcaataattcaccagaatgactctcagaactccggaaagtgctacatgtatgatgacagtgttattacaaaggacacagctcaggaccagccaaaggaagagacagcaggacacagtccaggagggcctggaaggcagagcttccatgtgctcaagaccggtcaccctcccactacatccatgcgttcaccacctggaagctccaccaagctttggggccagagcttccacttgggtttcatgacatactcgtgattgattgaatcactggcctgatggttgaacttcatctccagccacctcccttccctagaggtcaggctcagagccctgatcctctggtgacacgtgggtctttcctgtaagaccgtcacccgtcctgaaaccacgcaggcccccaccgtgagtgacctgttagcataaattatcagggcccaccatgaatagcagagacactcccatcacttgggaaattgtarggctttagagagcctctcccagaagatggagacaaaggccagcatgagtcctcatcacacaggaggagtgtgggtgtcgtgagtgtgagcggtcttgctcacacaggcacatgcctctgttctctagagacaaaaaccacagctccttagcatttcatgcgaagcctgccatccactggcctcatccctcgttgcctaacgtggggctttttctgcaaggccggtgctcgctgtcctcctcagggaaattctcaccagctccctggagca

SEQ ID NO: 936028 - DNA, 480 bp, Homo sapiens
acacaggcacatgcctctgttctctagagacaaaaaccacagctccttagcatttcatgcgaagcctgccatccactggcctcatccctcgttgcctaacgtggggctttttctgcaaggccggtgctcgctgtcctcctcagggaaattctcaccagctccctggagcatggctgtcattcgatctttggtgtaaacagcattcgacaggcttctgtaatcataattatcatgacataattgtaacttttcttctcaatacagtcmttttctccattcgattaaagtgatattttgcttacaagtaacaaaaacctggcttaaagcacaaggacatttctagtttacttaagtccagagatagctggtcccaaggtatttcggccactcaggccactgagaaccaggttatttctgttctgtcatccctagagagttgggctgtctaccgagcagtcactgtttaacatggacataggc

SEQ ID NO: 936029 - DNA, 745 bp, Homo sapiens
acagggcaccaagtccctaggctgcacacagcacggagaccctggtcccagaccatgaaaccattttcccctatgcctccaggcctgtgatggcaggggctgcgtgatgacctctgacgtgtcctggagacattttcctcattgtctgggggattaacatttgactcattacttatgcaaatttctgcaaccagcttgaatttctccttacaaaatgggtttttcttctctatcacattgtcaggctgcacattttccaaacttttatcctcttcttcccttataaaactgaatacccttaacagcacccaagtcacctcttgaatgctttggtgcttagaaatttcttccatcagataccctgaatcatctctctcaagttcaaagttccacaaatttctagagcaggagcaaaatgctgacagtctcttygctaaaatataacaagagtcacctttgctccacttcccaacaagttcctcatctccatctgagaccacctcaacctggaccttactgtccatatcgctatcaggcttttggtcaaacccattcaacaagtctctaggaagttctaaactttcccacattttcctatcttcttctgagccctccaaactgttccaacctctgcctgttacccagttccaaagttgcttccatatttgggggtatcttttcagcaatgccccactccttgtaccaatttactatattaatctgttttcacaatgctgatgaaaac

SEQ ID NO: 936030 - DNA, 586 bp, Homo sapiens
gagaggtaggcagttttgttttttttttatttgtttgagacagagtctccctctcttgcccaggctggagtgccctggcatgatcttggctcacttcacctaccaggttcaagcaattctccctgcctcagcctcccaagtagctgggattacaggtgcccrccaccacgtccggctaatttttgtatttttagtagagacggggtttcaccatgttggccaggctggtctcgaactcctgacctcaggtgatccacctgcctcagccttgcaaagggctgggattataggtgtgagccactgtgcctggccatatgtagctttttaatctttgtaggaatagaatgagaggtgggtttgcctaacagttcccagcttgactttttcctttggcttagtagttttgggatcccaagatttattttcctttcacaccctaaagcacagcagtttttggcaatggccagctaggagcaattcccttgccatggtcagagagggagacaccaacaaggtctcccatagctgggtatggaggacaggggtagtggtggtgatacgttcaatactgtaggtttgtggaatg

SEQ ID NO: 936031 - DNA, 586 bp, Homo sapiens
gagaggtaggcagttttgttttttttttatttgtttgagacagagtctccctctcttgcccaggctggagtgccctggcatgatcttggctcacttcacctaccaggttcaagcaattctccctgcctcagcctcccaagtagctgggattacaggtgcccgccaccacgtccggctaatttttgtatttttagtagagacggggtttcaccatgttggccaggctggtctcgaactcctgacctcaggtgatccacctgcctcagccttgcaaagggctgggattataggtgtgagccactgtgcctggccatatgtagctttttaatctttgtaggaatagaatgagaggtgggtttgcctaacagttcccagcttgactttttcctttggcttagtagttttgggatcccaagatttattttcctttyacaccctaaagcacagcagtttttggcaatggccagctaggagcaattcccttgccatggtcagagagggagacaccaacaaggtctcccatagctgggtatggaggacaggggtagtggtggtgatacgttcaatactgtaggtttgtggaatg

SEQ ID NO: 936032 - DNA, 576 bp, Homo sapiens
agcaagatggtaacctgacagagcaaagaaaaatggataaattcagaggacacttaggaaaaagaagtgcagaccttaatgattgattgtatgtaagaaatgagggaaaagaagaaattaaagattttgcccaagtttggggcttgggaaactgcatgaatggtattttcatttacctccctccactctcccaccrcaccctccaaaaacagagaagtaaatttggaagagagagaaaagtttagcttcaggtgactctgtgactttagaatgtgaacatccgataaacaatttgataaatgtgctcagaaatctggagaaacaaaagggccagaaatcataaagatttggaaatcttcagcatagagatggcaaatggcaccatggtagtagatgaaatcatcaaaagagggttcactaagaaaattacactagctcagtgtacttgactgcatcaatacttaacagccaggaagataaagcggggcccataaaggaaagttttcagaataaacaagaatgaaaaaaagaaaacagaagcctgaggtgtcatggaaacctagagacaacatttca

SEQ ID NO: 936033 - DNA, 576 bp, Homo sapiens
agcaagatggtaacctgacagagcaaagaaaaatggataaattcagaggacacttaggaaaaagaagtgcagaccttaatgattgattgtatgtaagaaatgagggaaaagaagaaattaaagattttgcccaagtttggggcttgggaaactgcatgaatggtattttcatttacctccctccactctcccaccacaccctccaaaaacagagaagtaaatttggaagagagagaaaaktttagcttcaggtgactctgtgactttagaatgtgaacatccgataaacaatttgataaatgtgctcagaaatctggagaaacaaaagggccagaaatcataaagatttggaaatcttcagcatagagatggcaaatggcaccatggtagtagatgaaatcatcaaaagagggttcactaagaaaattacactagctcagtgtacttgactgcatcaatacttaacagccaggaagataaagcggggcccataaaggaaagttttcagaataaacaagaatgaaaaaaagaaaacagaagcctgaggtgtcatggaaacctagagacaacatttca

SEQ ID NO: 936034 - DNA, 745 bp, Homo sapiens
agctccctgtctctaacctgcacaacatgtctgagttctctctgtgggacctatgatcctttgttctgacggctgccttctctctatgctatgtggtcggagaaagttttgaagatcttttggtcgcgtttctgcatttggagcttaaattgaaagtcaactgcaccacttgcactgctacccagagcatctgtgtagctcaaacatcccctgccctctgcgaatccccataacagtccttactgacttcaggctcaactctcacagtgggccatgagtaatttagttcggttgaaacttaggcaatatatactctgtgctagacaatctgataggtgtctggagacacaaaatggaaagacaggaaccttcttttgattaagtagtgcacaatttcataagagggcaaaacgtgaataatcacaagaaagttttaatgcaacattagaaatcaggattatatagccttgacataaaagactgaggtactttttaatggggacagtagtggcaggtggggacttttgacagatttcaggtcagaggaatagtatttcacaaaaggaaaagcaaggaaataaacagtagagcttcttctgagagtctgcrtggggtatacggagtacatgctatggataagtaaagagcggctcaaagagtttatgtaaaaggctgaagacagcagcactagtattcgaagcagaattagtacataggtctatctgactccagaattcatgttctc

SEQ ID NO: 936035 - DNA, 667 bp, Homo sapiens
tctgtgtgtcaattttttggttcaggattgctttgggtatttcagaatcttttatgcttccatgggaatttaaggattttttttttctatttttattaagaatgttactggtattttgatagagattctattaaatttgcagaatgctttggacagtatggccatttcaataatattaattctttcaatccatgagcataggaaaccttgccatttgtttgtgtcttcaatttctttcatcaatattttacagttttcaatgtagagatcttttgcctcctttgttacatttatttgggtgtttcttgtttttttgtatctacyagtaattgaattgttcaattgattttttcagatagtttgccattaatgtatagaaatgatactaatttttgtatgttggttttgtatcctgcaactttactgaatttgtttattatttcaaacagctttttggtgcattctttattattttctatattatatataatatatatatatattatatatatatctatgaacagagataacttaacttagacttttctaattaggatgcctttcattttttctcttgcctactcgttatgcctagaactttcaatactatgttgaaaaagaatgatgaaaggtggtatccctgtcttgttcctgatcttaaagaaaa

SEQ ID NO: 936036 - DNA, 667 bp, Homo sapiens
tctgtgtgtcaattttttggttcaggattgctttgggtatttcagaatcttttatgcttccatgggaatttaaggattttttttttctatttttattaagaatgttactggtattttgatagagattctattaaatttgcagaatgctttggacagtatggccatttcaataatattaattctttcaatccatgagcataggaaaccttgccatttgtttgtgtcttcaatttctttcatcaatattttacagttttcaatgtagagatcttttgcctcctttgttacatttatttgggtgtttcttgtttttttgtatctactagtaattgaattgttcaattgattttttcagatagtttgccattaatgtatagaaatgatactaatttttgtatgttggttttgtatcctgcaactttactgaatttgtttattatttcaaacagytttttggtgcattctttattattttctatattatatataatatatatatatattatatatatatctatgaacagagataacttaacttagacttttctaattaggatgcctttcattttttctcttgcctactcgttatgcctagaactttcaatactatgttgaaaaagaatgatgaaaggtggtatccctgtcttgttcctgatcttaaagaaaa

SEQ ID NO: 936037 - DNA, 493 bp, Homo sapiens
tgttattgagttgtttgagtttcatatctattctgggtgttaaccccttgtgagatagatcatttgcaagtatttcctcccattctgtaggttgtctctttattgatgttttgttgttgctggttttctttgatcgatgtaatcctatttgtctcgttttgcttttattgtctrtgatttcaaattcttatccaaaaatatctttgctcggaccaatgtcctataacattttccccaaggtttcttttagtggatttaaagttttaggtcttacatttaagtatttaatgcattttgaattaatttttctatatatatatatgttgaaaaatggggatataatttcatttttctgcatatgaacagctagttatctaagcaccatttattaaagagattgttctttcctcaatggaagttcttggcacttttgtagaaagtgaggtgactgtgagtgaatttaattctgttccattggtaaatctgttttttt

SEQ ID NO: 936038 - DNA, 653 bp, Homo sapiens
gtgggatccaaatatatgagggagatagaaggggaaagacaaggacacagatagatagatagagggacaaacatatagagacctggagagagggagagagaaacaaaaaaagagaagaaacagagaaataggaaggaggagagaagaacagggggtcttagatgaactaagccagccaggaggaccacggagactctgattacttcctgctgggcaatatttgggtaaggagctaagaaaaaggcagaaattcacttattaatatttttctcctggtgtcaaatccattccacaggccaartggaggtccagcctcaggcctttatgtgggacctagggaagggaggccacctcactggctcctgcttggggagtggacactttcaaaggggctttctaggatgaatggaggggccaggcatcccatgtcgtgtgggcctgcacaaagcctttcctcttctgagcctcatcagcctcgtctctaattacagcaaattgtgttttccaagtttgctgaacaagaagtgcagaaaaattcccatccccttgaaatggggcaggtctttgcaatagcatagatgaatgaatacagcagaaaggatgcagcatgacttctgagatgaggtcaagaaaggtactatggcttcctcacg

SEQ ID NO: 936039 - DNA, 570 bp, Homo sapiens
ctgatgaggctagaggggtggacgaggctgggtcatgtagggcctgggggtcatagtaagtctggcatttatttaagagcagtgttaagattaaagtgggcggtgtatgtgtgtgacataacctgagtagtgttttaaagctatttttatttgtttgggttttttgtttgtttgtttgtttgagacagagtctcgctctgtcacccaggctggagtgcagtggctcaatcttggctcactgcaagctccgtctcctgggttcacaccattctcctgcctcagcctccccagtagctgggactacaggcgcccacaactrcgcctggctaattttttgtatttttagtagagacggggtttcaccgtgttagccaggatggtctcgatctcctgaccttgtgatccgcccacctcggccccccaaagtgctgagattacaggcgtgagccacttagagctatttttaaatccttgcaacagcacttcaaaggcaaagcttaccatttccactttacagatgaggaagctgaggaagccacggctcagagacgttaagccacttgccctagt

SEQ ID NO: 936040 - DNA, 600 bp, Homo sapiens
gaggtaacataggagtcaatctaggtgaacttgggtctagcaatgggttcttagatatactgccaaaagcataatccatgaaagaaaaaaaactgataagttggacttcattaaaatgtaaaacttctgccacgtgaaagacacagctaagagaatgaaaaggcaaattacagactgggagaaaatctttgcaaaacacacgtgtgacataggacttatatccaaaacacacagagaactctgaaaactcaacaataagaaaatgaatactcaatttmacaaaaatgggcaaaagatcagaagacacctcaagaaaaaagatattcaggtagcaaataagcatatgcaaaaatattatgaaaataagctcaatctcatatgtcaattgggaattgcatgttttttaaaaatgagatgccactgtacacctatggaaatagcgaaaatctaaagcactgatgaagtatctcagaaaaaaataactttcaatgttaaaaaatggtcatggcagcatcatcatagtgaaaaaacaggaaataatcaaaatgtaggcagaagactagctcaatctattgaagtatattcacacaatggaatatt

SEQ ID NO: 936041 - DNA, 715 bp, Homo sapiens
ggaacacaccccaagctctggcctcgggaggagtgtgctgagcttgttgcggagcaaagacagaagcccagtgaacaaaagatggcgaggagacaccagtgcagggaggctaagggtgcagaggccgagtggggctgtgctcaaaagagaggcggtgctggagggacagggagaggtggcctgggtgttgggaggtgggggtgaggtgggggctgagggcaggrgggtcagggtgagggataggaaaggccgcaggagaggagaggatgaagagctgtgctggaggcgctgtgggcagcatcgtcctgctcttgggcactttgtgttttgtgacacatcctttctatgctgaactgagaacccagggacctcactctccccacacgtgtctgtccagctccagaggatgaagcagagaccacccaagcagtgcccaccacaacccctgagccccccaacaagcctcgcctcggggagctgaccgtgacagatgccacccctgactccctcagcctgtcctggatggtccccgagggccagtttgaccacttcctggtccagtacaggaatggggatgggcagcccaaggtggtgcgggtgccggggcacgaggacggggtcaccatctcaggcctggagccagaccacaagtacaagatgaacctgtacggcttccacggtggccagcgcgtgggccccatctctgtcattgggg

SEQ ID NO: 936042 - DNA, 695 bp, Homo sapiens
agctgcctttccttttgttcctaaacagatagatacagagaaaagattaaataattccataggtagctactctatgttcaccttgtcttaggtaaagtgctgatttactgagcacgagatgaattcgtaattgactattccctgcctgcttcttttctcttgcaacacatggattaaccttattctgtctctttcccctccagcccatttttcccctttaagtgttgaagccctcaaaatcatctttggagaaaggtataaaccrcagactgtttctgtaatttcatatttatttcttccgggcatgtccttaaccttggcaaaatcaacttctaaattgattgagacctgtctcagatactttttggttgatagtaccatatttagcaatttcttcttcctcttcttttttttttttttttttttttttttaccactttgaagataagattaacgactaatttgacacttgagacgtactaaaatttctttggatttccctaaagtcagtttatgagcaaagaatatgtagatcttattatctgtttttaaacaatttttttactgatgggagaagggattcatcttctataacaagaatgaaggcagaagagaaaggtagtgatcctagtagttttggtggtaaaaagtatgaggaaattcctccttggtggctgagagcctcttggtagaga

SEQ ID NO: 936043 - DNA, 600 bp, Homo sapiens
gctcaatgctttcctgaaagcttgtgatgaactcaccgacatccttccagagcaggagcagcaggggctgcaggaagctgttcgaaagctccacaaacaatggaaggtgagtcaggacaggacggagacaccgtgcatcctcaatgaagggagaagcttgagcgtgttaaggtccaaatgtaagagaaatttagaaattcctggaaagtcactgtaactatttcgctcatttaaaaactcaaaaaactggacttaaataaaacctgataatatatgatagaattgkgttattcctatttattatcagcatcaattttatcctattactcgagcattctttttggtttcctgatttttttttaatccagggtgcaagaacatttaacttattctagcaacatttcataagcttctctctgctgaataaatcttgctaggtatacctactgaaatcataaaacatgtatgtatagtttctgccccccaaagattttatcatctagttgagatagctatgatcaaaaaatataaatgaaaacattttgtagtcaagaattcaatgatgaacaaagcatacccctcttccccccaagagcttaa

SEQ ID NO: 936044 - DNA, 586 bp, Homo sapiens
acaatttcgacaaaacgtggtttcttggacagagcccaaggaaggaggcaaacctggagtgcagacacggtacagaagctgtggcaggcaaggaggtgagaaacctgaaagccctgcttgctttctcagcagggaggcttgtattgtagcttggggcaagttctcagccctgcccatcgctgcctggaaataaacttggtactgctgggtgtgcacagtgggagtgagactggccttttgrggtgcatgggagttgggtgaggcctgtaactgccggctctccccagcttccctggtgacctgcatgatgaagcagaggcagccataatttccttgggaacctaggtccattggcctgagaatcccacccccatcatccacagcagccacagcaagccctacccaaagacagtgtcagatcagacacacctagccccacccgatgggtttcctttacctaccctcgtagctgaagacaaaggacaaagtctgttgggagcgctatggccctgcccactgtctgagaaacttatccaggcaactctacggcaagcttgtatcctccctacactaccgcagtttatgc

SEQ ID NO: 936045 - DNA, 616 bp, Homo sapiens
aggggaaatttaaaaattctttgaactgaacaataataatgacataacatatcaaaacctctgggacacagcaaaagtggtgtaagaggaaagtttgtagcattaaatgcctacatcaaaaagtctaaaagagcacaaacagacaatctaaggtcacacctcaaggaactagacagacaagaacaaagcaaacccaaacccaagggaagaaaagaaacaaccaagatcacagcagcactaaattaaattgaaacaaacaaaaacaatacaaaagataaatgaracaaaaggctggttctttgaaaagataaataaaatagatagaccattagtgagattaaccaaaaaaagaagagataagatcaataagctcaattagaaatgaaacagaagatattacaaatgataccacagaaacacaaaagatcattcaaggctactatgaaaacctttacacacataaagtagaaaacctaaaggagatggataaattcctgaaaatatacaaccctcctagattagaccaggaataaatagaaactctgaacagaccaataacaagcagcaagactgaaactgtaatttaaaaattgccaaccaataaaaaaaatccagg

SEQ ID NO: 936046 - DNA, 868 bp, Homo sapiens
gaaagaaggtttctgagacactgatttgtgatgtgtgcattcacctcacagagttaaaccttccttttgattcagaggttggagacactgtatttgtccattctgcaaatggaaatttgggagctcttgaggccaatggtgaaaaggtgaatatcccaggaaaaaaaaacctgaaggaaattatctgagaaacaggttttgatatgtgcattcatctcacagaattaaatgtttcttttcactcagcagtttggaaacaccgtttttgtagaaactgcaaagggatatttgggagctcattgaggtckatggtgaaaaagaaattatcttcaaattaaaagtagaaagaagctttctttgaaactgctttgtgttgtgtgccttcatctcacagagtaaacctttcttttaattcagcagtttggaaacactgtttttgttctttctgaaaatggacatttgggagctcattgaggccaatggtgaaaaagcgaatatcccagggtgaaaccagaaggaaactatctcagaaaccactttgtattgagtgcattcatctcacagagtgaaacgtttcttttcattcagcaatttggaacctgtttttgtagaatcttagaagggatgtttgggagtgcattgaggcctatggtgaaaaagaaaataacttcaggtaaaactagaatgaagctttctgagaaactgctttgtgatgtgggcattcatctcacagagttaaagctttctttgattcagcagtttggaaatactggtttagtcctttctgagaatggacattcgtgagctcactgaagcaaatggcaaaaaagtgagtatcccaggacaaaaactagaagggagctatctg

SEQ ID NO: 936047 - DNA, 640 bp, Homo sapiens
aagggatgtttgggagtgcattgaggcctatggtgaaaaagaaaataacttcaggtaaaactagaatgaagctttctgagaaactgctttgtgatgtgggcattcatctcacagagttaaagctttctttgattcagcagtttggaaatactggtttagtcctttctgagaatggacattcgtgagctcactgaagcaaatggcaaaaaagtgagtatcccaggwcaaaaactagaagggagctatctgagaaacaactttttgatgtgtgcatttatctcccagagttaaacctttctttacattcaatagttttgaaaaactgtttttgtggaatctgagaaggaatatttgggagtgctttgaggcccatggtgaaaaagaaaatatcttcagataaaaactagaaagaagctttctgtgaaacttctctgtgatgtgtgcattcatctcacagagttaaaccttctttttgattcagcagtttagaaacactgtttatgtgcattctgcaaatggaaatttgggagctcattcaggccaatggcaaaaaggtaaataacccaggataaaaacttgaaggaagctatttgaggatctgctttgtgatgtgggcattcatctcacagactttcttaac

SEQ ID NO: 936048 - DNA, 640 bp, Homo sapiens
aagggatgtttgggagtgcattgaggcctatggtgaaaaagaaaataacttcaggtaaaactagaatgaagctttctgagaaactgctttgtgatgtgggcattcatctcacagagttaaagctttctttgattcagcagtttggaaatactggtttagtcctttctgagaatggacattcgtgagctcactgaagcaaatggcaaaaaagtgagtatcccaggayaaaaactagaagggagctatctgagaaacaactttttgatgtgtgcatttatctcccagagttaaacctttctttacattcaatagttttgaaaaactgtttttgtggaatctgagaaggaatatttgggagtgctttgaggcccatggtgaaaaagaaaatatcttcagataaaaactagaaagaagctttctgtgaaacttctctgtgatgtgtgcattcatctcacagagttaaaccttctttttgattcagcagtttagaaacactgtttatgtgcattctgcaaatggaaatttgggagctcattcaggccaatggcaaaaaggtaaataacccaggataaaaacttgaaggaagctatttgaggatctgctttgtgatgtgggcattcatctcacagactttcttaac

SEQ ID NO: 936049 - DNA, 640 bp, Homo sapiens
aagggatgtttgggagtgcattgaggcctatggtgaaaaagaaaataacttcaggtaaaactagaatgaagctttctgagaaactgctttgtgatgtgggcattcatctcacagagttaaagctttctttgattcagcagtttggaaatactggtttagtcctttctgagaatggacattcgtgagctcactgaagcaaatggcaaaaaagtgagtatcccaggacaaaaactagaagggagctatctgagaaacaactttttgatgtgtgcatttatctcccagagttaaacctttctttacattcaatagttttgaaaaactgtttttgtggaatctgagaaggaatatttgggagtgctttgaggcccatggtgaaaaagaaaatatcttcagataaaaactagaaagaagctttctgtgaaacttctctgtgatgtgtgcattcatctcacagagttaaaccttcyttttgattcagcagtttagaaacactgtttatgtgcattctgcaaatggaaatttgggagctcattcaggccaatggcaaaaaggtaaataacccaggataaaaacttgaaggaagctatttgaggatctgctttgtgatgtgggcattcatctcacagactttcttaac

SEQ ID NO: 936050 - DNA, 574 bp, Homo sapiens
ccactgttctgttcaaagctgtcagacagggacatttaagtctgcagaggttactgctgtctttttgtttgtctgtgccctgcccccagaggtggagcttacagaggcaggcaggcctccttgagctgtggtgggctccacccagttggagcttcccggctgctttgtttatctaagcaagcctgggcaatggcgggcgcccctcccccagcctcgctgccgccttgcagtttgatctcagactgctgtgctagcaatcagcgagattcygtggggtaggaccctccgagccaggtgtgtgatataatctcatggtgcgccgttttttaagcccgtcggaaaagcgcagtatttgggtgggagtgacccgattttccaggtgccgtccgtcacccctttctttgattaggaaagggaactccctgacccctttcgcttcccgagtgaggcaatgcctcgccctgcttcggctcgcgcacggtgcgcgcacccgctgacccgtgcccactgtctggtactccctagtgagatgagcccggtacctcagatggaaatgcagaaatcacccgtcttc

SEQ ID NO: 936051 - DNA, 746 bp, Homo sapiens
tttggaaattcagcctgtgaatctttttctttcaattggaatgccgagtttattaacatgcaatgtaataactgatgtatttgtgtttaaatctactatcttcctatgtgcttttttttgttttttctcttctttctcaattttctttcctttttaaacttttttttgggttgattgatttttatctctattttcccacaggtatttatwttttattttgttattctgttggtaattagcctagaaattacctcatccttaacttactaaagcctgaattaattggtagtttaactctcctctgaaaactcaaagatctcagaacagtttaactctattttccctgttcctgacatatatgctattattgtctaagtgtttctcctttgaaagaacttttttcttcttgctgtttcttgctgctttaaagattttcttttattcattgtttatgttcagtttatcattatgtgtcttgttgtggattttttttatcctttgggatccccaaatgtatagattagatatctgtcatcagttttggaaagtttgcagtttttatttccccaaatacccttcctgtttcatttttcttagctttctgcaattcaggttatacatatgttagattttcttacagtatcctttctttctatcacttgcctttacttacttttcattattcctttctatttgtctcatcttggataagttttttaaaatatgaactattttccatttcatga

SEQ ID NO: 936052 - DNA, 553 bp, Homo sapiens
cataaaaagcaatgagatcatgtcttttgcagggacctggatagagctggaagccattatccacagcaaactaacacaagaacaaaaaaaaacccaccacatgttctcacttataagtgggagctaaggatgagaacacatggacagaaggcagggaacaacacacactggggcctgtcgggtggaggggtgagaggagagcgagcatcagaaacattagctaatagatgctgggcttaatacctgtgtgatggaatgatctgtgcatcaaaccaccatggcacacatttacctatgtaacaaacctgcacatcctgaacatgtacttctgaacttaaaataaaagttgaagaaaaacaaactaaccraaaacaattaacaaaatagcagatttaaggcttctcttatcagtaattacattgaatgtaagtttttaaatcaaacccagacattggcaaaaggtattaaaaacaaacacaacttggtctgaatatagatgttttataagaaaatctagattgaaagtcacagataggttgaaagtgaaaaaatg

SEQ ID NO: 936053 - DNA, 587 bp, Homo sapiens
tgctgggttggatgaagggtggggagtcatgggaaaatgtgaaggacagaagaatttgagctaagggcagtgaactgggaacacccagcagggtggcttgtttggattcctctcggcattcctgtccctctatcttcagaggtgaagatgcttctttcctccaggtacagggagggcwcctctcacctgaaggtcttgtgatctgcttcagaggaaagctcggagagtccttcctgcacccgccgtttctcaaattctttcagtttcaaatattcaatatccaaagcaccatattttggggtagtacattctgaatcctctcaacagggataataatattaggctaaaccaggtaaatttgtcaacatttgactctttggacctataataatggcagtttcacacagatctgtcctggaaagttttggggagaattacagtaattaatccatctaatctccttagctcagtgtctggcacatagtaagtgctccataggcagtagctcttcttatttatttatagtcctcatcctcatgtaatagattttaaaaactgatgctcagagaggttaggtaacttgtgca

SEQ ID NO: 936054 - DNA, 587 bp, Homo sapiens
tgctgggttggatgaagggtggggagtcatgggaaaatgtgaaggacagaagaatttgagctaagggcagtgaactgggaacacccagcagggtggcttgtttggattcctctcggcattcctgtccctctatcttcagaggtgaagatgcttctttcctccaggtacagggagggctcctctcacctgaaggtcttgtgatctgcttcmgaggaaagctcggagagtccttcctgcacccgccgtttctcaaattctttcagtttcaaatattcaatatccaaagcaccatattttggggtagtacattctgaatcctctcaacagggataataatattaggctaaaccaggtaaatttgtcaacatttgactctttggacctataataatggcagtttcacacagatctgtcctggaaagttttggggagaattacagtaattaatccatctaatctccttagctcagtgtctggcacatagtaagtgctccataggcagtagctcttcttatttatttatagtcctcatcctcatgtaatagattttaaaaactgatgctcagagaggttaggtaacttgtgca

SEQ ID NO: 936055 - DNA, 587 bp, Homo sapiens
tgctgggttggatgaagggtggggagtcatgggaaaatgtgaaggacagaagaatttgagctaagggcagtgaactgggaacacccagcagggtggcttgtttggattcctctcggcattcctgtccctctatcttcagaggtgaagatgcttctttcctccaggtacagggagggctcctctcacctgaaggtcttgtgatctgcttcagaggaaagctcggagagtccttcctgcaccygccgtttctcaaattctttcagtttcaaatattcaatatccaaagcaccatattttggggtagtacattctgaatcctctcaacagggataataatattaggctaaaccaggtaaatttgtcaacatttgactctttggacctataataatggcagtttcacacagatctgtcctggaaagttttggggagaattacagtaattaatccatctaatctccttagctcagtgtctggcacatagtaagtgctccataggcagtagctcttcttatttatttatagtcctcatcctcatgtaatagattttaaaaactgatgctcagagaggttaggtaacttgtgca

SEQ ID NO: 936056 - DNA, 731 bp, Homo sapiens
ctcacttggggaggtaggaccatgggcaactcactaaggctgtctttgggtctctcatctctaaaaaggggataatgggggccagacacagtgtctcatgcctgtaatctcagaactttgggaagccaaggcgggaggattgcttcaggccaggggyttgagaccagcctgggcaacatagtgagacacttgtctctacaaaaaaaataaataaaaactttggccgggcctggtggctcatgcctgtaatcccaactctttgggagactgaggtgggcagatcacctgaggtcaggagttcaaggccaacatgcccaacatgttgaaaccccatctctaccaaaaatacaaaaattagcctggcgtggtggcaggcgcctataatcccagctacttgggaggctgaggcagaagaatcacttgaacccaggaagtggaggttgcagtgaaccgagatcgtgccactgcactccggcgtgggcaacagagtgagactcagtcttaaaaaaaaaattaaaagggaataataatagcatctatattacagggctggagcttaaataggcaatctatgtaatgcgcttagaacagtactaagcacatgtacgcattagcttttgttattaccaaaatcatcagtgttatcctcagctcatggggtggcccgaggggtcactgaggtgctgtgtgggaagcacttagcacagggaccggctctagtgagtgctcag

SEQ ID NO: 936057 - DNA, 532 bp, Homo sapiens
gacaacgcctgccagggctggcagagtgaccaaggccctggactccaacctgtagttcggagggaatcagagcttgtgctgtagatgcctagctggggttgcctttctgcccctgcccagtgcctagggctgggacagacgtgctcactcacgtagcaattactcactgagccctcgtttgtgccaagggtggcagtgcagcagagggttcagtctagtaggggagacagagacaattcaagtacccrcaagacatgcagatgaccacacgtggtaatgaagcgtatggggtgtgatgagcacataggatccagggtctgacctcacctggaggtcaaggtgggcttcctggaggaggtgatttggagccaagaacccaaaggctgggaaggagctgacccctgcttgagtaaatagggtggggaagataattctgttgtagttatttattgctgcataacaaactactgtaaaattcagtggcttaaaacaaccattttattttgttcatcatgttgtgggccaggaattt

SEQ ID NO: 936058 - DNA, 784 bp, Homo sapiens
catatagtatttgtccttctgtggctggcttatttcacttagcaaaacgtcctcaaggttcatccctgttgtagcatgcatcagaatttcctttttaaaatttttctgcattccaatcatccattatttccttcatttttaaaggctgaataatattccattgtatgtatatatgccatttgattatccactcattcattaatggacacatgggttgcttccaccttttggctgttgtgaataatgctactatgaacatgggtgtataaatacctgtttgagtccctacttttaattctttttggtatataatgagaaatgaaagtgctgaaccatatggtaattctatgtttagttatttaagaaaccaccatgctgccttccacgggggatgcactatttgacattcccactagcaatgcattagggttccaatttctccacgttatcaccaacacttagtattttccattttttgagaatagccatcctaatagatgtgaataggtatctcatggttttgatttgcatttctttaatgattagtgacgcagagcatcttgtcatgtgcttaagtcatctgtatatcttttttggagaaatgtctaytcaagtcctttgctcatttcttaattggatttttttgtttgtttttattattgagttgtaggtatattctctatatattctgaatattaactacttaccagatatatgatttgcaaatatttttcatttattctatgaattgctttttcactctgctggtagtgttttttgatgc

SEQ ID NO: 936059 - DNA, 779 bp, Homo sapiens
attaagtatgtaatagcatcatgtctagaatgcaatgtatatactttaaataaaaaatacttccttgtttaaaaatgctaaagatcatctgggcgttttgcaagtcataatcattttgctggtggagggtcttgccctgacgttgatggctgctgactgatcagggtggtggttgatgaaggttggaatggctgtagcaattatgaaaattatgataaaaataaagtttcccacattgactgacgcttctatttatgaaagatttattcatagcatgtggtcttgtttgaagcattttacccacagtaaaacttctttcaaaattggagtcaatcctctcaaaccctgctattgcttaattaactaagtttatataatattcttaatcttccattgtcattttaacaatgttcatagcatattcaccaggaatatattttacctcaatwaactgctttctttgctccttcacacaaagcaacttctcatctgttcaagttttaccatgagattagagcaattcagtcaaattttcaggctccacttctaattctagttctcttgctattttcaccacaactggcattactacttctactatgtctttaattcctcagtcatccatgaggattggagtcaatttcttcaaaactcctgttaacattgatattttgacctcctctcatgaatcacaattgctattaatggcatctagaatgatgaactctttccagaagattttcaatttactttgaccagatccatcataataacactat

SEQ ID NO: 936060 - DNA, 602 bp, Homo sapiens
aagatacagagggagaggaacaaggactcattcctggtccccaatgactcctgcagaagaggtgagttgaacaggcaaggagcaatctgctcttgccacaggcctctggaatcccttcaggcagagaccccttaaccaccacaaacccttgaattggcaggaagagctgcttagagaagtggtaggggcggagctcaagtcactgaggagaccaaagggtttggtgtgaaaggatttatagyaccgcacgacgagggattcccatatccctaggctcaacttgctctcataggagacgttagccctagaggaactgttggatctgaattctgcagggtagtcttgctcatgagatggggccaattcaaccagagcatccctcagtctgctggcccatcctggggctgcagcctagccatgccctacttgcaatgcagcccccaggtacctgctggaggcctccatcatggctcctatgctggcagaccacacctgactggcagagtgctccagaaaatcagcccccatggacatgcacaagccttcctgggccctctccccactgcagcctaccccgtggcactttgccagcacacactcac

SEQ ID NO: 936061 - DNA, 600 bp, Homo sapiens
tttgtatggcttccaaaattacttgttattaaattctagttttattatatttctgtcagagaaggtgcttgatattattttagttttttgaatatgttatgacttattttgttacctgccatatggagtaccttttagaatgatgcatgtactgaagaagaaaatgtgtattctgcagccattgaatgaaatgttctgtagatatctattagattcatcgggtctatagtccagataaagtctgatgtttctttattttctgtctggaagatctgtacaatgctgaaagtggggtgttgaggtctccagttcctattgtattgaagccaatctccttctttagctctgataatatttgctttatttatctgggtactccagcattgggtgaatatatatttgaaattgttagatcctcttgctgaattgacccctttwccattatacagtgacctttaccatgatacagtgtctcttctcataattttggttttataatctattttgtctgatatgagtacagggactcctgctcctttttggtttccattggtatataagatatttttctatctctttattttcagtttatctgtgttt

SEQ ID NO: 936062 - DNA, 768 bp, Homo sapiens
ggtgaggcaggagaatcgcttgaatcttggaggtggaggttgcagtgagccaagattgggccactgcattccagactgggcaacagagtgagactccacctcaaaaaaaaaaaagtatttcagaaaaactctcatttttaaataaaagataaatcaaccacataaaaacttacacacaaatgtttgtttatagctgcttyacccataattgccaaaatttgggagcaaccataatgtccttcaatagatgaatgaactgtgatacatccagataatagaatatttatttattcaatgataaaaagaaatgacctctcaaggcacaaagagatgtgaaggaaccttaaacatgtattgctaagtgaaagaagccaaccttaaaatggtacatactgtatgctatggtttgaatgtgtcgttaaaatttcatgtgttgaaaccttaatccccaaattcatattttgatggcatttggtggtggagccttgggaggtaattagggttagataaagtcattagtgtgggactggtggctttataagaaaaggaagaaagacctgagctggcatgctcttgccctcttgccaagtgatgctttctgctatgttatgatgcagtaagaagaccctcatcagatgtggcccctcaaccttagacttcccagcctccggaactataagaaataaattccttttctttataaattacccagtctcgggcattcagctatagtaacagaaaacgaactaaaacactgtatgattccaa

SEQ ID NO: 936063 - DNA, 642 bp, Homo sapiens
tatcaacaaaattttacactcatactttaaaatccattgatctatcttgcattttgagtgaatcttttacccaagcatgattttgtaacatcatgccttggttgtctgaaaaatactgatacagtgagttatacagatcttccaaatgttgacacattacgttatacaatatcataaatcacattcatcaatatcatttccaatctcatcagaaaagtcttttgtactggaaatttatcaggttcacagttgcagatggaagtgtttcagaattctgattttcacttgaaggcaaaaattgtatcattggtaaaatatcatcagttgttttcctataattgacaagctcacttatttcgttttcaagaaaatgtctgcaaaatacacaaggctgcataaccatatatttttgccrgtagctctttcatgtgaaaatggtgtttcatgtaaaaaagtggctagtacagcttacaactcaattatgcagatgtgtctcctcaaggcaaccatctttcttcagtatatgatagaaatggattatgcatagtttccatctttataacatagaatattaaaaagatgtacccacaggttaagatctaataaaaataataatatttactgatttatcaaggacagtat

SEQ ID NO: 936064 - DNA, 614 bp, Homo sapiens
gacaggccacacagctaaccaggaaccaggccccctgacaccaggaccagcccctccagagctgggacagggcttccctcaaactcagccagctctgcaagtggccctgccctctgcagcagcctctgggtttaaaatgaccagcggagcaatcttcctgcttgccaatcgccactcccatgccctggataccaatgtcaagtggagcgtgcacggaggccatggccaaagccaccctccagagccgtgacctaagttcaggatctgacccctgaggtttcatagcatcccttagaggctcctagtggatgggctgaaatgcctgtccttatgaggacatttttgtgcttccctctttccctcaaagtccacctgcattagttgccatcagtgctgacatctgttgatccaatttgccaataagccattaactgtcccttyatagcctgagctgaggctgaacccttggaaatcacagccgtcccatctcctacctagggatgcctccatgcgctactttgtgctgataacactgggatcaattgcatcaggcggtggctgtgctgtccccacccccgtgacctcctggaagttcctccctgctcttcagagtg

SEQ ID NO: 936065 - DNA, 563 bp, Homo sapiens
ttgcagctggatggggccaggagtgggggacagagctcaggtttagaccttttcatcttctcaaccaaattacctgctacttagttttgagctgctgagcttaccacatagcgcaccccagcaagaacagaatttcggacaggccacttctttcatcagccactgctatgatgggaagtgagggtgctgcagaccccaggtaaggagcaagtttcactggataaataaatcctctgcttcaatgattcttaactggggacaactccgtcccccaccaggkacattgggtaatatttggagacatttttggtggcacaattttgagggaggaggtggctacagacatctaatgggtacaggccagggatgctgctaaacatcctacagttcacagctccctgcctggccttcaacacacagacacgcacacacacaagcacacatacagacacatacagacacacacagacacacatacagacatgcacacacacacatgcacacacacaacaaagaattatctggccccgaatggcaagagtgctaagggtgaaaaaccctgc

SEQ ID NO: 936066 - DNA, 548 bp, Homo sapiens
caaaatcataaatttatagctggtgttgtgagctaaacttgtgtctccctcacctccaccaaaactcttgttgatgtcctaactcccagcatctcagaatgtgacctcatttagaaacagggtctctgcagatgtagttagttaagatgaggtcaccgtggagtaggttgggcctctaatccaatacgactgtgtccttatgaaaaagagaaatttggacacacagactgacacgcacacagggagaagtccgtgtgaagactgacacttcacacgcgaaggaactaccagaagccaggagggaagcctggacyagatccttcccagagccttccaaggagcgcggcccctctgctggccccgtggtctcgggattctagaatccagaacgctgggatggtaaatttctattgtttcagccactaggtttgtggtacttttgttacaccggccctaggaaactaatactgggagctgggaagacgagaaaggagtatagaagaagagggagttacagcaaaacaaaaccatcaagaaaaagcctcatc

SEQ ID NO: 936067 - DNA, 548 bp, Homo sapiens
caaaatcataaatttatagctggtgttgtgagctaaacttgtgtctccctcacctccaccaaaactcttgttgatgtcctaactcccagcatctcagaatgtgacctcatttagaaacagggtctctgcagatgtagttagttaagatgaggtcaccgtggagtaggttgggcctctaatccaatacgactgtgtccttatgaaaaagagaaatttggacacacagactgacacgcacacagggagaagtccgtgtgaagactgacacttcacacgcgaaggaactaccagaagccaggagggaagcctggactagatccttcccagagccttccraggagcgcggcccctctgctggccccgtggtctcgggattctagaatccagaacgctgggatggtaaatttctattgtttcagccactaggtttgtggtacttttgttacaccggccctaggaaactaatactgggagctgggaagacgagaaaggagtatagaagaagagggagttacagcaaaacaaaaccatcaagaaaaagcctcatc

SEQ ID NO: 936068 - DNA, 605 bp, Homo sapiens
gaagctgtaccctgcaaaggcacaggggcgaagctgcccaagaccatgggaacccacctcttgttatcagtgtgacccagatgcgagacatggagtcaaaggaggtcattttggagctttaagatttgactgccttgctggattttggacttgcatgaggcctgtarcccctttgttttggacaatttcttccatttggaattgctgtatttacccaatgcctgtaaccccattgtatctaggatgtaattaacttccttttgattttacaggctcataggtggaagggacttgccttattttggataagactttggactgtggactttttgagttaatggtgaaaagagttttaagactttggggcacttgttgagaaagcatgattggttttaaaatgtgaggacatgagatttggcaggggctaggggtggaacaatatggtttgtctctttgtccgcatccaaatatcatcttgaatatagcccccataattcccatgtgttgtgggaggaaactggtgggagatagttgaatcaccggggtggtttctcccatcttgtctcatggtagtgaataagtctcacgagatctgatggttttac

SEQ ID NO: 936069 - DNA, 675 bp, Homo sapiens
tgctctctagctcactgcagacaccccttcccctttcgcctctcttccttacataccctccttatccgaaaaaaagttcaaatgtttagccaaccagggttaatttagattgtactgcctgaccatggccaatggggaaagggtacaggggcaggacttgcttcaggaataaaggctcttgttcaagtgtgctctcatggtgactggccaaggagaagcacccctctgtgcagaagtaaaattgctttgctaagaatccttgtttgagtgttcaatttccttaggattttgagcattattcccaacatccaagatgcaagacaaagtcctcctcattcttccctctcctctcctcaagtggagggaagaggcctctttcgtgagctgtgcagcctggggttaggggaagggtgatgccagcaccttcttagctgccctggcttgtgtctcagtaggttgcatgttccctcagtccactgtctctgggcccagttcagcactagaacttgcmtaggagttgtagctcttggagcctagactgcctttcaagtttatttagagccccagagtactttagcccacagtggtaaggcttgcaggaactgaagttcagaccactgagattggattagcaattcccctctggctaaggctgtttaaatgctccctctttgg

SEQ ID NO: 936070 - DNA, 581 bp, Homo sapiens
aaggccacaatccctccagaggccttagggcagaatccacttcttgcctcttccagttcctggtggcttcccgaattccttggcttgtggcctcattattccaatttctgcctcctccatggtcacattaccttctcctcttccgtatgtcaaatattcctctacatccctctttttttttttttttttgacaaagattttcactcttgttgcctargctggagtgcaatggtgcgatctcagctcactgcaacctctgcctcctggattcaagcgattctcctgcctcagtctcctgagtagctgggattacaggcattcaccaccatgcctggctaattttgtatttgtagtagagatgggatttctccatgttggtcaggccagtcttgaactcctgacctcaggtgatttgcccgcctcagcctcccaaagtgctgagtttacaggtgtgagccaccgcacccagccttacctccctcctataaggatgtatgtgattgcattcaagtccaccctgataatctagaataatatccccatctgcaaagacccttttctttgcctataagggaacatct

SEQ ID NO: 936071 - DNA, 581 bp, Homo sapiens
aaggccacaatccctccagaggccttagggcagaatccacttcttgcctcttccagttcctggtggcttcccgaattccttggcttgtggcctcattattccaatttctgcctcctccatggtcacattaccttctcctcttccgtatgtcaaatattcctctacatccctctttttttttttttttttgacaaagattttcactcttgttgcctaggctggagtgcaatggtgcgatctcagctcactgcaacctctgcctcctggattcaagcgattctcctgcctcagtctcctgagtagctgggattacaggcattcaccaccatgcctggctaattttgtatttgtagtagagatgggatttctccatgttggtcaggccagtcttgaactcctgacctcargtgatttgcccgcctcagcctcccaaagtgctgagtttacaggtgtgagccaccgcacccagccttacctccctcctataaggatgtatgtgattgcattcaagtccaccctgataatctagaataatatccccatctgcaaagacccttttctttgcctataagggaacatct

SEQ ID NO: 936072 - DNA, 602 bp, Homo sapiens
gcttctaactttcttcctgcagtgactgaatgtttatgtctctccaaaattcatatgttgaaatcctaacctagggccgggcgcggtggctcacgcctgtaatcccagcacttagggaggccaaggcgggcggatcacaaggtcaggaratcgagaccatcctggctaatacagtgaaaccccgtctctactaaaaatacaaaaaattagccgggtgtggtggtgggtgcctgtagtcccagctactcgggaggctgaggcaggagaatggcgtgaacccgggaggcggagcttgcagtgaaccaagattgcgccatgcactccagcctgggtgacagagcaagactccatctcaaaaaaaaaaaaaaaaaatcctaacccaattctgaagtgatggtattaggaggtggggcctttgggggtgattaggtcatgaggatagaggcctcataaatgggattaatgcccataatttgcttgactatagtaaccactatatatatcactatatattggcttgactatagtaaccactacatatatattttggcttccccgggccacactggaagaaaaagaattgtctttgaccacacataaaa

SEQ ID NO: 936073 - DNA, 590 bp, Homo sapiens
tggcttcaagagtgaagctgcagacctttgtgatgagtgttacagctcttaaggtggcacatctggagttgttcgttcctcccatccagagttgttcattcctcccagtgggtttgtggtctcgctggcctcaggagtgaagctgcagaccttcgtggtgagtgttacagctcataaaggcagtgcrgacccaaatcgtgagcagcagcaagatttattgcaaagagcaaaagaacaaagcttccacagtatggaaggtgacccgagcgggttgccgctgctggcttgggcagcctgcttttatttccttatctggccccaccgacatcctgctgattggtccattttacagagagctgattggtccgttttaaagagagctgattggtccattttgacagagtgctgattggtgcctttacaaacctttagctagacacaaaagttctccaagtccccactagattagctagacacagcactgattggcgtgtttacaaaccttgagctagacacagggtgctgattggtgtgtttacaaaccttgggctagacgtaaaagttctccaagtccccacctgactcaggag

SEQ ID NO: 936074 - DNA, 468 bp, Homo sapiens
gtgcactgtggtcaacgttcctggctttgaaccctggctttgccccttcctggtcttggtcaggagtgtgtctctcatgccagactgcctggatttgggtcctgcaactatgcacactgactgtgtgactctgaactcgtgacttcacctttcttggtgtgagttttctcctttcaaagatggagctagcactagtaccacacacaaggtggctggagggattgtgccgtcgcatgcagaattcttgggacaggacttggcacatttaagcacttartaaacatctctggcctggtgccgtggcttaagcctgtcatcccagcactttgggaggccaaggcgggcagatcactcgagtccagcctgggcaacatcatgaaaccccctctctactaaaaatacaaaaattatctgggtgtggtggtgcacgcctgtagtcccagctactcaggaggttgaggcaagaga

SEQ ID NO: 936075 - DNA, 593 bp, Homo sapiens
accgaagatcatgaagatttactcctatgttttcttccaaaagttttatagttttagctctcacatgtaagtctataaaccattttgagaaatttttgtgtatcgtgtgagataggaggccaacttcattctttttatttcccttttttwaaaatttttcatgtaaccagtggggtataacaacttcattcttttgcatgtggggatgtacagtggtcccaacaccatttgttgaaaagactattcttattctttctccattgaattgtcttgacacgcttgtagaatcaattgatcataattttaagggtttatttttcaactctcagttcagtttctttgatctatatgtccattctcatgccagtatcacactgtctgggttactgtatatctgttgtaatttttgtcttgtctgtttatttttgagacagaatctcactctgtcacccagggtggagtacagtggtgcaatcatggctcattgcaacctcaacctcccaggctcaagcaattctcccacctcagcctcctgagtagctggtagccatgccaccacactcagctaatttttaaaagtttttgtagagatg

SEQ ID NO: 936076 - DNA, 593 bp, Homo sapiens
accgaagatcatgaagatttactcctatgttttcttccaaaagttttatagttttagctctcacatgtaagtctataaaccattttgagaaatttttgtgtatcgtgtgagataggaggccaacttcattctttttatttcccttttttaaaaatttttcatgtaaccagtggggtataacaacttcattcttttgcatgtggggatgtacagtggtcccaacaccatttgttgaaaagactattcttattctttctccattgaattgtcttgacacgcttgtagaatcaattgatcataattttaagggtttatttttcaactctcagttcagtttctttgatctatatgtccattctcatgycagtatcacactgtctgggttactgtatatctgttgtaatttttgtcttgtctgtttatttttgagacagaatctcactctgtcacccagggtggagtacagtggtgcaatcatggctcattgcaacctcaacctcccaggctcaagcaattctcccacctcagcctcctgagtagctggtagccatgccaccacactcagctaatttttaaaagtttttgtagagatg

SEQ ID NO: 936077 - DNA, 620 bp, Homo sapiens
gaacaaggacattctcttacataaagaaaattgtaaggttcttgtatcggttcgaatcccgagagcgtgccaacagacaacacgaggcgatgtggagcaacatgctgttttaatgagcgcctgggtgcaggcgggctgaggcctaaaatggcgtcagccccaagtgaggacargacaaaggttttatagtctcctttaaacaggaagtgtcctagtctgacgtaattgctacgttgtacccggatggcctgtttctcaatcttcaggggtacgtgtcttctggccggctctcttcctgcttctgctatcttgctggcacaggctgctgatgcaagtggtcttgcaccttgggactgggcctgagaagggaggagttactcatccctttaagctatcaggccccagggagaatcttacaaaaatcaagaaatttcacattgaacagtaccagtatgaaatgcacaggccacatttgaatgctgccaattgtcccaactagggtcttcctagaccctctccctctcctcggcacctgtcacttgacccgcatgtttttgaagagtagagatcatttatttagtagaacattcctcagcttgggtttcctgatgtatcctaag

SEQ ID NO: 936078 - DNA, 620 bp, Homo sapiens
gaacaaggacattctcttacataaagaaaattgtaaggttcttgtatcggttcgaatcccgagagcgtgccaacagacaacacgaggcgatgtggagcaacatgctgttttaatgagcgcctgggtgcaggcgggctgaggcctaaaatggcgtcagccccaagtgaggacaggacaaaggttttatagtctcctttaaacaggaagtgtcctagtctgacrtaattgctacgttgtacccggatggcctgtttctcaatcttcaggggtacgtgtcttctggccggctctcttcctgcttctgctatcttgctggcacaggctgctgatgcaagtggtcttgcaccttgggactgggcctgagaagggaggagttactcatccctttaagctatcaggccccagggagaatcttacaaaaatcaagaaatttcacattgaacagtaccagtatgaaatgcacaggccacatttgaatgctgccaattgtcccaactagggtcttcctagaccctctccctctcctcggcacctgtcacttgacccgcatgtttttgaagagtagagatcatttatttagtagaacattcctcagcttgggtttcctgatgtatcctaag

SEQ ID NO: 936079 - DNA, 620 bp, Homo sapiens
gaacaaggacattctcttacataaagaaaattgtaaggttcttgtatcggttcgaatcccgagagcgtgccaacagacaacacgaggcgatgtggagcaacatgctgttttaatgagcgcctgggtgcaggcgggctgaggcctaaaatggcgtcagccccaagtgaggacaggacaaaggttttatagtctcctttaaacaggaagtgtcctagtctgacgtaattgctacgttgtaccckgatggcctgtttctcaatcttcaggggtacgtgtcttctggccggctctcttcctgcttctgctatcttgctggcacaggctgctgatgcaagtggtcttgcaccttgggactgggcctgagaagggaggagttactcatccctttaagctatcaggccccagggagaatcttacaaaaatcaagaaatttcacattgaacagtaccagtatgaaatgcacaggccacatttgaatgctgccaattgtcccaactagggtcttcctagaccctctccctctcctcggcacctgtcacttgacccgcatgtttttgaagagtagagatcatttatttagtagaacattcctcagcttgggtttcctgatgtatcctaag

SEQ ID NO: 936080 - DNA, 706 bp, Homo sapiens
gcgtgtaatgaatatttggataagtgaatgaatgatgagaacagcatggtaaatttccctagacaaatagatcaatggaacagaatagagagcccagaaataggcctacataaacatagtcaactcatcttgacagaggaacaaaggtaaacaatggatagtcttttttttttttttttttttttttttgagatggagtttcgctcttgttgcccaggctggaatrcaatggtgcaatcttggctcacagcaacctccacctcctgggttcaagtgattctcttgcctcctctcgagtagctgggattacaggcgtgcaccaccacccctggctaattttgtgtttttagtagagatggggtttctccatgttagtcaggctggtctggaactcccgacctcaggtgatctgcccacctcagcctcccaaagtggtgggattacaggcgtgagccactgcacccagccaaagatagcctttttaacaaatggtgctagaaaaaccagacatccacatgcaaaaataaataaataaatgtagacacagaccttacacccttcccagaattaactcaaatggatcagagacctaaatgtaaaacacaaaactataaaactcctagaagataacatggggaaaaaaatctaggatgaccttgggtttgatgatgactttttagatatgacaccagacaccaaaagcatg

SEQ ID NO: 936081 - DNA, 706 bp, Homo sapiens
gcgtgtaatgaatatttggataagtgaatgaatgatgagaacagcatggtaaatttccctagacaaatagatcaatggaacagaatagagagcccagaaataggcctacataaacatagtcaactcatcttgacagaggaacaaaggtaaacaatggatagtcttttttttttttttttttttttttttgagatggagtttcgctcttgttgcccaggctggaatgcaatggtgcaatcttggctcacagcaacctccacctcctgggttcaagtgattctcttgcctcctctcgagtagctgggattacaggcgtgcaccaccacccctggctaattttgtgtttttagtagagatggggtttctccatgttagtcaggctggtctggaactcccgacctcaggtgatcygcccacctcagcctcccaaagtggtgggattacaggcgtgagccactgcacccagccaaagatagcctttttaacaaatggtgctagaaaaaccagacatccacatgcaaaaataaataaataaatgtagacacagaccttacacccttcccagaattaactcaaatggatcagagacctaaatgtaaaacacaaaactataaaactcctagaagataacatggggaaaaaaatctaggatgaccttgggtttgatgatgactttttagatatgacaccagacaccaaaagcatg

SEQ ID NO: 936082 - DNA, 706 bp, Homo sapiens
gcgtgtaatgaatatttggataagtgaatgaatgatgagaacagcatggtaaatttccctagacaaatagatcaatggaacagaatagagagcccagaaataggcctacataaacatagtcaactcatcttgacagaggaacaaaggtaaacaatggatagtcttttttttttttttttttttttttttgagatggagtttcgctcttgttgcccaggctggaatgcaatggtgcaatcttggctcacagcaacctccacctcctgggttcaagtgattctcttgcctcctctcgagtagctgggattacaggcgtgcaccaccacccctggctaattttgtgtttttagtagagatggggtttctccatgttagtcaggctggtctggaactcccgacctcaggtgatctrcccacctcagcctcccaaagtggtgggattacaggcgtgagccactgcacccagccaaagatagcctttttaacaaatggtgctagaaaaaccagacatccacatgcaaaaataaataaataaatgtagacacagaccttacacccttcccagaattaactcaaatggatcagagacctaaatgtaaaacacaaaactataaaactcctagaagataacatggggaaaaaaatctaggatgaccttgggtttgatgatgactttttagatatgacaccagacaccaaaagcatg

SEQ ID NO: 936083 - DNA, 851 bp, Homo sapiens
taaaatgagacagtcacacccacctagaaaggttagtgctctgagtaaaagcatgtaggatgggggctaggtgggaactggcccttggccagtggtagctgtcacctcttttcatgggtttatcccattcaaaagtgatcaaatgatcattgctgccgtcattgttatgaggggtcytgggtgtgttttgccccatccattcatttaacacaggagactatcctggccctggcagctctctgatctccagcaggttagtggttgaatagcccctggacccaagcctgtgggcttctagtcaggtactttcactagagggtcccaacactttcctagctgggagcaaggctgcaaagaacagatgtgcaggttgtatactgcacaacagaacccaatgaggggcatgagtaggggatgcacgtggggccatgtcagcctgaggacaggataccttttcttttttttttagacggagtcttgctctattgcccaggctggagtgcaatggcacaatcttggctcactgcaagctccacctccaaggttcacgccattctcctgcctcagcctcccgagtagctgggactacaggtgcccgccaccacgcctggctaatttttttgtatttttagtagagacggggttgcactgtgttagcaaggatggtctcgatctcctgatctcgtgatccacgcgccttggcctcccaaagtgctgggattacaggcgtgagccaccgcgcccggtcttaggataccttttctaatgggttttctctgagggctgccttttgaaattttctacctggaaaatataatattttttttataactcgtaccaaacattgtata

SEQ ID NO: 936084 - DNA, 591 bp, Homo sapiens
ctgcagggtgtgtcatcacccgagatcaagcttagaaagtgaaagagcctcttgtcagggatccaggttgcccagggagatcgggagcctccttcctctgaggtctggaggagaaaggacaaccatctggttagatgtggcccttgctggttgtgcctgggggcagagggatgggctagctggaacagaatctttggcagaggatatacctcctcagccatcacccttctggggaatgagaggtctggggcagtaaggataaagactacgcagacacgtaggaaggcaagakggccgccagcttgccagcaaattgctggaaggcagcgtcatcaagtagaggagacagagggagacatgcagtcagaggtgcagagggcctgaggtcgacaggaggtgaccatttctccacatcagaacctgggctgctggagggtttggggtcccccaggcacccttccagactgcatctactgtgagcagcagcaaagaagccagacccttgaggagtggccaggcagagagagtgggaatggcagagggccactggtccacagagcggtccgcttgctaagcctcagatcctggcct

SEQ ID NO: 936085 - DNA, 567 bp, Homo sapiens
ccggccctcattgcggtcagcacccagccattccagggctcgcttcacctcaaattccacgtactcagcggtaaaagtgtcccctgccatggcaagacggccaatggccttggatgccatttccatgacaactgggtcattggaggggaggaggttccgaagatagttggcaaatctgccaattcgggtggcattcccaccttccactcctatgaggctagctgcaaaagagaggaaggcaaaaggtgatgatggggcgtatgctggccaggaaagtacgcagacttcaactaaaagctggtgagtgccggccaggcayggtggctcaagtctgtaatcctagcactttgggaggctgaggcgggcggattgcctgagctcaggagtttgagaccagcctgggcaacatggtgaaaccccgtctctactaagatacaaaaaaaaaaaaaaaaaaaagaaaacaaaaaaattagccaggcgtggtggcacacgcctgtaatcccagctacttgggaggctgaggcaggagaattgcttggacctgggaggcagaggttgcagtaagcc

SEQ ID NO: 936086 - DNA, 622 bp, Homo sapiens
tgaatggggtttttgtgggggctttttgttgttgttgttgtggttgatgctcctgttgttgctttctgtttttttttttccccccagtggtcagttccctcttctgtagggctgctgtagtttactgggggttcagttcaggccctattaatctgatttgctcctgtgcctagagatgtcactcaaggaggctggaaaacagcaatgatgggtgcctgctccttcttctggcatctttgacctagaggggcaccaacctgatgccagcaggattgctcctgtatagggtgtctgacaactccgattggtgggtctcacccagttgggtagcacagggaacaggacctgtttaaygaagaactttgtcctttagtggagagggtatgattcactggggagaaacacacttatctgtgctgcctggatttctcagaactaccaggatgagaggctaagtctgctgctccatagagactgtggccacccctccccctaagggctcgggcccagggagatccagattctgtccctgaacctctctggctggagttattggagttcctgcagggaagccctgcccaatgaggaaggatgggtcagggttaagcctgaagaggcactc

SEQ ID NO: 936087 - DNA, 744 bp, Homo sapiens
tcaggctcattcatgcacctgtggtcagttgcagtttagaaggcaattctgctttggaagactgtctgactgttggctaaggcaatggggcaacctgggctgtgtgtctcccatcatccagaaagctagcctaagcttattcatagagtcaggatgctaacagagcaagtgaaagtctgaaaagcctcttgaagtctcagctcagggtggatacagtgtcactttcttggcattctaggtcaaaataactctcaggccaacacagatgcaatggctggtgaaaytggctccgtgcccaggtgaggggagttgcagtcacattgaaaatgagacagatatagggaggagtgaagaactggagacatttttcaaattgattgaccacagcaggcaaatgctaacaagacagcatgaaaatgcctatattacagggattggcaactattttcttttttttttttgtaactgaccagatagacaacatttttggctttgcaggcctgtcagtcaggctctttcacaactattcaactctgtcgctgtagtgcaaaagcagccattgacaataagtaaatgaatgggcatggctatgttccagtgaaacttgatttacaaaacagtaagtgggctgcatttggcccacagaaccatagtttactgaccacttgtctattttcctagagtgagataattttgctacgcaagtctttgcatttcaaacaggctggaatagaacatagcctc

SEQ ID NO: 936088 - DNA, 672 bp, Homo sapiens
cttgcttgcgcctgtagtcccagctacttgggaggctgaggcagaagaattgcttgaacccgggaggtggaggttgcagtgagccgagatcacgccattgcactccagcctgggcaacagagcaaggctctgtctcaaaaaaaaaaaaaaaaaaaaaaggctaagatagtaaattttgttatatatatatttaccacaatgaaaataaataaatatattatgtatgtatatatacacacacatacactagacatagttcaataaaaccacaagagaaaagaaccataacagaaatgaacaagcagaggccaggtgtggtggctcatgcctataatcccagcactttgggaggcygaggtgggtgaaccatgagatcaggagtttgagaccagcctgcccaagatggtgaaaccccgtctctactaaaaatacaaaaacttagccagacgtgttggcaggtgcctgtaatcccagctagtcaggaggctgaggcagagaagtgcttgaacctgggaggcagaggttgcagtaagccgagattgcaccactgtactccagcctgagcaacagagactgtctcaaaaaaaaaaaagagaaatgaacaaggaaaatacctcccatggtttcccaatcctcacgaaattgctcttgttcctgtgcaactcctgaaag

SEQ ID NO: 936089 - DNA, 579 bp, Homo sapiens
aaaagagagcctactgagttcctgatccctctgggctctctcatgctcttttctgagcctttttaactattttttctttgatcgctcactcttcatggttttgctcatactttctctgatgttctgcaattttctaggccctaggttgaacttctttcagcattgtgctagcatctttgtaatccaatttacagacaaggggcaagatcatgggctgcttcttcccagtggcccagaagtctgtgtgtgaaaagcgcttgtaaggctcaccacttgtaagcctgggctgaatcaggatttatttcaatggctctgttacaayatcagatggcagcatttggcttctgtaattcgttgaagacactggctctctttggcatgtagaatggtcaagagaggattcagcttgaaggcatctgtgaataagtcaatggctttctacggttcaccatcatttagggcttcagtggcagccactttcttatcatttgcgtaatccatcatctgttatagctgcattttcatctcccctttcttttttatttttaaaatttattttattattacgttttaaatttt

SEQ ID NO: 936090 - DNA, 568 bp, Homo sapiens
aacttccagtaccgtgttgaataggagtggtgagagagggcatccttgtcttgtgctggttttcaaggggaatgcttctagcttttgcccattcagtatattggctgtgggtttgtcataaatggctcttattattttgaggtatcttccatcaatacctagttgattgagagtttttaacatgaagagatgttgaattctacrgaattcaatattgagataatcatgtggtttttgtcgtttgttctgtttatgtgatgaattacgtttatcgatttgcatatactgaaccagccttgaatcctggggatgaagccgacttgatcatggtggataagctttttgatgagctgctggattcagtttgcatcaggattgcattgaggatttttgcatcaatgttcatcagggatattggcctgcagttgttttttgttgttgtatctctgccaggttttggtatctgtatgatactggcctcaaaaaatgagttagggagcagtctttccttttccattgtttggaagaatatcagaagaaatggtaccggtttctccttgtacctctg

SEQ ID NO: 936091 - DNA, 568 bp, Homo sapiens
aacttccagtaccgtgttgaataggagtggtgagagagggcatccttgtcttgtgctggttttcaaggggaatgcttctagcttttgcccattcagtatattggctgtgggtttgtcataaatggctcttattattttgaggtatcttccatcaatacctagttgattgagagtttttaacatgaagagatgttgaattctacggaattcaatattgagataatcatgtggtttttgtcgtttgttctgtttatstgatgaattacgtttatcgatttgcatatactgaaccagccttgaatcctggggatgaagccgacttgatcatggtggataagctttttgatgagctgctggattcagtttgcatcaggattgcattgaggatttttgcatcaatgttcatcagggatattggcctgcagttgttttttgttgttgtatctctgccaggttttggtatctgtatgatactggcctcaaaaaatgagttagggagcagtctttccttttccattgtttggaagaatatcagaagaaatggtaccggtttctccttgtacctctg

SEQ ID NO: 936092 - DNA, 812 bp, Homo sapiens
ccaaatatatcttaactttgaactacatacccatattaagaccagagaaaattattctactgtttcatagtattatctagagaaattaatgtatctgtcaaatacttatagattatccagctttgtttatttctccttctgggtttacattttcagtacccttttgtacccatgctataatgggttcagggtgttggggaggaagtaaaaatcatgtccctcatatgaagggtatttttgtcctcaaattgacctcattattggttttttaacctagcccctcaaagtctttttttttttttcttttttgagacagagtctagctctgtcgcccaggctggagtgcagtggtgcgatcttggctcactgcaagctstgcctcccgggttcatgccatcctcctgcctcagcctcccgagtagctgggactacaggtgcatgccaccacgcccggctaattttttgtatttttagtagagacagggtttcaccgtgtaaatcaggatggtctcgatctcctgaccttgtgatccgcccacctcaacctcccagagtgctgggattagaggcgtgagccaccgtgcctggccaatcaaagtctttttaggtgagttaattatacttaactttgtagatgataagaaatttataaacaaaatttaactttcttaagctcatgagtaacttctgctgtgttccattttgcacagtgacttggtaacctagccaaggattttatgcctcctagtagttcttgttagatcagtagctggaagaatgaggcctacttttgaccaaacagaggtcagaaa

SEQ ID NO: 936093 - DNA, 610 bp, Homo sapiens
actccaaatcacagatcattttcaaaaagctttagtaatgaatctttcatacagtgctatgttcaaatctggcattactcattcacatcctaatgctgctcctctcactgtccagtggaagaagcccagtccatctgcagaagcatgctttaccagagtgctcgcgacacaaacagagctgagcaaggaatgagaccatgctagtgaaatgaggaggacacaaggtcggaatgcgctctgcacacggkgcagacggctctgtacattacgaagaagtcttcaaagaggtggagcaatcagatgtcggctatgacctggtcctgtgaggtacttcatgtgtgcggtaaaataagggttagtggtaggactgagagccaagatggtgagtagtgacacctcattataatacttggctaccaaacctcacatttctgtcatgacacataaaaaaatatcttaggttcagcttataaaattcaatacaaggagactgatggcatcctgcttcaaaatttactattattccgtaaatttctctaaaaggtaccaaattgtagatacttacaacagatatttcataaaatgatttaatcctggcttccaaagtgac

SEQ ID NO: 936094 - DNA, 598 bp, Homo sapiens
aatgcttataatttaccagttatcttgagagttcatagctttcagttcagataccaggaacttactattttgaaatttgtagcatgtaatttttgcatttgcttgcagaaccagcaaccctgccagtttcaggatgggatatattattttcttccttttctttcctaggcccagcagtgagaaactttcmcaatctgtaatagatggtgtgactgttctaggaggtcaattccatggtatgtagttatcctgagttggaaattaaactaatatttaaaaaactttaatttacaaaagtaatgtatatttatttagaaaagtttgaaaatacagatgaacaaaaaatgtttaaaaaatgaactcctagatacaaaatactaactttaaaaatcatcttccaggtcgtttctgggcaggcatgttttgtcttacctatggtagtactataggagattatagctgggaaattctgaactaatacaacttcctttactttggtaaggctgaatttcctcaaataaaaacctttttaagtacttgaagatgatcattctggggagcttttatcaatattattaggtcttccctaatagctggt

SEQ ID NO: 936095 - DNA, 614 bp, Homo sapiens
atcaggggttggcaaacaaaagtcttcaagccaaatcaaacccacaccctgtttttataaataaaagtttgttaaaacacagccatgctcattggtttgcatattgtccatgactgcttttgtactataacggcagagttgagtagttgcaggagagaccacgtatccaaagctaaaattattccctatttggccttttacagaaaaagtttgccaaccctgctctagatcactgaagctatatagaacttgatttcaaagtatgtatatctcactctctgcacacatgtatctagccaaacaactagggaatctgctctttccaggtcttacctacataatgtcatcaatcctagtggacaacaagcmtgatgtcctgtaagatggtgagtccatcaaaatcctgtagaatagattatagcacagatctggagaatttacaaatccctgaattaggacagcaaatatattacttctctccctaccaaatgaaagcaatttgcctctgctgtttgctatgatcagaatggagaagaaagcactcgttgcctgctcaatagctgcatatccaatgtcaggggctgtgtagcttatatccagaaggggaacacatc

SEQ ID NO: 936096 - DNA, 603 bp, Homo sapiens
ttaaagatgcatattgttagccatagaacaaccagtaaaaagtaataaaaagaagtacggatgggaagctaattgaggatataaaatggaactccagaaatatatataattaggaaaggaaaggataattaaaggaataaaacccagaagaaatgaatgaaaacaaataccaaggtagtagacttaaacccaaacatattaataatcttattaaatgtaaagagactaaaactccccaatgaaattwaaaaaaaaaggagaatgacaaactagataaaaaagcaaaatttaagaatattctgtctaaagggatgtactttacatttcaaaacacaaatatgttaacagtgaaaggacagaaaaaagatatgttatctatcattacagactgaattgtgtttccccaaaattcatatgctgaaccccgagttgctaatgtgactggctgtatttgaagatagagcctttagggagacaattcaggttaaatgaggtcataaggggaggaccctaatggaatacgattaatgtccttaacaataagaggaagaggtatcaaaaatctctctcagagaagaggtcaagtgaggacccagcaagagg

SEQ ID NO: 936097 - DNA, 603 bp, Homo sapiens
ttaaagatgcatattgttagccatagaacaaccagtaaaaagtaataaaaagaagtacggatgggaagctaattgaggatataaaatggaactccagaaatatatataattaggaaaggaaaggataattaaaggaataaaacccagaagaaatgaatgaaaacaaataccaaggtagtagacttaaacccaaacatattaataatcttattaaatgtaaagagactaaaactccccaatgaaatttaaaaaaaaaggagaatgacaaactagataaaaaagcaaaatttaagaatattctgtctaaagggatgtactttacatttcaaaacacaaatatgttaacagtgaaaggayagaaaaaagatatgttatctatcattacagactgaattgtgtttccccaaaattcatatgctgaaccccgagttgctaatgtgactggctgtatttgaagatagagcctttagggagacaattcaggttaaatgaggtcataaggggaggaccctaatggaatacgattaatgtccttaacaataagaggaagaggtatcaaaaatctctctcagagaagaggtcaagtgaggacccagcaagagg

SEQ ID NO: 936098 - DNA, 603 bp, Homo sapiens
ttaaagatgcatattgttagccatagaacaaccagtaaaaagtaataaaaagaagtacggatgggaagctaattgaggatataaaatggaactccagaaatatatataattaggaaaggaaaggataattaaaggaataaaacccagaagaaatgaatgaaaacaaataccaaggtagtagacttaaacccaaacatattaataatcttattaaatgtaaagagactaaaactccccaatgaaatttaaaaaaaaaggagaatgacaaactagataaaaaagcaaaatttaagaatattctgtctaaagggatgtactttacatttcaaaacacaaatatgttaacagtgaaaggacagaaaaaagatatgttatctatcattacagactgaattgtgtttccccaaaattcatatgctgaaccccgagttgctaatgygactggctgtatttgaagatagagcctttagggagacaattcaggttaaatgaggtcataaggggaggaccctaatggaatacgattaatgtccttaacaataagaggaagaggtatcaaaaatctctctcagagaagaggtcaagtgaggacccagcaagagg

SEQ ID NO: 936099 - DNA, 636 bp, Homo sapiens
gaatttttggtagagacggggtttcaccatgttggacaggatggtctcggcctcttgaccttgtgatccacccgtcttggccttccaaagtgctgggattacaggtgtgagccatcacgcctggcctgaaagtcttgaaaaaaataaattaaaattttcatttgagttttttggaacatacagatacagttgacccttgaacaacatgggtttgaacttcacagatcyacttatatgtgattttcttccatctctgccacccctaagacagcaagaccgaccccttttcttcctcctcctcctcctcctcagcctactcagcatgaagatgacaaggatgaagacttacgatgatccacttttgcttgatgaatattaaatatattttctcctcttcatgatcttcttaataacattttttcctagctagcttattctattgcaagaatacagtattaatacatgtaacatataaaatttgtgttaactgactttatgttatcagtaaaacttccattcaacagcagactaccattagttaacttctggggaagtcaaaagctatacatgggtttttgactgcaggggggtcagcactcctagacccagtgttgttcaagggtcaactgtagcata

SEQ ID NO: 936100 - DNA, 636 bp, Homo sapiens
gaatttttggtagagacggggtttcaccatgttggacaggatggtctcggcctcttgaccttgtgatccacccgtcttggccttccaaagtgctgggattacaggtgtgagccatcacgcctggcctgaaagtcttgaaaaaaataaattaaaattttcatttgagttttttggaacatacagatacagttgacccttgaacaacatgggtttgaacttcacagatccacttatatgtgattttcttccatctctgccacccctaagacagcaagaccgaccccttttcttcctcctcctcctcctcctcagcctactcagcatgaagatgacaaggatgaagacttacgatgatccacttttgcttgatgaatattaaatatattttctcctcttcatgatcttcttaataacattttttcctagcwagcttattctattgcaagaatacagtattaatacatgtaacatataaaatttgtgttaactgactttatgttatcagtaaaacttccattcaacagcagactaccattagttaacttctggggaagtcaaaagctatacatgggtttttgactgcaggggggtcagcactcctagacccagtgttgttcaagggtcaactgtagcata

SEQ ID NO: 936101 - DNA, 588 bp, Homo sapiens
cctgcctcagcctaccaaagtgttgggattacaggcgtgagccaccacgcttggcccttcctaggtgattctgaagcccaacaccagaaaaagtagactgggtaagaaactatttgtcttctgctggatcccaccacagacatctgctgctaggtggtgctactgtagtcttgatggtttctctgtttagtagtaaagaaattgtatgacatccaatgtatgagtaatacatagatttcctttttattcctagacataaattactataaaattcttgcctaggatgtattaaaaatgtttaaagtatggcaggtgcagtggcacgtgcctgtaatcccaacactttgggaggccaaggtgggaggactgcttgagcccaggagtttgagaccagcttgggcaacatagtgggacatcgtttcaattaaaaaaaawataaattagccacgtgtgtggtggcatgtaccactattcccagctactcaagaggctgaggcgggaggattgcttgagtcccggaggttgagactgcagagaactgtgactgcgccactgcactcaagcatgggaaacagagtaaagaccctg

SEQ ID NO: 936102 - DNA, 639 bp, Homo sapiens
gtttgctggaggtccactcaagaccctttcaggtacaccagaccctgtttgcctgggtatcagcagcggaggctgcagaacagcgaatattgctgaacagcaaatgttgctgcctgatcgttcctctggaaggtttgtctcagaggggtacccggccatgtgaggtatcagtctgcccctactggggggcctcccagttaggctactcaggggtcagggactcacttgaggaggcagtctgtccgttctcagatctcaaactctgtgctaggagaaccactactctcttcaaagctgtcagacaggaacagtgaaatctgcagaggttgctgctgccttttgttcggctatgccttgcccacagaggtggagtctacagaggcaggcaggcctccttgagcgacggtgggctccacccrgtttgggtttcctggctgctttgtttacctactgaagcctcagcaatggtgggcgcccttcctcaggctcactgccgccttgcagttaggtctcagactgctgtgctagaaatgagcgaggctccatgggtgtgggaccctccgagccaggcgcaggatataatttcctggtgtgccgtttgctaggacccttggaaaagtgcagtattagggtgggagt

SEQ ID NO: 936103 - DNA, 639 bp, Homo sapiens
gtttgctggaggtccactcaagaccctttcaggtacaccagaccctgtttgcctgggtatcagcagcggaggctgcagaacagcgaatattgctgaacagcaaatgttgctgcctgatcgttcctctggaaggtttgtctcagaggggtacccggccatgtgaggtatcagtctgcccctactggggggcctcccagttaggctactcaggggtcagggactcacttgaggaggcagtctgtccgttctcagatctcaaactctgtgctaggagaaccactactctcttcaaagctgtcagacaggaacagtgaaatctgcagaggttgctgctgccttttgttcggctatgccttgcccacagaggtggagtctacagaggcaggcaggcctccttgagcgacggtgggctccacccagttygggtttcctggctgctttgtttacctactgaagcctcagcaatggtgggcgcccttcctcaggctcactgccgccttgcagttaggtctcagactgctgtgctagaaatgagcgaggctccatgggtgtgggaccctccgagccaggcgcaggatataatttcctggtgtgccgtttgctaggacccttggaaaagtgcagtattagggtgggagt

SEQ ID NO: 936104 - DNA, 611 bp, Homo sapiens
ccttggttatttcctttctcaaggaggagatactattctagtttgacagatcctttcctggacacactctcagaattccctaaggttcttatcgtggctaatggataacaatgcagaggctatgggagtgaataatcactctctctcagctaaaaacttcctttattgacttctctaacttcccgtcaacatcttgctgccaaatcaacctcttgttctaggcaattattaaaagcaattttcttgaaactgaaaaacacatttagccttcaacaataaatcacactaacatcaattactagccaattagattactagaatatcagacccagagatatttgcagtrttgaaatattttcaaaataaagttgtttacatttctatttctgtctttaatccttaaaatgcaaacaaatacaggagtgaagacagatgtattttagttatttcttctacaagataaagtggatagtaatattatgttaagaaaatacttatttagtatctagaatgatagcattatctattctttattaaaagagaaactaaaagtaatataattaaatagcttgttcttgtgacttaaataatataaaattttcatttcaatt

SEQ ID NO: 936105 - DNA, 635 bp, Homo sapiens
aagccactgaataaatcacagacaacactgatgctgtttataattgaagaaataatggagactacactactgcatacatccagaatcacaaccaaaataccctatccaaccaacaccgtagatacatcttcaggaaaaatttctcatrtatgaaagtaaatttaaaaaattggaagaagtgactggtaaaccaaatgcacagttatcaatgtaaggacaaaagacacataaaaaagcaaggaaatataacacctccagaggaacaaaatcattctccagcaacagatttcaatgaaaaaatttatgaaatcccaggaaaataatgcaaaataatgaaattaaagtatctcaattagatgcaagagaacgcagataaaaattacaaagaaatcagacaaacagttcaggatacaaataagaaatttaccagagagatagctacaaaacaaattttagaagttaagaattcattgaataaaatacaaaatacattcaaaatcttcaacagtagactaaattaggcagaagaaagaattttagaacttaaagacaagtcttttgaaatgacccagtcggataaaaataaagaattcaaaagaatgaacaaagcctacaagacatatggggcactataa

SEQ ID NO: 936106 - DNA, 574 bp, Homo sapiens
caagatggccgaataggaacagctccagtctacagctcccagcatgagcaacgcagacgaggggtgatttctgcatttccaactgaggtaccgggttcatctcactggggagtgtcggaaagtggttgcaggacagtgggtgcagtgcagcaagcgtgagctgaagcacagcgaggcatcrcctcacctgggaagtgcaaggggtcagggaattccctttcacagccaagcaaagctgtgacagatggcacctggaaaatcgggtcactcccaccctaatactgcacttttccaatggtcttagcaaacggcacaccaggagataatatcccatgcctggcttggagggttccacacccacagagcctcactcattgctagcacagcagtctgagatcaaactgcaaggtggcagcaaggctaggggaggaaagcccacaattgcccaggcttgagtaggtaaaaaaagcggcctggaagctcgaactgggtggagcccaccacagctccaggaggcctgcctgcctctgtagactcaacctctgggggcagggcatagccaaacaaaaggcag

SEQ ID NO: 936107 - DNA, 604 bp, Homo sapiens
aaagttttacagtcaaactccaaattccagatcttcaaccacgcggttacagtggggcagccacgtttataaagtgagaccctcctaccctctctggccacactgattggaccaggcaaaagcatctgacccaagmtgggccaatgagcctcttccatttgaaactaccagaaatggagagtgaaagagcttagttttaacttggctgtatttgactgcagggtatataattttggaaaaagaatgccaggatctttttcttttcatcaggtggtaaatcgaaggctcatctgcaatgatgaagactaaaactcccccctggagtgaagcaaggctgagagacagaagagagaatgtcctgggttccaatcagagaggaggactgtggttcattgcagtggggcggaccaaggggctccctggtcccctgcttccaagagctcccatatcctggtaaccaaatctctccttccttttatttccaaaattcccccaatgggttttctattatttgtagtcaagagaatcctgaccacaaatcacaatactaaatatttttgaaatccaaaaagatataaggagagtgtgagtttaataattatta

SEQ ID NO: 936108 - DNA, 618 bp, Homo sapiens
aatccatgagcagtcacaggcaacgtacaaacccacaggctgctttcccactgcaacagcagaggagagaggttaccacaaggactacatggcatgtaaagcctaaaatatttactatctggccttttagaggaaaaatttgacaactcttcatctagaaagtcatgaacacactcacctgggtgccacttaccctgtgattgtccaataattttgcttggttgagttttacaagattactatggtgttagtcctttttgcattgctataaaggaatacctaagtctgggtaatttataaagaaaagaggtttatttggctcacagttctgcctgctgtacacaaagcatagaamctgcatctgcctctggtcaggacttcaagaagcctttactcatggtgggaggtgaatgaggagcaggcatgtcccatggcaagagacggagaaagggagaagggaggaaggtgccaggctctttaaacaactaactcccacatgaactaatagggaacttgctcattactgcagggagggcaccaagccattcatgaaggatccacccccatgacctaaacacctcccactaggccccacctccaacaatggggatcatattt

SEQ ID NO: 936109 - DNA, 590 bp, Homo sapiens
tgccttctcgaccctgtcattcttttcttctttcgtcttttcaattcgccccatctgcacctggcctcatttctgtacatggctttgtatctagtggccgcaagatgcactatgtgtattttcacatggaaatgtccatggccagagtgaggaactgaaaggatgtctttttgaaacggaattaggaagacacctacttttatttacagaagggaaagatgaatggaacatcatcgaggatcttgcaggagccctctctgatagagggaaagcctgtagaccattttctrttctttctcttggccacagacattcctttcaacatgtgctgaccttctgcttgaaggtctccttgagaacattgtctcagaaatctctgttgcaatatttgaacggatcactcaatgcttttcactgttaaattttctctaccgtctcaccttaggcaatataaagtcctggttcactctcaggaacgagagctgacccagttaagggagaagttacgggaagggagagatgcctcccgctcattgaatgagcatctccaggccctcctcactccggatgagccggacaagtcccagggg

SEQ ID NO: 936110 - DNA, 825 bp, Homo sapiens
aacagtgcttagcacaaaggaaacactcaacgaatgactacctattattattattgttactattagtattgaagtgatggcagaaccgttgtttttcaggattacctactctgcaaacatggtggaggaaaatggagacaagagctatcaacactagcgaaaattcaggaaggagaaaggataacatgtatcccttatcagagatagagagatccaggttgggggaaaatatgatagaaaaaagtgcatacatcctttaagcagagaaaatgagacaggagagccatggggcaaaactgggataagaattggtctaggggtcagcagtggctggtctccagtgagttttgcctggtgcaaggtcagagaggctggcactggggcattgaagttgcatgatggagggggtggcaagacaacgggtggattcttcctacaacgaggctccagcaaccatgcacctgggatcttgtacctgatccctggcatgcttgttagccgaaggaaggctacccaagktcaaagaagttcaggagagagtgaatgaatatagtgtcagtaaggaagtgggacggcactccgcaaaggcaaacccagggttgctaagtcagtgcctctgggcccggcagtaactaacaaggattgcaatggagagaaaagatgactgcttcccagcaggcagtgacttatcagcttttatggcaaagctggggcccaggaggcaccacagaggacctcccaggttgcaggggaaacacctgcttgttaccaagcgtttttcagcatgtggtttcagccaagcttaggagaaaagactggtcaatg

SEQ ID NO: 936111 - DNA, 755 bp, Homo sapiens
cattaaaaggaacttccgggcctgtaaccccagcactttgggaggctaaggcgggcgggtcacctgaggtcaagggttcgagaccagagaccagcctggccaacatgatgaaaccccatctctactaacagtacaaaaattagctgggcctgtagtctacaatgcaaaatggtccctgctgacactcttcttgtctagacctctagggtgtgactctcctgggcctagggtttggctaaggctggtgtcataggaccgacatatttgcatgcctgttgctcagtagcagaccaggacactgagacagcagggtttgcagcaaagaaagagtttaatgattgccgagcacagagcaaggaactgggaggggaccctcaaatccacctccagaggagttccgsgctggggcttttacggggatcctataaagaagtcaaggggttggaaaactggagtcattgattggtgggggcagggagatgaattcgtcaggatgtggaaatggcttttttttttttttttttgtgagtcagttctttgtgggatctttcagactagctggcgtcagtagtttcatccggatgcaggccctgaaagaatatctcaaatgcaaaagtgaacgtttcatgacatacaagtggctgtctacagagcagttaaggggtgttagcatcctgcgacagggtctgtgtgattctgaggccgccacaggcactgcatggctgtgaggcagctggtcagagagcaggctgctc

SEQ ID NO: 936112 - DNA, 560 bp, Homo sapiens
cccagcttggctaacagagtgagaccgtgtctctattaaaaaaaaaaaaaaaaaagattatcattgaagaccattcaaagaagaaaaagacattgcacagaaagtcttcacaggcagagcacatgtaatcaggatccaggctgttttmtaaaactatggtttctgctcctagcaacacagatatgtgtgtgggttggtgtgtgcatggtaggtgtgggcaggtaggtgtgcacacacacaagttgctgcctgagacaaggccccacctggcccaggggcatgccaagtgctactctggggtctgggcaaagctgtggctctcctgagggcttctctggcagttggggacccctagagaaaggcttctctcatggccctgcggggctagcagctcccagactacatatgggggaacctggtggtcctggccaacagcttctccagatgcccttctgtgtgactagccagtgccctgcaattcacagccttggcccagcaaggtgaggagtccaggcactggcttggcagcacctcactatttctgagtcttggcattgggc

SEQ ID NO: 936113 - DNA, 600 bp, Homo sapiens
ctctcatggccctgcggggctagcagctcccagactacatatgggggaacctggtggtcctggccaacagcttctccagatgcccttctgtgtgactagccagtgccctgcaattcacagccttggcccagcaaggtgaggagtccaggcactggcttggcagcacctcactatttctgagtcttggcattgggcatccgcttttttttttttttttgaraaagagttttgctctgtcgcccaggctggagtgcagtggcgcaatctcggctcactgcaagctccgcctcccgggttcaagcaattttcctgcgtcagcctcccgagtagctgggactacaggcggctgccaccacgcccggctaattttttgtatttttagtagagacggggtttcacactcttagccaggatggtctcaatctcctgacctcgtgatctgtgtgcctcggcctcccaaagtgctgggattacaggcgtgagccaccatgcccagcctacttttttttttttttaagagatggggtcttgctctctcttctaggctagagtacgtggtatgaacatggctcactgtatcctcttgggtttaagtgatcc

SEQ ID NO: 936114 - DNA, 600 bp, Homo sapiens
ctctcatggccctgcggggctagcagctcccagactacatatgggggaacctggtggtcctggccaacagcttctccagatgcccttctgtgtgactagccagtgccctgcaattcacagccttggcccagcaaggtgaggagtccaggcactggcttggcagcacctcactatttctgagtcttggcattgggcatccgcttttttttttttttttgaaamagagttttgctctgtcgcccaggctggagtgcagtggcgcaatctcggctcactgcaagctccgcctcccgggttcaagcaattttcctgcgtcagcctcccgagtagctgggactacaggcggctgccaccacgcccggctaattttttgtatttttagtagagacggggtttcacactcttagccaggatggtctcaatctcctgacctcgtgatctgtgtgcctcggcctcccaaagtgctgggattacaggcgtgagccaccatgcccagcctacttttttttttttttaagagatggggtcttgctctctcttctaggctagagtacgtggtatgaacatggctcactgtatcctcttgggtttaagtgatcc

SEQ ID NO: 936115 - DNA, 673 bp, Homo sapiens
gtatttttagtagagacgaggtttctccatgttggtcaggctggtctcaaactgccaacctcaggtgatccacccacctcggcctctcaaactgctgggattacagacatgagccatcgcaccggcccattgcatcgtttttatacttttgtgtccttatagcttagctcccacttacaagtgagaacacagaatgtttagtttcccgactgggtgcggtggcttacgcctgtaatcccagcactttaggaggccgaggcgggcggatcatgaggtcaagagatcgagaccatcctggccaaaatggtgaaaccctgtctctactaaaattacaaaaattaactgggtgtggtggtgcgcacctgcagtcacagctactagggaggctgaggcaggggaatcacttgaacccgggaggtggaggttgcagtgagccaagattgtgccactgcactccagcctggtgacagagtgagactccatctcaaaaaaaaaaaaaraaaaagaaaagaaaagaaaaagaaaagaaaaaaagactgggtgtggtggctcacgtctgtaatcccagcattttgggaggccaaggcaggtggatcacctgaggtcagaaattccagaccagcctggccaacatggtgaaaccccgtctctactaaaaatccaaaaaatatat

SEQ ID NO: 936116 - DNA, 737 bp, Homo sapiens
gcccgggggaccactaccaccaatgcacggagaccggtagtggccccaaatgtctggctgcactgttatttattggatacaaggcagaaggggcagggtaaagaatgtgagtcacctccaatgataggtaaggtcacgtgggtcacatgtccactggacagggggcccttccctgcctggcagctgaggcagagagagagaggagacagagagaaagacagcttatgccattatttctgcatatcagggactattagtattttcactaatttactactgctatctagaaggcagagccaggtgtacaggatgaaacatgaaggcagactaggagtgtgaccactgaagcacagcatcacagggagacggttaggcctccagataactgcgggcgagcctgactgatgtcaggccctccacaagaggtggaggagcagagtcttctctaaactcccccggggaaagggagaccccccccccccctttcccrgtctgctaagtagcgggtgttgttccttgacaccttttgctaccgctggaccacgatccgcctggtaacgggcgtcttcccagatgctggcatcactgctagaccaaggagccctctggtggccctgtccgggcataactgaaggcttgcactcttgtctaatggtcacacctcactatgtcccctcagctcctatctctgtatggcctggtttttcctaggctatgattatagagtgaggattatc

SEQ ID NO: 936117 - DNA, 737 bp, Homo sapiens
gcccgggggaccactaccaccaatgcacggagaccggtagtggccccaaatgtctggctgcactgttatttattggatacaaggcagaaggggcagggtaaagaatgtgagtcacctccaatgataggtaaggtcacgtgggtcacatgtccactggacagggggcccttccctgcctggcagctgaggcagagagagagaggagacagagagaaagacagcttatgccattatttctgcatatcagggactattagtattttcactaatttactactgctatctagaaggcagagccaggtgtacaggatgaaacatgaaggcagactaggagtgtgaccactgaagcacagcatcacagggagacggttaggcctccagataactgcgggcgagcctgactgatgtcaggccctccacaagaggtggaggagcagagtcttctctaaactcccccggggaaagggagaccccccccccccctttcccagtctgctaagtagcgggtgttgttccttgacaccttttgctaccgctggaccacgatccgcctggtaacgggcgtcttcccagatgctggcatcacygctagaccaaggagccctctggtggccctgtccgggcataactgaaggcttgcactcttgtctaatggtcacacctcactatgtcccctcagctcctatctctgtatggcctggtttttcctaggctatgattatagagtgaggattatc

SEQ ID NO: 936118 - DNA, 776 bp, Homo sapiens
agaggtggaggagcagagtcttctctaaactcccccggggaaagggagaccccccccccccctttcccagtctgctaagtagcgggtgttgttccttgacaccttttgctaccgctggaccacgatccgcctggtaacgggcgtcttcccagatgctggcatcactgctagaccaaggagccctctggtggccctgtccgggcataactgaaggcttgcactcttgtctaatggtcacacctcactatgtcccctcagctcctatctctgtatggcctggtttttcctaggctatgattatagagtgaggattatcataatattggaataaaaagtaactgctacaaactaatgattaatgatattcatatataatcatatctaagatctatatctggtataactattcttgttttatattttattatactggaacagctcgtgtcctctgtctcttgcctcggtgcctgggtggcttgccrcccacacaatgtcatgaagctttctccgttttcttgtatgatttttatagttttagcttgtgttgaagtctttggtccattttactttaatttctgtatgtggtataaggtaagggtccaattttattcttttgtatgtagctatccagttttcccaacaccatttgttttaaagactatccttttgttaccaaaacaccagggatttggtctaggtcctgctgatcactgcacagaaagccgatcactgagatgacaagtattgccaaggaagaagggtttaattgggtgctg

SEQ ID NO: 936119 - DNA, 776 bp, Homo sapiens
agaggtggaggagcagagtcttctctaaactcccccggggaaagggagaccccccccccccctttcccagtctgctaagtagcgggtgttgttccttgacaccttttgctaccgctggaccacgatccgcctggtaacgggcgtcttcccagatgctggcatcactgctagaccaaggagccctctggtggccctgtccgggcataactgaaggcttgcactcttgtctaatggtcacacctcactatgtcccctcagctcctatctctgtatggcctggtttttcctaggctatgattatagagtgaggattatcataatattggaataaaaagtaactgctacaaactaatgattaatgatattcatatataatcatatctaagatctatatctggtataactattcttgttttatattttattatactggaacagctcgtgtcctctgtctcttgcctcggtgcctgggtggcttgccacccacacaatgtcatgaagctttctccgttttcttrtatgatttttatagttttagcttgtgttgaagtctttggtccattttactttaatttctgtatgtggtataaggtaagggtccaattttattcttttgtatgtagctatccagttttcccaacaccatttgttttaaagactatccttttgttaccaaaacaccagggatttggtctaggtcctgctgatcactgcacagaaagccgatcactgagatgacaagtattgccaaggaagaagggtttaattgggtgctg

SEQ ID NO: 936120 - DNA, 834 bp, Homo sapiens
agccttggaaacatttagctcctctccaactcctaattccctaagtaattctgtggcgtgttgttcacggggcctctgggtttcctcatcatctccgggagttctatgcactgcctgtgtcagggaggcacacaagaagctcttgctctctgtaaacaagcgtctttgctgtaggaggaatgaactaaaggctggtggtgctttccagaaggatgatgcagtgaaatgccaaacgctgctgggacgctttccacactgacagcattctcttagttacttaaagaaacgagggagggtgactattcctggaagtaaccaggagtgatgagtagccttcccttaaggataacaaagtatgtcaattgccccctcaccctcccgccacaccacactgggttttgcagcagtggcttcctgcctggccagtgagcctggtgtggtmagcagcctgttcaggctgaagacaacgggcaaaacgcagcttctctgaggccatgaaactgaccttatccccttcattcagacgataggtactgggttacttgaaagagccatcgtattgaccaataatataatgacagagacttccacagaatatctttgatatggttgggctctgtgtccccatccaaatctcatttgaattgtactctcataatttccacatgttgtgggagggacctggtgggagataattgaatcgtggtggcaggtctttgcagtgctgttctcatgatagtgaataaatctcacagccggggaccgtggctcacgcctgtaatcccaacactttggaaggccaaagcaggcagatcacttgaggtcaggagttcg

SEQ ID NO: 936121 - DNA, 615 bp, Homo sapiens
ggcagcagcggcagggccaggctgatgtttgtagaattcaactccatgcatcgtgctgagggcttttcatgttccctcatcttaatccttcacaaaaccctacaatacaaggtaggtattatgaaccccactgtataggtgaggaaactgaggccaatatacatggggtgatttatctaagagagcacagctggtaagccgttgtttctgaccctgagtctaactcaggaccaagcctgctgtgctaccttttacgtggaagctgtgcagggcttgcaaaagatgcctaacaaacactgaccaagaggctgcccactgtggcctgcggacatcacaggtgaggagactggaggccgggcttgtaggtctgctttatcaccctccagggaggaccataagtaagaaaatctttcaactgccatgtggcagtcatgggcgagttytgagttattaataacacataatttttcaaacgaagatcattatcataataacgaaaggtgccatgaagaagtgctaattgcaataattactaatttattagggagttagaagatgggtcaaggtttgtaaatcaggaaggaacgtgttagacaagtacgtgagaaaacatgt

SEQ ID NO: 936122 - DNA, 566 bp, Homo sapiens
tgctttacatctattaactcatttaatcctcacaacagctctctgtggccagtacatttttaatccccattttagagattaagaacaccaagtctcagagaggttaaacaactagtccaatgtcacacagcaagtgacaaagccattgaaaagaatgaagacagtattatgtcctgacatagaaatctggccctgacattctgttatacgatacaaagcaagagacaaacagtagtttgatcagaaaacatttaaaaagcacatttaaataattaggagatgtgtgtcttttttttttctgagatggagtttcactcttgttgcccagggtggagtccaatgatgccatcttggctcactgcaacctccgccttctgggttcaagcgattctcctgcctcaacctcccragtagctgggattacaggtgcccaccatgcccagctaatttttgtatttttagtagagatgggatttcaccatgttggccaggctggtcttgaactcctgacctcaggtgattgcctgtcttggcctcccaaagtcctgggattacaggcatgagcc

SEQ ID NO: 936123 - DNA, 569 bp, Homo sapiens
tcaaaaataaaataaaataaaataaattttaaaattttttttaaaaaagtgagctaaggacatgaatagacatttatttttatttatttatttatttttgagatggagtctcactctgtcaccgaggctggagtgcagtggtgcaatctcgtctcactgcaacctccatctcctgggttcaagctattctcctgcctcagcctcccaagtagctgggattacaggtgcgtgccaccacgcccacctaatttttttgtatttttagtagagacaaggtttcaccattttagccaggagggtctcgaactcctgacatcgtgatccacctggctcagcctcccaaagtgctgggattacaggtgtgagccactgcacccggccatagacaattcttaaaagaagatatacatatgaccaacaaacatatttwaaaaaatgctcacatcactaattatcaaagaaatgtgaatctaaaaccataatgtggtaccactttactcctgcaagaatagccataatttaaaaattaaaaaaaattgatattggtgtggatgtggtggaaagggaac

SEQ ID NO: 936124 - DNA, 531 bp, Homo sapiens
cttggtatttaccccagacaatgagcctgttttagtagttcctatagatcctataataagtgaggcacaatccctttatttacttatttatttttgaaacagagtctcattctgtcgcccaggctgaggtgcagtggtgttcccgggccaaaccaagggtcrggttccttattctcgtggcccaataacgagataaagatgaactgggagaaaagggagtttttatttctatagctggttacagggagaagggctggaaattatcgctggaccaactcaaaattacaaagttttccaaagcttatataccttctaagcgatatgtgtacatgtaagtgtgcatttacctaaagacacaagcgattaacttcttttaatctgtaactaagatctgagtcctgaagaccttcctctggagcctcagtaaatttacttaagctaaatgggtccaggtgctggggtgattaccgaccattatcttgtctcctgctaagtcatggaggtttggggacttactttagtccccaataa

SEQ ID NO: 936125 - DNA, 531 bp, Homo sapiens
cttggtatttaccccagacaatgagcctgttttagtagttcctatagatcctataataagtgaggcacaatccctttatttacttatttatttttgaaacagagtctcattctgtcgcccaggctgaggtgcagtggtgttcccgggccaaaccaagggtcaggttccttattctcgtggcccaataacgagataaagatgaactgggagaaaagggagtttttatttctatarctggttacagggagaagggctggaaattatcgctggaccaactcaaaattacaaagttttccaaagcttatataccttctaagcgatatgtgtacatgtaagtgtgcatttacctaaagacacaagcgattaacttcttttaatctgtaactaagatctgagtcctgaagaccttcctctggagcctcagtaaatttacttaagctaaatgggtccaggtgctggggtgattaccgaccattatcttgtctcctgctaagtcatggaggtttggggacttactttagtccccaataa

SEQ ID NO: 936126 - DNA, 605 bp, Homo sapiens
tccaacagtcgtagcaaatggcacaccaggagattatatcctgcacctggcttggagggtcctacccccatggagcctcgctcactgctagcatggcagtctgagatctaactgcaaggcggcagcaaggctgggggaggggcacctgccattgctgaggcttgagtaggtaaacaaagcagcagggaagctcgagctgggtggagcctactgcagctcaaagaggcctgcctgcctctgtagactccacycctgggggcagggcatagctgaacaaaaggcagcagaaacttctgcagacttaaacatccctgtgtgacagctttgaagaaagtagtggttctcccagcatggagtttgagatctgagaatggacagactgcctcctcaagtgggtccctgacccccgagtagcctaactgggagacacctcccagtaggggctgactgacccctcatatggccgggtgcccctctgagaccaagcttccagaggaatgatcaggcagcaacatttgctgttctgcaatatttgctgttctgcagcctccgctgatgatacccaggcaaacagtgtctgagtggatctccagcaaactccaaca

SEQ ID NO: 936127 - DNA, 605 bp, Homo sapiens
tccaacagtcgtagcaaatggcacaccaggagattatatcctgcacctggcttggagggtcctacccccatggagcctcgctcactgctagcatggcagtctgagatctaactgcaaggcggcagcaaggctgggggaggggcacctgccattgctgaggcttgagtaggtaaacaaagcagcagggaagctcgagctgggtggagcctactgcagctcaaagaggcctgcctgcctctgtagactccacccctgggggcagggcatagstgaacaaaaggcagcagaaacttctgcagacttaaacatccctgtgtgacagctttgaagaaagtagtggttctcccagcatggagtttgagatctgagaatggacagactgcctcctcaagtgggtccctgacccccgagtagcctaactgggagacacctcccagtaggggctgactgacccctcatatggccgggtgcccctctgagaccaagcttccagaggaatgatcaggcagcaacatttgctgttctgcaatatttgctgttctgcagcctccgctgatgatacccaggcaaacagtgtctgagtggatctccagcaaactccaaca

SEQ ID NO: 936128 - DNA, 605 bp, Homo sapiens
tccaacagtcgtagcaaatggcacaccaggagattatatcctgcacctggcttggagggtcctacccccatggagcctcgctcactgctagcatggcagtctgagatctaactgcaaggcggcagcaaggctgggggaggggcacctgccattgctgaggcttgagtaggtaaacaaagcagcagggaagctcgagctgggtggagcctactgcagctcaaagaggcctgcctgcctctgtagactccacccctgggggcagggcatagctgaacaaaaggcagcagaaacttctgcagacttaaacrtccctgtgtgacagctttgaagaaagtagtggttctcccagcatggagtttgagatctgagaatggacagactgcctcctcaagtgggtccctgacccccgagtagcctaactgggagacacctcccagtaggggctgactgacccctcatatggccgggtgcccctctgagaccaagcttccagaggaatgatcaggcagcaacatttgctgttctgcaatatttgctgttctgcagcctccgctgatgatacccaggcaaacagtgtctgagtggatctccagcaaactccaaca

SEQ ID NO: 936129 - DNA, 808 bp, Homo sapiens
tagcatgggagctgttgtgtggcgtgacagaggaagctggcttggaaaggcaacacatggtctcttcttggaagctttctgagagtggtgaacattcctgggtctgattgaacaagatttagagtcaaagttagcagccattacttgagcatctactttgccaggcactgtgctgcgtgctttccatgtgatttcttgtttagtcctcagagaatggcatcaaggtggttggcaaggaggaaccctttagaactctccacctaaccctgttcatcagtgggtgctgaaaggtgtttgttaaagataggctgatttaaactgagacaattgcctatgctgttagcagatacagaactacgtttgctctgtatgatgggttgttgaagggtgggtgtaaatatcccatgtgctcacatttagaatctatccctatttttttttttttttgagacggagtctcgctctgtcgcccaggctggagtgcagtggcgcaatcttggctyactgcaagctccgcctcccaggttcacgccattctcctgcctcagcctcccaagtagctgggactacaggcgcccgccaccatgcctggctaattttttgtatttttagtagagacggggtttcaccgtgttagcgaggatggtctcgatctcctgacctcgtgatctgcccacctcggcctcccaaagtgctgggattacaggcgtgagccaccgtgcccagcctctatccccattttaatgccctgttctgtcctctgctggctcaggctcttgtggagcattattaggggagggtgtctgga

SEQ ID NO: 936130 - DNA, 571 bp, Homo sapiens
acggtgtggagattccttaaagaactaaaagtagaactaccgtatgatctagcaatcccactactgggtaaccacccggaggaaaagaagtcattattcaaaaaagatacttgcacatccatgtttatagcagcacaattcacaatagcaaaatcctggaaccaatccaaatgcctrtcaatcaatgagtagataaagaaactctgacatatatatatatatatatatatatatatatgagttttatatatatatgttttatatatatatcagtgtttcatatatatatatataatctttctttgtctttgactttcagcaatgcaattaaaatgtgccttggagagaacctgttttatatatatatgtatatagatctctctctcaccatgatgcccatatatgtatatatgatggaatactactcagccataaaaaggaatgaattaacagcatttgcaatgacctggatgagattagagatgattattccaagtgaagtaactcaggaatggaaagttaaacatcatacattctcactgatatgtgggagctaacctatgaggacgca

SEQ ID NO: 936131 - DNA, 571 bp, Homo sapiens
acggtgtggagattccttaaagaactaaaagtagaactaccgtatgatctagcaatcccactactgggtaaccacccggaggaaaagaagtcattattcaaaaaagatacttgcacatccatgtttatagcagcacaattcacaatagcaaaatcctggaaccaatccaaatgcctatcaatcaatgagtagataaagaaactctgayatatatatatatatatatatatatatatatgagttttatatatatatgttttatatatatatcagtgtttcatatatatatatataatctttctttgtctttgactttcagcaatgcaattaaaatgtgccttggagagaacctgttttatatatatatgtatatagatctctctctcaccatgatgcccatatatgtatatatgatggaatactactcagccataaaaaggaatgaattaacagcatttgcaatgacctggatgagattagagatgattattccaagtgaagtaactcaggaatggaaagttaaacatcatacattctcactgatatgtgggagctaacctatgaggacgca

SEQ ID NO: 936132 - DNA, 716 bp, Homo sapiens
agggactacacaagatgatctgttcagaatttctgagcaggcttactgttgagagacatttctagacaaagccaaattgcaaaaactggaataaacacctaattcttcaatagcaaacaccaacaaacaaccacaaggaacaagaagcagggaaacttactgtaaccaaacagaaaaaataagggaccagtagttactaaccctaaaattaagaagatgagttaaattactgacaaagaattcaaaatagctgttttttaaaagctcagcaaatgtcaagaaaacacaaagaaacaattcagaaattcatcgagaaatttaactgagagaatattagttttaaacatattagaggtcaaaaatacaatgaacaaaatttaaaaatgcaacagagatcaccaatagcaaaattgatcaaccagaaaaaagaaaatgtgaactagaagacaaattatttaaaaatatacaggcagagtatatcttttctaaccacaatactataaaacaagaaatcaataacaggaaaacctttgaaaaatttaccaatacatggaaattaaacaacatgytcctaaacaactaatgagtcaatgaagaaataaaacagaaattttagaatgtcttgagacaggtgaaaatgggaaaacaacataccacaccctataagatacagcaaaagaagcaaaagaagttctaagtgagtagtttatagcaat

SEQ ID NO: 936133 - DNA, 726 bp, Homo sapiens
caagactttgcctttgctgctgccaaaccaaagcctctgcttttttttgaatttttgaaatcacagatcctaattcctgggactttaagctaaatgctgacactatctgttttgagctgttacagcttccaracaagctgtgctcaactgaaggcaggcataggttaggtgaataggacttcaacttgaggaccagtgcaggtttgagacattcctctgtgcagacatacgaaaacatcaaagacgctggctggaccacggatgctatgaaaacatcacggatgctggctggaccatctgggtcacatacagatactcacagaaggtttactctctgatgggaccacctgaaattgagctactcagttctgtgtttctaatacacctgcggactgtgttcctaacttgcaattactgccaaaagttacaccctgggggaagcacatcacggcaactggaatggaagagatcagtgacccctccaccgccccgacagaccagactatcaagcccctctgggtcttaacatccgttgacctgttgtgttctggattcgctgccgttgactataatgaattgacaacctgattctacttccctcgcctttctcctggtacacacaatacagaaggcaggttaattgttaaatgcaactgtttccagaaaggggttgatcttttctaggctgctcactagatacatgatcaggacaaaagaggtgggagg

SEQ ID NO: 936134 - DNA, 613 bp, Homo sapiens
cccctgcaagactttgcctttgctgctgccaaaccaaagcctctgcttttttttgaatttttgaaatcacagatcctaattcctgggactttaagctaaatgctgacactatctgttttgagctgttacagcttccagacaagctgtgctcaactgaaggcaggcatakgttaggtgaataggacttcaacttgaggaccagtgcaggtttgagacattcctctgtgcagacatacgaaaacatcaaagacgctggctggaccacggatgctatgaaaacatcacggatgctggctggaccatctgggtcacatacagatactcacagaaggtttactctctgatgggaccacctgaaattgagctactcagttctgtgtttctaatacacctgcggactgtgttcctaacttgcaattactgccaaaagttacaccctgggggaagcacatcacggcaactggaatggaagagatcagtgacccctccaccgccccgacagaccagactatcaagcccctctgggtcttaacatccgttgacctgttgtgttctggattcgctgccgttgactataatgaattgacaacctgattctacttccctcgccttt

SEQ ID NO: 936135 - DNA, 567 bp, Homo sapiens
cagctgggcttctgagtctggtggggacgtggagaacctttacgtctagctcagggattgtaaatacaccaatcagcaccctgtgtctagctcggggtttgtgagtgcaccaatcgacactctgtatctagctactctggtggggccttgcagaacctttgtgtagatattctgtatctaactaatctggtggggacgtggggaacctttgtgtctagctcagggattgtaaacgcaccaatcagcgccctgtcaaaacagaccactgggctctaccaatcagcaggatgtgagtggggccggataagagaataaaagcaggctgcccgagccaacagtggtaacccgctggggtacycttccacactggggaaaatttggtcttttgctctttgccgtaaatattgttactgctcactctttgggtccgcactgcttttacgagctgtaacactgtaacactcaccatgaaggtctgcagcttcacttgtgaagccagcgagaccatgagcccaccgggaggaatgaacaactccagactcgctaccttaagagctgtaacactca

SEQ ID NO: 936136 - DNA, 567 bp, Homo sapiens
cagctgggcttctgagtctggtggggacgtggagaacctttacgtctagctcagggattgtaaatacaccaatcagcaccctgtgtctagctcggggtttgtgagtgcaccaatcgacactctgtatctagctactctggtggggccttgcagaacctttgtgtagatattctgtatctaactaatctggtggggacgtggggaacctttgtgtctagctcagggattgtaaacgcaccaatcagcgccctgtcaaaacagaccactgggctctaccaatcagcaggatgtgagtggggccggataagagaataaaagcaggctgcccgagccaacagtggtaacccgctggggtaccmttccacactggggaaaatttggtcttttgctctttgccgtaaatattgttactgctcactctttgggtccgcactgcttttacgagctgtaacactgtaacactcaccatgaaggtctgcagcttcacttgtgaagccagcgagaccatgagcccaccgggaggaatgaacaactccagactcgctaccttaagagctgtaacactca

SEQ ID NO: 936137 - DNA, 567 bp, Homo sapiens
cagctgggcttctgagtctggtggggacgtggagaacctttacgtctagctcagggattgtaaatacaccaatcagcaccctgtgtctagctcggggtttgtgagtgcaccaatcgacactctgtatctagctactctggtggggccttgcagaacctttgtgtagatattctgtatctaactaatctggtggggacgtggggaacctttgtgtctagctcagggattgtaaacgcaccaatcagcgccctgtcaaaacagaccactgggctctaccaatcagcaggatgtgagtggggccggataagagaataaaagcaggctgcccgagccaacagtggtaacccgctggggtacccttccacactgkggaaaatttggtcttttgctctttgccgtaaatattgttactgctcactctttgggtccgcactgcttttacgagctgtaacactgtaacactcaccatgaaggtctgcagcttcacttgtgaagccagcgagaccatgagcccaccgggaggaatgaacaactccagactcgctaccttaagagctgtaacactca

SEQ ID NO: 936138 - DNA, 657 bp, Homo sapiens
aaaaataaataaaaggaggggctggagccaagatggccgaatagaaacagctccggtctacagctcccagcgtgagcgacgcagaagactggtgatttctgcatttccatctgaggtactgagttcatctcactagggagtgccagacagtgggctcaggacagtgggtgcagcacaccgtgcacgagccaaagcagggcgaggcattgcctcactcgggaagtgcaaggggtcagggagttctctttcctagtcaaagaaaggggtgacagacagcacctggaaaatcgggtcactcccaccccaatactgcgcttttccgacaggcttaaaaaacggcgcaccaggagattatatcctgcacctggctcagagggtcctacacccacagagtctcgctgattgctagcacagcagtctgagatcaaactacaaggcggcagcgaggctggaggaggggcgcccgccattgcccaggyttgcttaggtaaacaaagcagccgggaagctcgaactgggtggagcccaccacagctcaaggaggcctgcctgcctctgtaggctccacctctgggggcagggcacagacaaacaaaaagacaacagtaacctctgcagacttaaatgtccctgtctgacagctttgaagaaagcagt

SEQ ID NO: 936139 - DNA, 752 bp, Homo sapiens
gtcaaatgctcactgtgaagcattcaactgtagttgggtattgggtattgaaacgtctcttctacggctatcatattctcatatatgctattttgatatcgctatcatattttcatattgtagaagaggcatttcaaatcagtcagaaaaacatagacaatgtcataagtggtgctggacaaataactatccaaatgaaacataaagttagattctttgcctcacaccatgcatacaaatgagtactatgtggactaaaaggcaaaaaaagttgtgaaaatattagaaaaaaatatagaagaatatctttatgcccttggaagagggatagcattcttaagacatgaaaagcaaaaagcatatgggaaaagaggaatacatccaaaaagcatacctcaaacaaagttcaaagtcaagtgakaatggtgaacatatttgaaattgttttacgttatgtattctagaaaacggacttcgagatacagacatttgcacacagcaaatttattaggaggactgttaggattggtatctataggggagtgagagaagcgggacagggcagagggtgaagttgatctgcgatgcagtcacactaaagggttaggtgatcctgttccacagagagctctggagctgagctgtcttgaattgaggaaaggaggttggtctttaaacacccgcagtgaccagtaattgggtgtgggcagcttccagggagggggcatgacctgggtgagggcaagttctag

SEQ ID NO: 936140 - DNA, 638 bp, Homo sapiens
ttgggaggcttaggcaggagaatcgtttgaacctgggaggtggagggtgcagtgagcagaaatcgtgccacagcactccagcctgggcaacagagcaagactctgtctcaaacaaacaaacaaacaaacaagcaaacaaacaaaaacccatgtatatgttcagagaaggagtcaaggagagaaacaaaagtttccatgcttttaagtggtgggagtgtggctgaatattttctttcaccttttaaaaacactgcttatgttaagaaccacaaacaattcwctatctttcaatccaccctgctgaagactgggcctgggcacatggaaaccccctcttgcttctgcttcttctgcttgatgtggacccctgagtgctcccaggtggctctggttgtacatgctccgagccttacctgatgctaagtcattcaggggctgaaaaggtatggcctcccctcacctgatgggcttctgcgaagttcccgcgaaggatgcaggatgccagcagtgactcaggtggggagaacatcatggggatgagtgaactttgaggatgggggtgcaatctactgtgcagctcattccggccagacatggcactcagacttccctctgttgggacacaagaatgtgtgggg

SEQ ID NO: 936141 - DNA, 549 bp, Homo sapiens
acaagtgagcagcaccacactactcagcttttttttttttgtagagataggtctcaccatgttgccaaggctggtctccaactcttggcctcatgcaatcctcctgcctcagcctcccaaaatgttgggattacaggcacgagccaccacacctggcccccrtatgttatttttaatggcagaagaagaaacattttgtaaggctatattatgtcatgatctctgttctacaggtacctttgatattctcatccacaacccaaactctgcttctcctcttatgtttcttacttaagttcatcattcacccagttgaccaagtgaaaaaatgcagacaccctggaacctttctccctcactcctcatatccattgaggctggttaatttctgcctcaaaaccaactcttgggccgggaactgtagctcacccctgtaaccccagcactttaagaggctgaggtgggtggatcacttaagcccaggaattcgagaacagcctggataacatgggagacccttactaaaaatacaaaaaattagccaggcct

SEQ ID NO: 936142 - DNA, 662 bp, Homo sapiens
tggtgtatttacaatccctgagctagacataaaggttctccaaggccccaccagagcagctagatacagagtgtcgattggtgcactcacaaaccttgagctaaacacagggtgctgattggtgtgtttacaaaccttgagctagatacagagtgccgattggtgtatttacaatccctgagctagacataaaggttctccaaggccccaccagagcagctagatacagagtgtcgattggtgcactcacaaaccttgagctaaacacagggtgctgattggtgtgtttacaaaccttgagctagatacagagtgccgattggtgtatttacaatccctgagctagacataaaggttctccaaggccccaccagagcagctagatacagagtgtcgattggtgcactcacaaaccttgagctaaacacaggttgctgattggtgtgtttacaaaccttgagctagatacagagtgcygattggtgtatttacaatccctgagctagacataaaggttctccaaggccccacaccagagcagctagatacagagtgtcgattggtgcacacacaaaccttgagctaaacacagggtgctgattggtgtgtttacaatccctgagctagatataaagactctccatgtccccaccagactcagg

SEQ ID NO: 936143 - DNA, 635 bp, Homo sapiens
ttcctttgtcggaaaactttgtattactggttcaatcttgctacttgttataggtctgttaaggttttctatttcttcctgattcaaccttagtaggctgtacaaacgtagtagtttgtatgtttccaggaatttatccatttcctctaggtttttccagtttctcagcatatagttgttcataacgtctgtgatgatcttttgtatttaaaatttattttttatttttttattycaataggtttttggggaacaggtggtgtttggttacatgaataagttctttagtggtgatttctgagactttggtgcacccaagcggtatacactgtacccaatgtgtggttttttaatccctcaccacccgtcaccctttcccgagtgcccaaagtccaatgtttcgttcttctgccttagtgtcctcatagcttagctcctacatatgagtgagaacatatgatgcttggttttccattcctgagttacttcacttagaataatcatctccaattccatccaggttgctgtgaatgccattattttgttcctttttatggctgaatagtattccattatatatatatatatatatataccacattttggttatccactcattgattgatgggcatttg

SEQ ID NO: 936144 - DNA, 635 bp, Homo sapiens
ttcctttgtcggaaaactttgtattactggttcaatcttgctacttgttataggtctgttaaggttttctatttcttcctgattcaaccttagtaggctgtacaaacgtagtagtttgtatgtttccaggaatttatccatttcctctaggtttttccagtttctcagcatatagttgttcataacgtctgtgatgatcttttgtatttaaaatttattttttatttttttatttcaataggtttttggggaacaggtggtgtttggttacatgaataagttctttagtggtgatttctgagactttggtgcacccaagcggtatacactgtacccaatgtgtggttttttaatccctcaccacccgtcaccctttcccgagtgcccaaagtccaatgtttcgttcttctgccttagtgtcctcatagcttagctcctacatatgagtgagaacatatgatgyttggttttccattcctgagttacttcacttagaataatcatctccaattccatccaggttgctgtgaatgccattattttgttcctttttatggctgaatagtattccattatatatatatatatatatataccacattttggttatccactcattgattgatgggcatttg

SEQ ID NO: 936145 - DNA, 800 bp, Homo sapiens
tatagccatcagtgcaaatgatgagccaatttaacctcttgtcttataaattacccaatcttaggtatttctttagagtaatccaagaatggcccaacacgaaaaattggtaccaagcagtagggcattgctatagagatacctgaaaagatgcacacagctttgcaactgggtaacaagcagaggttggaagagtctggagagctcagaagacagaagatgaggaaaagttcggaatttcctagagactggttaaatagttgtgaccaaaatgctgatagtgatacaaacagtgagagccaggctgctgaggtctcaggtggaaatcaggaagttactaggaactgaagcaaaggtcatccttgttatgccttagcaaagaacttggctgcattgtgtccatgccctagagatctgtgggagtttaaacttgagcgtgatgacctagggatctggcagagaaaatttctaagcagtgagtaacttctcgtgagatctggctgttcaaaagtgtatgacacctcccccgacccttgctcycattctttccatgtgatgtgcctgctccggctttgccttccaccatgagtaaaagcttcctgaggcctccccagaagcagatgctgctatgcttcctgtacagcctgcagaaccatgagccaattaaacctcttttcttataaattacccagtctcaggtatttctttattgcaatggaagaacagcctaacatacctatgttaattcaaatatcttgaagatgtttttaagttattcagcaattcaaattgattccatt

SEQ ID NO: 936146 - DNA, 800 bp, Homo sapiens
tatagccatcagtgcaaatgatgagccaatttaacctcttgtcttataaattacccaatcttaggtatttctttagagtaatccaagaatggcccaacacgaaaaattggtaccaagcagtagggcattgctatagagatacctgaaaagatgcacacagctttgcaactgggtaacaagcagaggttggaagagtctggagagctcagaagacagaagatgaggaaaagttcggaatttcctagagactggttaaatagttgtgaccaaaatgctgatagtgatacaaacagtgagagccaggctgctgaggtctcaggtggaaatcaggaagttactaggaactgaagcaaaggtcatccttgttatgccttagcaaagaacttggctgcattgtgtccatgccctagagatctgtgggagtttaaacttgagcgtgatgacctagggatctggcagagaaaatttctaagcagtgagtaacttctcgtgagatctggctgttcaaaagtgtatgacacctcccccgacccttgctctcattctttccatgtgatgtgcctgctccggctttgccttccaccatgagtaaaagcttcctgaggcctccccagaagcagatgctgctatgcttcckgtacagcctgcagaaccatgagccaattaaacctcttttcttataaattacccagtctcaggtatttctttattgcaatggaagaacagcctaacatacctatgttaattcaaatatcttgaagatgtttttaagttattcagcaattcaaattgattccatt

SEQ ID NO: 936147 - DNA, 585 bp, Homo sapiens
tagggtgggagtgacccaattttccaggtgccgtctgtcacccctttctttgactaggaaagggaattccctgaccccttgtgcttcccgggtgaggcgatgcctcgccctgcttcggctcacgctcagtgcgctgcacccacggtcctgcacccactttccgacactccccagtgagatgaacccggtacctcagttggaaatgcagaaatcacccatcttctgcgtcactcaacgctgggagctgtagactggagctgttcctattcggccatcttggctccaccccrggtcttgaatttctgacctcacataatccacccacctcagccttccaaagtgttgagattacaggcgtgagccaccgcgcctggcccatcttttcttactctacactctccctacacaatctcatctttgtccagagcttcaagtgccatctgtaggataatgaattttaaatcccaagcatagatctctctcctgagctccagaccttctcttcttttctttccctctcccttcctataattctcctcttcctgatattctttcattctataaatacttactgagagcctgcta

SEQ ID NO: 936148 - DNA, 744 bp, Homo sapiens
tatatatgaatatcattaatcattagtttgtagcaattagtctttattccaatattataataatccttactctataatcataacctaggaaaaaccaggccatacagagataggagctgaggggacatagtgagaagtgaccagaagacaagagtgcaagccttctgttatgcccagacagggccaccagagggctccttggtctagcggtaacaccagcgtctcggaagacgcccgttgccaagcagaccatggtctagcggtagcgtcgstgtccaggaaaaacacctgctacttagcagactgggaaagggagtctccctttccccaggggagtttagagacaactctactcctttacctcttgtggagggcctgactaggcctaaccatctccctgtgatgctgtgcttcactggtcacgctcctagtctgctttcatgttccatcctgtacacctgactctgccttttagatagcagtagcaaattactgagagtactaaaagtctctgatatgcagaaataatggcacaagctgtctcctctctccctctctctctgcctcggcttccaggcagggaagggccccctgtccagtggacacgtgacccatgtgaccttacctatcattggagatggctcacactccttaccctgtccctttgtcttgtatccaataaatatcagcgcagcctggcatttcgggccactactggtctccgcatcttggtggtagtggtcc

SEQ ID NO: 936149 - DNA, 744 bp, Homo sapiens
tatatatgaatatcattaatcattagtttgtagcaattagtctttattccaatattataataatccttactctataatcataacctaggaaaaaccaggccatacagagataggagctgaggggacatagtgagaagtgaccagaagacaagagtgcaagccttctgttatgcccagacagggccaccagagggctccttggtctagcggtaacaccagcgtctcggaagacgcccgttgccaagcagaccatggtctagcggtagcgtcgctgtccaggaaaaacacctgctacttagcagactgggaaagggagtctccctttccccaggggagtttagagacaactctactccttyacctcttgtggagggcctgactaggcctaaccatctccctgtgatgctgtgcttcactggtcacgctcctagtctgctttcatgttccatcctgtacacctgactctgccttttagatagcagtagcaaattactgagagtactaaaagtctctgatatgcagaaataatggcacaagctgtctcctctctccctctctctctgcctcggcttccaggcagggaagggccccctgtccagtggacacgtgacccatgtgaccttacctatcattggagatggctcacactccttaccctgtccctttgtcttgtatccaataaatatcagcgcagcctggcatttcgggccactactggtctccgcatcttggtggtagtggtcc

SEQ ID NO: 936150 - DNA, 812 bp, Homo sapiens
tgaaaaaggttgggatgagttagggagagctagtatgggagcagcttttagggctgtttttaaggaatggaaagaggagtggggaaaggatttaggatctatggggtcagctaggtttatctagaatagaataatgggtagtggagggaggtattgagggataggagagtatatgggtttggcaccatagggtggataggcaagacaatttggttgataaagcgcagatcctgaactaacctgtaagacttgtctggtttttggacaggtaaaatgagggaattgtaaggagagtttacaggctttaaaaggccatgctrtaacaggcaagtgataacaggctttaatccttttaaagcgtgctgtgggatgggatattggcattgagcagggtaagggtgatgttgcaggaagtcagggaacccaaacggagggactggctgaagccacggcagaacataaattgtgaagatttcatggacatttgttagttccccaaattaatagctttataatttcttacgcctgtctttactgcaatctctgaatgtaaattttgaagatttcatggacatttatcacttccccaatcaatagtcttataatgtcctatgcctgtctttcttttaatctcttaatcctgtcatcttcataagctgaggatatatgtcacctcaggaccctgtgatgattgtgttatctgcacaaattgtttgtaaagcatgtgtgtttgaacaatatgaaatctaggcaccttgaaaagaacaggataacagcaattttcaggaaacaagggagataaccatgaagtc

SEQ ID NO: 936151 - DNA, 605 bp, Homo sapiens
aaggatacaaaataaaagtataaaaatcattaccatgtctatacactaacaatgtccaagctgagaaccaaatcaagaatgcaatcccatttataatagccacaaacaataagatacctaggaatacagctcaccagggtggtgaaagatctctacaagaagccttattaaactgctcaaagaagtgagarataacaaaaacaaatgaaaaattgttcatgctcatgaataagaagaatcaatattattaaaatggccatactgcccaaagcaatttacagattcaatgttattcctatcaaactgccagtgtaatttttcaaagtattagaaaaaaaagtcttaaaatgcacatggaatcaaaaaagagccaaaatacccaaggcaatcctaagcaaaaagaacaaaactggaggcatcacattaccctacttcaaagtatactacacagctacagtaaccaaaacagcacgttactggaaaagaaaaaaaaaaaaagtcatacaatctcacacagctcaatggaacaaaataagaagcttagaaataaagccatacacctacaaccatctgatctttgatgaaactgacaaaaacaagcgata

SEQ ID NO: 936152 - DNA, 784 bp, Homo sapiens
gcaaggcaaggcaatggtgaaggctttagcctgagccatgagttatggtttgagtcccatctgtgccattaacttgctttgaccttggccaagtcacttcctctgtctgggccccaagttccccacttgtataatgaaggggttggactagatgacctttgagagttcaattagcttgatgttttcttggttctatgagcatgttacagtcactcagggcacactcacccaaaccccaagggcaggatggtactgtgtctttgtacatgtgacacctgcatccttgctgatgcttgcatccatgtccaaaagaatgctctgggtccacttaaacatccaataaagacaatgaaaatttccaagtgattttcctactagttcttcccatcctccactaaggacagcaatgctctgttagcctagggtcagccagcccaagcttggaggtaggaacttggagggaggaactggtcctgataggctttatcttaaaatgacaggtctctactatacactttggtttaagcaagatgctactgatcttgagtctagggatacagggttggtggcagaactgtgtctctgttactcctttctgaaactccataaatcatcttcatggamacacccttcaaactctttacagacagtccctgtaggaatatgcctgattcagaactcctgggcgtgttgccaagagcaactaatgatttcatgtaatggtctgtgtctaaagaacatctggacagaaactaaggcactcagtcaatctcccagatgtttt

SEQ ID NO: 936153 - DNA, 641 bp, Homo sapiens
tttctcagactggcccacacttagggaaaatagaaaagaacatactttgaaatattgggggctggttcccccagtaaacctccttggttaggtatattcctaagtattttatttttttgcagctactataaaaggggttgagttcttgatttaattctcagcttggtcactgttagtatatggcagtgctacagatttgtgtacattgattttgtatcctgaaactttactgaattcatttatcagatctaggagctttttggataagtatttatggttttctaggtatacagtcatatcattggtgaacagtgacagtttgacttcctatttactgatttgtctgattgctctggctaggatttccagtactatgttgaatagaagtggtgagagtgggcatccttatcttgttccagttctcagggggwatgctttgaacttttccccgttcagtataaggtcggctgtgggtttgtcatagatggtttttattaccttaagttatgatctttgtatgtcaagtttgctgagggttttaataaaaaagcgatgatggattttgtcaaatgctttttctgcatctattgagatcatatgatttttgttttcaaatctgtttatgtgatctatcacattta

SEQ ID NO: 936154 - DNA, 700 bp, Homo sapiens
taacaggccaagagttgtctctcacaaggagagtagttatctgcaggagatgcagggccttgctccaaattcctagaggcctcccctgtgattgacctataggggcctgccaagggctccaaacaacatccctatctgccattgacacttcaagcaccattggatctgccaggtcatatggcccaagtggcagagcagcttgccaagcattctggacctgttgcagagccttctcttctggatcccactcaaaactggaagcctttcaggtcacttgataaatgggctggagtaacacaccyaaatgaggaatgtgttgcctccaaaatccaaataggcctgctaggcattgtgcctctttcttagttgtaggaggggccaaaggcagcaacttatccttcatcttagaaggaatatcttgacagaccccacaccactggacccctagaagttttactgaggtagaagttccctaaattttagtcaattttatttcccaacctctggcacacaagtgtctcaccaataaatccagtatgtttgctacttcttgctcattggatccaatcagcataatgtcatgaatataatggaccagtgtgatatcttgtggaagagaaaaactatcaagatctctccaacaagattatgacacaaagctggagaatcgatatacccctgaggtaggacagtaaaggta

SEQ ID NO: 936155 - DNA, 653 bp, Homo sapiens
atgcagggccttgctccaaattcctagaggcctcccctgtgattgacctataggggcctgccaagggctccaaacaacatccctatctgccattgacacttcaagcaccattggatctgccaggtcatatggcccaagtggcagagcagcttgccaagcattctggacctgttgcagagccttctcttctggatcccactcaaaactggaagcctttcaggtcacttgataaatgggctggagtaacacacccaaatgaggaatgtgttgcctccaaaatccaaataggccygctaggcattgtgcctctttcttagttgtaggaggggccaaaggcagcaacttatccttcatcttagaaggaatatcttgacagaccccacaccactggacccctagaagttttactgaggtagaagttccctaaattttagtcaattttatttcccaacctctggcacacaagtgtctcaccaataaatccagtatgtttgctacttcttgctcattggatccaatcagcataatgtcatgaatataatggaccagtgtgatatcttgtggaagagaaaaactatcaagatctctccaacaagattatgacacaaagctggagaatcgatatacccctgaggtaggacagtaaaggtata

SEQ ID NO: 936156 - DNA, 653 bp, Homo sapiens
atgcagggccttgctccaaattcctagaggcctcccctgtgattgacctataggggcctgccaagggctccaaacaacatccctatctgccattgacacttcaagcaccattggatctgccaggtcatatggcccaagtggcagagcagcttgccaagcattctggacctgttgcagagccttctcttctggatcccactcaaaactggaagcctttcaggtcacttgataaatgggctggagtaacacacccaaatgaggaatgtgttgcctccaaaatccaaataggcctgctaggcattgtgcctctttcttagttgtaggaggggccaaaggcagcaacttatccttcatcttagaaggaatatcttgacagaccccacaccactggacccctagaagttttactgaggtagaagttccctaaattttagtcaattttatttcccaacctctggcacacaartgtctcaccaataaatccagtatgtttgctacttcttgctcattggatccaatcagcataatgtcatgaatataatggaccagtgtgatatcttgtggaagagaaaaactatcaagatctctccaacaagattatgacacaaagctggagaatcgatatacccctgaggtaggacagtaaaggtata

SEQ ID NO: 936157 - DNA, 548 bp, Homo sapiens
gaagtttgtaaaaagagtataaataacaggccagctgaggaggctcacacctgtaatcccagcactttgggaggctgatgcgggtggatcacctgaggtcaggagttcgagaccagcctggccaacatgaggaaaccctcrtctctactaaaaatacaaaaattagctgggtgtgttggtaggcacctgtaatcccagctactcaggaggctgaggcagaagaatcacttgaacccaaaaggcgagggttgcaatgagcctagatcacaccactgcactccagcctgggtgacaacagcaaaactctgtctcaaagaaaaaaaaaaagtataaacaacagatggaagcattatttgtgaccactgttacagaagcacaaggtaaggagaattggacatataatgtacatctagaagagtggagatctcccttttacacacagtggagataatgtcaggtacattagaaaaggtggtacatcttttgtcatgttagtcagtattttattttattcaattgtggatattctcacagtgtgtattgctctc

SEQ ID NO: 936158 - DNA, 723 bp, Homo sapiens
acattcttctttttagcgcatgggtaattcttaaggatagacgatatgttaggtcaccaaacaaatctgaaaactttaaaaaaactgaaataatatcaggcatcttctctgaccacagtggaataaaactaaaaatcaataacaggaggaattttggaaagtatatgaacacatggaaattaaacagtatgcttctgaatgaacagtgggccaatgaagatattaagaaggaaactgaaaagtgccttgaaacaagtgataatggaaacacaacataccaaaacctatgggatatagtgaaaacagtattaagagggaaatgtatagctataagtgyctacatcaaaaaggaagaagaacttcaaacaaataacctaatgattatcttaaagaattagaaaagcaagagcaaaccaaacccaaaattaggagaaaaaaagcaaaaatatggatcagagcagaaataaatgaatttgacatgaagaaaacaatacaacaggtcaatgaaacagaaaaaaagttcttttgaaaagatgaacaaaattgataaacttttagccagactgaataagaaaaaaaaagaagacccaaagaaataaaatcagagaagaaaaaggagacataactaataccacaggaattcaaagggttattaatggctactatgaacaactatatgtcaataaattggaaaatctagaagaaatggataaatttttagac

SEQ ID NO: 936159 - DNA, 676 bp, Homo sapiens
acagctgtagaatacacattcttctttttagcgcatgggtaattcttaaggatagacgatatgttaggtcaccaaacaaatctgaaaactttaaaaaaactgaaataatatcaggcatcttctctgaccacagtggaataaaactaaaaatcaataacaggaggaattttggaaagtatatgaacacatggaaattaaacagtatgcttctgaatgaacagtgggccaatgaagatattaagaaggaaactgaaaagtgccttgaaacaagtgataatggaaacacaacataccaaaacctatgggatatagtgaaaacagtattaagagggaaatgtatagctataagtgtctacatcaaaaaggaagamgaacttcaaacaaataacctaatgattatcttaaagaattagaaaagcaagagcaaaccaaacccaaaattaggagaaaaaaagcaaaaatatggatcagagcagaaataaatgaatttgacatgaagaaaacaatacaacaggtcaatgaaacagaaaaaaagttcttttgaaaagatgaacaaaattgataaacttttagccagactgaataagaaaaaaaaagaagacccaaagaaataaaatcagagaagaaaaaggagacataactaataccacaggaattcaaagggttattaatggct

SEQ ID NO: 936160 - DNA, 676 bp, Homo sapiens
acagctgtagaatacacattcttctttttagcgcatgggtaattcttaaggatagacgatatgttaggtcaccaaacaaatctgaaaactttaaaaaaactgaaataatatcaggcatcttctctgaccacagtggaataaaactaaaaatcaataacaggaggaattttggaaagtatatgaacacatggaaattaaacagtatgcttctgaatgaacagtgggccaatgaagatattaagaaggaaactgaaaagtgccttgaaacaagtgataatggaaacacaacataccaaaacctatgggatatagtgaaaacagtattaagagggaaatgtatagctataagtgtctacatcaaaaaggaagaagaacttcaaacaaataacctaatgattatcttaaagaattagaaaagcaagagcaaaccaaamccaaaattaggagaaaaaaagcaaaaatatggatcagagcagaaataaatgaatttgacatgaagaaaacaatacaacaggtcaatgaaacagaaaaaaagttcttttgaaaagatgaacaaaattgataaacttttagccagactgaataagaaaaaaaaagaagacccaaagaaataaaatcagagaagaaaaaggagacataactaataccacaggaattcaaagggttattaatggct

SEQ ID NO: 936161 - DNA, 676 bp, Homo sapiens
acagctgtagaatacacattcttctttttagcgcatgggtaattcttaaggatagacgatatgttaggtcaccaaacaaatctgaaaactttaaaaaaactgaaataatatcaggcatcttctctgaccacagtggaataaaactaaaaatcaataacaggaggaattttggaaagtatatgaacacatggaaattaaacagtatgcttctgaatgaacagtgggccaatgaagatattaagaaggaaactgaaaagtgccttgaaacaagtgataatggaaacacaacataccaaaacctatgggatatagtgaaaacagtattaagagggaaatgtatagctataagtgtctacatcaaaaaggaagaagaacttcaaacaaataacctaatgattatcttaaagaattagaaaagcaagagcaaaccaaacccaaaattaggagaaaaaaagcaaaaatmtggatcagagcagaaataaatgaatttgacatgaagaaaacaatacaacaggtcaatgaaacagaaaaaaagttcttttgaaaagatgaacaaaattgataaacttttagccagactgaataagaaaaaaaaagaagacccaaagaaataaaatcagagaagaaaaaggagacataactaataccacaggaattcaaagggttattaatggct

SEQ ID NO: 936162 - DNA, 676 bp, Homo sapiens
acagctgtagaatacacattcttctttttagcgcatgggtaattcttaaggatagacgatatgttaggtcaccaaacaaatctgaaaactttaaaaaaactgaaataatatcaggcatcttctctgaccacagtggaataaaactaaaaatcaataacaggaggaattttggaaagtatatgaacacatggaaattaaacagtatgcttctgaatgaacagtgggccaatgaagatattaagaaggaaactgaaaagtgccttgaaacaagtgataatggaaacacaacataccaaaacctatgggatatagtgaaaacagtattaagagggaaatgtatagctataagtgtctacatcaaaaaggaagaagaacttcaaacaaataacctaatgattatcttaaagaattagaaaagcaagagcaaaccaaacccaaaattaggagaaaaaaagcaaaaatatggmtcagagcagaaataaatgaatttgacatgaagaaaacaatacaacaggtcaatgaaacagaaaaaaagttcttttgaaaagatgaacaaaattgataaacttttagccagactgaataagaaaaaaaaagaagacccaaagaaataaaatcagagaagaaaaaggagacataactaataccacaggaattcaaagggttattaatggct

SEQ ID NO: 936163 - DNA, 614 bp, Homo sapiens
attgttttttggatttccttgcattgggcttcacctttctctggtgcctccctgattagcttaataactaacctcctgaattctttttcagataaatcagggatttcttcttggtttggatccattattggtgagctagtgtgattttggtggtggggggtggggggcgggggggtggtgttaaagagccttgttttgtcatattaccagcgttggttttccggttccttctcatttgggtaggctctctctgagggaaggtctagggctaaaggctgttgttcagattcttttgtcccacactgtgttcccttgatgtagtactctcccccttttcctatggatgtggcttcctgtgagccacgttgcagtgattgttatttttcttctgagtctagccacccagcaagtctgcccggctccaggctggtacgggggtttgtctgcacagagtcrggtgatgtgaaccctctgtgggtctctcagccatggataccagcacccgttttggtggaggcggcaggggactgaaatgaactctgtgagggtttttagctttggtggtttaacgttctatttttgtattggttggcctcctgccgggaggtggcgct

SEQ ID NO: 936164 - DNA, 574 bp, Homo sapiens
aaatagctggaacattctaggtaaagaaataaatagcaaagtcatcctgctcatagaactcacagtctatagggagacagactcggtcttaatacaacctaagctctctatggaaggtattcaagtttcagagaatgcacaggggcaggactgcatctgacttccagatttgaatgtcaaggaatctcatatcttatgtttattaatttatttagttagtttttcatttttgagacaggttcttgttctgtggcccaggctggagtgcaacagtgccatcacagctcactgaagtctcaacccctcagcctcaagcgatcctcccacctcagcctcccaagtagctgggaccacgggtatgtaccaccacccccagttaattatatattttttaaaaattttatttaataacagctcyaatctgcaacaaacaaacaaattcctgaagcctacagaatctggttggcttgtgtgttatatttgtgcaacaaacaaccagcccaaataagctgataattgtcacttagaaacacgcttaaagattgaatctctttactattcaatttatatgcca

SEQ ID NO: 936165 - DNA, 552 bp, Homo sapiens
tgcactccagcatgggtcacagagcgagactccatctcaaaaagaagaaaaaaagaaaaaaaagaaaaaaagaaataaaataaaataaaaagaagttggaaacaatcacttgtagcgttttgttcagaagttcccataggaaggtcagagaagggtcattgaagacttcccaatgggaaaaaccattcatttccaggatccatactaacttctttctaaaatttaaatcaaaatattggaatgaaagtgcaaacagagaagttcacccagatatcaggtagcattcacagccagccacatttttcaccctcttcacttggagatttggtcttgagtaaaacgttagagaatcagagaacatcagggrtccagggcctctgaagatgtgaaaaccaacctccttgttttgcaaatgtggaaggaaaagtcccacgaaaagtccaagaatgtgcccaatgttataaagagacttgccttcatattcaagaggttcaacagtcactgctctggggctgccataaagatggtctccgctggctatctttactgtct

SEQ ID NO: 936166 - DNA, 783 bp, Homo sapiens
tgagaggctgaggtgggaagattgcttgagcctgagagtttgaggctgcagtgaactatgatcacgccactgtactccaggctgggagacagtgagatacttaaaaaaaagaaaaagtatcttcaaaaatgttctgacgtaatctgtgctgcctagcattttgttctccaagctgagtggaataatgcctttcatttacatgttaaatggaagcctatttttaggctaaatgtaagtcttaaagtactgagcagaaatatcttccacatcctattgttgcattaaatccctactgatattttaatggtaattgtgatagtacctgaataactattgtgtaagaataaagttaatgtaaaaaaatttttaagtgtgtagtcttactgagtacatttgcttttcatggtatcttttctctgtttatattcaagttttatgagcaatatgatgatgatgaaattggagctctggataatgcagaattggaaggttctattcaagtggacagcaatcgcttrcaggaagttttgaatgactactataaagagaaggcagagaagtatagtgacttttccttccttgtttagctgttcttttttttaaaaaagaaaaaattccaaagaaaggtctatagtataactgaattgaggaaaaaattaacctagtcaaaatacatattgagaaaatgaaaaaggaaaaaagaaaaggggaaaaaaaaagatagggcggaaaaaagaaagtggtacattttccataaacttgggtcatgtatagctcattgtt

SEQ ID NO: 936167 - DNA, 770 bp, Homo sapiens
caatgctgtgtggaataccatgacagtggataaggcatgctatgagtccatggatggtagtcttggcagaagcattgcatggaggataggcaaacccatatccagagtgagtgtttattccagtgaggagaaacctctgccttttccatgatggaagaggttcaatgtaatcaacctgccagcaggtagctggctgatcaccctgagaagtggtgccatatcgaggtctcagtgttggtctctgctgctggcaaattgggcactcagcagtggctgtagtcaggtcagctttggtgagtggaagtccatgttgctgagtccatgcataaccttcattcctgccaccatggccactttgttcatgggccyattgggcgacaacaggggtggctggggaaagaggctgagtggtgtccacagaacgggtcatcctatccacttgattattaaaatcctcctctgctgaggtcaccagttggtgagcattcacatgggatacaaatatctttccagtttttgaccactcagagaggtccatccacatacctcttccccaaatttctttgtcaccaattttccaatcatgcttcttccaagtccctgactatccagccaaactactggcaacagcccatgaatcagtatataattgcacatctgaccatttctcctttcatgcaaagtgcacaagcaagtgcactgttcaaagttctgcccactgggaaaattttccctcaccactttcagggatgtcctaggaaggggctgtc

SEQ ID NO: 936168 - DNA, 636 bp, Homo sapiens
cgactctccagagtccacaggctggaatagctgaattgaccaaacagcagaggtgttgcccaccactctccccttgaggctccatcctgtctcaggcaggctccgccctgttgctgatggcttactggaattccaagacagtgggtcttatcttgtcaggtgtggtggaagtggggtctacagaatgatgctgcttggctccctggattctgccccttcctagggatatatgcagaccacctaccttgcctgtgttgcagaaagactggtgtatttaaagctcctgggtttctgtgtgtgcctgagcagttgctctgccaagactctacccagttctatgtgacagatccaaggctctggtggcataggctcacaaggggatctcctgatccacaggttgcaaagattcatgggagaagcatggtttcctgggtcacatagtcacyaattgcttcccttggctgggggtgggtgtttccttggctccatgtcactcctggtgggccattgcgccaccctacttttcttcattctccgtgtattgagttgtttccctaatcagtcccagtgtgagaacctggatgtttcagttgaaagctgtattcacttgcctgttttgttcctttctgtgagtgc

SEQ ID NO: 936169 - DNA, 590 bp, Homo sapiens
gtagtcccacatactcgagaggctgaggcacgagaatggtgtgaacctggggaggggaggggagatcaggtgagttaagctggagttgggggggaatgttggccaagtggcaggcagggtgggcctgggcctgagggaagccataggcccctagacttgttcctgctgacagagcgccagcggctgggcaggagcatgagcaaggtgggtttgcatctgtcgctggacgagcgctccgaatgcttctcaggacaaaagcaggaggctgccattgttcacaggatgtgagatctaatatggttcaggctggggcaaatcagtgaagatcaaaatccctcatcttccacaatgagggactagaatcaaaggtggatgtgctcccgcctgctcacaaagggtcctcacatgccycagggccctctgctggggcacagtccacattaggtgacacacaaacagcctgagggtgcccagtcactgagcagccccagacgctgtgccgttaccggcaggcagggccctgcaggagaccttcgcctgcccggaccagagaggctgcaggggtgctgtggggagagggccagatggcc

SEQ ID NO: 936170 - DNA, 589 bp, Homo sapiens
aacatattttggccgggcatggtggctcacgcctgtaatcccagcactttaggaggctgaggcaggcggatcacgagatcaggagttcgagaccagcctggccaacttggtgaaacccccatctctactaaaaaattacaaaaattagccaggcatggtggcaggtgcctgtagtcccagctactcggctgaggcaggagaattgcttgaacctgggaggcagaggttgcagtgagccgagatcacaccactgcactccagcctgggcaacagaatgagactccggctccaaaaaaaaaaaaaaaaaaaaatccagttaactttgaaatagcctcaggcaggtttttcaggagmtattccagaataaggcactgttatcacaggagatgacagctccatgcatgttattgcccctaaagaccttccagtggtacatgtggaggtggaagatggtgatactgatgatcctgaccctaggcaggcctaggcttatgtgggtgagtgtgtctttgtttttaacaaaaaatttttaaagtaaaaaaaaattataaaaatagaaaaaagctatttttataattaagatataaag

SEQ ID NO: 936171 - DNA, 626 bp, Homo sapiens
tgtagtcccagctactcaggaggctgaggcaggagaatcgcttgaacctcggaggcaggggttgcagtgagccaagatcactgcactccaggctgggcgacagtgagactctgactcaaaaaaaaaaaaaaaaaaaaagaaagaaaaaaaaaaaagaaagaaatctaaagctgatttctgtccctgctaatccagcaggactctattaatcaaaaatgggattgcacaccayatggagtactcagaggcatgcatagaggcaagaaaagttcaggataaaaataatcttcccattaatgaaatttcaattttatttagatatctaaggaaatcaactgataaataatttcattagaaagtagaagcaaatacatatgagttagaaaaaaataaaacaaaaaacccacttcaaacttttaattaagctactttgagctatgtcttaacatttttctttgcctagattgtctaggggatatgttttcgcttttctctattgatagtttatatcactaaaaaactgggcccaccaaagtgggcttacggtttaagttgcatagccaataaatgttgggtttttgtaaaatcagtttatattccctgtccaggcccttccatagtgtcta

SEQ ID NO: 936172 - DNA, 603 bp, Homo sapiens
acttatgtttaaaagggaagcagaggctgggcacggtggctcatacctgtaatcccagcactttgggaggccaaggcaggcagatcacgaagtcaggagatcgagaccatcctgaccaacatggtgaaaccctgtctctactaaaatacaaaaaaaaaagtagccgggcatggtggtatgtggctgtagtcccagctacttgggaggttgaggcaggggaatcgcttgaacctgggaggcagatgttgcagtgagcagagatcacaccactgcactccagcctggatacagagtgagactctgtctcaaaaaaaaaaaaaaaaaaagaaagaaagaaaaaacaaaaatggaagcagagcgtaaatgtttagaaaattcgcagcctgacgatgagatagaaaaaaaaccattttctggaaagatattcaagctggctgcagaaatttgcayaagtaacgaggagccaaatgttaattaccaagacaatggggaaaatttctccaggtcatgtcagagatcttggtagcagcccctcccatcacagaccctaaggcctaggcagaaaaaaatcgtttcctgggctgagccctgggccctgggccc

SEQ ID NO: 936173 - DNA, 659 bp, Homo sapiens
gctgaattctactaagcatataaggaaatagtaacactaattctcctgaaactgtcccaaaacattgaagagagaaaattctcccaaactcattctatgaggactgtatcaccctgataccaagccagacaaagaygcacaaaaaaagaaaaccacagaccaatatccctgaagaatatgggccaaatagactcaataaaatactaccaaaccaaacccaagagtacatcaaaaagataatacaccttgatcaagtgggtttttaccagggattgcaaggatggttcaacatatacaaatcaataaacatgatacatcacatcaacagaattaaggataaaaccatataatcatctcagtagacacagaaaaagcatgtggtataattcagcaccccttcatgataaaaactcaacaaatgaggcatagaaggagcatacctcaaattaataaaggccatatacaacaaacccacagccaacatcatactaatgaggaaaagttggaagcatttcctttaactggaacaagacaagaatgcctactttcaccacttctattcaatataatattggaagtcctagccagagcagtcaggcaagagaaagaaataaaaggcattcaaattggagaagaaatcaaattatccctgtttgccg

SEQ ID NO: 936174 - DNA, 540 bp, Homo sapiens
ggtgtaaggaagaggtccagtttcaatcttctgcatatggctaaccagttatcctagcaccgtttattgaatagggaatcctttccccattgcttgtttttgtcaggtttgtcaaagatcagatagttgtgggtgtgtggttttagttctgagttcttattagttcrttctcacattgctataaagacatacctgaaattgggtaatttataaagaaaagaggcttaattgactcacagttctgcatggctggggaggcaccaggaaacttacaatcatggcagaaggtgaaggagaagcaaggcacatcttacatggcagcaggagagagaatgaagggggacgtgccacacttttaaaccatcagatatcatgagaactcactatcatgagaacagcaagggggtatctttccccgtgatcctatcacctcccaccaggcccctcctctgacacatggggtttacaatttgagatgagatttgggtggggacacagagccaaccatatcagttctctattctgttccactggtctata

SEQ ID NO: 936175 - DNA, 583 bp, Homo sapiens
ctagtggggacttggagaacctttatgtctagctaaaggattgtaaatataccaatcagcactctgtgtctatctcaaggtttgtaaatacaccaatcagcactgtgtctacttcaaggtttgtaaacacaccaatcagcaccctgtgtctagctcaaggtttgtaaatgcaccaatcagtgctctgtggggacttggagaacttttgtgtctagctcrgggattgtaaacacacaaatcagcaccctgtcaaaacggaccaatcggctctctgtaaaatagaccaatcagctctctgtaaaaatggacgaatcagcaggatatgggtggggccagataagggaataaaagcagactgccccagccatcaggggtaacctacctgggtcccctttcacattgcggaagttttgttctttcactctttgcaataaatctcgctgctggtcactctttgggtccacactgcctttatgaggtgtaacactcaccacaaaggtctgcagcttcagtcctgaagccagcgagaccacgaacccaccgagagggacgaacaacttcagacaagagaaacaaacaactc

SEQ ID NO: 936176 - DNA, 606 bp, Homo sapiens
cagttggctataaatatgtggatttatttctggtttctctattgtgtttcattggtttatttgtgtaatttgaagttagatagtgtcatgtctctagctttgttctttttgctcaggattgctttgcctatttgggctctttttttattccgtatgaatttttggattgttttttctattactgtgaaaaatgacatcaggattttgatagagattgcatcraatctgtagatttctttgggaagtatgatcattttaacaatattaattattccaaaacatgtgcatgggatggctttccatttatttctatcctcttcaatttctttcatctgtgtttcgtagttttccttgtagagattttttcaccttcatggttaaatttattcctatgcattttttgtagctattatacatgacattgccttcttgatttctttctcagctaattaattatcggtgtgtagaaatgctaatgatttttgtgtgttgattttatatcttgcaactttactgaatttatttatctatcagatctatgagtggttttggtcaagtctttaggtttttctagatctaagatcatattatctgcaaaaagggaca

SEQ ID NO: 936177 - DNA, 600 bp, Homo sapiens
gtactaacatattaaaataaaccttaataaaaacagtttttaaaatatagatgcattaaatgtaagcctgatagaaacaaattatcattagtaaaatatttaattcttcaatcaaatatttatgttcgataagtactttatcatattatttaatttggagctggaaaggtccttaaacattattaagtccactttatcaaawaaggacatatacttccaagaatgcaaatgacttgctcagggtcacatagatatcaaagctttggtagaatcaagattagacctcagatcacctgtccctaaaccagggctctttccatgaagccatactgcataacacatgctcttttgttttcaattttttttcaaagttaaatatgcatatgcataatatgcataaataagtcatgcagttttacaaggtttatttcaactaacaggagccctctttcccacttccattttccattcactacaaatttctcttaacacttttttccaatgtttgtggaatttacctccttattactaaatatcatgtttatattgctattgtgattattcttttgtaggtataatatagaggctctccttttgcag

SEQ ID NO: 936178 - DNA, 596 bp, Homo sapiens
agcacattgattaatttgggtttgtgtgtgttgaaccactcttggtccttgttcttgttttatccctgtgataaatctcacttggtcatgatgaattatcttttttacgtgctgttgaattcagtttgctagtatttgttgaggatttttgtattactgttaatcagtgatatcagtttgtagttttctttttttgctgtgtctttgtctggttttggtattggggtaatcctgtcttcttagaatgaatttggcagtacccttttctattctgttttttggaatagtttgagtaggattgatacwagtgcctctttagatgtttggtggaattcatcagtgaagccatcagattctaggcttttctttactaggagaattttattacagcttcaatctcattacttattattagtctcttcagattttggatttctttatgcttcagtcttggttagattgtatgtatctaagaatttatccattttttttcctagattttccatcttattttcatatggttggtcataataaccacaaatgattctttgaatttctgtggtatcagttgtaacagctcctttttcagctgtgat

SEQ ID NO: 936179 - DNA, 791 bp, Homo sapiens
atgattttgaagctttaaaatttgacggccctcctggatttcagacttgcatgtggcctctagcccctttgttttggccaatttctcccatttggaatggctgtatttacccaatgcctgtacccccattgtatctaggaagtaactaacttgcttttgattttacaggctcacaggcagaaataacttgccttgtctcagatgagactttagactgtggacttttgagttaatgctgaaacgagttaagactttgggggactgttgagaaggcatgattggttttgaaatgttaggacatgagatttgggagtggccaagggcagaatgatacggtttggctgtgtccccacccaaatctcatcttgaattgtaactcccagaattcccatctgtcatgggaggaaccaagtgasagattattaaattatggggctgggtctttcctccgctgttcttgtgatagtaaatgagtctcacaagatctgatggttttaaaaacaggagtttccctgcacaagctctctttttgcctgccgccatccacataagatgtgacttgctcctccttgccttctgccatgattgtgaggcctccttagccatgtggaactgtaagtccattaaatctctttcttttgtaaatttcccagtctccagtatgtctttatcagcagcatgaaaatggactaatacaacctccgaacagaatgttgaggcaattgtatacctcaccacgtttatttatcttatgccctgggtcaaagtcctctattgtctattatctaata

SEQ ID NO: 936180 - DNA, 567 bp, Homo sapiens
tatgtaattcatgaagaattcaaagaattgagtgaaattgctgtaaaaaaaaaaatccttcttccattcctatatacatatgcatggaaacaaagtctatttttgacaaagaaaaaaatcaaaatagaattaataatggaccctctcttattctagcaattagtaatagttatctatgtctacaagaatgaatgggagtaaatgagaggggaacaggaacaatatgggccatctcattaagaaatgtagttttttttttttttttgagacggagttttgctcctgttgaccaggctggagtgcaatggygcgatcttggctcaccgcaacctccgcctcccaggttcaagcgattctcctgcctcagcctcccgagtagctgggattactggcatgtgccaccacgcccagctaattttgtatttttagtagagatggggtttctccatgttggtcgggctggtctcgaaatcccgacctcaggtgatctgcccgcctcagtctcccaaagtgctgggattacaggcatgagccaccacgcccggccaagaaatgtattttcaataa

SEQ ID NO: 936181 - DNA, 579 bp, Homo sapiens
atcctgactgttagaaggaaaactaacaaacaaaaaggacacccacaccaaaaccccatttctaggtcaccatgatcaaagaccaaaggtagataaaaccacaaagatggggagaaaacagaacagaaaagctgcaaactccaaaaatcagagcacctcttctactccaaaggaacacagctcctcgccagcaacagaacaaagctggatggagaatgactttgatgaggtaacagaagtgggcctcagaagatcagcaataacaaactcctctgagctaaaggaggatgttcaaacccaygactaagaagctaaaatccttcaaaaaagattagacaaatggttaactagaataaacagtatagagaagaccttaaatgacctcatggagctgaaaaccttggcacgagaactacgtgacgaatgcacaagcttcagtagccgattcgatcaactggaagaaagggtatcagtgattgaagatgaaataattgaaatgaagcgagaagagaagtttagagaaacaagagtaaaaagaaatgaacaaagcctccaacaaatataggactatgtgaaaag

SEQ ID NO: 936182 - DNA, 627 bp, Homo sapiens
gccaaagtgcctttaccagccacacagccctcctgagtcctgaagcagccctgacccagccagaaaagagtcacggggagctctgatctaagaagtattcacatggcgccactatgaatgcactcagcaggcttctgggagcccaggtttatgagtatccgcaggggtcactgagctagctgcacggttagaggccactcactctctccttcagttgggcatctctccataaaaatgtgtcatgcattgggaggccgaggcgggcggatcacctgaggtcaggagttcgagaccagcctgcccaacatggtgaaaccccatstctactaaacatacaaaaattagccgggctttgtggcggacacctgtaattccagctacttgggaggctgaggcaggagaatcacttgaacctgggaggcggctcttgcagtgagccaagatcacgccactgcactccagcctgggcaacaagagtgaaactccatctcaaaaaaaaaaaaaaaaaaaaaaaagtatcctgtattgatctcatgccaagtctggggagaatgagaatctgctgggtgtcacgggtgggtttccaaagtaagctgggtggggagggagcatctggggttgcttcct

SEQ ID NO: 936183 - DNA, 601 bp, Homo sapiens
gtaggatgctttaggctgcaagtaatagaaatgccaactcaaactggtttaacccaccatcaattattgtctcacctagcatatgtccagaggcagtgtgtcccatagtcacatagcttgttagcttattagctgtgtggccttgtgcaactgacttagtctcaatttcctcatctgtgagaaggattgttgcatatcaaattagataatataagcaaaattcttacagcactctatagcataaagtaagtgctttataagtgttagcaactgtattggtcagtcattgctccataacaaacaaatgcaaacatctcagtctacaacaaytggtatttccttctcatgtgtctacaggttggcaggatttggttgggccactctaattcaatctgtgtgtggctgggcatggtggcctatgcctgtaatcccagcatttggggaggctgaggtgggtggattgattgagcccaggagttcgagaccagcctgggtaacatggtgaaaccccatctctacaaaaaaaaaaaaaaaaaaaaagcctggcatggtgatgtgtgcctgtagtcccagctacttcagaggctaaggtgggaggatc

SEQ ID NO: 936184 - DNA, 601 bp, Homo sapiens
gtaggatgctttaggctgcaagtaatagaaatgccaactcaaactggtttaacccaccatcaattattgtctcacctagcatatgtccagaggcagtgtgtcccatagtcacatagcttgttagcttattagctgtgtggccttgtgcaactgacttagtctcaatttcctcatctgtgagaaggattgttgcatatcaaattagataatataagcaaaattcttacagcactctatagcataaagtaagtgctttataagtgttagcaactgtattggtcagtcattgctccataacaaacaaatgcaaacatctcagtctacaacaattggtatttccttctcatgtstctacaggttggcaggatttggttgggccactctaattcaatctgtgtgtggctgggcatggtggcctatgcctgtaatcccagcatttggggaggctgaggtgggtggattgattgagcccaggagttcgagaccagcctgggtaacatggtgaaaccccatctctacaaaaaaaaaaaaaaaaaaaaagcctggcatggtgatgtgtgcctgtagtcccagctacttcagaggctaaggtgggaggatc

SEQ ID NO: 936185 - DNA, 608 bp, Homo sapiens
ccaagggcatactgggctccttaaatgacctcacccaactatgacgtggcacgaggtgaaacagtttcccaaaagaacgcttgtgcctccagaccagaattgtcacacctgaagttgtttatttgagcagccttgtcattgggctttccaaagcaggctttgtacagtggccacaccmtggtcttgcatgatacttgaatttggaaggttcctggtagacgtagaaacggcccagactgcctgttcagagctaagcatcatggtaagttaaggtacattctctcctagtacaccttgagttacctaataaaataatccagagcagccaggcatggtggctcacacctataatcccagcactttgggaggccaaggtgggtggatcacgaggtcaggagatcaagaccaccctggccaacacagtgaaaccccgtctctactaaaaatacaaaaattagagggtgtggtggcgagtgcctgtagtcccagctactggggaggctaaggcaggagaattgcttgaatccgggaggcacaggttgcagtgagctgagatcacgccactgtaccccagcctggtgacagagtgagactccgtcaaaaaaaaa

SEQ ID NO: 936186 - DNA, 608 bp, Homo sapiens
ccaagggcatactgggctccttaaatgacctcacccaactatgacgtggcacgaggtgaaacagtttcccaaaagaacgcttgtgcctccagaccagaattgtcacacctgaagttgtttatttgagcagccttgtcattgggctttccaaagcaggctttgtacagtggccacaccatggtcttgcatgatacttgaatttggaaggttcctggtagacgtagaaacggcccagactgcctgttcagagctaagcatcatggtaagttaaggtacattctctcctagtacaccttgagttacctaataaaataatccagagcagccaggcrtggtggctcacacctataatcccagcactttgggaggccaaggtgggtggatcacgaggtcaggagatcaagaccaccctggccaacacagtgaaaccccgtctctactaaaaatacaaaaattagagggtgtggtggcgagtgcctgtagtcccagctactggggaggctaaggcaggagaattgcttgaatccgggaggcacaggttgcagtgagctgagatcacgccactgtaccccagcctggtgacagagtgagactccgtcaaaaaaaaa

SEQ ID NO: 936187 - DNA, 568 bp, Homo sapiens
taaaaattatccaatgctgagtaaaaatcaatgacagccagtaaacaagcacataagcacactcccctaataatccgtcaaataggatgtttttaaatcacagcaatatttgttatttcttctgatgctttctatttgttccaagccttagagyataaggctagctactaaagagcagaaagagaaatcgaattcggctacctgttgttgctggtatggggagggagatgaataaaagcagttccaagctccagtggctggttttcatgaaaatgtattttcttaaatcaataccatttcagactggttagtttttggacatcctttaccaaagatagatagataaataaataaatgagaggtcattttatatttcctttatgaaataaatatgcttaaactctaatggtaaaaatgtatgtgaagatcaaaatttatattgtgcttaatgattaaatgggctacagaaaaatatttttacctagtagacagcatcttagtctcaaactcaggctctatttaacagtcttaataattagcttcaggctgggcgtggtggctcacgcct

SEQ ID NO: 936188 - DNA, 568 bp, Homo sapiens
taaaaattatccaatgctgagtaaaaatcaatgacagccagtaaacaagcacataagcacactcccctaataatccgtcaaataggatgtttttaaatcacagcaatatttgttatttcttctgatgctttctatttgttccaagccttagagcataaggctagctactaaagagcagaaagagaaatcgaattcggctacctgttgttgctggtatggggagggagatgaataaaagcagttccaagctccagtggctggttttcatgaaaatgtattttcttaaatcaatascatttcagactggttagtttttggacatcctttaccaaagatagatagataaataaataaatgagaggtcattttatatttcctttatgaaataaatatgcttaaactctaatggtaaaaatgtatgtgaagatcaaaatttatattgtgcttaatgattaaatgggctacagaaaaatatttttacctagtagacagcatcttagtctcaaactcaggctctatttaacagtcttaataattagcttcaggctgggcgtggtggctcacgcct

SEQ ID NO: 936189 - DNA, 568 bp, Homo sapiens
taaaaattatccaatgctgagtaaaaatcaatgacagccagtaaacaagcacataagcacactcccctaataatccgtcaaataggatgtttttaaatcacagcaatatttgttatttcttctgatgctttctatttgttccaagccttagagcataaggctagctactaaagagcagaaagagaaatcgaattcggctacctgttgttgctggtatggggagggagatgaataaaagcagttccaagctccagtggctggttttcatgaaaatgtattttcttaaatcaataccatttcagactggttagtttttggacatcctttaccaaagatagatagataaataaataaatgagaggtcattttatatttcctttatgaaataaatatgcttaaactctaatggtaaaaatgtatgtgaagwtcaaaatttatattgtgcttaatgattaaatgggctacagaaaaatatttttacctagtagacagcatcttagtctcaaactcaggctctatttaacagtcttaataattagcttcaggctgggcgtggtggctcacgcct

SEQ ID NO: 936190 - DNA, 766 bp, Homo sapiens
gtaggagcctaatgataagccccagctaacaaggccaggtgggcttaacacagaccaacccccttcccactttttgtaatctgtcacttctctgacgtcattgagtccccactcaccctctctgttctttcattcttgctttaaaatgcccagttatctctacaaatcaaagttgagttcagttcaagctaggctcttttccctattgcaataatatgtcactgattaaaatctgttcttaccactttatttatttatttatttatttatttatttattattttgagacggagacttgctatgtggcctaggctggagtgcaatggcacaatcttggtttactgcaaaatctgcctcccgagttcaggcgattctcctgcctcagcctcctgagtagctgggattacaggtgtgcaccaccatgcccagctaatttttgttttttagtagagatggggtttcaccatgttggtcaggctggtctcgaattccttgcctcaagtgatccgcctgcctcggcctcccaaagcrctgggattacaggcgtgagcctctgtgcctgtcctgtccttaccactttagctagtgtctggctttgtttatctatgagatgatccagcaattctactcccaggtatatacccacgaaaaatgaagatatatatccacacagaaacttgtatacaaatgtttatagcaacattatttataatagccaaaaggtgaaaacagcccaaatgcccactaactgatgaatggataaata

SEQ ID NO: 936191 - DNA, 570 bp, Homo sapiens
acacctggaatcccagcactttgggaggctgtgggcagatcacctgaggtcaggagttcgagactagcctggccaacatggcaaaaccctgtctgtattaaaaatataaaaatcagccaggcatggtggcaggcgcctgtagtcccagctactggggaggctgaggctagagaatcacttgaacctgggaggcagaggttgcagtgagcggagatcacgccattgcactccatcctgggtgacaagagcgagagtcmgtctcaaaaaaaaaaaaaaaaaaagaaacacaagcttacattttctttccagaattacataaggggacatttcagtgaaaggaaaatgagaaataaaagcacatgaaataaaaaagaatacctaagtaacaataaacaaataaaaattgtacaaattgctcacttttagatgttaacaccctcaaacaacattgtcattcttgccctaaccttggaaaaaaatcacattttctagaactaaaacaagaatgtataatttgtggaatttcctgagatgagtcccccacccctggcaccctaactccccaaagga

SEQ ID NO: 936192 - DNA, 617 bp, Homo sapiens
caatgttattattgacaagtaaggacttactcctgccattatgtttatttatttatttatttatttatttatttttctggttgttttatggttttgtcttccttctttctttcattcctgtcttcctttcagtgaaggtgattttctccggagatacgattgttttttgtatatgtatctattgcatgctttttgttttgaggttaccatgaggcttgtaaatactatcttgtaaccctttattttaagctgataactgtagggagaccccctgaaactattgttatggggtaaaagatgaaatgttcctaattattgtaaatacaaagttgcatgcaggattgtgtaaagacaatgccaggttggactgccagaatgagccaacagtgagcgaygtgcctccccctgcagagagcctatgaacagacgtgtagtcagggaggtttcacatcaccaagattcctatcccagaaaaacagatgttcatagctctgggaatggaatgtgacccttgtggagagcttataaatggacgaatgagggggcacctgttcatatggataagatagggctataaatgcccttatcttgccacgtctcttctaggcctctttagg

SEQ ID NO: 936193 - DNA, 528 bp, Homo sapiens
ctccagcatttggtattgttgcctttgaaatttttgctgttctagtgggggtatgacagcacctcgtttttttttttttttgaaacaagatctctctctatcacgtgggctcgagtacaatggcgcaatctcagcgcactgcaacctaaacctcccaggctcaagcaattctcctgcctcagtctcctgaatagctgggactataggtgcacgccactatgcctggctaatttttgtatttttttttttttttttgtagagaggggtttttgccatgttgtccaggctacctcaytcattttaatttgcatttcctcaatatgcatattttcttttttctttttttttttttttgagatggaatctcgctctgtcacctaggctggagtgcagtggcacgttctcggctcactgcaagctccacctttgggttcaagcaactctccctgactcagcctcctgactagctgggattacaggcgcccgccaccacacccagctaatttttgtatttaaaagtacttttgt

SEQ ID NO: 936194 - DNA, 528 bp, Homo sapiens
ctccagcatttggtattgttgcctttgaaatttttgctgttctagtgggggtatgacagcacctcgtttttttttttttttgaaacaagatctctctctatcacgtgggctcgagtacaatggcgcaatctcagcgcactgcaacctaaacctcccaggctcaagcaattctcctgcctcagtctcctgaatagctgggactataggtgcacgccactatgcctggctaatttttgtatttttttttttttttttgtagagaggggtttttgccatgttgtccaggctacctcattcattttamtttgcatttcctcaatatgcatattttcttttttctttttttttttttttgagatggaatctcgctctgtcacctaggctggagtgcagtggcacgttctcggctcactgcaagctccacctttgggttcaagcaactctccctgactcagcctcctgactagctgggattacaggcgcccgccaccacacccagctaatttttgtatttaaaagtacttttgt

SEQ ID NO: 936195 - DNA, 558 bp, Homo sapiens
acttctagcaccctgtgaacagaaagtacggggtttactaggtataaaatcaaaacagaaaatccaagtaaacccaatcagaaatgacaaaagggacattaccattgacttcacagaaatacaaaaaaactctgagactactatgaacacctctatacacacaaactaaaaacctagaaaattggataaattcctggaaacatccaaacctcccaagagtgaaccasgaagaaatcaaaatccttaatagaccaataattaatttcaaaattgaatcagcaacaaaaagcctaccaatatcaatcagaaaaaagccctgtaccagatgaattcatggccaaattacaccagacatacaaagaagagctggtaccaatcccaccgaaattatgccaaaaaatctaggaagaggggacacttccctaattcactctatgaagccagcatcattctggtacctaaacttggcagagacacaatgaaaaataaaacttcagaccaataaaccaatactcctgatgaacacaatgcaaaaatctccaacaaaatactagcaaa

SEQ ID NO: 936196 - DNA, 676 bp, Homo sapiens
tttttctttttttctgatatccttggcaactgctaaatcacctggattcttgaaatggcctcctaactgcactccctccttccattccccattaaatttattctccacgttgtaatgagaaggattgtctgctcaaaactctgcaatgctctgctcaaaatcctgcaatggcttattctttcattctaagtaaaagtcttttaactaaaagactgcatgatggcatggatctgcactccccctcttccttactctttccacagcctcttgccattcctcagatatgataagcattggccaatctcagggcctttgcacttgctcttcactctgactggcaatttcctcagatatccacacagcttsttctcttactttttttgggggactcaaatgccagttaatctgagaaggcttccttgaccaacttatgtaaagcagcatccctcacaccaacatgctgtattgcctttttgctgctttttcttcatagcacttatcaccacttccacttttactattaaatatttgcttattatttatcaaacactgcatccaccccagctaagaatgtaagctccaggagaggggctttggttcactgctatatccctggcacctggaaatgcgtctggcatttcgcagacattcagtatttattgaatgaatgaattcc

SEQ ID NO: 936197 - DNA, 557 bp, Homo sapiens
aggagttcgagaccagcctggccaacacggtgaaaccctgtctctactaaaaacacaaaaattagctgggcttggtagcatgtgcgtgtaatttcagctacttgggaggctgagacaggagaattgcttgaacctaggaggcggaggttgcagtgagctgagatcatgccatagcactccagcctgagtgacagagtgggactctgtctcaaaaacaaaataaaataaaaaagataaaataaaaagaaattatctcttttcttaagagattaatttgatctggaaaaatcctttggacatattcctataaattggaagcatatgccactatttatttattttttttttggagacagtctcactctgttgcccaggctggagtgcagtgrtgtgatctcggctgactgcagcctcatgcctataattccagcactttgggaggccaaggtgtgtggatcacttgagcccaggaattcgagaccagcctggccaacatggtgaaaccccatctctactaaaaatacaaaaattagctgggtgtggtggcgcaggcctgt

SEQ ID NO: 936198 - DNA, 468 bp, Homo sapiens
cttttgtgatcttttaaaactgattggatgaaaaaatggaaaatgtaacataagaagtgtcagacctctgagcccaagctaagccatcatatcccctgtgacctgcacatacacatccagatggccggttcctgccttaactgatgacattccaccayaaaagaagtgaaaatggcctgttcctgccttaactgatgacattgtcttgtgaaattccttttcctggctcatcctgtctcaaaaagctcccctactgagcaccttgtgacccaccccccaactctgccctccagagaacaactcccctttgactgtaattttcctttatctacccaaatcccataaaacggccccacccttatctcccttcactgactctcttttcagactcagcccgcctgcacccaggtgaaataaacagccacgttgctcacacaaagcctgtttggtggtctcttcacacggacg

SEQ ID NO: 936199 - DNA, 468 bp, Homo sapiens
cttttgtgatcttttaaaactgattggatgaaaaaatggaaaatgtaacataagaagtgtcagacctctgagcccaagctaagccatcatatcccctgtgacctgcacatacacatccagatggccggttcctgccttaactgatgacattccaccacaaaagaagtgaaaatggcctgttcctgccttaactgatgacattgtcttgtgaaattccttttcctggctcatcctgtctcaaaaagctcccctactgagcaccttgtgacccaccccccmactctgccctccagagaacaactcccctttgactgtaattttcctttatctacccaaatcccataaaacggccccacccttatctcccttcactgactctcttttcagactcagcccgcctgcacccaggtgaaataaacagccacgttgctcacacaaagcctgtttggtggtctcttcacacggacg

SEQ ID NO: 936200 - DNA, 468 bp, Homo sapiens
cttttgtgatcttttaaaactgattggatgaaaaaatggaaaatgtaacataagaagtgtcagacctctgagcccaagctaagccatcatatcccctgtgacctgcacatacacatccagatggccggttcctgccttaactgatgacattccaccacaaaagaagtgaaaatggcctgttcctgccttaactgatgacattgtcttgtgaaattccttttcctggctcatcctgtctcaaaaagctcccctactgagcaccttgtgacccaccccccaactctgccctccagagaacaactcccctttgactgtaattttcctttatctayccaaatcccataaaacggccccacccttatctcccttcactgactctcttttcagactcagcccgcctgcacccaggtgaaataaacagccacgttgctcacacaaagcctgtttggtggtctcttcacacggacg

SEQ ID NO: 936201 - DNA, 818 bp, Homo sapiens
tgtgatttctgcctcttggggccacagagaacaggtctgatcccgcttctacatcacagatcaaggaagattgtgtttatgtctcaagcctgcacttctctaggacagccattctacatttcattgactgtccattttttggtgcttctgttccttcctttttactctcctttggatgtgctcctgttcaccagtgttgctcttttttgtttgtttttttttgagatggagttttgctctgttgcccaggctggagtgcagtggcgccatctcatctcactgcaacctctgcctcccgggttcaagtgattatcckgcctcagcctcccgagtagctggaattacaggcatgcgccaccaagcccagctaatttttttgtattttcagtagagacgaggtttcaccatgttagccaggctggtcttgaactcctgacctcaagtaattcgcctgccttggccttccaaagtgctgggattacaggtgtgagccaccgtgcccggccagtgttgctcttaaggtgtggagtggacagagctgaataatctgaatattctagccaaagtctgagcagcacaaccctagaacaggcagggccgagccatttgtttaggaactagtttggttatgagtgctctttagccctgatacttccggtatcactgagacagggaaaagtgatcgtattttcctgtggcttattcattagtaaagggatgagcatctaggaacccctaaagtttgtttggtccttcttaaagagtcttagctgaaggattgaatgatttaagttcttaacaagagcatctgctggctt

SEQ ID NO: 936202 - DNA, 812 bp, Homo sapiens
gcttggtgcggggtagacgctcttctgcaaagaaagaacatgccctttgcagataggcagcttggctttgatcccaggcctgccactgcctaactgtatgacttgggcaggtgataaactctttgagcctcaataccctggcctttcaagtggtacagtaacagtacctacctcatagataggttgttgggaagaactagtgagcatggaaagtatcaatttttcattgccatgaaagcaccaatcatggcacccaggaagcttctcataaatgttagctgctgttatatattaactttttctccaccatgccataactgtatactctttcttagacatactgggctaggaaaggggacaggataccactgcgtggtggcaggcgcctgtaatcccagctccttgggaggctgaggcaggagaattacttgaacccgggaggcagaggttgcagtaagcggagatcgcgccactgcactctagcctgggtgacagtgtaagactccatctcaaaaaaaaaaaaggggggggacaggacagggacaagaagatgcagagatccccagagacaatgttggacacaggcaaggaaagmgaggcgggggggaaacaggcaagacggaggagagaatgctcatattcatcaagtgtttgcatagtgattatctttctcgtctgtccttagggtagtggtttcacccccatcttgcatctgacaaacatgttcagagatgtgaaataacttacctgacacccaccttcagggctgggattctggcctggtctactgataccaagcctcatattctttt

SEQ ID NO: 936203 - DNA, 603 bp, Homo sapiens
acagctatctgtctttatctgaaagacaacagactgaatgtacaaatggacaatggctagaccacatataaaaatagaactctggcccacaagctgcagcaacctgcccaggaaaccaattcccttatctacaataaacaacacaggaagccagcctgctacacaagtatatcagacttgcaggaagccatattgccatctctagaaataatccagaaagataaacaataacttctgtaacrattcacacaaaatggccaggacttgattaataattgacagcatccctaatttttgcccccacctctaacttagaacaaatcagagaaaaaaaatatgcttgcccccacttctaacttaggaccaaccatataggatgctttgcttctagttaacttgcctacagtgtccccatgcctatcaggacatatgtgaagtcttctcttttttctgttgtgaagctttctcacccctctgcctacctttgaatctctgccaaatgtaagtgtgatgggctgactcccttgctatagtaaaatctaaagaaatagcctttgcatttctcatttgactggtatattagtcagggttctccagataaac

SEQ ID NO: 936204 - DNA, 581 bp, Homo sapiens
tacttgaaagtccatttgaggtgtctaatttctgaatcagggtattgcattacagactctttacacagataacccagcattcactttgcttcaggtaacagtggctgcagaacagaagttgagaaccacatgtagcttatgtatggcccataagctaagaatggtttctacagatgaacatttgtaatcggtttgatgttaggaaaaactaactttgttttttgttttgtttataacttttgtttcaggttctggggtacatgtgcaggtttgttatacaggtaaacttgtgtcatgggggcttgttgtacagattattttgacaaccaggtactaagcctgrtactgaatagttattttttctgctcctctccctcctcccatcctccaccctcaagtaggtcccagtcagtgtctattgttctcttctttgtgtctatgagttttcatcattagctcccatttacaagtgagaatatacggtatttggttttctgttcctgtattagtttactaacagtaatggcctccagctcccttcatgttcctgcaaaagacatgatctcattcttttttatggc

SEQ ID NO: 936205 - DNA, 594 bp, Homo sapiens
gccacctgaaggcccaagaactgacctgccagaaattgtcaacacagatgccagcatacacagccatggggcccaaggacaggcatacttggcctgccactgccaccaccagggcctgaagactggcccatttgtcatctcagtccccagcacaacttcaccacagtctccattaacaatcataccctaagctactaaggaaatcacaggcattamcgatgctatatagcagaagaaatcatatggagattactacactactgcatgaactcagatcaaagccaaagagtcctccccaaccagcatcatagatacatcttcaggaaaaagtactcccctatgaaagcaaattcaaaaagaattggaagaagtgactattataccagatgtacatacatcaacataaggacaaaaggaacacaaaaaagcaaggaaatatgacacctacaaagaaacataattattctccagcaacagattccaatgaaaaagaaatttatgaaatcatggaaaaataattttaaataatgatattaaagaagcttagtgaggtacaatacaactcagatacacaatacaaagaaatccaaaaac

SEQ ID NO: 936206 - DNA, 691 bp, Homo sapiens
tgttgttctcagccactaagtttgggtgatttgttacacacaataagcaatggagacaccacctgccagcacattctgtcacaagtccctccattatttctctagaatctgcccttcatcccacgacccagagaccttgttatcacaatagccttctccctggtctcccagcttccactctggggccttccaaactgttccccttaggatcaaagaacttttaaaatggatcttatatcttcttaaayttgccaatggcttcttctttgcactgggaacagactccatcctattccagcccactccatgctaccccagcctacaagtgtctcccgacccagtctccggccagctctctgacttcaggcctcgccagtcctgctcatatctattctgctccagccacactgaccttacttctcttccttggaagcactcagctccttcccatctcggggcctttgccccacctattgcctctgcaggatcatgctgcactcggctggctccttcttgtcactcagatttcattttgagaccttccgtggccaccacaactaaggtgcctcttgcctctactgtcccagtcactcccacatcctgcttttattcttttcattgcacttgagttcctttcaataaactcctatgttaccctcctgagccccttctgaggtgtccatctctgtca

SEQ ID NO: 936207 - DNA, 726 bp, Homo sapiens
actgttcaacaacaaatggagacgcccccatttcccttgtgcctgaagcaggcctttcaaaggaaaggccacattgtctggtacagcgttctttaaaggaattaggtttgaatttaaacggtttctaatgtggacatgttctttgcttccactgccaggctaacttttataatttacatgaaactcattgcaagttttactcaaaaaaagcaattatctcagatgctgctcttcagaaaaaaaaaataataataagtatatgaagaactgatcaaggaaaagaaaaattgccttaagaatcaattccacaattaaatttcacttggatttcaaaggacattaaataaaacggtagtatctcttcattgtcctctattaagaaaaaacagtgaaaaataatatatgagattgtctacatttttttaaggtttatggaaaatagtgctttcagataagatgagagaacatagagccaagtctatgacttatttccttatatttatccatagtttctagtgacttacacattcattcattcgataactagaaattcaatggagaakgaaacaaagtacaatcctgccatcaggagcttatattctagggggaaatgctctaagttagattctcatggagctgagcctgagatggggattcttttacatgtgatttataagggaggagtctcaggtaataccaacaaggcaatgaggaagcacagggcag

SEQ ID NO: 936208 - DNA, 726 bp, Homo sapiens
actgttcaacaacaaatggagacgcccccatttcccttgtgcctgaagcaggcctttcaaaggaaaggccacattgtctggtacagcgttctttaaaggaattaggtttgaatttaaacggtttctaatgtggacatgttctttgcttccactgccaggctaacttttataatttacatgaaactcattgcaagttttactcaaaaaaagcaattatctcagatgctgctcttcagaaaaaaaaaataataataagtatatgaagaactgatcaaggaaaagaaaaattgccttaagaatcaattccacaattaaatttcacttggatttcaaaggacattaaataaaacggtagtatctcttcattgtcctctattaagaaaaaacagtgaaaaataatatatgagattgtctacatttttttaaggtttatggaaaatagtgctttcagataagatgagagaacatagagccaagtctatgacttatttccttatatttatccatagtttctagtgacttacacattcattcattcgataactagaaattcaatggagaatgaaacaaaktacaatcctgccatcaggagcttatattctagggggaaatgctctaagttagattctcatggagctgagcctgagatggggattcttttacatgtgatttataagggaggagtctcaggtaataccaacaaggcaatgaggaagcacagggcag

SEQ ID NO: 936209 - DNA, 625 bp, Homo sapiens
gcttggttttctgttcctgtgttagtttgctgagaaagatagtttccagcatcatccatgtccctgcaaaagacatgaactcatccttttttatcactgcatagtattcacggtgtatacgtgccacattttcttattccagtctatcattgatggacatttgggttggttccaagtctttgctgttgtgaacagtgctgcaacaaacatacatgtgcatgtgtctttatagtagaatgatttataatcctttggatatatacccagtaatgggattgctgggtcaaatggtatttctagttctggatccttgaggaattgccacactctcttccacaatggttgaactgatttacmatcccaccaacagtgtaaaagtgttcctatttctccacctcctctccagcatctgtttcctgactttttaatgatcacctttctaagtggcatgagatggtatctcattgtgatagagaaatttacatttctctaagaaccagtgatgatgagcttttttcatatgttgttggccacataaatgtcttcttttgagaagtgtctgttcatatccttcacccgctttttgatggggttgctttttttttttcttgtaaatttgtttaaa

SEQ ID NO: 936210 - DNA, 540 bp, Homo sapiens
ctggaacttgagaataggcctgcccagcctgccaccaccaccactgctggcaatcttctgcatgcactacctggaggattggggactgggctgcccagcccattgcagccaccgctaatatcagtgagtgcccatggggagcctgaggactcatccagtcatctggcacactgctgccataaccagcacccaagaaagctgcctggaggccccaaaatcagccctctggacttgctaacactggcgcccacatatgccaccccgggacccaagaacaggcatgcttggtctgccgctgccaacagcagggcctgaggactggcccacctggcgtcctatccccaggaaaacctcagcataatctctactaacaackgcagcctacgccactgaggaaatcacagacaccactgatggtgtatagccaaagaaatcctatggagactgcaccaccatatatgcccagaataaaagaaaagtaccctaaccaaccaacaccatagatctatctacaggaaaatgtcttcccctatgaaaacc

SEQ ID NO: 936211 - DNA, 608 bp, Homo sapiens
ctgagccttcctacaagccactctttgtttttaaaacagtggggaaatacgtttacagagattgtgagcttcagagaatgcatgtgatggtgtgtattacatgctaattcatataagctgtatctgtcagctaccaccctgtgctttaaaaatgcacacactcaaccctctttagcttggagctcagctttttgcttttttttttttttttttgtagaattatttagctaacataagtattctgattgctacctgatggccattcttacttagtttcatagatgtgctttaactatgatcctttgaagctcaccccttggagagcctacagaacctcaggctgatagctttgaagactgccaaacagcccagaaggaagcaaagcatctgcataatcaggagggttgtatamcaagtagtgatttggcaaatatgtgggtagctttaggctgaggcacgggcctcaggcaaaaatgcccttcgagtgaatccgaagggcatgatcttcctatgtccttgactaggcatgacgagtcatttgaggtcagatattatttgagttgttcagcacccccaaaggtaggcattctcctgggaaattttcattt

SEQ ID NO: 936212 - DNA, 535 bp, Homo sapiens
ggtagtgcacctgtaatctcagttgctcaggaggctgaggcaggatgacagcttgaccccaggaattcgagttcagtctgagaaacatagtaagactctgtctctaaaaaaaaaaaaaagaggcccaaaagagctgcrttgctcctttcactgttagagcatgcagtgggaagtctacagtgggcagctcagaaaagggccttcaccagagcctgatcatgttggcatctgtatcttggaattctggcctccagaactgtgagaaataaatttatattgtttttaagccatgcagtctatggaaatttattataagggcctgagcagattaagacatccttccctgtattagtctgttttcatgcttctgataaagacatacccgagactgggcaatttaaaaaagaaagaggtttaattgaacttacagttccacatggctgcagaagcctcacaatcatggcagaaggcaaggaggagcaagtcacatcttccacggatggcagcaggcaaagagagagagcttgtcagaagc

SEQ ID NO: 936213 - DNA, 593 bp, Homo sapiens
tgatgtgtttactataatatcttgtgaagtggtttggtgagaattttgtttattaagaactgcttctattgggtgaaaacagtgatttttctgagattctaaggcattacagtttttcctgccactgggcagcttaatactaaataataacattttggtacctgatcagtggcttaaatatagtatagctacagggacaaatgcccytttatctttgcatttatttatttatttatttatttgtttattttagactatttggagttttcctggtcttactggatgtcactctcatccttgccgacctaattttcactgacagcaaactttatattcctttggagtatcgttctatttctctagctattgccttattttttctcatggatgttcttcttcgagtatttgtagaaaggtaagtttgattatttttataatgcattaagctactttgtagttttataagaagcactttcggaggctgaggtgggaggatcccaaggtcaggagttcgagacgatcctggccaacatggtgaaaccccgtctctactaaaaatacaaaaattagctgggcatggtggtggttgcctg

SEQ ID NO: 936214 - DNA, 647 bp, Homo sapiens
gctgtttgggaggctgaggcaggagaatcgtttgaacctgggaggcagaagttgcattgagccgagatcatgccattgcactctagcctgggtgacagggtgagactccatctcaaaaaaaaaaaaaaaaaagcattttaaaataattaacgggagcattcactacaaactgacttaagagcctttgggccttatgagaacattggtggtagtctggcagtacccccyccatgtcctgtgtttgaggtggccatggattgatgctcctctgcctttggacaggggtggaaagagtgggaaggactgcatcttgtggtttgagtgacagctcagccatagcacaataaaacactaggtagacttttacagtttttgatctaggccctgattcccagacagcacctgtggatccacctgtaggctaggagaacttgccatcctgaaggcaaggacacaggcctggctgtttttacgatgtgatgactgtagagccccagggccttcagtaaactcctgcaatagctaaggagtggttacagcaggtcttgggcaagaccccgtgctgtgctggcctcaggtctgacccaatgcagtcacagtagtggtggccacagaggtgcttatgtcactcaaccccaagctttagg

SEQ ID NO: 936215 - DNA, 647 bp, Homo sapiens
gctgtttgggaggctgaggcaggagaatcgtttgaacctgggaggcagaagttgcattgagccgagatcatgccattgcactctagcctgggtgacagggtgagactccatctcaaaaaaaaaaaaaaaaaagcattttaaaataattaacgggagcattcactacaaactgacttaagagcctttgggccttatgagaacattggtggtagtctggcagtaccccccccatgkcctgtgtttgaggtggccatggattgatgctcctctgcctttggacaggggtggaaagagtgggaaggactgcatcttgtggtttgagtgacagctcagccatagcacaataaaacactaggtagacttttacagtttttgatctaggccctgattcccagacagcacctgtggatccacctgtaggctaggagaacttgccatcctgaaggcaaggacacaggcctggctgtttttacgatgtgatgactgtagagccccagggccttcagtaaactcctgcaatagctaaggagtggttacagcaggtcttgggcaagaccccgtgctgtgctggcctcaggtctgacccaatgcagtcacagtagtggtggccacagaggtgcttatgtcactcaaccccaagctttagg

SEQ ID NO: 936216 - DNA, 571 bp, Homo sapiens
ttgtggttttaatttgcttttccctgatgattaatgatgtttagcattttctcattatacctcttggccatttgtgtgtcttctgttgagaaatatcttttcaggttctttgcccattttctagagaagtaacttgttctcttgctattgtgttgtctgaattccttttttaaaaaayctgttaacctattatcgaatgtatgctttgtagatatttctcccattctgtaggttgtctctttactctataaatatctcctttgctgtgcaaaagcgttttagtttgatacagtatcatttgtctactttttctttcgttgcctatgcttttcagtcatatccaaaaatatcttggcccagaccaatgtcaagaagattttcacctatcttttcttctagtagttttccaatttcatgtttcacagttaagcatttactttgagttgatttttgtatattgggtgagataggttgcaatttcatttttctgcaagtggatattcagtttccccagtatcgtttattgaagagactgtcctttcctcatcttggattcttggcacctttgttg

SEQ ID NO: 936217 - DNA, 655 bp, Homo sapiens
ctggcctaaaaccaaggtgtcagcaaaacttccctcttgatgcaagttctgggggagaatcagtttccttgccatttcctgcttctaggggaatgtttctagagtattccttggctcctggacccttccttgaacttcagagccagtagtgcagcatcttctaatttctctgtgactctgacctttgcttttgtcctaacatcacctcctctggctctggcactcctgcctccctcttacaaagatcctgtgatgatcttagacccagctggataatccagggtcatttcatctcatgattcttaaactaatcacatctgcaaaatctttttagccatgacaggtttttacagatttctagaattaggatgtggatwtttttttgagggggggaagggggtgcttactctgtcaacccacatggggattaggatgtagacatccttggggccattattctgtctgctacctagtattaggccatggacatctttgggaccattattctctgtatcacatgaggagtaggacatgggtatctttgggaccattattctgtctcccacatggggattaggatgtggacatctttggggccattattctgtctgccacgtggggataaggatgtgtacatctttgaggccattattct

SEQ ID NO: 936218 - DNA, 574 bp, Homo sapiens
ggattacaggtgtctgccagcactcctggctaacttttgtattttcagtagagacgggacttcaccatattggtcaggctggtctagaactcctgtcctcaaatgatctgccctcctcggcctcccagagtgctgggattacaggcatgagccactgtgccyggctggtaacgctctttcatgatagaatctttatttttaaatttatttatttattttgagactgagtcccactctgccactcaggctggagtacagtggcacgatctcggctcactgcaaccttcaccacccgggttcaagtgagtcttctgcctcagtgccccccgagtgtctaggattacaggcatgcgccaccatgccgagctaatttttgtatttttaggagaaatgaggtttcatcatgttggccaggctggtctctaactcctgaccttaagtgatccacccaccttggcctcccaatgtgatggaattacaagtgtgagccaccacacccggctggctcccacttttaaatgaaaacgtgtggtatttagttttctgttcctgcattggtttgctaagcatacca

SEQ ID NO: 936219 - DNA, 598 bp, Homo sapiens
acctaaggtgtcttgagtcagatcaggaaatccaaacatcagagcacttaattctgacttggtgtaaggtgtatatcttatgtttgaacccactcttcctgtgggttttgttttaaaagaaatgactactattttatcttctcctgtagctatttctggaccctttgtggtttaagaaggaatacagggaggagaaagagaaaaaaaatgaaatcatccaggcaaggaagtttagaaagcagaggtttaggagaagaaaaagaagagacagtttctggcagcttcctgattttagaagctgattttgctacttttctttaattctgaggtagtttcaaatattttgttgttacctttctggaaagaaataagtttatcatttctacttttggatgtttttaggtgccagctaaaatacaaccctcatttattttccttgatgcagaaacctaacttctctaatttagcatacgagaagaccagtttgggaatatttaaagttcttcactttgggaaccttagatgttggtcgtccttagtaaaatcccccctttacataaatgtttgyaagaagaggtgctataattatcacacataa

SEQ ID NO: 936220 - DNA, 601 bp, Homo sapiens
caccacgagattatatcccacacctggctcggaggatcacacacccatggagccttgctcactgctagtgcagcggtctgagatcgaactgggaggcagcagacaggctgggggaggggcatccaccattgctgaggcttgactaggtaaacaaagccactgggaagcttgaactgggtggagcccaccacaactcaaygaggactgcctgcctctgtagactccacctctaggggcagggcatagctgaacaaaaggcagcagaaactttctacagcagaagtttctacagccttaaacttccctgtctgacagccctgaagagaacagtggttcccacagaatggagtttaagctctgagaatggacagactgcctcctcaagtgtgtccctgacccccaagtagcctaactgagagacatctcccagtaggggtcaactgacacctcatacagccaggtgcccctctgagacagagcttccagaggaaggatcaggcagcaacatttgctgttctgcaatatttgctgttctgaagcctctgccagtgatacccaggcaaacagggtctggagtggacctccagcaaactccaacaga

SEQ ID NO: 936221 - DNA, 443 bp, Homo sapiens
taataacaaacttctccaagctaaaggaggatgttcgaccccattgcaaggaagctaaaaaccttgaaaaaagattagatgaatggctaactggaataaacggcgtagagaagaccttaaatgaccaaatggaggtgaaaacaatggcacaagaactacgtgacgcatgcacaagccgatttgatcaagtggaagaaaggggatcagtgattgaaggtcaaatgaatgaaatgaagtgagaagagatgtttagagaaaaaaragtaaaaagaaatggacaaagcctccaagaaatatggggctatgtgaaaagaccaaatctacttgtgattgctgtacctgaaattgatggggagaatggaactaagttggaaaacactcttcagaatattatccaggaaaacttccacaacttagcaaggcaggccaacattcaaattcgg

SEQ ID NO: 936222 - DNA, 545 bp, Homo sapiens
tagacaagcaaatgctgagagattttgtcaccaccaggcctgccctacaagagctcctgaaggaagcagtaaacacagaaagaacaaccagtaccagccactacaaaaacatgccaaattgaaaagaccatcgatgctaggaagaaactgcatcaactagtgggcaaaataaccagctaamatcacaatgacaggatcaaattcacacgtaacaatattaaccttaaatgtaaatgggctaaatgttccaattaaaagacacagactggcaaattggataaagagtcaagacccatcagtgtgctgtattcaggagacccatctgacatgcagagacacatataggttcaaaataaaggaatggaggaagatctaccaagcaaatggaaaacaaaaaaaaaacaaaaaaaacaggggttgcaatcctagtctcaggaaaaacagactttaagccaacaaagatcaaaagagacatagaaggccattacataatggtaaacggatcaattcaacaagaagagctaactatcctaaatatatatgca

SEQ ID NO: 936223 - DNA, 545 bp, Homo sapiens
tagacaagcaaatgctgagagattttgtcaccaccaggcctgccctacaagagctcctgaaggaagcagtaaacacagaaagaacaaccagtaccagccactacaaaaacatgccaaattgaaaagaccatcgatgctaggaagaaactgcatcaactagtgggcaaaataaccagctaacatcacaatgacaggatcaaattcacacgtaacaatattaaccttaaatgtaaatgggctaaatgttccaattaaaagacacagactggcaaattggataaagagtcaagamccatcagtgtgctgtattcaggagacccatctgacatgcagagacacatataggttcaaaataaaggaatggaggaagatctaccaagcaaatggaaaacaaaaaaaaaacaaaaaaaacaggggttgcaatcctagtctcaggaaaaacagactttaagccaacaaagatcaaaagagacatagaaggccattacataatggtaaacggatcaattcaacaagaagagctaactatcctaaatatatatgca

SEQ ID NO: 936224 - DNA, 525 bp, Homo sapiens
aggcacatgacaccacgcgtggctaaatttctttgtatttttagtagagacggggtttcaccatgttggccaggttggcctcgaactcctgacctcaagtgatctgccccctcagcctctcaaagtgctgggattacaggcatgagccactgygcccagccgagtttgttttgttattaaattggtataaaagatttttgaaaaattaagtcagtgattaaaaatcaagactacagtagtctctcaatttatcttctccaacatgaaatgctgacccagaaaaaaattaagtaaaaactggtggtctatattatcaaactgtcaaatgaggcatatttatacttcaatatcttggatgatatcagggggaggtagggaggttaaaaaaatagttcttccagtcatgaaagaaaataaagtataatctagaattccttaaaatcgttcatgagtctaaattaaacagccatattccagaatattaaatatagaatatgaagaagaactgtcatctccggtcaatga

SEQ ID NO: 936225 - DNA, 601 bp, Homo sapiens
gaggctgaggcagaagaatggcacaaacccaggaggcggagcttgcagtgagccgagatcgtgccactgcactccagtctgggcgacagagcaagacgccgtctcaaaaaaaaaaagaaaagaaaagaaaagaaaaactgcccactgcctacctgagaagcaaagatgccaggtactaactttataagggagttcagatactgtgtagccsagaccgaaaatcagattcttgagtatttaatatagtcaatatacacagaagaacagcacaatcaattgcacactaattcaaaagttggtatttcaagattttaatgtgtttaattggtatctgctaaactcaatgaacatgtgacttcataaatgaagactgcttttacatccttcagttccaccctccacaacactgccagagttatttttctaaaatgcaaattttgttatgtcattcttctactcagaatccttcagtggttaattccccattttgttttatagtataacattcaaactctgtagcgtaacgtacaagtccttctcaatacttgaatcctgccaaatttctagacacaactaccaatattctactctgtcccctgaa

SEQ ID NO: 936226 - DNA, 727 bp, Homo sapiens
ggagttcgagaccagcctggccagcatagtgaaaccccatctttactaaaaaaatacaaaaatacaaaaatttgccggacttggtggtatgtgcctgtaatctcagctccttggcaggctgaggcaggagaattgcttgaaccaggsaagtggaggttgcagtgagccaagattgcgccactgcacttcagcctgggcgacagagtgagactctctctaaaaaaaaaaaaaacaaaacaacaacagcagaacatccctaacaccctggcaatcaagctgattgaaaatcaatcaagctgttgaaaaatatcaacaacaatatcgatatcaaataagataagagcactacccagatataagcaatagtggttatttctgggtagtgctctttatctgattttttatatattttacattttctgaatttttttgcagtccagaactaatttttcaaaagaaaagttatttgctatgttcttcacaaaagagccacaaatcctttcattttcaggctttcttcactttggtaacttgaaaaataatctattaccttgagttgctttattttagcttgaacatcacactcagaaaaatgttcaatattagtgagctgcagatccatctctgtgagccagaccagaatgctgtcccgcgcagtctcaaactcctcacgctggccaataaaatgctggaaggcaagaggaaagtagtaacaattatttttatt

SEQ ID NO: 936227 - DNA, 636 bp, Homo sapiens
tgcactccagcctgggtgacagagagagactccatctcaaaataataataatgaataaataaataaaataaaaaataaaaaggtggaagaaactcagactttcaaaaattaaggatcctatttttacctaagatattggctttactcttcggttcccttgattgacttagccaataattttttttctacctaactacacaagaaaaatgaaatgaaggtgtagaactcaagaatccctgtgcatttctaaaagccaaattttacaaccactgcaatattaccatttactaacattttctttctgtctcagccaaaggtaaggggcctctaactgggacaggcatggtggctcacgtctgtaatcccagcaattcgggaggcctaggtgggtrgatcacttgaggtcaggagttcaagatgagcctggcccatatgttgaaaccgtgtctcaactaaaaatacaaaaattagctgggtatggtggtgggcacctgtaatcccagctcctcgggaggctgaggcaggggaatttcttgaacacaggaggcagaggttgcagtaagcctagatcttgcccctctactccagcctgggtgacagagaaagactccgtctcaaaaaaaaaaaaaaaaaaga

SEQ ID NO: 936228 - DNA, 665 bp, Homo sapiens
tttcatgatgaaactaatttcgctatgttctccagtttaggatgacaggaagagctttaccacaggtatcttataagaaatatgtgcactctaattgcatattgtatggtgatttcctcaacaaattatagcaaacaaactaatttmtctttaagcaaccactggatcttaataagtcctgggatggaagctgtgccattaaggtttgttcaagcagctactttaatacgtgaccactgccaatttaccttgtataggttcataacaaagcagttccaaaattgtatgcctgtcatgtagtatatctttagctgaagattttaagatttcaccaaggttaattaacccttgaaagtaaatactcagatattaaaaataaatctaaagcatcatgaggtcattgataccatgtaagcttagagatgccagaaatgttggtggattagatcagttttctaatctgaactcccaaaatatgaggcaaaactaaaggtgaatggagaattgggctaatccagagggtaaacatgcacacatgtgagtgcaagtgtgtgcttgcatgagatatgtaccctctgcggccctgagaaagtagcagcagagatagacttctcagggacacctgggcactgcccctgcctttacacatttgtcaggtatattgg

SEQ ID NO: 936229 - DNA, 665 bp, Homo sapiens
tttcatgatgaaactaatttcgctatgttctccagtttaggatgacaggaagagctttaccacaggtatcttataagaaatatgtgcactctaattgcatattgtatggtgatttcctcaacaaattatagcaaacaaactaatttctctttaagcaaccactggatcttaataagtcctgggatggaagctgtgccattaaggtttgttcaagcagctactttaataygtgaccactgccaatttaccttgtataggttcataacaaagcagttccaaaattgtatgcctgtcatgtagtatatctttagctgaagattttaagatttcaccaaggttaattaacccttgaaagtaaatactcagatattaaaaataaatctaaagcatcatgaggtcattgataccatgtaagcttagagatgccagaaatgttggtggattagatcagttttctaatctgaactcccaaaatatgaggcaaaactaaaggtgaatggagaattgggctaatccagagggtaaacatgcacacatgtgagtgcaagtgtgtgcttgcatgagatatgtaccctctgcggccctgagaaagtagcagcagagatagacttctcagggacacctgggcactgcccctgcctttacacatttgtcaggtatattgg

SEQ ID NO: 936230 - DNA, 628 bp, Homo sapiens
tgataccatgtaagcttagagatgccagaaatgttggtggattagatcagttttctaatctgaactcccaaaatatgaggcaaaactaaaggtgaatggagaattgggctaatccagagggtaaacatgcacacatgtgagtgcaagtgtgtgcttgcatgagatatgtaccctctgcggccctragaaagtagcagcagagatagacttctcagggacacctgggcactgcccctgcctttacacatttgtcaggtatattggctcatgggctcattctctttatcagagaaagattacaggtttctgatataaacaccaaaagatcaggtgatatattattgaaagttcactgcctattataatctgagtaatataaaataataatggcatatggatggtctgatggcaatattagtttcttctactagatagggaaggaggtgtctttctcttttcgtgaatttgggcctttgttgtaaatcaggagttgacatatttctggaacataagggaaaactacatccaaccagaatctaaccttttaatccatccaagagtttacttaattcacccaattaaaatatcgattctctacaatacctattcataatctctttagtccata

SEQ ID NO: 936231 - DNA, 574 bp, Homo sapiens
ctagaagcaaggagccagcaagtctagcaggtatggaagccccacctcagcttctctcccaacactcagcttttctcccaacatgccccccttctcttttttgtaaaaaccaccacagctatcattattattagcataaggtggcctctttttaaaaattaattgagcaaggcrgttgcaggctgtgcagcccttaattgccagttggtgatccagcttcatttttcttagtccttattccaaatggagttgctctggtttgaatgcttcctacatatctcccctttccctttcacaagaggacccttaatcctaggggttgcagaaggatgaaggtccatcttctgcaacttcttcatgctaaataggggtgatgatactcctgcctacctattggggtctcttgtattcagggtagagagcagttcagtcagaaagcattggtccattaagcatctataggtaaaactttggtgctccagcagtttctcagcgtggctcatactggggaacctcatccatggttgggatccacgagtccttctagtctcctgttccatggttgtacacatct

SEQ ID NO: 936232 - DNA, 644 bp, Homo sapiens
taatgggagtgctagaagcaaggagccagcaagtctagcaggtatggaagccccacctcagcttctctcccaacactcagcttttctcccaacatgccccccttctcttttttgtaaaaaccaccacagctatcattattattagcataaggtggcctctttttaaaaattaattgagcaaggcagttgcaggctgtgcagcccttaattgccagttggtgatccagcttcatttttcttagtccttattccaaatggagttgctctggtttgaatgcttcctacatatctcccctttccctttcacaagaggacccttaatcctaggggttgcagaaggatgaaggtccatcttctgcaacttcttcatgctaaataggggtgatgatactcctgcctacctattggggtctcttgtattcasggtagagagcagttcagtcagaaagcattggtccattaagcatctataggtaaaactttggtgctccagcagtttctcagcgtggctcatactggggaacctcatccatggttgggatccacgagtccttctagtctcctgttccatggttgtacacatcttgagggcacctacacagtttatctcctgcaaaaacacaagcataccctcaccccatttt

SEQ ID NO: 936233 - DNA, 650 bp, Homo sapiens
agtaaaactagacctctatctctcatcattacaaatattaactcaaaatggattaaatacttaaatgtaagacctaaaaagataaatctactagaagaaaacatagggaaaacattttgtgatatttgtctgggcaaggatttttcagacctcaaaagcataggcaacaaaagaaaaagtagttaaatgggattattctgcatctagaatggttaatcctttccagaaggctttccattcactttgcccagatccatcagaggaatcgctgtctatggaagctatggcattataaaatgagtttcttaaattataaggcttgaaagtcaaaattactccttgatccatgggctacagaatggatgttgtgttagcaggtaggaaaacattaatctctttgtacatcctcatcagaactcttgggtaaccaggtacattgtcaatgagtagtagtattttgaaagccwtttaaaaaaaataggtctaaacggtgagcttaaaatattcagtaaataatgctgtaaatagatgtactgtcatccaggctttgttgttccatttatgtggcacaagaagagcagcttttagcataattcttaaaggccctaggatttttggaatggtaaataggcattggcttcaacataaag

SEQ ID NO: 936234 - DNA, 539 bp, Homo sapiens
tgttctcaatttcatttagaaatacatattttaaaaatacatagaccaatatggcctgcccaaacagatatttaacatggtaaatataaggaataaattgtttgaatataaatatctataaaaaaataagtacatcaaaattcaatccaacctctttcattagccggttatataaaggaaaataattttactgctttaaagcrtaacaaacacttacttttcaatatatttcataaacaaccctataccattgtgtctccaaaaatcaaggacagggaatctcctgatttaatgatcttttttttcttatggatcagagctagtagattaccatgaaaatattatatctactgctgacacattagaccagacttctacgaggctaggatttagtatgggggatggaggaaggggcagcaggggtgggaagagtttggggaggcaataattaaatgtgggaaatacttctgccagagtgcaatataggtgaggtagactcatattcatgaaacatatcctgatttatggtagtaacagtt

SEQ ID NO: 936235 - DNA, 551 bp, Homo sapiens
aacatcaacatgtgaaaaggcaggttatgaagtaatatgattccatttttaaaatatgtaaagaaaaatttatatgtacacacacatagaggagaggaacttcattcttttttttttttttttttttttttgagacagagtctcgctcttttacctaggctggagtgcagtggcatgatctcggctcactgcaacctccaccttctggtttcaagygattctcctgcctcagcctcccaggtagctggaattacaggcgtgagccaccatgcccagctaatttttgtattttaatagagatgagatttcatcatgttggccaggctcgtctcgaactcctgacctcgtgatccacctgcctcggcctcccaaagtgctgggattacaggtgtgagccactgcgcccacccaggaacttcattcttgaagagttagtgtgacagtcatggctttcccctgctttggacatgatcgaacccaaggtttccatatccactgtccacctggaccttgaccgtaattaaagtcatgagctcacctgcaactgtact

SEQ ID NO: 936236 - DNA, 560 bp, Homo sapiens
tgccaccacgcctggataatttttgtatttttagtagagatggggtttcaccattttggctaggctggtcttgaactcctgattcaagtaatcagtccaacctcagcctcacaaagtgctgggattacaagagtcagccactgcgcgaggcctaggccttagtgatttaactctatctgctgtcccctcccctcttgagaagtggactgtcgggtggggctgaaagttccaaccttttaatcctggctggatctttctggtggctagaccccatctagaagctctcgaggcacctccctccctccgcagctttgagtcatctcatgagaatacaaaagacgctctttatcactcacgagattccagtgttttaggaagtctgtgccaggaacctggggacaaagaccaaatacagtmatgttccacataagccactggcctcatttatgatggtggttccataagattatgatggggctaacaaattctatcatccagtaacattgtcaccgtcatagtgcaacacattactcagtgatgctggtgtaaacaaacccact

SEQ ID NO: 936237 - DNA, 657 bp, Homo sapiens
aaaacagtgtaaaccggcagtgtaaacaagagcagggcatgtatgagtagttgagaacggtgaataggagtatgactagacagaagatagtagggatgacaagttttttggggggcacagtctaagttggtctggtgtctggaatgagactggggcctaataaaaaggagcgtctatacaggagcttaaatgggctgtaccctgtagcattctgaamacaggcctgaattctgagaagggaaagtggtaaaagtattgtccagtcctttttaagttggtggctgagcttggtgaggtgtgtttttaaaagacctttagtccattctacttttcttgaagatggaggaacgtaagggatataaaggtttcactgaatactaagagcctgaaaaactgcttggctgatttgactaataaaggctggtctgttatcagactgcatcgaggtgggaaggctaaactgaggaattatgtctgacagaagggaagaaatgactgcggtggccttctcagaccctgtaggaaaggcctctacctatccagtgaaagtatctacctagactaagaggtattttagttatctgactcagggcatgttgagtaaagctaatttgccagtcctgggtggggcaaatcctcgagcttgatgtgtaggga

SEQ ID NO: 936238 - DNA, 614 bp, Homo sapiens
actacaggtacccgccacctcgcccggctagtttttttgtatttttagtagagacggggtttcaccgtgttagccaggatggtctcaatctcctgacctcgtgatctgcccgcctcggcctcccaaagtgctgggattacaggcgtgagccactgcgccaggcgatgctattcttatatgaatgacagctctacatttctgtctacatatataatgctatatatatgctatgctattctatatattattctatatataatatatgttatgctattctatattattctatatatratatagaacatatcctatatattattctattatatatgttatgctattctatatattattctatatataatatagaatatattctattatatgtaatatagaatatattctattatatgtaatatagaatatattctatatatataatatagaatatattctattatatgtaatatagaatatattctattatatgtaatatagaatatattctatatatataatatagaatatattctattatatgtaatatagaatatattctatatatatagaatatattctattatatgtaatatagaatatattctatatatata

SEQ ID NO: 936239 - DNA, 602 bp, Homo sapiens
taaagcaggtattaaatatgtttgctgatacatataacagcgccattcttatcattacttttatttgttttggaaaagtaaaactgtttttcataaaacatgctatgctatattattcatgttaacttatgagtttatcattttataagaattaataaaggaaataaggcagagtagagagcactagtaaacctatctccccacctagacaacaattgtactggcagaatatatatatatatatatatatatatatatatatatatatatacatatatatatatwttttttttttttttttttttttttttgagacggaatctcactctgttgtccaggctggagtgcaatggtgtgatcttggctcactgcaccctctgcctcttgggttcaagcaattctcctgcctcagcctcccgagtagctgggactacaggtgtgtgcaaccaagccaggctaacttttgtatttttagtagagacggggtttcaccacattggccagactggtattgaactcctgacctcgtgatccaactgcctgggcctcccaaagtgctgggattacaggcatgagccaccacgtctggcctagaatatttt

SEQ ID NO: 936240 - DNA, 561 bp, Homo sapiens
aggatacaaagtcaacatataaaaatcattaatatttctatatgccaacaacaaacaatctgaaaaagaaaccaaacagtaattccagttataatagctacaaataaaattaaatgcctagaaattaacataaggaagtgaaagatctctacaatgaaaactataaaacattgatgaaagaaattgaagatgaccctaacaaatggaaagatattccatgttcatggattggaagaatcratattgtttaaatatctatattttccaaagcaatctatagattcaaagtgatctgtgtcaaaataccaatgacaatattcatagaaatagaaaaaaaaaatcctaaaatgtgtatggaacaacaaaagactcagaatagccaaagctgtcctgagcaaaaagaataaaactggaggaatcacattacctgacttcaaattaaactacagagctatagtaaccaaaacagcatggtgctcacataaaaacagacacatagaccaatagaacaaaatagacaactcagaaacaaatccatacacctacagtgaaatccttgat

SEQ ID NO: 936241 - DNA, 561 bp, Homo sapiens
aggatacaaagtcaacatataaaaatcattaatatttctatatgccaacaacaaacaatctgaaaaagaaaccaaacagtaattccagttataatagctacaaataaaattaaatgcctagaaattaacataaggaagtgaaagatctctacaatgaaaactataaaacattgatgaaagaaattgaagatgaccctaacaaatggaaagatattccatgttcatggattggaagaatcgatattgtttaaatatctataytttccaaagcaatctatagattcaaagtgatctgtgtcaaaataccaatgacaatattcatagaaatagaaaaaaaaaatcctaaaatgtgtatggaacaacaaaagactcagaatagccaaagctgtcctgagcaaaaagaataaaactggaggaatcacattacctgacttcaaattaaactacagagctatagtaaccaaaacagcatggtgctcacataaaaacagacacatagaccaatagaacaaaatagacaactcagaaacaaatccatacacctacagtgaaatccttgat

SEQ ID NO: 936242 - DNA, 811 bp, Homo sapiens
ttctcctcctgcattagtttcctactgatgctataataaattaccacaaacaaatgcaccatcttacagtcctgtggttagaaatccagcatgggtgtccctgggctaaaatcaaggtgtcagtgcagcgggtttcttctggaggctctatgggaaaatttgtccccttaccttttccagcttctagaggctgcctgctctctgtggctcgtggactttttctccatctccaaaaccagcaatggcaggttgagcccttctcacatcacagctcatctttccaacctactcatatgcctcgttcttccatttctrtggaccctgtgattacagtggccacctggaccatccaggacaatttccctattttaaggtcagcggattagcaaacttaatttcatctgcagcctaattcctctttcccaggtagcctcacatattcacaggttggggatcaagaggcgaacatctctgggaagacattattctgcctagcccgtgttggaactggctgggtgcagtggctcacacctgatatcccaacactttgggaagccaagatgggaggatctcttgaggccaggagattgagactagtctgggtagcatagcgcgaccctgtctctacaaaaaaagaaaaaagctggatgtgatggtgcacacctgtagttccagctccttgggaagccaaggcaggaagatcttgagcccaggagtttaaggctgcagtgtaccatcatggttgtgccactgtactctagcctgggtgacagcgagaccttgtcaaaacaaaaaaacaaaaaaacaaaaa

SEQ ID NO: 936243 - DNA, 508 bp, Homo sapiens
tctcagttatttctgtatgcccacccagcaaatggtattgatgggtggaagtaacccacaggggttgtggcaggacctgaggctggtgattcatatgtacacacagcaccagcttcaccaaatgcactcagagtctgaattctctggctgtggtttgtaacaccaggccatgtaaaatgtccactcacagactgtattccggtatgagagagacatacactatatataaayggggagccaaatggcaatggccaagatgcagagatataggtttcactttcactggccagcctccataactgtcaatgtaagcaggtttgcctggaaacttatctgggttcccataaacaaggctgcaagctgcactagtatccaccagcaccagcatccactgtacattggtggggtaccaatggatcactaattccacatgtggcctctagttgtccagtgtcccgcaagctgggcacctcagccagttccttaatcaaacagaaaaggctctaca

SEQ ID NO: 936244 - DNA, 838 bp, Homo sapiens
gtctttgagctaaagcacccaggtgggacccagttgcacagcaatgtcattctcccccttggctttttctggaattgctgctccggagacaattgtctccacaaagttaagagtactttattgggctgcttttttatttttctctcattcaaccctgtccaaaatcaaatctatccacatctgtgagcatrtcactcattggggcccccttttctcccatggggggcccctgagggcagggcagggcatcttccccttcttcatggcacagacccctcaatcccatcaatagccttctgcttccccaagagccgccatagcagtggtcacttcatgtatgtggtgccctacatatagggtgaaggccgcagatagggaaccaaaggcatgagatccctcatgtgggaggtgaaatgttcatcatctggcccccaggtattcaggtaaaacatagcctgctgcatacccatctcctggatgacttccaccaaattggcatacgactgccatttactctcagttttgggtatttcaccagcgtcattccacacagtccgtatggctgcccattgccactcaatcagagtgtggtcatgttgctcttgtgccaacggcctgctcacctgcaaccactgacagagggatgagtgagttatgatagaggccagcttttccatctcagaggcagaacaggagatactatctgctccctcatcccacaaacgaagcatccgggtgggcagaggttctcctggaagctggctgcactgcttgcctaattcccacaactcagttggggtataggcagtatatgaagtatgttgcgttatggtggggg

SEQ ID NO: 936245 - DNA, 838 bp, Homo sapiens
gtctttgagctaaagcacccaggtgggacccagttgcacagcaatgtcattctcccccttggctttttctggaattgctgctccggagacaattgtctccacaaagttaagagtactttattgggctgcttttttatttttctctcattcaaccctgtccaaaatcaaatctatccacatctgtgagcatatcactcattggggcccccttttctcccatggggggcccctgagggcagggcagggcatcttccccttcttcatggcacagacccctcaatcccatcaatagccttctgcttccccaagagccgccatagcagtggtcacttcatgtatgtggtgccctacatatagggtgaaggccgcagatagggaaccaaaggcatgagatccctcatgtgggaggtgaaatgttcatcatctggcccccaggtattcaggtaaaacatagcctgctgcatacccatctcctggatgayttccaccaaattggcatacgactgccatttactctcagttttgggtatttcaccagcgtcattccacacagtccgtatggctgcccattgccactcaatcagagtgtggtcatgttgctcttgtgccaacggcctgctcacctgcaaccactgacagagggatgagtgagttatgatagaggccagcttttccatctcagaggcagaacaggagatactatctgctccctcatcccacaaacgaagcatccgggtgggcagaggttctcctggaagctggctgcactgcttgcctaattcccacaactcagttggggtataggcagtatatgaagtatgttgcgttatggtggggg

SEQ ID NO: 936246 - DNA, 649 bp, Homo sapiens
gtgtggtcatgttgctcttgtgccaacggcctgctcacctgcaaccactgacagagggatgagtgagttatgatagaggccagcttttccatctcagaggcagaacaggagatactatctgctccctcatcccacaaacgaagcatccgggtgggcagaggttctcctggaagctggctgcactgcttgcctaattcccacaactcagttggggtataggcagtatatgaagtatgttgcgttatggtggggggatccctaagcctgcccttcgakccccagtggctgttcatgatctaccttctgacagaccactgggcaagcctgcaacagaggttcttcctcctcggcatcagacccagtgggggtctctggccaagatgacggacccaggcctgcatttacagcagcctctaattccttttccaagctgtgtagccaggccttcaggcatcccacctgtgcctggaggtccccattcacagcagcttctaactctttttctgagctgtgtagccaggcctccaggcaccctgcctgtgcctggagggcccttactgcactgcatccctcaggtactgggtgtgtgcttctcatagtgcaatcaaaaatgcccatccaactctgcaggcaaaggctcactccttct

SEQ ID NO: 936247 - DNA, 618 bp, Homo sapiens
acagcagcctctaattccttttccaagctgtgtagccaggccttcaggcatcccacctgtgcctggaggtccccattcacagcagcttctaactctttttctgagctgtgtagccaggcctccaggcaccctgcctgtgcctggagggcccttactgcactgcatccctcaggtactgggtgtgtgcttctcatagtgcaatcaaaaatgcccatccaactctgcaggcaaaggctcactccttctcagtgctctgtgcttccagctgcttcaacaccttctccatgctcgcrggggacccatctaccactgcccaggtttccagtggagcccatccgaccagcacagctgacactgggtaccacaacctgtgttgccaccacatggccaaccgggaatcagtgtggaccaaaggtgcactcccctcaggattctattcacaatgccaattatcaggttataaccaaagaccaaggggagtcagtgggcaagtggcgggtagctagaaaaacactcaaggaatcgtaggcagcttcaatatggctttactctctctctgggtgtgagcaagctgcatgtacagcgttagcagggtaattataacttttacagacaata

SEQ ID NO: 936248 - DNA, 618 bp, Homo sapiens
acagcagcctctaattccttttccaagctgtgtagccaggccttcaggcatcccacctgtgcctggaggtccccattcacagcagcttctaactctttttctgagctgtgtagccaggcctccaggcaccctgcctgtgcctggagggcccttactgcactgcatccctcaggtactgggtgtgtgcttctcatagtgcaatcaaaaatgcccatccaactctgcaggcaaaggctcactccttctcagtgctctgtgcttccagctgcttcaacaccttctccatgctcgcgggggacccatctaccactgcccaggtttccagtggagcccatccgaccagcacagctgacactgggtaccacaacctgtgttgccaccacatggccaaccgggaatcagtgtggaccaaaggtgcactccyctcaggattctattcacaatgccaattatcaggttataaccaaagaccaaggggagtcagtgggcaagtggcgggtagctagaaaaacactcaaggaatcgtaggcagcttcaatatggctttactctctctctgggtgtgagcaagctgcatgtacagcgttagcagggtaattataacttttacagacaata

SEQ ID NO: 936249 - DNA, 579 bp, Homo sapiens
aaactccagagatctggagggtccccctgaagaatttggctgagtccttgaaagcatacacaggtgagtcagttgtcagacgctgagaaaccactggaaaggaggggggttcacacagggtcagggatggtttgtttttccaacagcctgagaagaaaagccttgtaattcatggggcattgggaagacacagaagagctttgactgagtgatgaggggaaattagccctagactaaaggctgctgtggtctccctttaaaaagcttaaaagcaagcctcaaaatgattaaacgatttcagagtaatttagctgccttccaaaatgaagctcaaaagtatctatgggaatttaattatacctagcattcaacaaggcaaaatttacagtgttatccgtaaaaatgagcaggcctgcaaagaagcrgcgaagagcaactcataatgggagaaaagtcaatcagtagaaagaaatctggaagtgaggcagatgagactcttcaattagtagacagggacattaaaatagtttttataactgtattccttatatttaaggtgatagaagaaaaatatatttt

SEQ ID NO: 936250 - DNA, 613 bp, Homo sapiens
ttctttgcattgaattacaacatgctcctttagctccgcgaagttcattattacccaccttctgaagcctacttctgtcgatttaggcattttagcctcagcccagttctgtgtccttgctggagaggtgttgcagtcgtggaggagaaaaggcgctctggctttttcagttttcagcatgtttgcattgattctttctcatgtttgtaggcttatctatctttgatctttgagatctctaaccctatccataacctttgaatgaggttttggtggggtcttttttgttgatgttgttgttttctgtttttcttttaacaggccattctactgtagggctgttgccatttgctggcggtctactccagatgccagttgcctcagtttctcccatacctrgaggtactaccagtgaatactgtgaaacagcaaagatggcagccagctccttcctctggaagctctgtcctagtggttactgacctgttgctggcccacacccacctgtaggaggtggctggagacccctactgggaggactcacccagtcaggaggaacaggatcagggatctggctgctttttggtagagccaatgtgctgcactggagatg

SEQ ID NO: 936251 - DNA, 733 bp, Homo sapiens
ctcctagaattaacttgcatatatcttttagctcagatcatttgtgaaagcttaaattcacaagttcaatttaagtgagtatttatttagcattatctgttggtagatcattcctggccaaaaggaaaaaaaacaaaaaacaaaaaacaaccaaaccaaaaaaactcagaaaactggagacacgggcttggcctcccagcctacatccttctcccatgctggatgcttcctgccctcaaacactggactccaaggtcttcagttttgggacttggactggctctccttgctcctcagcctgcagacggcctattgtgggaccttgtgatcatgtcatggctatgatcgtaatcaatccatgaactgaaaatactggagatctggcaagatggccaartaagaacagctctggtctgcagctcccagcaattccaacgcagaaggctggtgatttctgcatttccaactgaggtacctggttcatctcaatgggactggttaggcattggttcagcccatggagggtgaccagaagcagggtggggtgttgcctcacccaggaagtgcaaggagctggggactgctctcccccagccaagggaagccatgagggatggtgctatccagcccagatactatgcttttcccacagtttttgcaatccgcagatcagaagattcccttgtgtgtctacaccaccagggccctgggtttcaagcacaaaactgggcag

SEQ ID NO: 936252 - DNA, 849 bp, Homo sapiens
acatgtgctttttacatggaaataagttttttaataggtaggtttttgagttattttaaggttattttccttacatattcctagggttaataaaaacgtaaaactgcctggcttgtgtctattctcaggatgtaagaagtgaaactcctagaattaacttgcatatatcttttagctcagatcatttgtgaaagcttaaattcacaagttcaatttaagtgagtatttatttagcattatctgttggtagatcattcctggccaaaaggaaaaaaaacaaaaaacaaaaaacaaccaaaccaaaaaaactcagaaaactggagacacgggcttggcctcccagcctacatccttctcccatgctggatgcttcctgccctcaaacactggactccaaggtcttcagttttgggacttggactggctctccttgctcctcagcctgcagacggcctattgtgggaccttgtgatcatgtcatggctatgatcgtaatcaatccatgaactgaaaatactggagatctggcaagatggccaagtaagaacagctctggtctgcagctcccagcaattccaacgcagaaggctggtgatttctgcatttccaactgaggtacctggttcatctcaatgggactggttaggcattggttcagcccatggagggtgaccagaagcagggtggggtgttgcctcacccaggaagtgcaaggagctggggactgctctcccccagccaagggaagccatgagggatggtgctatccagcccagatactatgcttttcccacagtttttgcaatccgcagatcagragattcccttgtgtgtctacaccaccagggc

SEQ ID NO: 936253 - DNA, 683 bp, Homo sapiens
cacagcctgcctggctctgccccaccctcggactcgaagctgtgagtcaaggccctttctcttggggccatgggcaccgtgatggaggcgcttcaccagcctggcaccacagcatcccccatgcacagcctggtgctaacacagagtaagccctcgtcgatatttgtgattggacacaaggatgactgagtgactatctgtgattggacacaaggatgaatgagtgagtatctgtgattggacacaaggatgaatgtaaatgagtgaataacaagagatggtcgaggtgatgcccgataaygctcccagcttagaaactcagtggctcctaatcttgccaacttgtgtccaggcatctaaagcccagcctggttttcctcacaggtcagagagatgatttgagaggctgtagcagagccacacactccagaatgtgtcccttgtatgtgaactgctgcacctgaaatcacaccattactcacacagctcaccctaaaaatgcaccgatctctggaagcagcattacttagagctgagagcagtgtgcattctgggacaagcagagttttctgggatcaaaactgagcgtggaatgaagccagttcaaggtccagccagacaaagctctcagtaaacgtccgtcacaggggccagacaaagctctcggcaaacatccgtcatgg

SEQ ID NO: 936254 - DNA, 631 bp, Homo sapiens
atgatgttttttttgaaattttacattctcattttgaaagagcttcacaaaacttacatgagaatctggatgctcataagaggtctgattttttaatggcatgtttgtatttctgttatgtacatcaatgtcaagcattcgtttcctgagctgttctctacaacacaatttaacttgtaatggacactcaataaatggtcggttggatattcaaatcaacaccttagttccatcaattttcatttcatataaaaatgcctgatcttctatactcaccaatgaaacagagagcgatgaaggagggagagcagttgagactgagaggatgacaagcagacctcattctgcagtggatttcctacactctccacttctgaatgcttggaaacacttgccatgctyaaaaaatattggtatttcctaggcagcaaatgggagttaaagaaagtccatatttctatattgcaataacttacactataatacacagacaacatacatttctaagctatttcaattcatagaaaatgtagataaatttaggtgagcaaggtgtaggagaagggttagtaatcaagctgagtgtgattgtgagattaaatctaatattatgcaattattgtataattgt

SEQ ID NO: 936255 - DNA, 631 bp, Homo sapiens
atgatgttttttttgaaattttacattctcattttgaaagagcttcacaaaacttacatgagaatctggatgctcataagaggtctgattttttaatggcatgtttgtatttctgttatgtacatcaatgtcaagcattcgtttcctgagctgttctctacaacacaatttaacttgtaatggacactcaataaatggtcggttggatattcaaatcaacaccttagttccatcaattttcatttcatataaaaatgcctgatcttctatactcaccaatgaaacagagagcgatgaaggagggagagcagttgagactgagaggatgacaagcagacctcattctgcagtggatttcctacactctccacttctgaatgcttggaaacacttgccatgctcaraaaatattggtatttcctaggcagcaaatgggagttaaagaaagtccatatttctatattgcaataacttacactataatacacagacaacatacatttctaagctatttcaattcatagaaaatgtagataaatttaggtgagcaaggtgtaggagaagggttagtaatcaagctgagtgtgattgtgagattaaatctaatattatgcaattattgtataattgt

SEQ ID NO: 936256 - DNA, 637 bp, Homo sapiens
caagttcaagttctgtgactcactggctctgtaattctgggtaagtctcttgctctccttgagtctcatatcctccttggtaaaatggagaggtagagctattgttagattttgaaggcaaggcaagggttaaagaaagacagagaaagacagttgacggcttcaacagcaacacctttattactagcaaaaccctgcagaggaggaaaccagcttactgccagcaccaactgcctctcacaggctggggtgatcatgggactgggaaggaggggtstgggcggtagagcttgctgcccggcaggatatggcaaggatgttcctgcagtcaggctgttgggcctttgcccgggagggtgcgataaggatgtttctacagtcaggtgatcaggaaggatgcttctcacggcccgagttcccaaggaatgtttcattctgaccagggtgtgcaaaatggctgcaggtttacaaaatggtacaggttagactaacagcaacatctcccaggtagacagttctataaagtaaacttcccttgagcacctacactgtactagacatggtgctaggacccaggccacaggaggaataggacagatgaggcccctgccatcctggtgctcatgcctgatgaagg

SEQ ID NO: 936257 - DNA, 607 bp, Homo sapiens
acactgaggtttttccttacatactcttgagtctagacaaaggctcccaagcctgtgcacctgctggcttaacactatgtggaagccaccaaggcttgcagcttgcaccctctgaagcagtgaaccaagctgtacctgtgcatctttcagccatggctggagctggagctggagctgcagggatgcaggcggcactgtcctgaggatggacacagcagcgcgaccatgggactgacccaggaaaccattctttggtcctagaactcagggcctttgacagcaagctctgctgcaaaggtctctgaaatgccttcaaggcctttttaacattgtcttagctattagcactgggctccattttatgcacatttctgaagccttcttgaattttcccactraaaatcagcttttctttttgacctcttgggcaggctgcaaatcaaacttcaaagctctgcttctcatttaaatataagtttcaacttgaggtcatttatttggtcacacagaacaccacaggctgttcaatacagacaagatacctcttgagctttgctgcctagaagttcatttcaccagatataccctaaatcatcaccctcaagtt

SEQ ID NO: 936258 - DNA, 622 bp, Homo sapiens
ggagacatgtcagcccatcacacttctgaatttacatgtgattcctctatgcagacaactttgcatcccctgaggaaagatagtggtttttcttaagagaaaatgacatttgtaataggaattttaagattttattacttcttctttcatctcctcaaaggaatgaagaaatgktggtgggcagatcttcctttcccatgcagtattttccaattaataatacttctttacctcaagaatattttctctttcagaagatggtaagtttaatatgcattttatttagtatataatatgatacaaactatgaagaacataaaggctatttgtaacatatggtgcccaaatctaaactgggatgaaggcacaagatgtcccagcactgtcctccagtggtgtcctggcctaacaccatcatcctaaatttcagttctaatgccttagcaaatggccagggtgtcaacagaaaagggatggacggcagtgacgacatactgcagtccaagtgaaatttgagtagagagttctaatgtaaatgactattttaaaagacgtttgcagtggccagacatggtggttcacacctataatcacagcattttgggaggccagggcaggatca

SEQ ID NO: 936259 - DNA, 622 bp, Homo sapiens
ggagacatgtcagcccatcacacttctgaatttacatgtgattcctctatgcagacaactttgcatcccctgaggaaagatagtggtttttcttaagagaaaatgacatttgtaataggaattttaagattttattacttcttctttcatctcctcaaaggaatgaagaaatgttggtgggcagatcttcctttcccatgcagtattttccaattaataatacttctttacctcaagaatattttctctttcagaagatggtaagtttaatatgcattttattyagtatataatatgatacaaactatgaagaacataaaggctatttgtaacatatggtgcccaaatctaaactgggatgaaggcacaagatgtcccagcactgtcctccagtggtgtcctggcctaacaccatcatcctaaatttcagttctaatgccttagcaaatggccagggtgtcaacagaaaagggatggacggcagtgacgacatactgcagtccaagtgaaatttgagtagagagttctaatgtaaatgactattttaaaagacgtttgcagtggccagacatggtggttcacacctataatcacagcattttgggaggccagggcaggatca

SEQ ID NO: 936260 - DNA, 588 bp, Homo sapiens
tcacaatgctgatagtgatatggacaatgaagtgcaggctgaggtggtctcaggcggagatgaggaacttgttggaaactggagtaaaggtcactcttcttgtgctgtagcaaagagactggtgacgttttgtccatgtcctctatagatagagatctgtggaattttgaacttgagagagatgayttatagtatctggtggaagaaatttctaagcagtaaagcattctaagaggtgacttgggtgctcttaaaagcattcagttttatgcattcacaaagatatggtttggaattgtttaaaagggaagcagagcataacagtttggaacatttgcagcctgaggatgagacagaaaagaaaaacccatttctgaagagaaattcaagtcaactgcacaaatttgcataagtaatgagccaaatgttaatcaccatgacaatgggaaaatgtctgcaaggatgtcagaggtctttatggcagcccctcccatcaaaggcccagaggcctaggaggaaaaaatggtttcatgggccaggtccagggccttgctgctttgtgcagtttcaggacttggtgccctgcat

SEQ ID NO: 936261 - DNA, 633 bp, Homo sapiens
aaatagagccagggaaggccatgcaaaaaaggattcttgggcttgtatgcctgataacaaaaaattatcacagaagactgcaaaaaacacaatcttgcacaaagcccattgcaactttgcacacaacaatgcttctgaaggatatttgcccaacaactgcctgtccarcctgggcctggcctcacctttgttattgatctttgtagccaaggataatcatttccaaatgatcatataatcttcctcattttttcttttgtcttcctttacctccgtgaatatgcatatagtttactctggcttgcctatttctattgcaaggctctgtttccaaacgaatatctttttcttgtggagagcctctctctgtttgttatttagggtgacaagagaaatgtgaacatttgagagctcaggtaaaaggccttagtctatagtgaaacttttttgcacccttagatgcttacttccactacaacttgcaggtgggccttgaaaagttcttggaataagtttgagcttcgatcttgtccggttcatttagcatagattctcaaaatgtggtccctggacccacagcattagcatcgcctggagattgttagaaatgcaaatcatcgggcctcattccag

SEQ ID NO: 936262 - DNA, 633 bp, Homo sapiens
aaatagagccagggaaggccatgcaaaaaaggattcttgggcttgtatgcctgataacaaaaaattatcacagaagactgcaaaaaacacaatcttgcacaaagcccattgcaactttgcacacaacaatgcttctgaaggatatttgcccaacaactgcctgtccaacctgggcctggcmtcacctttgttattgatctttgtagccaaggataatcatttccaaatgatcatataatcttcctcattttttcttttgtcttcctttacctccgtgaatatgcatatagtttactctggcttgcctatttctattgcaaggctctgtttccaaacgaatatctttttcttgtggagagcctctctctgtttgttatttagggtgacaagagaaatgtgaacatttgagagctcaggtaaaaggccttagtctatagtgaaacttttttgcacccttagatgcttacttccactacaacttgcaggtgggccttgaaaagttcttggaataagtttgagcttcgatcttgtccggttcatttagcatagattctcaaaatgtggtccctggacccacagcattagcatcgcctggagattgttagaaatgcaaatcatcgggcctcattccag

SEQ ID NO: 936263 - DNA, 738 bp, Homo sapiens
tgtgtgtgtgtgtgtgtgtgtgtgtgtagccattttctctttctgatattggtaatttatatttttttctttggtagtctggctggaaatataaattttatcgaaattttccaagaaccaagataccatgtaagttatgtatttcacagactatggtttggtttgtccccaccagaactcacgttgaaatttatttatcaatgtggcactattgggaggtagaacttagcaggaggtgtttgagtcctagggtgcatccctcacaaacagattaatgccctcctgtgagaatgagtgagctctgctctcttgggactgaattggttcctgagagartgggttgttaagaggagtctggattccttggttttgctctctggcttcctctcttgcatggggtcctttgcacacattgactcaccttctgctttctgccagagtggaagcagcgtgagcatctccccagatgccgacgcccaaccttgaactttatagccactggaatcatgaaccaaataaacctcttttctttataaactacccagtcacaggtattctgttataacaacactaaatggatgaatacaccactcctaagaacttaccccaaataaactaaagcgtatgtctaaagacacgtacacaaaggttcgtagcaactttatctgttatagccaaatctagaaagagcccagatttcttcaatacatgaatgtttaagcaaactgaactgtagta

SEQ ID NO: 936264 - DNA, 646 bp, Homo sapiens
acagctaatgatatttcttgcaaggacacaccactcttgtaaagtgtcataaaaccctcttcgttgggtgacatctgctttcttatttagtgagaaactttgttcttcaaagtcatagactatcagaaatgtgatgttgaaatcacatcagtatgcatgaaacatctctctcttggattgcttggttgcttggtttgggcttcagtttttttaaacacacatttattatcccacagtttctgtaggtcagaagtctgggtgggctcccttggctcttctgctaagggtctcataatggtaaaatcagagtattggccaggctgcattcttttctggaggctctggggaagaatgtttccaagatcattcaggttgttgcccaaattcagttccttgcagttgtaggactagggtcccatttccttgctggccgtgtgagcctactggtctctgttcttggaggtttcccayaaaaacatccccctcttacctggaagatttcagctattttaacattaaaaaaaaaaaaaaaaaaagcagcccagagttaacaactcatgtgcaaaccttcaaataagaggtttctggctgcaatattttacatctaccttaactttggtatttcaaagtaattaacaggacctta

SEQ ID NO: 936265 - DNA, 570 bp, Homo sapiens
agccaaactatatcactgcatacatttctagtttttggtgactgaagcatatacttttttcctgagtggtggtataaagtctgagtttttcattgctcaacaaaccttctcttcagtacctaggattcctggggaagtgtagctgcaaatgtccacacaggatgggattctgacacatttaaactcactgttgtaccatcacctctttatatgtggtattatgtcattcagaaagaacttgcacaatatatatggttttattttgactcattctcaccatcaaaaaggttctgccctcattaacaatgtgaatacccaagtgcccatgcaatatctgcccccatgttcccagtagccgagaaagtacacagatctgagttaatatctagactcaratggacctgataaaaatttgtctgaggatcgtaatcgtacatgcattttccacagcacagcccctgacccttggtagattttgatatctagctacagtggtttgtactggtgccccaatctaatgacatattatataaaacttgtttcttgcttacttcatgttgtcctcttaag

SEQ ID NO: 936266 - DNA, 619 bp, Homo sapiens
cgtagcctcaccagcatctgttgtttcctgactttttaataattgctattctggctggtgtgagatggtgtctcattgtggttttgatttgcatttatctgatgatcagtgatgttgagcttttttaaatgtttcttggccgcataaatgtcttcttttgagaagtatctgttcatatccttctcccactttttgatggggttgttttttacttgtaaatttaagttccttgtagattctggatattagacctttgtcagatggatagwttgcaaaaattttctcccattctgtaagttgcctgttcattttgatgatagtttcttttgctctgcagaagctctttagtttaattggatctcatttgtcaattttggcttatgttgcagttgcttttggtgtttttatcatgaagtctttgcccatgcctatgtcctgaatggtattgcctaggttttcttctagggtttttatggttttgggttttacatgtaagtctttaagccatcttgagttaatttttgtttaaggtataaggaaggggtccagttgtagttttgtgcatatgggtagccagttttcccagcaccatttactgaagaggagatcctttcctcat

SEQ ID NO: 936267 - DNA, 481 bp, Homo sapiens
cctacctcctcccagccccgcactacctctcccagcctctggtaaccatccttgtatcttctctcttcagaagttcaatcattttgatttttagatcctataaatgagaatgtgtgatgtttttctttctgtgcctgacttatttcattagcataatgatctccagttccarccatgttgttgcaaatgacagaatctcattctttttatgactgaatagtactccattgtgtataagtaccacattttctttatccattcatctgttgatgaacacctaggctgcttccaaatctagccactttaagaaagaaccaaactgggctgggcatggtggctcacgcctgtaatcccagcaatttgggaggctgaggtgggtggagcacctgaggtcaggagtttgagaccagcctggccaacatggtaaaatctcacctctgttaaaaatacaaaaaattagccagacatggtggccggtgcc

SEQ ID NO: 936268 - DNA, 715 bp, Homo sapiens
tgaatagtgctgctgtgaaatatgggtatacagatatctcttcaagaccccgctttcttttgttttccttttttttttttttttttttttgagacagggtctcgctctattgtccaggctgaagtgcgtgccacaatcatatctcactgcagcatcaaaygcctgggcttattttcccgcctctgcctcccaagtagctaggatgacaagtgcttaccaccatgccaggcaaattttttgtttgtttttttgttagagacgagagcctcactgtgttgcccaggctggtcttgaactcctggcctcaagtgatcttcctgccttggcctcccaaagtgctgggattacaggtttgagctaccacccctggccgagaccttgccaccacactgcttaataaaaggctgggctgcattttgggattaggacctcctgtggaggtggggggagggtggggaaggagaacggtggcatcccagccaggaagcatgagggatggcatccgtccaccaggccacaggaagcataagggatggcctccatccacccggccacttctttccacatcagcattcttccgcacttgggccacacagggtctgcgagaactccaggtggctcttagagtggcactgaccaagtagtctgtgtagggggactcactgtgccccccatgctcagaggctgtatggtgaagtcgttaagggcccgggct

SEQ ID NO: 936269 - DNA, 666 bp, Homo sapiens
cacatgcctgtaatcccagctacttgggaggctgaggcaggagaattgcttgagcctgggaaacggaggttgcagtgagccaagattctgccactgcactccagcctggccaacagactaagaatctgtctcaaaaaaaaaaaaaaaaaagaaacagatttttctttttacctgaaactactaaaaaaaccacaaaatacatgaaacaacagcactcaagacattgtctagtaggcaaggaaggacagagattccwgagtcaggaaacaagcaagttgagctttacaactgccccaacttatcacatggataaagtttccaggctgcagcagagaaggaaggacccaggcagaacctggtgggttccatgaattgagaagatagacctagaagtctggagaagccaagacagcacaggggacggtactggagaaagttgcagagagaaagagagctctaaagatctcaagtactcagttgagtgatgactgccacatctatgtgtgaaacttccagaggctggggaaagaaccacctgaaagaaatacagggaacagtactaggagctcacacagtgccaagaataatcctgttcttaacagccagagtggaaaacctaatgatgtaaggagcatccattagagttttaaaaagagtcttgcctca

SEQ ID NO: 936270 - DNA, 834 bp, Homo sapiens
aagccgaaaaccgagtgttggcagacgcggctgctcagtgcaatgaggaagccggaaaccgagtgttggcggacgcggctgctcagtggaaccaggaagccggtgctggctctccaggcccacactgcacgccctgacatggctcctcagtggaaactcctcatgtacgtcggctcagggtgctctgggcagaagyggacatcgtgtgggtccttgaaagccctcactcagtcagtcaacaaacactgagcacctgctgcatgtcccacccaggtggagctgagcttctcctaggacaaataggattctgcccctctccctgtcccaaagctgtgtgcaaaggagctgtgtgtccgtccccctacagacagggactgtgtctttgctgccagacaacttgggccctggcacaggcctggtgccaaggcccaagtaggccaaggaagtaggggcgggggagggaggttggcaggcagggcgctcagagatgaggaggcacaccctccccgccatgcaggaggtcctcagctgtgagaatgacaccaggtgactgtcactttaacaaactcccactccgggctctgatgaccctcagctttgttgtcagaattaagtgcaaacactatgactgactccccacccccagtcatcacagcccggtggagtctgtgtgtctgtgtttaatacagaagtccccgaggggctgcattcccttcaggtcctcaggccccagtcagagaaaacggggtctgctggtctccaccctgtcccctccctgtccctggaccctgggtccgccaaagaagcaaagagaagattcaagtgcactcaacc

SEQ ID NO: 936271 - DNA, 672 bp, Homo sapiens
gaggggaaatgggagtgcacttgggtcacttcatgtttgaggtgcttctcagatacccaagggacatgttaagtaggtctaggctgagcacatcaatctgcaagtcaccagagtacttaacacagtgggactgggtgaagtgcccccaggtgtggggctaaagcaggggagtctgaggacggaccctggacacacccacactgcactgagttcagggagaggggctgaatgagactgagaaggagaggctagtatggcagggggaaatgtggaggatgaggccaggtgaggaagatgtgtcggcttctagggctgctgtcacaaaggtccatggattgaatggcttaaaacaacagaaatttactttctcacmgttctggaggctagaagtctgaaatcagagtgtcccagggccatgctgtctctgaaggcccttcaggagaatgttccatgccactccctagtttctggtggctgctgtcagtcttcgacgtccttgccttgtggctgcatcactcccatctccatctctgtcttcacgtgggcttctccctgtgtgactccaagtatctgtgtctcttctttttcccttacaaggacctcagtcatattggattaagggcccaccctactccagtatgaccacatcttcattacatttgcaaaaaccct

SEQ ID NO: 936272 - DNA, 672 bp, Homo sapiens
gaggggaaatgggagtgcacttgggtcacttcatgtttgaggtgcttctcagatacccaagggacatgttaagtaggtctaggctgagcacatcaatctgcaagtcaccagagtacttaacacagtgggactgggtgaagtgcccccaggtgtggggctaaagcaggggagtctgaggacggaccctggacacacccacactgcactgagttcagggagaggggctgaatgagactgagaaggagaggctagtatggcagggggaaatgtggaggatgaggccaggtgaggaagatgtgtcggcttctagggctgctgtcacaaaggtccatggattgaatggcttaaaacaacagaaatttactttctcaccgttctggaggctagaagtctgaaatcagagtgtcccagggccatgctgtctctgaaggcccttcaggagaatgttccatgccactccctagtttctggtggctgctgtcagtcttcgacgtccttgccttgtggctgcatcactcccatctccatctctgtcttcacgtgggcttstccctgtgtgactccaagtatctgtgtctcttctttttcccttacaaggacctcagtcatattggattaagggcccaccctactccagtatgaccacatcttcattacatttgcaaaaaccct

SEQ ID NO: 936273 - DNA, 774 bp, Homo sapiens
ggctgtatttaactttcatattttttcagaaacctttaactttttcaaaaagtttattctatatgtggaggcttcaaaaagtttatggaaaaatggaattaaaagataaaaaatataaactttatttctcaacataagtgtcatcaagttcaggacacttttgttggtaatgataccagccatttagtccatccctaaagaactgagggtcctaggaatttaaccatgtcagtgcggtcatttttacatcattagctgacgaaaaatgaatgccttttacagattttttaagattaggaaacacaaagaagtcagaaggagccaaatcaggactataaggtgaatrcttaatgatttcccatcagaactctcacaaaattgcccttgtttgatgagaggaatgagcaggagcattgctgtgggggaggaggcctctctggtgaagcttttctaggcatttttctgctaaagctttagctaactttctcaaaacactttcataataagcagatgttatcattctttggccttctagaaagtcaacaatcaaaatgcctcgaacatcttaaaaaactgttgccatggcctttgctcttgaccagtccacttttgctttgactggaccactttcactttttggtagccattgctttggttggacttggtcttcaggatcatactggtataaaaccatgtttatctctgttacagtcttcaaagaaatgcttcaggatcttgatcctacttatttaaaatttccattgaaagctctgc

SEQ ID NO: 936274 - DNA, 630 bp, Homo sapiens
gaaagtttgctcaggtttattcttcaatcagaattgtgtaagctgattccattgagacgtctgtggtgttagttattgtttctgctgttaatcattggtcctgttcagttagggcatggtcacgacaatttttttttttcttgaaaatagaggtgaacaatctgctgcagtgagcttcatcttcaatattgtctggtcccttctttttttcttttcttttcttttctttttttttttttcaggtgggatcttgctgtattgccctggctggcctcgaactcctaggctcaagtgatccacccaccttggcatctcaacgtgctggtattacaggcatgagccaccatgctttgccttaatttttaatttttaaattttttgtagagatgaggtctggctatgttacccaggcagctcttkaactcctggcctcaagtaattctcctgtcttagcctcccagagtgctggtattacaggcatgaggcaccacacctggacccaaacctttaatttaattcctgacagttgcttttgttaaagtgttagcaaagcctaaaatatagtaggcttccattctagttactactcatttattggtccctgcagtactgatagaggtctaatgtggt

SEQ ID NO: 936275 - DNA, 788 bp, Homo sapiens
tgaggcagaaggattgcttgagtccagatgtttggaagctgcagtgatctatgatcacgccactgcacttcaactacagactgggtgacacagtgagactctgtcccccccaaaaaaatacaaataataaaacaaaaaaacccccaaaggattatctttgagatttaaaatgttatactggattcacaaactatttcagttctttgtgtagtatttaataaaaaccttctcagaaagttagttattagagtgggcttatcaatatcctaaaaggtatggcttgagatacaaatcttcatgataaaactgatgagtggcatttctctggctaggttctttggtttatgttttggtgttttacacatgagacagaatttagttctstgagggagccttaatttcatcagtgtgatcattgagtatatgcatttattctttcttcatttgttggtttatttgtaatttttagaaatgagggtctcactctgtcacccagtctggattgcattgacatgatcgtaactcaaactcctggcttaagggatcctcctaaaagtaagggatactttttaatatatattatataattacaaacattcctggatgcttcagaaaaagttccttagcctcctgagtagcagaggctacaggcccagctattttgtctttttttaaacctttcaaatggaccttttaagtcaacttataaattaatatagcataattaattctatgtatccataactccagtaattatgaggctctcatcttatttcttctctttcact

SEQ ID NO: 936276 - DNA, 729 bp, Homo sapiens
atcaggaagatatgaataaagcagtgtttcataaaatacctatgtcccttgttttgaacgggtcctgtgatactgcttgtttactcaaggtttggctaaggaaaagtgattgcaatgaaattaggaatcattcaaaatgagcagttatttttcatagctaagggaagagatttttgtgtttctgatactgtgaattgataataaatgcataaactatctgaaacttatttatacataagaatgataaaggaaaacaacccacagtattaatttgctgtccccttgtgtattagtcttttttcacgctgctgctaaagacatatctgagactggacaatgtacaaaataaagaggtttaattggatttacagttccacatggctgaggaagcctcacaatcatggcakaaggcaagggggagcaagttatgtcttacatggatggcagcaagcaaaggaagaaagcttgtgaagagaaattcccatttttaaaaccattagatctcgtgaggcccattcgctattatgagaacagcatgggaaagacctgccccgatgattcagtctcccaccgggtcccttccacatgtgggatttatgggagctgtatgatgagacttgggtggagacatagagccaaaccatataattctgcccctggccaccccccaaatctcatatctttacatttcaaaaccaatcatgccttccccacagtcccctaaagtct

SEQ ID NO: 936277 - DNA, 594 bp, Homo sapiens
tttttttttaacctccctggttagccatattcctaggtattttattctttttgtggcaattgtgaatgggattgtgtcctcatttggctctaggcttggttgttgttggtgtataggaatgctagcgattttttttttttttttttgagacagagtctcgctctgtcacccagcctggagtgcggtggcatgatctcggctcactgcaacctccacctcccaggttcaagtgattcttcttcctcagccttctgagtagctgggttcacaggcacacgccaccatgcctggctaatttttgtatttttagtagagayggggttttaccatgttggctaggctggtcttgaactcctgacctcaagtcatctgcccgcctctgcctcccaaagtactgggattacaggcatgagccactgcacccagccttcaatttttatatgttgattttggatattgagactttgccgacattgtttatcagcttaaggagcttttgggccaagactatggggttttctagatataggatcatgtcatctgcaaacactttgtagcatggtggcagtggaatccgtccttgttcacacatgc

SEQ ID NO: 936278 - DNA, 763 bp, Homo sapiens
tatgttagttcttcattgctctataacaaatgacctcaaaatatagcagcttaaaacaacacattttcattatctgacagctcccatgggcccggaatctgggttcagcttatctgggcccccaggctcagggtctctctcaggctgcagtcaggagtcatcgggggccatggtcatcccaaggctccgctggggcaggatccacttccaagcaagatcagcagttgtggctggattcagttcctcataggctgggaccgaaggcctcagttccccactgtttgtgaccaggagctgccctgggttctttccacgtaggcagtgctgctggcttcatcagagggagcaaatgagaagactcagataaagagagcgccagcaagatggaagtcattacytcttgtaatctaagaagcgagtcactaggtccagcccacaatcaagggtaggggatcacacaagggtgtggctaccaggagtccaagctacttggaaggctgaggtgggaggattgcttgagcccaaaagacagaggtcacagtgagctgtcattgttccactgccctccagcctggatgacagagtaagaccctgtctcaaaaaaaaaaaaaagaaaaagaaaaaaagccagtacctagtgataataaaaatcagagcaattgttgaaatactgttttaaaattctctgtagatagtgcaacccctgagtgccagcaccaggtggatcattcctaccaccccctcccctcatcgggatgccacc

SEQ ID NO: 936279 - DNA, 763 bp, Homo sapiens
tatgttagttcttcattgctctataacaaatgacctcaaaatatagcagcttaaaacaacacattttcattatctgacagctcccatgggcccggaatctgggttcagcttatctgggcccccaggctcagggtctctctcaggctgcagtcaggagtcatcgggggccatggtcatcccaaggctccgctggggcaggatccacttccaagcaagatcagcagttgtggctggattcagttcctcataggctgggaccgaaggcctcagttccccactgtttgtgaccaggagctgccctgggttctttccacgtaggcagtgctgctggcttcatcagagggagcaaatgagaagactcagataaagagagcgccagcaagatggaagtcattacctcttgtaatctaagaagcgagtcactaggtccagcccacaatcaagggtaggggatcacacaaggrtgtggctaccaggagtccaagctacttggaaggctgaggtgggaggattgcttgagcccaaaagacagaggtcacagtgagctgtcattgttccactgccctccagcctggatgacagagtaagaccctgtctcaaaaaaaaaaaaaagaaaaagaaaaaaagccagtacctagtgataataaaaatcagagcaattgttgaaatactgttttaaaattctctgtagatagtgcaacccctgagtgccagcaccaggtggatcattcctaccaccccctcccctcatcgggatgccacc

SEQ ID NO: 936280 - DNA, 763 bp, Homo sapiens
tatgttagttcttcattgctctataacaaatgacctcaaaatatagcagcttaaaacaacacattttcattatctgacagctcccatgggcccggaatctgggttcagcttatctgggcccccaggctcagggtctctctcaggctgcagtcaggagtcatcgggggccatggtcatcccaaggctccgctggggcaggatccacttccaagcaagatcagcagttgtggctggattcagttcctcataggctgggaccgaaggcctcagttccccactgtttgtgaccaggagctgccctgggttctttccacgtaggcagtgctgctggcttcatcagagggagcaaatgagaagactcagataaagagagcgccagcaagatggaagtcattacctcttgtaatctaagaagcgagtcactaggtccagcccacaatcaagggtaggggatcacacaagggtgtggctaccaggagtccaagctacttggaaggctgaggtgggaggattgcttgagcccaaaagacagaggycacagtgagctgtcattgttccactgccctccagcctggatgacagagtaagaccctgtctcaaaaaaaaaaaaaagaaaaagaaaaaaagccagtacctagtgataataaaaatcagagcaattgttgaaatactgttttaaaattctctgtagatagtgcaacccctgagtgccagcaccaggtggatcattcctaccaccccctcccctcatcgggatgccacc

SEQ ID NO: 936281 - DNA, 849 bp, Homo sapiens
gagacaaattggacttgaatcttgaccctcccccaacccccgacagactatgtggcctcagcctggttacatgacctctctgtatatgttagttcttcattgctctataacaaatgacctcaaaatatagcagcttaaaacaacacattttcattatctgacagctcccatgggcccggaatctgggttcagcttatctgggcccccaggctcagggtctctctcaggctgcagtcaggagtcatcgggggccatggtcatcccaaggctccgctggggcaggatccacttccaagcaagatcagcagttgtggctggattcagttcctcataggctgggaccgaaggcctcagttccccactgtttgtgaccaggagctgccctgggttctttccacgtaggcagtgctgctggcttcatcagagggagcaaatgagaagactcagataaagagagcgccagcaagatggaagtcattacctcttgtaatctaagaagcgagtcactaggtccagcccacaatcaagggtaggggatcacacaagggtgtggctaccaggagtccaagctacttggaaggctgaggtgggaggattgcttgagcccaaaagacagaggtcacagtgagctgtcattgttccactgccctccagcctggatgacagagtragaccctgtctcaaaaaaaaaaaaaagaaaaagaaaaaaagccagtacctagtgataataaaaatcagagcaattgttgaaatactgttttaaaattctctgtagatagtgcaacccctgagtgccagcaccaggtggatcattcctaccaccccctcccctcatcgggatgccaccaa

SEQ ID NO: 936282 - DNA, 459 bp, Homo sapiens
ggaggctgaggcaggagaatcacttgaacctgggaggtggaggttgcggtgagccaagatcatgtcactgcactccagcctggctaacagagcgagactccgtctcaaaacaaaataaaacaaacaaacaaaacagtatcgtaacagatataataataatgaaaaggtttgaaatattgcaagarttactgaaacgtgacagagttatgaagcaagcatacactgttggaaatatagtgctaatatacttgctcaaaatggagttgctgcagaccttcaatttttgaaaaacacagtatctgcagtgtcataaatcaaagacaaatagaatgaagtatatttgcattaaaaaaatcaccatgtatatcaattagggatacattttagtacaaatcacaggaaattttggcttaaataattgaggtgtttattcttattagatgataggttggtatagga

SEQ ID NO: 936283 - DNA, 561 bp, Homo sapiens
cctagagacttggagggctcaggagactggaagatgtgggaaagtttggaacttcctagagacttgttgaatggctttgaccaaaatgctggtagtgatatagacagtgaagtccaggttgagatggtctcagatggagatgaagaacttgttggcaactggagtaaaggtcacctttgttatgctctagcaaagatactggcagcattttgcccctgccctagagwtctgtggaactttgaacttgagagagaagatttagggtatagtggtaaagtgttcaagaggaagcagagaataaaagtttgaaaaatttgcaggctgaccatgtgatagaaaagaaaaacccattttctgaagagaaattcaagcaagctgcagaaacttgcataagtaaccaggagctgaatattaatcatcaagacaatggggaaaatgtctccagggcatgtcagagaccttcatggcagcccttcctgtcacaggcctggaggcctagcagaaaaaataatggttttgtgggccaggcccagggcccccttgctatatacagcctgggga

SEQ ID NO: 936284 - DNA, 561 bp, Homo sapiens
cctagagacttggagggctcaggagactggaagatgtgggaaagtttggaacttcctagagacttgttgaatggctttgaccaaaatgctggtagtgatatagacagtgaagtccaggttgagatggtctcagatggagatgaagaacttgttggcaactggagtaaaggtcacctttgttatgctctagcaaagatactggcagcattttgcccctgccctagagttctgtggaactttgaacttgagagagaagatttagggtatagtggtaaagtgttcaagaggaagcagagaataaaagtttgaaaaatttgcaggctgaccatgtgatagaaaagaaaaacccattttctgaagagaaattcawgcaagctgcagaaacttgcataagtaaccaggagctgaatattaatcatcaagacaatggggaaaatgtctccagggcatgtcagagaccttcatggcagcccttcctgtcacaggcctggaggcctagcagaaaaaataatggttttgtgggccaggcccagggcccccttgctatatacagcctgggga

SEQ ID NO: 936285 - DNA, 766 bp, Homo sapiens
aactgtctgtggaggatagtttgggtgtaggttactgatgtctcacctgagttttataagctgctgttgagtagtatgctgggaggaatcttcttttttatatattgtatttttgtatgcctttcgggaagtggtgttaactgcttttgtacaagaaaaaactcatgggcaattctcctgttgcaagggtctgatttattttgasaggcaagttcacctgaaattttgtatttagctgtgattactgattgcctgattttaaaatattgccttctgggacatcttctaataaaagatttctcaaacaaacaaacaaaaaaacaaaaagagtcttgtgtgccatagatcatactgtgggaaatgctgactaattggaatctcaagtcccttctaacactgaacgcttacaattccatgattctgttacaggccatgaagatataggagaatacagatatatacatatatatatatatgtatatatatctcctgtgttcttggattaatctgtgattggtccactgtgtaagtgcctaattaacctcagtgtgatattttctataaaatgtcttggcaagattgttgataggtccaagcattcaatagaagattgaactggacctagctgcacatttgacccatctaaagtatttgttgtaagtacagatttctgagacaaattcccaggatttctgattctataatttgagggaaagctctagaaacaatttttaatggtcattccaggggttctgcaccatatttg

SEQ ID NO: 936286 - DNA, 753 bp, Homo sapiens
tttacctcggtctctccttctaccttatgcctctcagttgaattctttcttctgagaaggcaagaattgaggttgctgcagacatgtacaaattcaccatcagtaacataccttagtgcaagttttaaagcaggggtgaaaatttattaaaaagctgtaaagcagaaatgaaaggaagtagagtacacttggaagagggccaaataggtgacttaagagatcaagtgcacgccttgacttttgacttggggttttattagttgggattcttctggcatctgaattttctctcccctgattcttcccttgggatgggctgcctgcatgcacagtggcctgctagcacttgggagtggccccatgtacagtgtgtttaatggagttgtatacatgcttacttgaggcattcttcccttaccagtcaaatgtcccyagaaagtcatacaccagttaaactggcattttgcctcttaatgagcatgcttgagccaactcgcccagctcctgagatcttattaggaagctgctgatcaccagcttcaggttttttctatgtattgggggaccacctttccctggcactggctgggactatcaactgcctgaccatcacttgatggtcccctgacactcctgttttggtggggctctcctgcactgctcatgtctgactagctacctactgtaacaatcttagggtttaccaatagtgaggttatccccaggaacaatttggtgagggtcagaatattg

SEQ ID NO: 936287 - DNA, 663 bp, Homo sapiens
tgcccacagagggagcattcaaatcagccttagccagaggggaatttccaatcccagtggttcaaacttgagtgcctgcaaaccttgccacccagggccaaagtgctcttagtctctaactaaacttgaaaggcattctagcccataagcactgcaactcttargtgagttcaagggcttaactaggcctagagataatggattagaaggccacatgacatactgtgacaccagctttggcaggcaaaatgtgctggcatcacccctcccctaatcccaggctgcacagctcacagctccaaaaaagacccttttcttcctcttgaggagagtagagagaagagtggggaggatcgtttcttgcacctgaaataccagcttagccacagcaggatatggcaccagtcagagtcaagaggcccccattccaggccctatcagccagatgatatttatagatataccctgggccagaagagaacctatttgaagaaagggatccagtcctgctagcatgggctctgaataaccagcagtaatatccaggtgctatgctacatcaagggttttggtgagcctctgagacttgctggcttcaagtaccaacatcaccacaggggtgtagagcagcaagtcaagactgtttactcttgaatgacattt

SEQ ID NO: 936288 - DNA, 663 bp, Homo sapiens
tgcccacagagggagcattcaaatcagccttagccagaggggaatttccaatcccagtggttcaaacttgagtgcctgcaaaccttgccacccagggccaaagtgctcttagtctctaactaaacttgaaaggcattctagcccataagcactgcaactcttaggtgagttcaagggcttaactaggcctagagataatggattagaaggccacatgacatactgtgacaccagctttggcaggcaaaatgtgctggcatcacccctcccctaatcccaggctgcacagctcacagctccaaaaaagacccttttcttcctcttgaggagagtagagagaagagtggggaggatcgtttcttgcacctgaaataccagcttagccacagcaggatatggcamcagtcagagtcaagaggcccccattccaggccctatcagccagatgatatttatagatataccctgggccagaagagaacctatttgaagaaagggatccagtcctgctagcatgggctctgaataaccagcagtaatatccaggtgctatgctacatcaagggttttggtgagcctctgagacttgctggcttcaagtaccaacatcaccacaggggtgtagagcagcaagtcaagactgtttactcttgaatgacattt

SEQ ID NO: 936289 - DNA, 626 bp, Homo sapiens
acagggaagagagtcagtagcaaggaaagtctggcaggaactaaaacacatcccatttcactggccagaacacaactatgtggcctttctaattgcagtggggaggctaggaaaggcagcctagctgtgtgttcaaggggaaagtgaaaagatgttaacacatatcaactctgccacgcatggccactaccatgttttgtgtgtgtgtgtrtgtgtgtgtgtgtgtgttttgagacagagtcttgctctgtcacccagactggagttcagtggtgggatcttggctcactgcaacctccacctccaggactcaagcgattcttctgcctcagtctcctgaatagctgggattacaggcgtgcaccaccatgcccagctaagttttgtatttttagtagagatggggtttcaccatgtttcccaggctagtcttgaactcctgacctcaagtgatctgcccaccttggcctcccaaagtgttgggattacaggcgtgagccatggcacctggccgcctctcttattttatcctcctaagaactctgggaggtacatggcaataatttatatcctctgttaatagatgaggcactaggatcatattggtgaagtcatttgcccaaagc

SEQ ID NO: 936290 - DNA, 746 bp, Homo sapiens
tcattagtgttagtgtattttgtgtgtggcccaagacaattcttctttcaatgtggttcagggaagccaaaagattgggcagccctggtttagacagtgttatgggttgaattgtgtctactaaaattcttatgttgaagttttaactgccggtacctcaaaatatgtctttatttaggcatacagcagcggttcccaacctttttgacaccagggcctggtttcatgcagacagtatttccaccgatgggtggggggatggtttcaggatgaaactgtttgacttcagatcatcaggcattagctggagtctcataaagacagcacagtctagattcctcacatgtgcagttcacagtacagtttgtgctcctgtgacaatctaaygccactggtaagctcactcgccaaacactcacctcctgctgtgcggcctagtttccaacaggccacgaaccggtctggtccatggcctggaggttgggggcccctgctttacacagtcaatcatgttaatcatgttaagtgagatccattgtgatggatgtctttataaaaaaaggaaatttgggtagagaggaatgcatagaaggaagatgatgtgaagacacacggtgagaagacagacatttccaagccatggagagagacctgatatacatccttatctcaaagccaatttatagtcttgtgtgcacttgtacaaacacaatagatgaataacatgggcgtggcgattattatta

SEQ ID NO: 936291 - DNA, 613 bp, Homo sapiens
taacatttgtgcatggacagttttatgaattataacacatgtttagatttatgtaactacaacacaatctggatacacaacagttccatcaccccctcacattgtaagggggtaaagagtcttgagaaactctttactgttaaactctccgcacacscagaacccgtggcagccacagatgtgttctccttcctatagtttttgcttttaaaatgttatataaatggaatcctacagtagatggttttttttgagactgtcttttttcactcatcatctttctctgataatcattcaagttgcttgtattagtattttttaaaatatttaatgctgagtattattccattatatagatgtatcacattgtggttatcaattctccaattgagggcatttatgttgtttacagtttatggtgattttgaataaatatgctactaaacactcatgaacagttattttgtgaatataattcacttaggtaaattcctagggtaaatataatagggataggattgctggtctatagagtgaatataacttaacttctagaaactgcaaaactgttatcaagagggtgtaccattttgcatccccatgagcaatgcat

SEQ ID NO: 936292 - DNA, 562 bp, Homo sapiens
caataaagtgtaggctgaggtggtctcagatgaagatgagaaacttattgggaactggagcaggggccacttttgttatgcattagcaaagagtttggaggcattgtgcccctgccctaggaatctttggaactttgagcttgagagtaatgatttagggtatttggtagaaaaaaattctaagcagcaagtgttcaagaattggccaggctgcttctaacagcgtatgctcatattcattctcagagtgayggtctgaaattgaaacttatatttaaaagggaagagagtctggaagtttggaaaatttgcagcctggccatgtgaaagaaaagaaacatccattttctggggaggaattcaagctgcctgcagaaatttgcatgtgtaaagatcagccaaatgttgatagccaagatcgtggggaaaatgcctcaaatgcctttcagagactttcccagcagctcctcccatcacaggcctggaggcctaagagagaagaatgattttgtgggccaggcccagggcactgctgccttgtgcagccttggaacatggtgcc

SEQ ID NO: 936293 - DNA, 444 bp, Homo sapiens
tttctctctggctgcccataacatttttttccttaaattctaccttggtgaatctgttgattatgtgtctcagggttgctcttcttgaggactatctttgtggtgttctctgtatttccagaatttgaatgctggcccatcttgctgagaggtgacagcatgctggcagccctcactcgctctcgrcacctcctcagcctcggcgcccactctggccatgcttgaggagcccttcagcccacggctgcactgtgggagcccctctctgggctggccgaggccagagccggctccctctgcttgtgggtaggtgtggagggagaggcgcgggtaggaaccagggctgcacatggcactcgcgggccagcgcaagttccaggtgggtgcaggctcggcaggccctgcacttggatcgtccccgggcagtgaggggtgtagtacctg

SEQ ID NO: 936294 - DNA, 601 bp, Homo sapiens
tgccaagaacacacagtgggggaaggacactctctttattaagtaatgttaacaacaactggatatccacatgcagaagaagggaattagactgcatgttacatcacatacaaaaagcaagtcaaaataaagttttaaatataagaaatataagactttacactgtgacactactataggaagcattgtggaaagactccatgacattggccttggcaatgatgttttgtatataaacccaaaaacatgggaaacaaaagcaaaratagaaaaatgtgattgtatccaactaaaaagctcctgcacagtaaaagaaacgaatgacagtgtgaagagacaacctacagaatgagagaaaatatttgcaaactgcacatttaatcaagggttaatacccaaaatatataaggaatccaagcaactcaatagtaagaaaacaaataatctgatttataaaatgaggaaaggatctgaatagacatttctaaaaagaggaaatacaggtggccaataggtatatgaaaatattctcaacatcactaattatcagggaaatgaaaattaataccacaatgagatatcatctcccatccgttagaac

SEQ ID NO: 936295 - DNA, 601 bp, Homo sapiens
tgccaagaacacacagtgggggaaggacactctctttattaagtaatgttaacaacaactggatatccacatgcagaagaagggaattagactgcatgttacatcacatacaaaaagcaagtcaaaataaagttttaaatataagaaatataagactttacactgtgacactactataggaagcattgtggaaagactccatgacattggccttggcaatgatgttttgtatataaacccaaaaacatgggaaacaaaagcaaaaatagaaaaatgtgattgtatccaactaaaaagctcctgcacagtaaaagaaacgaatgacagtgtgaagagacaacctacagaatgagagaaaatatttgcaaactgcacatttaatcaagggttaatacccaaaatatataaggaatccaagcaactcaatagtaagraaacaaataatctgatttataaaatgaggaaaggatctgaatagacatttctaaaaagaggaaatacaggtggccaataggtatatgaaaatattctcaacatcactaattatcagggaaatgaaaattaataccacaatgagatatcatctcccatccgttagaac

SEQ ID NO: 936296 - DNA, 595 bp, Homo sapiens
ctgcaatgaacatagatgtacatatatctcttcaagatccttttttcaattattttggaaatatatccagaagtgggattgctgggtcatacggtaatggtgtgtttaggtgtttttgagggatcttcactttgtcttccataatggctgcatcattttacattcccaccagcaaggcacaagggttccaatttctccccgttcttgccaacgctcattaatttttgtttttgtttgttttactaacgggtgtcaggtgatatctcattgtcattttgatttgcatttctgtaatgattagtgatgtagggtctcctgtaatacacctgatagcctttttttttttttttttttgagacctagttttgcacttgttgcccatgctggagtgcaatggcgcaatcttggctcactccaacctccgcctcctgggttcaagtgattctcctgcctcarcctcctgagtagctgggattacaggtatgtgccaccatgcctggctaattttgtatttttagtagagacggggtttctccatgttgatcaggctggtcttgaattcccgacctcaggtgatctgcccgcctttgcctcc

SEQ ID NO: 936297 - DNA, 588 bp, Homo sapiens
ctccctaggttcaagcgattctcctgcttcagcctcgtgagtagctgggattacaggcacacaccaccacgccggcctaatttttgtatttttagtagaaacggggtttcaccttgttggtcaggctggtttcgaactcctaaccttgtgatccgcctgcctcggcctcccaaagtgctaggattacaggagtgagccacggtgcccggcccaggataaggcataattttgtgcctcctataaagttgggaaattgactgtttctggaattcagattttttaaaaattaaaattgaacttctggttctcttctccttatctaggtctaacttattgtactctggctgtttgcctatatgcaraatttatcctgattgtgttttaggaagctagctgaagaaaatatttttctaccaaatgagacaaaccagtttgtaaacctaagttagtaaccagaaaatgtaaatctatgatgttttatagttctgcttgttatatatgatcactggacacacagaggtacagaaatccagtaagaaagtgaagttttgggggagtctataaaaatggaaagcatctggtgtgaag

SEQ ID NO: 936298 - DNA, 784 bp, Homo sapiens
ctcataagcaacttacagtatttttttgttcaagatttacataaatggggtgaggtggccgatatggttgactagaagcagctagtgtgtatgactctcataataatgaatggaagtggcaagttaatacatcatcttcaaatgaaactttcagaaactcacctgagactaaccaagaaaaacaacttgacccacagagaacagagaaaggcaaggcaggatgatggtccacccaggagcgacatgaaaccagaggaactttccccacccagggaagtggtgagtgaatgtgcatccccgggaacccatgcttctcccacaaatctttgcaacccttgggttaggagataccctcatgaacccactccaccagggacttctgtctggcacacagaactacatggagttttgrcgcagcagcgactcaggcacacgaggagacccgcccgggagctttagatacctgagcattctaggcttcctgacaaaagtacctgcaactccagcagaacgggtggttagactcccatatatacacccgggaaacagggtaaatccagagagctgagcagtgacagtctgcaggccccacttccgtggcacctcacaggataagacccacaggcttggaattccagctagccaatagtggcagcattgcacctcccttagatggaactctcgggggaggggtgagccacagtctttgctgtttggatgacttagccatcacagcctttgtgctttggagagtccaagctgaccagggatggaagcagtagcc

SEQ ID NO: 936299 - DNA, 784 bp, Homo sapiens
ctcataagcaacttacagtatttttttgttcaagatttacataaatggggtgaggtggccgatatggttgactagaagcagctagtgtgtatgactctcataataatgaatggaagtggcaagttaatacatcatcttcaaatgaaactttcagaaactcacctgagactaaccaagaaaaacaacttgacccacagagaacagagaaaggcaaggcaggatgatggtccacccaggagcgacatgaaaccagaggaactttccccacccagggaagtggtgagtgaatgtgcatccccgggaacccatgcttctcccacaaatctttgcaacccttgggttaggagataccctcatgaacccactccaccagggacttctgtctggcacacagaactacatggagttttggcgcagcagcgactcaggcacacgaggagacccgcccgggagctttagatacctgagcattctaggcttcctgacaaaagtacctgcaactccagcagaacgggtggttagactcccatatatacacccgggaaacagggtaaatccagagagctgagcagtgacagtctgcaggccccacttccrtggcacctcacaggataagacccacaggcttggaattccagctagccaatagtggcagcattgcacctcccttagatggaactctcgggggaggggtgagccacagtctttgctgtttggatgacttagccatcacagcctttgtgctttggagagtccaagctgaccagggatggaagcagtagcc

SEQ ID NO: 936300 - DNA, 743 bp, Homo sapiens
aaatacatggattcatttctgggtttgcgattctgttccattggtctatgtatctgtttttatgctggcaccatgctgttttaggtactatagctttgcagtatattttgaagtcaggtagtatgatgcctccagctttgttctttttgctcaggattgctttggctattcgggatcttttgtgcttccataggaattttagaactttttctatctctgtgaagaatgtcattggtattttatagggattgcattgtatctgtagatcacttttggtaatatagtcattttcacaatattaattatttcaattcatgaatatgggatktctttctatttttttgtgtcctcttcaatttcttttatcagtgttcatagctttccttatagaggtctttcacctccttagctaaacttattcctaagcattttatatatttttgaggtagctattgtaaatgggattgtttttcttgatttcttcttttcagctagtttgttgttgatgtatagaagttcctctgatttttgtatgttaatttcatactctgcaactttactgaatttgttgatcagttctaagagttttttggtggagtctttagtttttcctaaatataagatcatgtcatctgcaaacaactttccactttggatgttctttctttctttgcctagttgctctggctagggtctccagcactgtgtttaataggagtggtgagagtaggcagccttgtctt

SEQ ID NO: 936301 - DNA, 688 bp, Homo sapiens
tttgcgattctgttccattggtctatgtatctgtttttatgctggcaccatgctgttttaggtactatagctttgcagtatattttgaagtcaggtagtatgatgcctccagctttgttctttttgctcaggattgctttggctattcgggatcttttgtgcttccataggaattttagaactttttctatctctgtgaagaatgtcattggtattttatagggattgcattgtatctgtagatcacttttggtaatatagtcattttcacaatattaattatttcaattcatgaatatgggatgtctttctatttttttgtgtcctyttcaatttcttttatcagtgttcatagctttccttatagaggtctttcacctccttagctaaacttattcctaagcattttatatatttttgaggtagctattgtaaatgggattgtttttcttgatttcttcttttcagctagtttgttgttgatgtatagaagttcctctgatttttgtatgttaatttcatactctgcaactttactgaatttgttgatcagttctaagagttttttggtggagtctttagtttttcctaaatataagatcatgtcatctgcaaacaactttccactttggatgttctttctttctttgcctagttgctctggctagggtctccagcactgtgttta

SEQ ID NO: 936302 - DNA, 845 bp, Homo sapiens
actgttcttcacttggtccctgtccctgcttctcctcactgggcagggcctcctgacctgggactcccgcataactactctgccctgcctgggcacttcagtcagcagcagctctgcatttgtctaaggaggaaatcctggagtcaacccacaacccctccaccattgcacctgtagtggtaccaccctaaccaccctcaggctaaggaaggaacaaagggcttagttcctgtgctagcacctcctgcactgtgtagcccccatacagagtcctgtctctcttctctgtgaacccccaccctcaactcttcaccaggtagggcccctgggtcaggactgcagatcagtcgccccaaccacagctaaggatgcccactgggagtggctcygagtttcccagaggaggggctcccagagggaaccaacacccctctgccatagcaatggttctgcctctgctgccctccatctggggaagaaacaaagagcctgagggcttcacctgcactttcagcacaccacagtcaccatcggaagaaaagcccagtctctcctccctgtgagccttccaccccctcttcaccaagtggagtgcccaactcatgccagcagtgcagccaacccaccccctggctgaatactcccattggcagtggttctgcttctctgaggtagaattcccagagataactgaaaggccctttgccactgccgctgctgtggtacttctcttgcttccctcagactaaggaaggagcagagaccctgagtgcttcaaccacacctttggtaagctgaagttgccctaaggagaagaggccagtctgtatccctccaggacccac

SEQ ID NO: 936303 - DNA, 581 bp, Homo sapiens
cacagattggtggcattttgcccctgccctagaaatctgtggagtttcgaacttgagtgagatgatttagggtacctgctgggagaaatttctatttttttaattatactttaagttctagggtacatgtgcacattgtgcaggtctgttacataggtatacatgtgcattgttggcttgctgcacccatcaactcgtcacttacattagctatttctcctaatgytatccctcccccaggcccccatcccctgaaaggccccagtatatgatgttccccttcctgtgtccatgtgttctcattgttcaattcccacctatgagtgagaacttgtggtgtttggttttctgcccttgtgatagtttgctgagaatgatggtttccagcttcatccatgtccctgcaaaagacatgaactcatccttttttatgattgcatagtattccatggtgtatatgtgccacattttcttaatccagtctatcattgttggacatttgggttggttccaagtctttactattgcgaatagtgccgcaataaacatacttgtgcatgtgtctttatagtagcatgatt

SEQ ID NO: 936304 - DNA, 592 bp, Homo sapiens
tggctaaaagggatgaaggtacatcttgggctattgcttcagagggtgcaagccccaagccttggcaccttccatgtggtgttgagcctgcaggtgcacagaaggcaacagtttgagagcctccacatagatttcagaggatgtatagaaatgcctggatgtccaggtagaagtctgctacagggacggagatctcatgaagaacctagtgcagagggaaaaagtggggttggagcccccctaccccacagagtcctcaatgagacaatgcctagtggagctgtgagaggagggacactgtcctccagaccycataaaggtaaatccactgacagcttgcatgtgtacctggaaaagccacaggcactgaatgccagcccataagagcaacctcgggggctatatcctgcagcgctccaggggcagagctgcccaaggccataggagcccactccttgaatcagtgtgccctaggtgtgagacatggagtcaaaggagattattttgaacctttaagatttaatgactgtcatactgggttttggacttgtatggggcctgtagccctttggttctggccaatttcttcctt

SEQ ID NO: 936305 - DNA, 592 bp, Homo sapiens
tggctaaaagggatgaaggtacatcttgggctattgcttcagagggtgcaagccccaagccttggcaccttccatgtggtgttgagcctgcaggtgcacagaaggcaacagtttgagagcctccacatagatttcagaggatgtatagaaatgcctggatgtccaggtagaagtctgctacagggacggagatctcatgaagaacctagtgcagagggaaaaagtggggttggagcccccctaccccacagagtcctcaatgagacaatgcctagtggagctgtgagaggagggacactgtcctccagaccccataaaggtaaatccactgacagsttgcatgtgtacctggaaaagccacaggcactgaatgccagcccataagagcaacctcgggggctatatcctgcagcgctccaggggcagagctgcccaaggccataggagcccactccttgaatcagtgtgccctaggtgtgagacatggagtcaaaggagattattttgaacctttaagatttaatgactgtcatactgggttttggacttgtatggggcctgtagccctttggttctggccaatttcttcctt

SEQ ID NO: 936306 - DNA, 592 bp, Homo sapiens
tggctaaaagggatgaaggtacatcttgggctattgcttcagagggtgcaagccccaagccttggcaccttccatgtggtgttgagcctgcaggtgcacagaaggcaacagtttgagagcctccacatagatttcagaggatgtatagaaatgcctggatgtccaggtagaagtctgctacagggacggagatctcatgaagaacctagtgcagagggaaaaagtggggttggagcccccctaccccacagagtcctcaatgagacaatgcctagtggagctgtgagaggagggacactgtcctccagaccccataaaggtaaatccactgacagcttgcatgtgtacctggaaaagccacaggcactgaatgccagcccataagagcaacctcgggggctatatcctgcagmgctccaggggcagagctgcccaaggccataggagcccactccttgaatcagtgtgccctaggtgtgagacatggagtcaaaggagattattttgaacctttaagatttaatgactgtcatactgggttttggacttgtatggggcctgtagccctttggttctggccaatttcttcctt

SEQ ID NO: 936307 - DNA, 604 bp, Homo sapiens
tcacatgaagattatttttaaaaacttcctcatggtttcttctaggctgcttattacttcatttaaaaatatttaggccgggcgcggtggctcacgcctgtaatcccagcactttggaaggccgaggcgggtggatcatgaggtcaggagatcgagaccatcctggctaacaaggtgaaaccccgtctctactaaaaatacaaaaaattagcagggcgcggtggcgggcgcctgtagtcccagctactcgggaggctgaggcaggagaatggcgcgaacccgggaggcggagcttgcagtgagccragattgcgccactgcagtccgcagtccggcctgggcgacagagcgagactccgtctcaaaaaaaaaaaaaaaaaaaaaaatatatatatatatatatatgtgtatatatatatatatatacacatatatatatatacatatatatatttaaatccttgaatttaaacaaattcatctggcatttatcttggtataaagggtgagaaatggacctaattttaatttttttgtcaatggctgccccgttgtcctaataacatgattgaatagttcatcttctcttcaatgacctgccccc

SEQ ID NO: 936308 - DNA, 562 bp, Homo sapiens
atagaaagacccctgtatctaaaaataaaaataaattcaatagcgagccatggtgctgtatgcctttagtcccactactagggaggcaaaggcaggaagatcctttgagcctaggagttcatgactcctagctatgactagagctatgactgtgccactgtactccagcttgggtgacagatttaatcccaggtatgcaagcctggttctacatttaaaaatcaatcaatgtggccagamgcagtggctcatgcctgtaatcccaacactttgggaggccaaggcaggcggatcacttgaggtcaggagttcaagaccagcctggccaacatggtaaaaccccatctctactaaaaagatacaaaacttacctgggcatggtggcaggtgcctgtaatcccagctactcaggaggctgaagcaggaaaattgcttgaacctggaagtcggaggttgcggtgagtcaggatcacaccactgcactccagcctgggcaacagagcgagactctgtctcaaaaaaaaaaaaaaatcagctaatgtaatctatcacatagaaatga

SEQ ID NO: 936309 - DNA, 585 bp, Homo sapiens
ccagagatacaaagaggagctgctaccattccttctgaaactattccaatcaatagaaaaagagggaatcctccctaactcattttatgaagccaggatcatcctgataccaaagcctggcagagacacaacgaaaaagagaattttacaccaatatccctgatgaacaccgaagcaaaaatcctccacaaaatactggcaaaccgaatccagtagcacatcaaagagcttatccaccacgatcaagtccatttcatccctgggatgcaaggctgcttcaacatacacaaatcaataaaattaatccatcatatgaacagaaccaaagacaaaaaccatatgattawctcaatagatgcagaaaaggccttcaaaaaaattcaagagcccttcatgctaaacactctcaataaatttggtagtgattggacatatctcaaaataataagagctatttatgacaaacccacagccaatatcatactgaatgggcaaaaactggaagcattccctttgaaaatggcacaagacagggatgctctctctcaccactcctattcaacatagtgttggaagttctggcca

SEQ ID NO: 936310 - DNA, 585 bp, Homo sapiens
ccagagatacaaagaggagctgctaccattccttctgaaactattccaatcaatagaaaaagagggaatcctccctaactcattttatgaagccaggatcatcctgataccaaagcctggcagagacacaacgaaaaagagaattttacaccaatatccctgatgaacaccgaagcaaaaatcctccacaaaatactggcaaaccgaatccagtagcacatcaaagagcttatccaccacgatcaagtccatttcatccctgggatgcaaggctgcttcaacatacacaaatcaataaaattaatccatcatatgaacagaaccaaagacaaaaaccatatgattatctcaatagatgcagaaaaggccttcaaaaaaattcaagagcccttcatgctaaamactctcaataaatttggtagtgattggacatatctcaaaataataagagctatttatgacaaacccacagccaatatcatactgaatgggcaaaaactggaagcattccctttgaaaatggcacaagacagggatgctctctctcaccactcctattcaacatagtgttggaagttctggcca

SEQ ID NO: 936311 - DNA, 610 bp, Homo sapiens
gtttatagctggaactctgattctgtacagaggtcaggataataaacaaaagaagagtcatttgtttatgtcagagatttgttatgtggtattaaatatatccataatgttaggcaaaaatggattgtgtatttttttcctcctaaatagatcttaataaatgggctactttaaatattacatacaaagaaattkagttttaaagaataaatttgcttgacatgacaaatatcaaagggaactgaggagcagctacttctttggccatgattccaattcttcattcagtatgtatgcacacctattcctcatttgtttgggtcacttgcttcccctctggaggaatttgagcactgagtctgatcaagggtaatagagtccttgacaaagttcatggctaaggccagagacctaagtgaggttgccatttggaaacagaagaaaagggggccaattatggaagtggggagaatagccatccaaagaaactgagaagaatcagtaagaacagcaggagagagcagtttcacccaagtcaaagtaggagatagtgctatctttttatttacattattattattttttaattttagagatgaaattttgtcct

SEQ ID NO: 936312 - DNA, 749 bp, Homo sapiens
aataaataaatagatgagtcagggaagagtgaacccgggaggcagaagttgcagtgagctgagatcacaccactgcataccagtctgggtgacagaatgaaactccttctctagataaataaacaaacgattaattaaatgatacacaaactcactgggagtcagaaatgtgaattaaattgaaaatgacatattatacacctaattagattggccaaaataataaaatacccatatctccctaatatttgtggtggtgtagagaaaagtatttccaaatattgctagtggatatgtgaggtactatattttttggacagaacatttagcaataaatattaaaataaaaaattttwaaaaccctcatataccctttgatccagaaatcccaaaccaggtatttaggctatagaattaaagtaccagtatgtgagcataagtataaggatgtttaataacttaattattgttcatactagcaaaaaatggaggaaaatgaatatccattgtaatagttaacttatggtacctgcatataatgaattattttgcagctattaaaacttgtcactgtttgctgatgatatgattgtatacctagaaaaccctgaagactcatccaaaaagctcctagatctgataaataaattcagtaatgtttcaggatacaaaatcaatgtacacaaatcagtagcactgctatacaccaacaaatgaccaagctgagaatcaaatcaagaactcaatcc

SEQ ID NO: 936313 - DNA, 611 bp, Homo sapiens
tgctgcaaaagaaatgattttggtttttttatggttgtatactatttcatggtgtatatgtattgcattttcattatccaatccaccattgatggacacctaggttgattccgtgtttttgctattaggaatagttctatgatgaacatacaactgcatgtgtttttggtacaatgatttattttcctttgggtatatacctagtaatgggattgctgggtccaaatgggagttccatttttagctctttgagaaatctccaaagtgctttctacagtgactgaactagtttgcatttacaccagcggtgtataagcattcccttttctctgcagccttgccaatatttattattttttgacttctgaataatagtcattctgactggtgtgagatggtatctcattgtggttttgatttgcattgctctgakgttcagtgatgttgagcattttttcatgttggttggccgcttataggtcttgttttgagaagtgtttgttcatatcctttgcccgctttttaatggggctatttgttttttgcttgttgaatagtttaagttccttataaattctggatattagacctttgttgcatacatagtttgt

SEQ ID NO: 936314 - DNA, 780 bp, Homo sapiens
tagtttgaagttgggtagtttgaagcctccagctttgttctttttgtttaagattgccttggtattcaggctgttttttggtcccatatgaattttaaaatagtttttttttctagttctgtgaagaatattagtggtagtttgataggaatagcattgaatctgtaaattgctttgggctatatggctattttaatgatactgattttttcctatccatgagcatggaatgtttttccattcatttgtgtcatctctgatttctttgagcagtgttttgtaattatcattgtagagatctctcacctccctggttagctgtattcataggcattttatttatttatttattttttgaaactgagtttcactcttgttgcccaggctggagtgcaatggctcaatctcggctcaccgcaacctccatcctgggttcaagcgattttcctgcctcagcctcccgagtagctgggattacaggcatgtgccaccacgccctactaatttttttttttttttttttttgtatttttagtagagacagggtttctccatgtaggtcaggctggtctcgaactcccaacctcaggtgatccacccrcctcggcctcccaaagtgctgagattacaggcatgagccactgcacctggcggcattttattatttttgtggcagttgtgaatgggattttgtcatttgtgtcttggcttggctgttgttggtatataggcatgctagtgatttttgtacattgattttgtatcctgaaactgctgaag

SEQ ID NO: 936315 - DNA, 654 bp, Homo sapiens
tgattgatgtcttatgtctccctaaaacatataaaatcaagctgtaacccaaccaccttgggcacatgttcttaggacctcttaagactgtgccttgggggctggcacagtggctcacgcatgtaatcccagaactttggaaggctgcagtgggtggactgcctgaggtcaggagtttgagaccagcctggctaatatggcgaaaccctgtctctgctaaaaatacaaaaaattagccaggcatggtgttgggcgcctgtaatcctggctactcgggaggctgaggcagaagaattgcttgaacccaggaggcggagtttgcagagagcctagattgtgccactgcactccagcttgggcaacagagcgagactccgtctcaaaaagaaaaaaaaaaattctccctagtttatgttctttatagctcttaggtatgtctaaaatcactttactggtttatatgcttattgkctgtctctttccattctaatgcaaatcccataagacaagaatcttgtctgtctcatttacattttatccctattgcttagcaaagtggctggcacatggcagatcttcaaaaattatttgttgacgtctttttaagggacagggtctcgctctgtcacccaggccagactgcagtggcatgat

SEQ ID NO: 936316 - DNA, 622 bp, Homo sapiens
ctttaacctctgtcctcctctaccctttatgttactgataccacaaattacatctttttatgttgtgtatcaaatagtatatttttatagttattgctatttttatgcttttgtctttcaacttctaaaccagaattaaaattgatttatgcaccatgcttacagtattatagtattgtatatttttaatatatttayctttaccagtgaactttatattttatatgttttcagtttatcatttagcatctttcagtttcaatttttagtactccattagcatttttttgtagggcaggtctagtggagtggaactccctcagttttgttcatctgagaaagtacataccttcattttttaaggagagttttgccaggtataatattcttgtttggcattttttaagctctatgaatatatcatccaacttcatttttgactgcaaggtttctgctgagaaatccactgatagtgttatgagagttttcttctacataatgattggatttctgcttgctgctttcaaaattctctttgtctttgaattttgacagttagattatatgtgtcagtgtggacttccttgggttcatcttattggggattcatttgccttcttga

SEQ ID NO: 936317 - DNA, 745 bp, Homo sapiens
gctgggagctgtagactggagctgttcctattcgtccatcttggctcctccccctcgtattttatcattttaaagaattctattttaaatatatttagttaaactccatttgtcttttaaatttatgtttttacctgtagtaattactttcatcttcttacctcaagtatatttttaatctgcctttttatgacttcctcaattacatgtttagttcatttactttcacatttttcatttaataatacaaaggaagtcaagatatgattttgccaacaagtacaactttgaccagatgcctagactccccrtctccctcatttcttagacaatatgtcttctcaaatgtaattgagagtgcgttttttccctcattctcatgggttaagtctattaagtaaagatttttcattgttcttcatagaataaaatctacatattctcctgatttgaaatggactttgtcacagattttataggttatgcttcaaagatttaaatgtaaatcatagcgatgaggagaatgtcataatgtctagagactttattatgatagaggctctagtaagcctattaattattgaaaaggacttaaatttggatgcaatttgttgaataacagtttatgagttactttttctgtgtgtagcagatgtctttaaaatctgctcttttaaaccacaggtgattgcagttgcttctgctcctaagggaattatctctagaggtgacagctggttatatt

SEQ ID NO: 936318 - DNA, 615 bp, Homo sapiens
tacaatggactttggggacttgggggaaagggtgggaagagggtgagggataaaagactacacagtgggtacagtgtacactgcttgggtgatgggtgcacccaaatctcagaaatcaccactaaagaacttattcatgtaatcaaacaccaccttttccacaaaaatctatttaaataaaaataataataatgtgcttttcataattgttggcagractggctatttgacttgtgggcccagtgaaaaattaaaacatggaaccccttgctcaaaaactaagaatttcaacacagtggtgctagagcattaaaacaagtgtgcggcccttctaggaatggcgcttagtgtgactgcacaggtcacacagccatgagctggctctaattgttctacactggccatttaggttaattttattaattgtcttgttcaaatccttaacatccttaccacatgttttgctgcttgttttatcagttgttaagagatgctacttccatcataattagattgtctatttcaccatttaattcattagttgtcctgttagagtttattaggtgcaaacaaatttaaaattgttataaatttcttgtgtattcaccattttat

SEQ ID NO: 936319 - DNA, 614 bp, Homo sapiens
tgtttggggtgaccagcttttagtcccttatttgtccccgcccacatgctgctgattggtccattttacagagtgctgattggtgcatttacaatcctttagctagacagaaaagttctccaagtccccactcaacccaggaagtccagctggcttcacctctcaatacaatggactttggggacttgggggaaagggtgggaagagggtgagggataaaagactacacagtgggtacagtgtacactgcttgggtgatgggtgcacccaaatctcagaaatcaccactaaagaacttattcatgtaatcaaacaccaccttttccacaaaaatctatttaaataaaaataataataatgtgcttttcataattgttggcagaactggctatttgacttgtgggcccagtgaaaaattaaaacatggarccccttgctcaaaaactaagaatttcaacacagtggtgctagagcattaaaacaagtgtgcggcccttctaggaatggcgcttagtgtgactgcacaggtcacacagccatgagctggctctaattgttctacactggccatttaggttaattttattaattgtcttgttcaaatccttaacatc

SEQ ID NO: 936320 - DNA, 601 bp, Homo sapiens
ttttaatttccctgtgtgttagtaaatcaatacctgggccatctctatctgattctactgacttattcctttcttaatgatgacatatcttcttgggttactttttttttttttcgagacggagtctcactctgtcacccgggctggagtgcagtggcgcaatctccgctcactgcaagctccacctcccgggttcacgccattctcctgcctcagcctcctgagtagctgggactacaggcgctcgccaccactcctggctaattttttttgtatttttagtagagacggggtttcaccgtgttagccaggatggtctcgatctcctgacctcrcgatccgcctgcctcggcctcccaaagtgctgggattacaggcttgagccaccgtgcccggctgggttacttttttatgtgtctcaaagtatttattgaattgctaaatattgtatattaaaaagtagcagagattgaggtaaataatatttatgctcagaaaaaaaaagcaagcttctttttctatgagacaatagtgtgtggcttgcatgggtgagtaagaaaaatttaatctgcaacttaatctaattgggctttgttgctga

SEQ ID NO: 936321 - DNA, 627 bp, Homo sapiens
cagcagctgcagcaagactcacccaaggagagtctgggctcagacacacctagccctgcccccacctgatgggccttccctacccaccctggtagctgaagacaaagggcatatactcttgggagttctagggctctggccactgccggttcctctccgtactaatgctctctggaaagctaatgctctctggaaagcaccatctcctggcaggaggccaaccagcacaaaaatagagcattaaaccaccaaakctaagaaccctcacagagtccatttcatccccctaccacctccaatggaacaggtgctggtatccacggctgagagaccaacagacggttcacatcacaggacttgtgcaaacaaccccaggtaccagcccagagcctggtagacttgctgggtggctagacctagaagagagataattgctacagcttggctctcaggaagctaggaaaagggggacagtattacatcaaggaaacaccccactggacaaaagaatcttaacaacagccttgagccccagactttccctctgacagaacctatctaaatgagaagaaaccagaaaaccaactctggtaatatgacaaaacaaggctctttaacaccccccaa

SEQ ID NO: 936322 - DNA, 641 bp, Homo sapiens
caagaactcaaaagcaatgcaataaaaacaaagataaagagctgggacttcattaaactaaagaaattttgcatggcaaaagggacagtttgcagagtaacatcccacattctcccacatacattctacccacagttctgaataaagaactgaaaggaaaaggaactgtgggttgccctgtctttctcttcctttatgccatgaatttttctgtaagtggttrgctaatgcagagaagtgacatgaatgaaaaaggatatgattgggtttcttggccattcgtgtatgtcttagaatgtcattgtcttctttttgcactttaagaaagttctggtttaaatgaaaaacatggcctcttggggctgttggcatttccacttagccacatccataacacatttaccttgtattcctttgagaaaacaaaaaattctcatgtattgtgggtctaccagaatcctatagtcacagggcctcacaaacactacatgaaaacagatactgaggaatggtaggcatgcttattgtgcatatctctgttcactcacatgcttcgttgttccatcagacataatttcaaaaaaaaaaatacgagttcagagataaaattgttaacaatttcatgaggatgacagctgggc

SEQ ID NO: 936323 - DNA, 760 bp, Homo sapiens
ctgtgggacgattgggtgggtttcaaggctaacatttaagtcaggggactttgcataaagcgaagggtgaccctccataatgtgcgtgggtctcatcccatccgttgaaggccttcatagacagagactggcctctcccaagcaagaaggaatgctgcctgcttttgggtggacttaaactgcagctcttccctgagtctctagcctgcctcctaccccaccagattttgttctcatcaagcctctacaatggcatgagccaagtccctaagataaatgccctctgtctatttatatacatgtatatgtacatacgtcctgtcggttctgtttctctggagaaccatgactgatacatcaaccaaagaataaatatccattgggaattttaaaagttcagtatagtttatgtctttctcttatactatayggctttaaaaggcttatttcagttagagagtgttcatacattggaccagaatcccaggaccaagggacagaccctgtagatcattcccttcccctgatcagcccccgaggctgtagagaggagaacccgtcctgtgactcactagatttgattggctgtgacctttgtctttaaccagttggaatgttctcaagacctggacagacacatgccgataagaatctggcaaaagagaacatgggtggcatagagctaatggatgagtcactgaggccggctgggtagcaacaggctcatttaggctttaggatttggctgtgccatgaaatg

SEQ ID NO: 936324 - DNA, 760 bp, Homo sapiens
ctgtgggacgattgggtgggtttcaaggctaacatttaagtcaggggactttgcataaagcgaagggtgaccctccataatgtgcgtgggtctcatcccatccgttgaaggccttcatagacagagactggcctctcccaagcaagaaggaatgctgcctgcttttgggtggacttaaactgcagctcttccctgagtctctagcctgcctcctaccccaccagattttgttctcatcaagcctctacaatggcatgagccaagtccctaagataaatgccctctgtctatttatatacatgtatatgtacatacgtcctgtcggttctgtttctctggagaaccatgactgatacatcaaccaaagaataaatatccattgggaattttaaaagttcagtatagtttatgtctttctcttatactatatggctttaaaaggcttatttcagttagagagtgttcatacattggaccagaatcccaggaccaagggacagaccctgtagatcattcccttcccctgatcagcccccgagrctgtagagaggagaacccgtcctgtgactcactagatttgattggctgtgacctttgtctttaaccagttggaatgttctcaagacctggacagacacatgccgataagaatctggcaaaagagaacatgggtggcatagagctaatggatgagtcactgaggccggctgggtagcaacaggctcatttaggctttaggatttggctgtgccatgaaatg

SEQ ID NO: 936325 - DNA, 600 bp, Homo sapiens
tgctactagcctcagacttcagggatctttgataaggagataagcaataaagacatcacaggttctcttgggcatctgtgatttacagagtaggaaagacaacagcagcaaaagccctgtgctctgcagagacccaggcaggcttcactgcgcagaagcagyggcgaggcatccctcctcacccgtcccctggcctcggaagctggtgccagggtgtgcccagcctctctggctgtagacccctggagtccctttcatttgcttcatgagaggcctcaaagcaaatactccttagctcgagccttggcctatttggactttggggtctcagggtaattaaaggttgctttaaagatcaatggcagctttagaattatacctggaaggaggcggagagaagatggggtttgcacatggagatttatcatttctagttttttcttacctgaaagaaccacattattaatgacgatgaggtctcagcccctccaggaggctgaggggtgttcccgtgaggttccgtctgccaagactttggggcaggtgggtggaatcgctttgctttactcctggccacccagcccttccctttggcctgaa

SEQ ID NO: 936326 - DNA, 647 bp, Homo sapiens
gcaggtcatcccaacaagtgttcagatatcagcagagagggtagctcctctctgcaactggtcatccatcatctctctgtcctttctctgctctagctgaaactggaacttttatgggcctcagaggggaggaggtatgtgctgattggtccatgggtggctatgggtgggcctggaaaaggtgccacaggtccccactccagtctgcgggactggcagcctggctcccagccttcaggccctccctggcttgaagatgggacctcaacagggaccctctctgctcaggagcctgtctgcctcctgctggcattcatggcgcccaggctgtgggtgccaaggggcacctgcatgccagcacttagctgctctcagttccccatcggcttccctcctatgctcgatggtgcccaaagtccagaggaggccaaaggtggcagtgggctggcgtgtcagccctgccctgagcatttgctcatctgaccaggctgtgacagtgcttsgacttggccccgactttgctccaagatcagagtgggcaccgacagcagggagaagccaggcagtgggaacaggcatttctgagcctgtgagggcaggggaggccccgaagagtgcagagatgcctgggtctgcagccgcggttt

SEQ ID NO: 936327 - DNA, 762 bp, Homo sapiens
atcaacaaaaagcacaaaaaatatgaaaaacatgacactaactagactgcaaaaaggacacttgtttacatcatcagagtcaaaacaagaaggcagagggtcacctttttcaaccttagctggaaacatgcacatcaagtgactcaaatttttgctgctgtacgcatgtctgcagatgactgcaaaagctgtgtggatactagtttggtggttacaaatatattttattgattaaatgaattcaaaaatatggaatccaagaataatgaggactgactatatgtgtttcaagaccttgcatgtctaaaaatctcttcattctatcctctcatttgactgatagcttggctgggtaaagaaatataggttggggctaggcgtggtggctcacacctgtagccctagcactttgggagggcagattgcctgaggtcagcggttcgagacgagcctgggcaacgtggtaaaaccctgtctctactaaaaatacaaaaaattaaaaaattagccagggatggtggcacgtgcctgtagtccyagctactcgggaggctgaggtgggagaatagcttgaacccaggaagcggaggttgcagtgggctgagattgtgccactgcactccagcctgggagacaagagcgagactctgtctcaaaacaacaataataacaacaacaacaacaccacccaaagaaacctaggttggaaacacttctccttcagcatttcatagcattgctcctgcacctgctggctgtcaa

SEQ ID NO: 936328 - DNA, 762 bp, Homo sapiens
atcaacaaaaagcacaaaaaatatgaaaaacatgacactaactagactgcaaaaaggacacttgtttacatcatcagagtcaaaacaagaaggcagagggtcacctttttcaaccttagctggaaacatgcacatcaagtgactcaaatttttgctgctgtacgcatgtctgcagatgactgcaaaagctgtgtggatactagtttggtggttacaaatatattttattgattaaatgaattcaaaaatatggaatccaagaataatgaggactgactatatgtgtttcaagaccttgcatgtctaaaaatctcttcattctatcctctcatttgactgatagcttggctgggtaaagaaatataggttggggctaggcgtggtggctcacacctgtagccctagcactttgggagggcagattgcctgaggtcagcggttcgagacgagcctgggcaacgtggtaaaaccctgtctctactaaaaatacaaaaaattaaaaaattagccagggatggtggcacgtgcctgtagtcccagctactcgggaggctgaggtgggagaatagcttgaacccaggaagcggaggttgcagtgggctgagrttgtgccactgcactccagcctgggagacaagagcgagactctgtctcaaaacaacaataataacaacaacaacaacaccacccaaagaaacctaggttggaaacacttctccttcagcatttcatagcattgctcctgcacctgctggctgtcaa

SEQ ID NO: 936329 - DNA, 762 bp, Homo sapiens
atcaacaaaaagcacaaaaaatatgaaaaacatgacactaactagactgcaaaaaggacacttgtttacatcatcagagtcaaaacaagaaggcagagggtcacctttttcaaccttagctggaaacatgcacatcaagtgactcaaatttttgctgctgtacgcatgtctgcagatgactgcaaaagctgtgtggatactagtttggtggttacaaatatattttattgattaaatgaattcaaaaatatggaatccaagaataatgaggactgactatatgtgtttcaagaccttgcatgtctaaaaatctcttcattctatcctctcatttgactgatagcttggctgggtaaagaaatataggttggggctaggcgtggtggctcacacctgtagccctagcactttgggagggcagattgcctgaggtcagcggttcgagacgagcctgggcaacgtggtaaaaccctgtctctactaaaaatacaaaaaattaaaaaattagccagggatggtggcacgtgcctgtagtcccagctactcgggaggctgaggtgggagaatagcttgaacccaggaagcggaggttgcagtgggctgagattgtgccactgcactccrgcctgggagacaagagcgagactctgtctcaaaacaacaataataacaacaacaacaacaccacccaaagaaacctaggttggaaacacttctccttcagcatttcatagcattgctcctgcacctgctggctgtcaa

SEQ ID NO: 936330 - DNA, 762 bp, Homo sapiens
atcaacaaaaagcacaaaaaatatgaaaaacatgacactaactagactgcaaaaaggacacttgtttacatcatcagagtcaaaacaagaaggcagagggtcacctttttcaaccttagctggaaacatgcacatcaagtgactcaaatttttgctgctgtacgcatgtctgcagatgactgcaaaagctgtgtggatactagtttggtggttacaaatatattttattgattaaatgaattcaaaaatatggaatccaagaataatgaggactgactatatgtgtttcaagaccttgcatgtctaaaaatctcttcattctatcctctcatttgactgatagcttggctgggtaaagaaatataggttggggctaggcgtggtggctcacacctgtagccctagcactttgggagggcagattgcctgaggtcagcggttcgagacgagcctgggcaacgtggtaaaaccctgtctctactaaaaatacaaaaaattaaaaaattagccagggatggtggcacgtgcctgtagtcccagctactcgggaggctgaggtgggagaatagcttgaacccaggaagcggaggttgcagtgggctgagattgtgccactgcactccagcctgggagacaagagcgagactctgtctcaaaacaacaayaataacaacaacaacaacaccacccaaagaaacctaggttggaaacacttctccttcagcatttcatagcattgctcctgcacctgctggctgtcaa

SEQ ID NO: 936331 - DNA, 600 bp, Homo sapiens
ctgaccctagtccacccgcggctgctccctgcctgggcacggccccctgctgtttctgtacggctactcctggacattggctgggactggggcctgaggctgtcatactgcccttggccccagttttggagtcttaggtatggccctgtggccccaagtcatgtggtgaggtgtccaggacaggaaaggaagctactggggtcactcccaccctacccagaaagaaacttccaggcttagaagcctgccttcagccttgggctgctggccagacccccaagggttcctgcctcacgctggtggggtctggctgctggccctgcccaagaacctgggtgaattcatcagccacgttcctttgtctcaggaatatctcctgggactccagcaaacgckcttctcctgctgccattgccattttataaggtctcagcgtgtccgccccatggtcagtgtggtctgtgcagttgaagtcgaggctgactgatctggaccctcagccaccataggccacagccagccctcagccaccatgggccacagccagccctcagccaccataggccacagccaggcagccttctggggagagacagcact

SEQ ID NO: 936332 - DNA, 615 bp, Homo sapiens
ctggtctccaagtagatagtagcagaattgaggtcattgtagaatacccagttggcagccactgaaggatctggtgttagaaatgaatatgttgagtgactgttttgttttcctaatattacaaatcaaaccaaaatctgcaaatgtgacctgtaaatgaacactggaaaatttccagattaacattctggttagattatggaaaatactccaaaaggagaagggactaagtaaatgggagaaaagatagcagagagaagaaagctaattcttaaaatttcataaaattcattcattgtacctcagtaaagctaggaagtataggtcccatgttcaagttagtgcctcaacttgacattttaaaaatgataccagaaaagtttattttatattattccctgkacttcctttcataatttgtttatacttgtgcttgttgatttatcttaattgtcaatttgttgaaataataaatcaaatcaattctcagtagattactaggatatgctttgtgaatggagacagctcttacacagtacttaagacacacttctcttcagtaagtgttttaggatatttttcaatacatacttgcttttgcaggatagaccttaa

SEQ ID NO: 936333 - DNA, 615 bp, Homo sapiens
ctggtctccaagtagatagtagcagaattgaggtcattgtagaatacccagttggcagccactgaaggatctggtgttagaaatgaatatgttgagtgactgttttgttttcctaatattacaaatcaaaccaaaatctgcaaatgtgacctgtaaatgaacactggaaaatttccagattaacattctggttagattatggaaaatactccaaaaggagaagggactaagtaaatgggagaaaagatagcagagagaagaaagctaattcttaaaatttcataaaattcattcattgtacctcagtaaagctaggaagtataggtcccatgttcaagttagtgcctcaacttgacattttaaaaatgataccagaaaagtttattttatattattccctgtacttcctttcataatttgtttawacttgtgcttgttgatttatcttaattgtcaatttgttgaaataataaatcaaatcaattctcagtagattactaggatatgctttgtgaatggagacagctcttacacagtacttaagacacacttctcttcagtaagtgttttaggatatttttcaatacatacttgcttttgcaggatagaccttaa

SEQ ID NO: 936334 - DNA, 619 bp, Homo sapiens
ctcccatagctagcttggcgtatgtgcaggaatgggcaagaacagcttgtgaggttagaagcaagatggggtcaactatattatatgtctctcactattgtaattttgcaaaggtagtctcatgactttctccaggcctctcagaaagaaatttaaaacaaagaatgatggtcaaagttcagaccttagtttccccttatttgaggtctacatgccaatggatccatttggtagggatctgggctttggagaaacaacttagacacttatattgttatctttagtttctatagggaacaaaatgtctcgtgagttcgacttcattggctattattttaagctactgttacattctggcttatcacrtcttttatttacttctcaaggctagctaggtgcctgaaatttcctttgaaggaactcaagatttctctttatttccatacttggtggggaggtacacctgactctaagaggggggtcccggctctgtctcactggtgaaactctaataaatagtctaaacatccatttatgttcagcttaaaatcagaaatgttagtacccattaaaacatccaaaaagataattaatattataattttagagacctgttaga

SEQ ID NO: 936335 - DNA, 583 bp, Homo sapiens
tctgcagaatcacacagctaagtagaggcagaagtcttcagtcagcccatttcacctgcatcttattactgcattgacatggataattttctttacctcctttaattttttaaaaaagtttaaaatatttctttgtttggattttatgaattctttttccaatatattccagatagtctgggatattgttattgtgaatgggatgatgttttctcattatactttctagttggttattgatggtgtagaccctggtattcaaagagcagtccatgttgcagcagcgttggtatcacctgggagattgttagaaaggtccaatctctggcctggcatcacgtcagacctcgtgaatcagaatgtctttcagtaagatgttcatatgattcacayggacataaaaattgtaaaagaaatcaatatagagaaacttgatttagagaaccattgtcttaattttctcttgaagaaaaacactttcagttgcactatggggacagcggtccaattgtcccatagtactttctcttctgttcctaacccttactccttcagatctattcctgcaccccttccacaagag

SEQ ID NO: 936336 - DNA, 594 bp, Homo sapiens
ccagggtattgcagggtctgtcttagtgtctcaactcttactccaaacctactcaaaatgccctctcctttctgacatctaggggccaggaattttgcacagaagcagaaaaaagaaactttatttctggatctctgtctcctctagcctccccttaccaaacttgtgaaattacttaaaaggtttactgaaggcaggtctctggaccacgcacaaagaatcaaacaatttattacacacttcatgatctgagtggtgcataaaggagtgctgcataaaacttacattctcaagccctacttggaggtctcaggaacactgaaacagtgaaacttggaataaaacaattttccactatatctttagttttatcttccattcaatattataaatgtacgaggaagakaactaactagatttgaatgtaactagatggagccgggcacaatgactcacacctgtaatcccagcactttgggagactgaggcaggcagatcacttgaggtcaggagttcgagaccagcctggccaacatggtgagaccccgtatctactaaaaatacaaaaaattaactgggcgtggtggcgggcgc

SEQ ID NO: 936337 - DNA, 580 bp, Homo sapiens
ctgaattctaccagaggtacaaagaggagctgataccattccttctgaaactattacaatcaatagaaaaagagagaatcctccttaactcactttatgaggccaacatcatcctgataccaaagactggcagagacacaacaaaaaaagagaattttacaccaatatccctgatgaacatcaatgcgaaaatcctcaataaamtactggcaaacagaatccagcagcacatcaaaaagcttatccaccatgatcaagttgcttcatccctgggatgcaaggctggttcaacatatgcaaatcaataaacataatctatcacataaacagaaccaatgccaaaaaccacatgattgtctcaatagatgcagagaaggccttcaacaaaattcaacagcccttcatgctaaaaactctcaataaactaggtattgatgggacacatctcaaaataataagagctatttatgacaaacccacagccaatatcatactgaaagggcaaaaactggaagcattccctttgaaaactggcacaagacagggatgccctctctcactgctcctactcaacatagtg

SEQ ID NO: 936338 - DNA, 776 bp, Homo sapiens
gacaggggcgcccctgagtcacccgccctgcccacccgggccaagcagacggggtgctcccacaccatccgacggggcagcctcgcagcaccccccccacgcaccgtctggcgcccgcgtggcacccaccagatgaggcgcttgtccatcatggcatagggcagcccgcgcacgggcgtcccagagccgcgcagccgctccatctctgcctcccacagctcctccggctccggcaccccaggggcccgctccgatgacaccgaccgcggcagcagcatctcggcgggcacgggtagaggctggggcgccgggctgccggtgggggggatatgagtccccggttggatgagccttaaggccttggctatggcctctgtgcacgctgggctgggggcgggcccttccgtcccctctgcgccggcgtcggggcctgggctcctgcagccctagggttcacttgcccgagtctgccgctctgccacctccggggctcagaaatgagagagaatcctgctgsggtcgaattcgggcccagccccgctccaactctcagagggacacacagccacggcctcagtctccccatctgtcaaatggggtgaaagatccaaagggcacagaaagtctggaccggcacaggcaaagaaagccaagacctgctgcaccccgcatccacctgtgcctgggcccaccgtcaccccaaggagagacaattccctctcttctccacgtggcagtttgcccttccggaagagcctgtgtcccaaaccccacag

SEQ ID NO: 936339 - DNA, 798 bp, Homo sapiens
tacccctagactaagtaaactcttctaaccagacaaatacttcatggcctaataaacccaaaggaactatgaatgcccttaatactatgatttctggaaggtcacctaactttcctgaattgtaccagttagaagttatgcaaattcttctctattgtcctgttcacactgtacagtcatttacccattaatttgactaaaaagggctgcaacaattatgtaataagaaggcatacgggccgcgcacggtggctcacacctgtaatcccagtattttaagaggctgaggcgggcgcatcacctgaggtcaggagttcaagaccagcctggcctatatggtgaaaccccatctctactataaatacaaaaaattagcttggcttggtggcgggtgcctgtagtcccagctacttgggaggctgaggcaagagaactgcttgaacccaggaggtagatgttgcagtgagctgagatcgtgccactgcactccagcctgtgcgacagagagactccgtctcagaaaaaaaaaaaaaaaaaaaaaaaaaggagtcatacaacaacccaagctgcccacatctgtgttgccaggcactttaagagagagcaygggcttggccctgggatgatcaaatcaagctgtggggtgggcaggctccccagctaattgagcttctttgctgaacaccagtgagatgtgagagatgagtttggattggaattccattatgggttttcaataattaaacattacatgtttggaacctcattcttctgtattactttttaaatattaatcta

SEQ ID NO: 936340 - DNA, 566 bp, Homo sapiens
aaagtaacataaactgagtagcttataaagaacagaaatgtatttcttacagttctggagaagtttaagatcgaggcaccgatttggtgtctgatgagggcccactttctgattcatagatggcttcttcttgctgtgtcttcacatggtagaaggggcaagacagctctggggcctcttttatttatttatttggagatggagtctcactctgtcacccaggctrgagtgcagtggcatgatctcggctcactgcaacctctaccccctgggttcaagggattctcctgcctcagcctcccaagtagctgggactacaggcacccaccaccacgtccagctaatttttgtattttttagtagagacagggtttcaccatgttggccaggctggtcttgaactcctgacctcaagtgatccccctgcctcagcctcccaaagtgctgggattacaagtgtgagccactgtgcccagcctggggtctcttttataagggtaccaatcccattcatgaaggctcagccgtcctgacctaatcatctcccaaagaccctacttcctaaa

SEQ ID NO: 936341 - DNA, 606 bp, Homo sapiens
ccacactacagcatcacacaatttatccaggtaacaaatctgcatgtgtatcccctgaatcgaaaataaaagttgaaaaataaaataaaatagaaaaaccactagcaatattaaaaaagaaaatgagatatggcacaaataaataattttagcaatgaaaaaggaaaataacttcatatccagcaagatttttaaaatttaaaataatactttggttaattttatgccaataaatttgaaagtttaaaaaaatatataggctaggcacaatggctcatgcctgtaatcccaacactttcagagcccgaggagggagaatygcttgagcctaggagtcggatactggcctgggcaacacagggagaccttgtctctaccaaaattttttttaaaaattagccgagcatgatggcatgtgcctgtgaccccagctaattgagagactaaggtgggaggatcatgacactgaacttaagcttgggcaacagagcaggaccctgtccccccccaaaaaagtgtgtgtgcgtgtgtgtgtgcatgtgtgtgtaaaacttcagaaatgtttagtcacaattacagacactgataaagtaattgaacatcttc

SEQ ID NO: 936342 - DNA, 567 bp, Homo sapiens
ctagaaagtaaagagcctagggtggatccttaaattctgcctccctgtatctctgacaacgactcacacttggatcacccaagcacacagacttaaagcactccagctaaagacaaaatatgtgaagagacgagatgccacccaagaaacggagtttgcagttcaagtccatccaatataattgcctactaaaacaaagggacatcattcaccagagaaaagtgacagaataaagaatctccacaaattagtatccacaatgtctcggttacagtccaaaactgtaaccagatacagccgggcacagtgagtggttcatgtctgtaatcccagcattttgggaggctgaggcaggcggacagctagagctcaggagtttcagaccagcctaagctacatagtgagaccctgtctctacraaacatcaaaaattaaccagatgtggtggcacatgcctgtagtcccagctactcaggaggctgaggtgggaggattgcttgaaaccagaagttcaaggctacagtgagccgtgatggtgccactgcactccagtctgggcaacagagt

SEQ ID NO: 936343 - DNA, 634 bp, Homo sapiens
ggcctccactgtgattcaccaatgggcctgccaaaggctccaaacagcattttcatctgccactgacacctcaagcaccattgaatctgccggctcatatggcccaagtggcagagcagcttgcacagcagcctggatctactgcagagccttctcctgttctgaaccccattcaaaactggcagccttttgggtcactcaataaatggaccaaagtaacacactcagatgagaaatgtgttgcctccaaaatccaaatagcctgactagacattgtgtctctttcttrgctgtaggagaggccaagtgcatcaacttattcttcaccttagaaagaatatctcaacagtccccacaccactgaacccctagaaattatactgaggtagaaggtccctgaactttagttgcatttatttaccatcctctggcatgcaaatgtttcactaataagtccaatgtgtttgctacttcttgctcactggatccaatcagcatagtgtcaccaatgtaatggaccattgtgatgtcttgtgaaaggaaaaagtgatcaaggtttctccaaataagattatgacacaaagctggagagttgatatatccctgagataggacaatgaaggtatattgctag

SEQ ID NO: 936344 - DNA, 481 bp, Homo sapiens
caagacctgaagacagatcacatcacaggactctttgcagacactccatattatcagcctggagcccagtagctctgctgggtgtctagacccagaagagcaaaaacaatccctgcagtatggctctcaggaaaccccatttctaggggaaggggaagaacaccaaatcaagggagcacaaaagaatctgaacagcagggcctgaatcctaaatcttctctttgacatagtctacccaaatgagaagkatccaggaaaacagtactggtaatattacaaaacaaggttttttaacacctccaaaagattatacaagctcaccagtaatagatccaaaccacgataaaataactgaattgccaggaaatgaatagagatggtcaattattaagctaataaaggaggggccagacaaaggtgaagtccaacttaaagaaatcaaaagacatgatacagaatataaaaagaaaattcttagtga

SEQ ID NO: 936345 - DNA, 481 bp, Homo sapiens
caagacctgaagacagatcacatcacaggactctttgcagacactccatattatcagcctggagcccagtagctctgctgggtgtctagacccagaagagcaaaaacaatccctgcagtatggctctcaggaaaccccatttctaggggaaggggaagaacaccaaatcaagggagcacaaaagaatctgaacagcagggcctgaatcctaaatcttctctttgacatagtctacccaaatgagaaggatccaggaaaacagtactggtaatattacaaaacaaggttttttaacacctccaaaagattatacaagctcaccagtaatagatccaaaccacgataaaataactgaattgccaggaaatgaatagagatggtcaattattaagctaataaaggaggggccagacaaakgtgaagtccaacttaaagaaatcaaaagacatgatacagaatataaaaagaaaattcttagtga

SEQ ID NO: 936346 - DNA, 734 bp, Homo sapiens
ctggacctggagcctcagcctgggggtcagtgttggctgctgctcctgcacaagtcagtgggcttctctgagcctcagtttcctcatctgtagaatggggattagaatgctacctactgggccaggcaccgtggctcacacctataatgccaacactttgggaggccaaggtgggtggattgcttgagcccaggagctcgagaccggcttgggcaacatagggagacccctgtctctacaaaagaatttaaaaaattagccaggtgtggtggcacgaacctgtgtttccagccacttgggaggctgaggcaggaggatcacttgagcccaggagttggaagctgcagcgagccacggtcgagctactgcactccagcctgggtgacagagcaagaccctgtctcaaaaaacaaaacaaaacaaaacaaaacaacaacaacaaaaaaaaaaamcccagaaaaccaagaatgttacctactgcgttggggtttttagaggatgaaattagatgatcaggagatgaaatgcgtagtgcagtactgggcctaataaatgtgcaacattattatttgaaaccagggcctgtgtgcatattggcagatgaggatcctgtctctagaggggtccaccccacctggccagatacacagtaaggaatgagccgagtgggagcaggggaagtttcaggtgattcttccatgaaatgatggacacagggcgctggcccagtgtct

SEQ ID NO: 936347 - DNA, 588 bp, Homo sapiens
gcaattcttttttttttttttgagatggagtctcgctctgtcgcccaggctggaatgcagtggcacaatctcagctcactgcaacctccacctcccaggttcaagtgtttctcctgcctcggcctcccaagtagctgggattacaggcacgtgccaccatgcctagctaatttttgtatttttagttgagatggggtttcaccatgctggccaggctggtcttgaacttctgacctcttgatccgctggcctcagcctcccaaaatgtttggattacaggcgtgagccatcgcgcccggccggttcaagcgactcctgtacctcagcctcccaggtaggtgggatcacagacatgtgccaccrtgcccagctaatttttgtatttttggtggagatggggtttcaccatgttggccaggctggtcttgaactcttgacctcaggtgatcagcccaccttggtctcccaaagtgttgggattacaggcgtgagccaccacacctggccctctctgcagtttatacttgaggaaactgaggcccagacaggtgaagtgactgtccagggtggtccagacagaggtggttg

SEQ ID NO: 936348 - DNA, 727 bp, Homo sapiens
ctccccgcaggaggaatgagaatcgcactcctagagtccatccccccaggaggaatgagaatcgcactcctagagtccatccccccaggaggaatgagaatcgcactcctagagtccatccccccaggaggagtgagaatcgcactcctagagtccatccccccaggaggaatgagaatcgcactcctagggtccatccccccaggaggaatgagaaccgcactcctagggtccatccccccaggaggaatgagaacatgtccacacacaaacctgtacacgcctgttcttagcagcaccgttcccaacagccagaaagtggaaagagcccaagtgtccgtcagcggtcccacggaaaaacaaccttcatatacagccatgactggaatattattcagccttaaaaaggaatggcattctgatgaaccggcaacacggatgaacctcggaaacatgacgccgagtgaaggaagccagtcaccgaagtctgccctgttggagcccagtgatgtgaaacttccggaacaggcaaggtcacagaggccgaatgaaggcccgtggcygccagggtccaggacggagatggggagtggttgctgacgggtatggcgttgctttcgaggagatgaaggtgtcctaaagttggctgtggtgatggtcgcccaacctgggaattgatgctttaagtggcaaattttattgtatgtgaatcatatctcaataaaac

SEQ ID NO: 936349 - DNA, 774 bp, Homo sapiens
tccactctacttggattcttcagcgtcggagacatgcgttttctccccatttcgtaatcggttcagtcactctcactgtttatcagtgtggactgatagatgcgtttgtcctttaggctgcgatccagggctgctttatttaccgggttgccaggtatgttagctctggccatgggcgctccccctggcactcgtgggctccgttggcacagcccatcagtgactgtgtgttttgagctgttcttcacttcttggcaccaccagtgactcctggctcatcytgtctagctcctgtcctagtctcagaaacagccgttaccccagggagtgtgggtttctttcatcacagagtactattagaaacctaggtcttggccgggtgtggtggctcacgcctgtcatcgcagcactttgggaggcagaggtgggcggatcacctgagatcaggagttcaagaccggcctggccaacgtggcaaaaccctgtctctactaacaatacaaaaacaaacaaacaaaaaaacatcagggtgtggtggcgggcacctgtaatcccagccacctgagaggctgaggcaggagaattgcttgaacccaggaggcagaggtagtggtgagtcaagattgcttcactgcactccagcctgggaaatagagtgagaccctgtcttgaaaaaaaaaaaagagagagagagagaaacaaaaaccttggtcttggtgtccagcatccttgttgctaatggagtgtcattcattgtttctcagccttcttggc

SEQ ID NO: 936350 - DNA, 608 bp, Homo sapiens
ctttgtttttttaatcaagttagaatgatctcttatatatccaggttgttgagtttttattgtgaatgggcattgaattttgtcagttgctttgtttttccttctgcatctaatgagattattatatgattgttattctttattttgttaatatagtgaattacattgatttcaaatatgaaggaactgtttgttcctaggatgaatcctgcttggtcactacgtactattggattcaatttgctaataatttgttaaggaattttacatttgtgwtcatgagagatactgagttgtagtcttccttctttgtaataaggagtttggtaataagaactttggttttcatatcagagtaatactccctcaaaaaattagttgggaaatcgttcttcctgttctgttttcttaagatgtttatgaaagattgatattactttctacatcaaatgtttgccagaattcacagtttagccatctaaatttttttatatagaaagtgctttttttcttttctttcttttctttttttttttttttttaagatggactccacgttgccaaggctggtaatttgtttcctcttgatcaatataaagacgtttcaa

SEQ ID NO: 936351 - DNA, 608 bp, Homo sapiens
ctttgtttttttaatcaagttagaatgatctcttatatatccaggttgttgagtttttattgtgaatgggcattgaattttgtcagttgctttgtttttccttctgcatctaatgagattattatatgattgttattctttattttgttaatatagtgaattacattgatttcaaatatgaaggaactgtttgttcctaggatgaatcctgcttggtcactacgtactattggattcaatttgctaataatttgttaaggaattttacatttgtgatcatgagagatactgagttgtagtcttccttctttgtaataaggagtttggtaataagaactttggttttcatatcagagtaatactccctcaaaaaattagttgggaaatcgttcttcctgttctgttttcttaagatgtttatgaaagattgatattactttctayatcaaatgtttgccagaattcacagtttagccatctaaatttttttatatagaaagtgctttttttcttttctttcttttctttttttttttttttttaagatggactccacgttgccaaggctggtaatttgtttcctcttgatcaatataaagacgtttcaa

SEQ ID NO: 936352 - DNA, 636 bp, Homo sapiens
aaatgagtgcagagtttattggagaagtcagagtctgagaaacatattttggtatcatcagcatggagaatattaaagtcatgaatctgatgagatcacctaaacagaaagtttagctggaaaaaaaggataaatcagggctacactcaggatcactcaattcctcaaargtatcaacttttattttgctgtgattttcactttccagcctgttcttcagctactaagtaggtacttgaatatatttaaagaataagatgctgtaatgaaatctagtgaacatgatttttaagcccatttgccacaggtcaagattgacaggacatttgattgaattctcataatcacccttagctggatacagatcccaatcagtcctcatcattgacaaggctatgaaatgcagaactaaaataaatggccactggtatttctgcaaaagtggtgcacaacttggcctcccagaggaacatcagctcctcctgtctgatggccttcaaactgggacatcagctcctgttctacagagcttccagccctcagatttcaactgggaaataggggtcttcatactttggacttaaccagatccagcttccacaattgcttgaacaaattccttatgataaaatctct

SEQ ID NO: 936353 - DNA, 600 bp, Homo sapiens
actagagatttgtcttagtcaacttgagctggcataacaaaatactataggctgggtagcttaaacaatggatatttatgtctcagttctggaggctgggaagtccaaagtcaaggtgctagcagattttcttcctggtgagggccctcttcctaacttacaaagttgctttttcctcccatgggaggaagagactaatctctcttgctctaaggatattaatcccatcatgggttccaccctcatgacctcatctaaatccaattacctccaaataccaccayattgggagttaggtcttcaatataaattggggaatggaggatgcaaacatgcggtccataacaaacctcctgtgcacgttttctcctctacatccttctgtgtctaggaggctgaactttacagattgcatcacctgggctactgtgccatcagtcttctggttgggttaggccaatgggaggcatgggcaggaaatcagaggttagaaggacatggcagttggggtatccctccatcttccttctgggcatggttttggcagtgtcattcctcaagagccacagcttgttaggtggccactttccttgctccagg

SEQ ID NO: 936354 - DNA, 646 bp, Homo sapiens
cttccccaggctctggaggaggacgggtgtccccgtcttctccagcggctagaggcttcctgcggccttggctcgtggccacctcacgtcacctttccttcctctgctccgtcactgcgtcacctttctgcctttgacctcctgcctccctctaaggactctgctggttgctctgggccccctggatagtccagggccattgccccacctcgagagccttcgttcaatcacatctgcatcgctccatctgtcatggaaggcaacatagtcacaggttccagggctcgggatgtggacgtctttgaggggcagggggagcacgttattctgcaggccgcagcgtgggagctgggaggctgtcaggctcctgctgtcacacagcgaccatggtgcttagaccaaggggcgtggaggaagtggcragaggcactggactgtgaagattctgaagacagagccaagagggttgctcacacatggagctgggtgtgagggaggggagacgccagggatgagggtgagggtcttgtcctgagctactggaaggatggcgatgatggccaggaaacaggaagaataggttggggaggagaggagaaggcaggagtctgctttcaggcaggttgaatacaaaatgcctgtggag

SEQ ID NO: 936355 - DNA, 825 bp, Homo sapiens
caccacgttcactgatgaacgacacgtgatctctcccttccctcctccagttggcttcctccgttttctcatctgtgtggtatttatataacaactgtctcttaaaatacctttccaggtgttagtgttttcattcttttttttctttttttgagtctttcagaacatcaactagtcagtcaccccaagggcttgtgaaggaggagggtacaggcacagacacaccttgtcttattgccctttgtcttattgcactttgcagatactcattttttactaattgaagatttgtggcaaccttgcattgagcaaatctatcagtgccttctttttttttttttggagatagagtttcacttytgttccccatgctggagtacagtggtgcgatcttggctcactgcaacctccgcctcccaggttcaagcgattctcctgcctcagcctcccaagtagctgggcacctgccaccatgcccagctagtttttgtatttttagtagagacagggattccacatattggccaggctggtctcaaactcctgagctcaggtgatctgctcacctcagcctcccaaagtgctgggattacaggcatgagccaccgtgcctggtctatcagtgccatttttccaacagcacatgctcactgtgtttctctgtgtcacactttggaaattctcacaatattttaaaattcttttattattattacatctgttgtgatctttgatattactattgtaattgtttgggggcaccatgaaccacacccatataagacagcaaacttaataaatgtggtcctgactgctacactgacc

SEQ ID NO: 936356 - DNA, 587 bp, Homo sapiens
aggtcaggcattcaagaccagcttggccaacatggtgaaaccccatctgcactaaaaatacaaaaattagcctggtgtggtggcgtgcacctgtaatcccagcttctcgggaagctgaggcaggaggatcgcttgaacccgggaggcagaggttgcagtgagctgagattgcgccactacactccagcctgggcaacagagcaagactctgtctaaaaataaaaataggccgggcgcggtggctcacacacacctgtaatcccagcactttgggaggccgagacgggcggatcacgaggtcaggagatcgagaccatcctggctaacatggtgaaaccccgactctacyaaaaatacaaaaaaatagctgggcatggtggcgggcacctgtagtcccagctactcgggaggctgaggcaggagaatggcgtgaacctgggaggcagagcttgcagtgagtcgagatcgtgccactgcactccagcctgggcgacagagcgagactccgtctcgaaaaaaataaataaataaataaaataaaaataaaaaataataaaagaaaggacagagtgaggtgtcatgcacaa

SEQ ID NO: 936357 - DNA, 676 bp, Homo sapiens
gaatggtcagttgtggggaatgggcagtggagaggatcttcttgggctctgagttactctagtcccctgctccatcccagggatcagcatctttcagaacttcagagtggagagactctggtctctgaatgtccactactacrttctcacaaagtggttgaccaacatatgcttgaatgcctcccacctctcattgaggcccattctacctttggtagaataattagctttaattattagaaagtccttcctcataaaggatctacatccactctctggtctttggtctttgctctcaagatatgcagaatcaattcggtttctattccaggagttgaaagaccattatcatctgccccttgaatcttctctcccagttcagtatcttcatgtcttccctgtggtcatgggctcttctcaccatcctgatttctacctctggactctacagtttgtctctgtccctctcaaaatgggccacacactcctcacagggtttgactctcacagagtctggggcctatgagccccattgttctgggtactaaagctctcttagtgcatcccaaagtcatgttagtgcttttggcaagcagatcacagtcaattctttccaatctcttatcagccagagtcctcctgtcttcatacactatcgttattccacccctcacgt

SEQ ID NO: 936358 - DNA, 709 bp, Homo sapiens
ccactaccaccaatgcgcggagaccggtagtggccccgaatgtcgggctgcgctgttatttattggatacaaggcagaaggggcaaggtaaagaatgtgagtcacctccaatgataggtaaggtcatgtgggtcacatatccactggacagggggcccttccctgcctggcagccgaggcagagagggagaggagacaaagagaaagacagcttacaccattatttctgcatatcagggactattagtattttcactaatttactactgctatctggaaggcagagccaggtgtacaggatggaacatgaaggtggactaggagcgtgaccactgaagcacagcatcacagggagacggttaggcctccggataactgtgggtgagcctgactgatgtcagggcctccacaagaggtggaggagcagagtcttctctaaactcccccrgggaaagggagacccccccccccaccccgctttcccggtctgctaagtagctggtgttgtttcttgacaccttttgctaccgctggaccatgatccgcttggtgacgggcgtcttcccagatgctggcgtcaccgctagaccaaggagccctctggtggccctgtccaggcataacagaaggctcgcactcctgtcttctggtcacttctcactatgtcccctcagctcctatctctgtatggcctggtttttcctaggct

SEQ ID NO: 936359 - DNA, 593 bp, Homo sapiens
atgtagaagacgctcattttatttattggaaaaatccagctttttaactccctgctttaattctttaattcttgctcctgacaatctattttcaacaaaaccttcaggatgtatctattaaaatctaggtggcattacctctctgccccatctcactcagggtaaatgctgaagtccttataagagcctataagaaccggtgtaatttacatccccaaggtcccaaatgcatcctcactccactctgacctcacccccttgctttcattccctgatctcaccacattggtctgcctttctactggctggttcttctgcttggaaacctctcctcctactgcatccttgctcaccctctcgtctttgtccagactttgttcaaatttgcccttckcaagtagccctcctctgatcaccctgcttagagctgcatccctcccctctcggcttgatttccctatgtagcacttacatatcaccatcttatatcctacgtacctttcgtactcactattttgttcactgtctttcttccctctctagaatcaaagttccataaggccagggattccctgctgaatcctagcaccaag

SEQ ID NO: 936360 - DNA, 593 bp, Homo sapiens
atgtagaagacgctcattttatttattggaaaaatccagctttttaactccctgctttaattctttaattcttgctcctgacaatctattttcaacaaaaccttcaggatgtatctattaaaatctaggtggcattacctctctgccccatctcactcagggtaaatgctgaagtccttataagagcctataagaaccggtgtaatttacatccccaaggtcccaaatgcatcctcactccactctgacctcacccccttgctttcattccctgatctcaccacattggtctgcctttctactggctggttcttctgcttggaaacctctcctcctactgcatccttgctcaccctctcgtctttgtccagactttgttcaaatttgcccttcgcaagtagccctcctctgatcaccctgcttagagctgcatccctcccctctcrgcttgatttccctatgtagcacttacatatcaccatcttatatcctacgtacctttcgtactcactattttgttcactgtctttcttccctctctagaatcaaagttccataaggccagggattccctgctgaatcctagcaccaag

SEQ ID NO: 936361 - DNA, 642 bp, Homo sapiens
taaataaaattgaaaaaaagacataaaattaaaatagatcgatttgactgtatcaaaatttaagatttctccaaagacacaatacaattaaatgacaagaatcacaatacagaaaatatttgcaatacacataaagtatacaaaatacataaagaacttctaaaaaatcaataaggaaaagacaacrtaccctaaaaaaaagaaatgggcaaaagatttggacaagtaatgcagagaaggaaatataaatggataggagacacagacttcagccatcctggtaattcagaaaaatgcaaactaaaacaagatattatttttcacccaccagattggttaaaatgtaaaacttggagatggtctggagaaatggacacacatactgctggcatgaaattaaatcagaaaggtactttgaagaacattttagcagttactattagaatttaagatgtgtagactctatgacccatcaattctgtttctaagtatctgctccagaaaaacacttgtacatgagcaaaagtggcatgtacaaggatgctgttacaggtttgtcttattgaaacaagactggaagccttttaatagtcgatcaataagcaacaactaaataaatcatagcacaatcagttctggttg

SEQ ID NO: 936362 - DNA, 749 bp, Homo sapiens
ttctctcaactcctcacaagcaatgctgcttcctgcccctcaggcgggacaggtatggccccattcaaaagtatttttcgggccaggcatggtggctcacgcctgtaatcccagcattttgggaggccaaggtaggcagatcacttgagatcaggagtttgagaccagcctgaccaacatgttgaaaccccatctcagccaggcacggtggctcacgcctgtaatcccagcactttgggaggccgaggcgggtggatcacaaggtcaggagatcgagaccatcctggctaacacggtgaaaccccgtctctactaaaaaamcacaaaaaattagctgggcgtggtgacgagcacctgtagtcccagctactcaggaggctgaggcaggagaatggtgtgaacctgggaggcggagcttgcagtgagccaagatagtgccactgcactccagcctgggcgaaagagcaaaactccatctcaaaaaaaaaaaaaagaaaccccatctctactaataacacaaaaattagctgggcatggtggtgggcgcctgtaatcccaactacttgggaggctgaggcaggagaatcacttgaacctgggaggtggaggttacagtgacctaagatcacgccattgcactccagcctgggcaacagagtgaaacggtgtcttatgtcacagttagatgcagtgaaaagagctggactgggcatgagaaaactcaagttctagtcccaaatctgttactc

SEQ ID NO: 936363 - DNA, 654 bp, Homo sapiens
tcaccctgctctggcccagggttccagggctggcttggccccaccactgcttcccatcgtgccccatcactgcttgtggagggcagagggccatagcattacagccttctttgtacctgcatccaataagaggggtcccaagttctttttcctgcatccaataagaatgaagttacactgacaatcaaagggtgaggagggcagagaagaattttgttgagtgatgaaacagctctcagtggagaggggatgtgagggtggtcccccatccaaagtagggtggtctatctctgtatggctgggtctagggcttttatgggcttagaattgggagtgcatgctgagtggtttgtgagtatgcaaaaaaagttgaacaaaggcaccaytcaaaggtgggcaagacagtgtaaaaaaccaattagggaagggtagttatatgcaaacaggtgaagggtagggatcaatcagaggaaagcatgccaaacaggaagacaagttctcaatccagtccatggatttatccagaacttgtagctagaatttaaactgtcttcggtttgaaggctgggtttcactggggacctgcccctgtctgcctagggctttgtctgcctcctgcctctgtcaaaaatgctttgctttgtttaaaagggg

SEQ ID NO: 936364 - DNA, 602 bp, Homo sapiens
tgttgataaaaagtaaaaaaaaaaaaaaaaaaaaagtaaaaagccaatgtatgagttttatgcacgtccgtgtgaagagaccactgaacaggctttgtgtgagcaacaaggctgtttatttcacctgggtgcaggcaggctgagtctgaaaagagagtcagtgaagggagataggggtggggctgttttataggatttgggtaggtaaaggaaaattacagtcaaagtggggttgttctctggcgggcagagtggggggtcacarggtgctcagtaggggagcttttgagccaggatgagccaggagaaggaatttcacaagataatgtcatcagttaaggcaggaacaggccattttcacttcttttgtggtggaaagtcatcagttaaggcaggaactggccatctggatgtgtacgtgcaggtcacaggggatatgacggcttagcttgggctcagaggcctgacattcctgtcttcttatattaatgagaaaaatacaacgaaatagtggtaaagggttggggtggtgaagattttgggggtggtatggagagataatgggcgatgtttctcagggctgcttcgagtgggattagggg

SEQ ID NO: 936365 - DNA, 607 bp, Homo sapiens
tgagcagaagttaatgaatttaaaaaaatgcataaacttaaaaatcaaatgaagatctttattgtattttgaaagagtggatccatgagcactgcactgaacacatgccacttaaaggtatactgaccataaaacgaagaaagatctatcacaakgaatggaaaattgaaaagaactagaatattcagcaagctagtttcagagatttagaaaaagccacaacattaaattgttgaaatttgtggtgagaaagcatctgctgtcataaagcagcagggaaattcagtgacaagtttaccaaagtccttgctgatgaaaatctcatgtcagaacaagtctacaatgatgataaaatatcatgttttggaattattgccccagaaagtcacagagtacaggcgaagagacaggaattaaggatgcaaagcacagaataactctgttaggatttgctaatgcagcaggcatgcataagtctaaacttgctgtgataggcaaaagcttgcattctcactggttttaaggagtgaatttagtactagtccattattatgttaacaaaagggcacgtgtcaccagggacatgttttctgattttttctcaagc

SEQ ID NO: 936366 - DNA, 514 bp, Homo sapiens
cattcttaaagaaaagaattttcaacccagaatttcatatgcagccaaactaagcttcataagtgaaggagaaataaaatcctttatagacaagcaaatgctgatggattctgtcaccaccaggcctgccttacaagagctcctgaaggaagcactaaatatggaaaggaaaaaccagtagcagccactgcaaaaacaacccaaaatgtaaagaacattggcactatgaagaaactgcattaactaatgggcaaaataaccagctagcatcataatgacaagatcaaattcacacataaaatattaaccttaaatgtaaatgggctaaatcccccaattaaaagacacaaactggcaaattggataaagagtcaagrcccatcagtgtgctgtattcaggggacccatctcacatgcaaagacacacataggctcaaaataaagggatggaggaagatttaccaaacaaatggaaagaagaaaaaaaaaaaagcaggggttgcaatcctagtcc

SEQ ID NO: 936367 - DNA, 637 bp, Homo sapiens
aggcagctaggagtggggctgtaccctgcaaagccacaggggcagagctgtgaaaagccatgagagcccaccacttacatcagcatgacctggaagtgagatatggtatcaaaggaaatcgttttgtaactataaggtttaatgactgccctattggattttggactkgcatggggcctgtagcccctttgttttgaccattttctctgatctggaatggttatatttaccaaatgcttgtacctccattgtatctaagacttaactaacttgcattttatttcacgggctcataagtggaagggacttgcctagtctcagatgagactttggacctggcatttgggttaagcctggaatgagttaagactttgggagactgttgggaaggcataattgtgttttgaaatgtgagtttatgagattgggaggggccagaaacaaaatgatatgttttggctctgtgtccccacccaaatctcatcttgaattttaatctcataatctccacatatgtgagagagacccagtgggagacaattgaatcatggggacggtttctcccatgcttttctgatgatagtaagtgatttctcagaagatctgatggtttcataaggggcatctccccatttgc

SEQ ID NO: 936368 - DNA, 657 bp, Homo sapiens
atgatggggaacatggtgagaccagtgaatatcaacagcatgaacccactgccacacatctttagccataaagtaagtgacttggtcaaaggcaatgctgtgtggaattccatgacagtggaaaaggcattccatgattccacagatggtagtcttggcaaaagaattgcatgcaggataggcaaacccatatctggaataagtgtctattccagtgaggacaaacctctgccctttctatgatggaacaggttcaatataatcaactggccaccaagtagctgcctgatcaccctgagaaatggtaccatatcgagggctcagtgttgatctatgctgctggcaaattgggcactcagcagtggctatagccaggtcagccttggtaagtggaagtccatgttgctgaacccatgcataamctccatccctgccaccatggccactttgttcatgggcccattgggcaatcataggggtggctggggaaagaggttgggtggtattcacagaatgggtcatcctctccacttgtttatttaagtcttcccttgcagaggtcacccattggtgagcactcacatgggatacaaatatattcagtttttgaccactcagggaggtccatccacatacctcttccccaaatttctttat

SEQ ID NO: 936369 - DNA, 627 bp, Homo sapiens
gtgttccacaaaaaattaaaaatagaactaccatatgatccagcagtcccacttctgggtatatatccaaagggattgaaatgaggatcctgaagagatatctgcactcccatgttaattgcagcattgcctgcaatagccaagaaatggaagcagcctaaatgtccatcgaaggtaaagaaagaaaatgtggtatatccataygatggaatgttattcagccttaaaagggaaggaaattctgacacatgccacaacatggaggaagcctgaggacattatgctaagtgaaataggccagttacaaaacaacaaatactgtatggcttctcttatgtgagttatctaaagaaaaactcttacaaagtagaatggtggttgcaaagagtaggggatggacagaggcagggggaagggagttgatgggtattgagtgtggttttacaagatgaaaaagttctggagatcttttgaccaacaatgtgcacagagttaacacccctgttctggacgcttaaaaacggttaagatgggcccggcgcagtggctcatgcctgcaatcccagcactttgggaggctgaggcgggtggatcatgaggtcaggagatcaagaccatcctggctaa

SEQ ID NO: 936370 - DNA, 522 bp, Homo sapiens
cgaagatgcggagaaggccgaccggggtcacgacacagtcttaatgttacatttgtaaagaatatcaccactcaatttatggtttgtgggtttttttttttttggttttttgttttgttttgttttgttttttttgaggtggagcctttctctgtcacccaggctgcagtgcagtggtgcaatctyggctcaccgcaaactctgcctcccgggttgacaccattctcctgcctcagcctcccgagtagctgggactacaggcacctgccaccatgcctggctaattctttgtattttcagtagggatggggtttcaccatgttggccaggatggtctcaatctcctgacctcatgatctgcccgcctcggcctcccaaagtgcttggattacaggtgtgagccactgcgcccagcacggtttgtgtttttaatccttatgtctttctggcagctaaaaagcaccagctccaggtaaacaacacccaattgacctgtaaatcttgtcagttatatcactgcat

SEQ ID NO: 936371 - DNA, 522 bp, Homo sapiens
cgaagatgcggagaaggccgaccggggtcacgacacagtcttaatgttacatttgtaaagaatatcaccactcaatttatggtttgtgggtttttttttttttggttttttgttttgttttgttttgttttttttgaggtggagcctttctctgtcacccaggctgcagtgcagtggtgcaatcttggctcaccgcaaactctgcctcccgggttgacaccattctcctgcctcagcctcccgagtagctgggactacaggcacctgccaccatgcctggctaattctttgtattttcagtagrgatggggtttcaccatgttggccaggatggtctcaatctcctgacctcatgatctgcccgcctcggcctcccaaagtgcttggattacaggtgtgagccactgcgcccagcacggtttgtgtttttaatccttatgtctttctggcagctaaaaagcaccagctccaggtaaacaacacccaattgacctgtaaatcttgtcagttatatcactgcat

SEQ ID NO: 936372 - DNA, 522 bp, Homo sapiens
cgaagatgcggagaaggccgaccggggtcacgacacagtcttaatgttacatttgtaaagaatatcaccactcaatttatggtttgtgggtttttttttttttggttttttgttttgttttgttttgttttttttgaggtggagcctttctctgtcacccaggctgcagtgcagtggtgcaatcttggctcaccgcaaactctgcctcccgggttgacaccattctcctgcctcagcctcccgagtagctgggactacaggcacctgccaccatgcctggctaattctttgtattttcagtagggatggggtttcaccatgttrgccaggatggtctcaatctcctgacctcatgatctgcccgcctcggcctcccaaagtgcttggattacaggtgtgagccactgcgcccagcacggtttgtgtttttaatccttatgtctttctggcagctaaaaagcaccagctccaggtaaacaacacccaattgacctgtaaatcttgtcagttatatcactgcat

SEQ ID NO: 936373 - DNA, 522 bp, Homo sapiens
cgaagatgcggagaaggccgaccggggtcacgacacagtcttaatgttacatttgtaaagaatatcaccactcaatttatggtttgtgggtttttttttttttggttttttgttttgttttgttttgttttttttgaggtggagcctttctctgtcacccaggctgcagtgcagtggtgcaatcttggctcaccgcaaactctgcctcccgggttgacaccattctcctgcctcagcctcccgagtagctgggactacaggcacctgccaccatgcctggctaattctttgtattttcagtagggatggggtttcaccatgttggccaggatggtctcaatctcctgacctcatgatctgcccgcctcggcctcccaaagtgctkggattacaggtgtgagccactgcgcccagcacggtttgtgtttttaatccttatgtctttctggcagctaaaaagcaccagctccaggtaaacaacacccaattgacctgtaaatcttgtcagttatatcactgcat

SEQ ID NO: 936374 - DNA, 799 bp, Homo sapiens
tgtgataacatgcacagagtattgccaaccagggaagctcacctgaactttggtatctagagtttttaatgaggcttcactacatgggcatgattgattaaactcaatcttcagcccactccaccccaaccctggaggttgggttgaaagctctcacagtaaattctatgtttggtttttctggtgtggccagcccctccaccctaagactatcaggtgtgagtggcgttatgaataatctcatcaacataaactatcaggtgtggtcccagtgactcaacaggaataaagaggacactcctgtcatgttggaaattctagacatttctttgagtgaggccaaattccttacaacatggaagtttatccattatagcatttatcaatacttcattacttttttgtttctgaataatccattttatgtgtacacgatttgtttattcacttgtttattgctggacatttgggttgtttccacctttggggtattttgaataatgctgctattaaacatggatgtacaagyatctgagtacctgttttcaattcttttgaatatatatctgggatgtttaactttatgcattaatttgactggattatgggatacccagatctatggtaaaacgttatttcagagtgtgtctgtgagggtgttttctagattagtatttgaatcagtggatggagtaaagaagatcatcctccccagtgtgggcagacatcatggatgaacttcggtgttgaaggcccattaaaatagaacaaaaatgtggaggaagtgcaaattctctct

SEQ ID NO: 936375 - DNA, 668 bp, Homo sapiens
aaaggggttggtgtagcattataggaaagcagcatacacagtgcacagagaccagagagttgaaggaaggacacatagccaagaagtaggaatgaatgaatacgagggtgacagcactggaggaaaagcaagctccagtgtacttctgctgcaggttagtcaagaagtatttatttttagaaaaaaagcagtgttgtatgggatgggcacaactaaaaatgagcgtgagaagggttaattctctctgaaattatcttccactgccactttccacctagtttagatctgtcctcaaggaacaagcttaagtttttcaaggatcataagacaagttttatcaagatttaaaaaaattctgtatttcttaggggaaaaaagcagcttccatataatatgggacaaagagggtgacatggtttggctctgtgtccccacccaaatctcakgttgaattgtaattcccagtgttggaggagggacctggatcatgcaggtggatttccctcatgctgttctcatgatagtgagtgagctctcacaagatatgatcgttttaaaatgtctggcacttcccccttcacacatgctttctcctgccaccatgtgaagatgtgcttgcttccccttcgccttctaccatgattgtaagtttcctaaggccttccagc

SEQ ID NO: 936376 - DNA, 808 bp, Homo sapiens
aagtgtcctgcaactgccaggtcaaagcagaggcaggccccacacagaattcctctgaggtgctagcacaagtttggtttttcctgagaatgtagtcctagcatttgctttcctcctcaacaaggacaaaccatgcaacacactgcgccctcctccctccctttttcttgtcttcagttcttttctaagcctactaccaagtctgagccttaaccagagcaataaagcaatgcctcttggaccaaatgtgcgtccagtctttttactcacttcagttctaatgttaaactctatgtccttgattcttttacttttatgccttttttttttttgagacagagtcttgctctgtcgcccaggctggagtgcagtggcgcaatctcgactcactgcaagctccgccccccgggttcacgccattctcctgcctcagcctcccgggtagctgggatgacaggctcctgccaccacacctggctaattttttttgtatttttagtagagacggggtttcaccrtgttagccaggatggtctcaatctcctgacctcgtgatccaccagtctcggcctcccaaagtgctgggattacaggtgtgagccaccgcgcctggccacttttatgcctattcttaaatgtacatacttgttggggaatagagtaaacaaaacaggtcaattgagaatgaatgctaaaaatgataatactaaaattataataacaacacatgctgtgttctatttgctttgtaagtattaactcattcagtctcccatgtggtaggcactatcattaccatttgacaggc

SEQ ID NO: 936377 - DNA, 561 bp, Homo sapiens
gggaacatcacaccaccggggcctgttgtggggtggaggatggggagggatagcattagaagaaatatctaatgtagatgactggttgatgggtccagtaaaccaccatggtacgtgtatacctatgtaacaaacctgcacattctacacatgtattccaaacttaaagtataataaaaaaaatgatgtttggcaaactgtatatccaagtgccaaaacaaaaaataaaattggaccattataccatacacaaaatcaactcaaaatggattgacttaaatgtaaaacttgaaaccacaaaacygtacaagaaggcataaggaaaatctccttgaaattggtcttggcaataatatttttggatatgataacaaaaggacagacaacaaaagcaaaaataaagagttgaggctacacccaactcaaaagcttctgtatagcaaacaatcaacaaaatgtaaagacaatattcggaatgaggaaaaaagatttgcaaaccgtatattcaataaggggttaaatcctaaatatataagggactcatacaccttaataccgaaa

SEQ ID NO: 936378 - DNA, 738 bp, Homo sapiens
ccccaaagtgccactcttaactcttgaagtaaataaataatctttgctggcaggactctgctgaatctccttaggcactctctgatcagatgtcctaggtcctcccaattcttagaccttttatacctgtttttctccttctgttattccatttagtttttcaattcatacaaaactgtatccaggccatcaccaataattctacatgacaaatgtttcttctaacaaccccacagtatcaccccttaccacaaaatcttccttcagcttaatctctcccactsttaagttcccacgccgccccaatcccgctcaaagcagccctgagaaacatcgcccattatctctccataccacccccaaaaattttcactgtcccaacacttcaccactatttcattttatttttcttattaatataagaagacaggaatgtcaggcctctgagcccaagctaagccttcatatcccctgtgacctgcatgtacacatccagatggcctgttcctgccttaactgatgatattccaccacaaaagaagtgaaaatggcctgttcctgccttaactgatgacactgtcttgtgaaattccttctcctggctcatcctggctcaaaagctcccctactgagcaccttgtgacccccactctgcccgcaagagaacaacccccctttgactgtaattttcctttatctacccaaatcctataaaacggccccatccttatctccctt

SEQ ID NO: 936379 - DNA, 630 bp, Homo sapiens
agttgcctcactcattatcttcatgtttctgaaattcgtgatacaaagaacaatgtatagccaatcaatagcttatgttattttaagaacatcttgataaacaacatagaaacttcctccttttttcctttaaaacttgacctgtggccaggcgcagtggctcacacctataatcccaktaatttgggaggtcgaggcaggtggattgcttgcgcccaggtgtttgagaccaatcagggcaacatggtgagactctgtctctaccaaaaatttaaaaattagccagatgtcgtggtgcttacctgttgtcccagctacttgggaggttgagttgggaggattacttgagcctgggaggtcaagtctgcagtgagccatgactgcgccactgcactccagcctgggtgacagagtgagacctggtctgaaaaaacaaaacaaaagaaaacaaccaacttgagtctgggtgcagtggctcatgcctataatcccagcactttgggaggctgaggtgggtggatcacttgaggtcaggagtttaagaccagcctggccaacatggtgtaaccccatctctactaaaaacaaaaatacaaaatttacccgggagtggtggcgggtgcctgtaaa

SEQ ID NO: 936380 - DNA, 567 bp, Homo sapiens
gcatgccaccacacccagctaatttttgtatttttagtagaaatgaggtttcaccgtgttggccaggctggtcttgaactcctgacctcaagtgatccacctacctcagcctccagaagtgctggaattacaggcgtgagccactgcacctggcccgaagttctatattttaatagagaggatctgcaagccatgcccttcatatccttataagggagaaagcccttcagactgacagagtaaagatctctgaatatctactcctttgtaaaagcaactggaacattggcaaaagttgcatttctcaattatttccataactctggaaattaatcaaaagcttgtaaaaattcaagaagtgtttattwaaaaaaattgggttaatcttggcaagaaaaagcaagatttgtgatatttttgtgtgctcaattctcattccccttgccccagctctgtggtaaccttcaaaatcaacagccttggagccctgatacctgtgaaaattagcagtcttgccacaactaactggagaggggcaggatgggcttggagtgccccctaaaagct

SEQ ID NO: 936381 - DNA, 637 bp, Homo sapiens
aactgctgctctttgcatgatggaagaggtccaacataatcaacctgccaccaagtagctggataatcaccccccaaagaatggtgtcatatcaagggctcagtgttggtctctgcttctggcaaattgggcactcaccagtgggtgtagccaggtcagccttggtgagtggaagcccatgttgctgagcccatgtgcaaccttcatccctgccaccatggccactttgtttatgggctcattgggcaatgataggggtggctggggaaagaggctgagtggtgtccactgaaagaatcttcctatccatttgattattaaaatcctcctctactgaggtcacccrttggtgagcactcacatgggatacaaatatcttcacaatcttcgaccactcagagaagtccatccatatacctcttccccaaatttctttgtcaccaattttccaacaatgcttcttccaagtctctgaccatccagccaaaccattagctacagcccatgaatccatatataatcgcatatctggccatttctccttccatgcaaagtgcacaaccaggtgcactgctcaaacttctgcccactgggaagatttcccttcaccgctgtccttcagaaatgacctggaaag

SEQ ID NO: 936382 - DNA, 698 bp, Homo sapiens
agctgatcatagggaactccccatgaggccattgcttcaggctaggggagagaaggcagggtggcaggagtggagaccatgagcatttgagccatttcctcatgcaacttacttgtgccttcaggacctgctcaagcctgatcatgtgtataccacttccatttgatgatggagtgctgctgtgcacaccccactctatggctaaacgggtaaaaaagcacaattcatgataggcagttcaggttgcatggcgacttgacccgtagtcaaatgttcagtttccaccaaatcccagtaacaggacaagagctgtctctcaaaaggagagtagttatctacagaagatagcagggccttgctccaaaatcctagagggctctgcagtgattcacctgtgggagcctgccaaaggctccaaacagcatccctatctgctgccactgacacctcaagcaccattggatctgctgggtcatatggcccaagtggcagagcagcttgcacagcagmctgaatctgttgcagacccttctcctgttctagaccccactcaaaactggcagcctttgaagtcccttgataaatgggccagagtaacacacccagatgaggaatgtgttgcctctaaaatcctaataggcccacttggcattgtgcctcattcttggttgtaggaggggccaaatgcagcaacttat

SEQ ID NO: 936383 - DNA, 506 bp, Homo sapiens
ttatatacttatacttctttgtttattttttatggtttgcttcagcacttataaacctttaccttaccaaagcttcctttaaatgatactatactatatcacatatggcagcggtccccaaactttttggtgccagggaccggtttcgtggaaggtgatttttccacagatgagaggaaggtggtttttcaatgattcaagcactttacatttattctgcactttattcctattattattacrtcgtaatatataatgaaatagttatacaactcaccataatgtagaatcggtgggaggcccgaggctgttttcctgcaactggacagtccgctctgggagtgatgggagacagtgacagatcatcaggcattagatttgtataaaaggcatgcagcctacatccctcatatacacagttcacagtggggttcacacccctatgagaatctaacgccatctaatgacaggacgtggagttcaggtggtaatacaaatgatgcaga

SEQ ID NO: 936384 - DNA, 577 bp, Homo sapiens
tctttacaatccgcctcccacttaattacaaattttgcctttaaataacttatctcctcttgcattttactataatcagctaagaaagccatgcagtagtctgaatgcttttttgtttataggtttcttctgcctaatattctagtttattactyttaagtcctgcctcccacaaaatcctgggtacatacaaaattcagccaagctctttgccactttataacatgggtataccttcctccagttttcaataccttatttctcatatttgcctgatacctcagcagaatggccttcattgtccatattcctaccagcattcttttcccaatcacttaagtaatctataagattcagacttttcctatagctattctctttttctgagacttcacccaaacacctttaatacctagttcatgtgaatataggctactaacaaaatcatttacttcaaaatgttacaggtagctagacaggcatgagcggggcaggaaagggttccccccacaacccccaggaatgtcaggtgatggagtgatagttcaacaattatcatgctgcctctgtaaaatga

SEQ ID NO: 936385 - DNA, 620 bp, Homo sapiens
agtgatttgttggagggaggtatggacagcacaccccatggctgccacaactggcactgttattgggagcctcctgctattctcagtctcactttttcatccttgggcttatccaatatctttttttttttttttttctggagatagggtcttgctctgtctcccaagctggagtgtaktggcacaatctcagctcacagcagcctctacctcccagaatcaagcagttctcctgcctcagcttcctgagtagctgggattataggcatgcaccaccatgcctggctaatttttgtattttttagtagagatggtgtttcgccatgttgggcaggttggtcttgaacttctgacctcaagtgatccatctgccttggcctcttaaagtgctgggattacaggcatgagccaccatgccctgcctatatccagtatctttatcgtaaggtgtggtgaaaatataatggattacgaatctgacgacctgagtaccatttcctattgctttgctaaaaattttggaccttgtggacaattcatgccacctttctgtgtctctgtgaaatctccaaggtccttcccaaccacgacatttcaaagtttatgatttgttccaggat

SEQ ID NO: 936386 - DNA, 591 bp, Homo sapiens
tgaagagcctccataaggaaccaagtgaggaaatcaatttatttagtttatgtgtttattgagtttacctatttagtttatttatcactctgtcacccaggctggatggcacaattatagctcactgtagcctcaacctcctgggctctagggatctgcctgcctcagcctcctaagtagttgggaccacaggcacatgtcaccatactgggctatggttttttgtttgtttgtttttgtttgttttgttgtttgttttttgtttgtttgtttgttttcaatggagtcttgttctgttgcctaggatggagtgcagtggcaccatctckgttcaccacaacctccacctcctggattcaagcaattctcctgcctcagcaggacaattgtaatcccaagtagctgggattacagccgcccatcaccacactcagctaatttttgtatttttagtagagagggggtttcactatgttggccaggctggtctcgaactcctggcctcaggtgatctgcccacctcagcctctcagagtgctgggattacagcagtgagccaccgcacccggcctactgggctaatttttaaag

SEQ ID NO: 936387 - DNA, 765 bp, Homo sapiens
ttgcattttcttcttaagattttcactccccttaattctgctcttccctctgatttctgccttactgtatatcccatggagtcaccaggatcaaagtgggtaacagtcatgtatgcatgtatgtgtgtgtacatatacacattgttggggctggagtgtggtgtgtgggtaagtgtatgagttggaatcactgactgaaactctccacaccaggctgtgttcctgctcattgctggaggtactgtcagggtccctgtcctcaacccctggtctgacacttgcagmtcaggcaggacattctggaggaatcatgcccttggaaggatccctgaggagtgactggtgggtattggtggataaataccccagctcccttgctttgggtgggtgactctgaggcacatgttctgtgctgtctctgcagatgtacctggcagggctgagtcctggctgccacaggggaaactttcttgatgaaggtccctttaactgctgcattcctttcctgtctcagttccccactcctctactggtgtttcctgggatacgcaccctaaggaagaactggcagtcgaattactatcctagagttatctccaaatagaatttttgtatttgaatatttgcctcaggatctacttccaggaaaattatactaaggcacacatttttctgtcagctccttcaatccccataggcctgccattgtgctgtttttatcaaaagggaatatgaggatcagagaggggaagtcacttgcccaaa

SEQ ID NO: 936388 - DNA, 590 bp, Homo sapiens
cccatatttcttggaggctttgttcatttctttttactcttttttctcttatcgtgtcctcttgctttatttcattaatttgatcttcaatcactgatatcctttcttccacttgatcgaatcagctattgaagcttgcacatgcatcacgaagtacttgtgccacggttttcagctccatcaggtcatttaaggttttctctatactggttattctagttagccatttgtctaaccttttttcaaggtttttagcttccatgcaatgggttagaacatgctcctttagctcagagaagttcgtagttcaatattaccaaccttctgaagcctacttctgtcagctcgtcaaagtcattctccrtccagctttgttccattactggtgaggagctgtgatcctttggaggagaaaaggcactctggtttttagaattttcagcttttctgctctggtttctccccatctttgtggttttatctacgtttggtctttgatattggtgacctacagatggggttttggtgtggatgtcctttttttttgatgttgatgctattcctttctgtttgttcgttgtccttctgac

SEQ ID NO: 936389 - DNA, 732 bp, Homo sapiens
aatcccgtctctactaaaaatacaaaacattagcgggctgtggtgacgtgtgcctgtagtcccagctacttgggaggctgaggtgggagaatcaactgagccagggaaggtgagaatgcaatgagctatgatactgggggactggaatgagaccttgtcttawtgtctcaaaaaaaaaaaaaaaagaatgaaaagaaaataaaactcttctgtactgtttatttatgtgaagagctgttttagtaagacaaagtaagaaccaggccccactagcagcctttcaggagtcctcgtgtagaacatgcctctacaatgtggcagaaggaaattttggataactgagctgcttttcatattaactgctatgtagccatgtgctccagctacttttttggtaacaagtttattgagatataattcttatactataaggttcgccacgttaaagtatacggttcagttagtatattaacagagtgtgcaaccaatactatagtctaattttagaacatttttaatgtcccccaaagaaactctgtacccattaatagtcactccccctttccctcctttcccccccttctcacagcccaaggcaaccatgaatccattttttttctctatatgaaggctgtagctacttttgttccaaaatgcatatagggataactatactttaaaaatagtgagattgatttggcatttaaacagtagaatctgggcagggtggct

SEQ ID NO: 936390 - DNA, 731 bp, Homo sapiens
tattaacagagtgtgcaaccaatactatagtctaattttagaacatttttaatgtcccccaaagaaactctgtacccattaatagtcactccccctttccctcctttcccccccttctcacagcccaaggcaaccatgaatccattttttttctctatatgaaggctgtagctacttttgttccaaaatgcatatagggataactatactttaaaaatagtgagattgatttggcatttaaacagtagaatctgggcagggtggctcacacctattatcccagcactgtgggaggccaagataggctgatcacttgagcccaggagttcgagtccagcctgggcaacagagtgagacccccgtctctacaaacaaagatacaaaaaattagctgggtgtggtggcaggtactgtagtaccagctacttgggaggctgaggtgggaggatcacctgagcccaggaagaagaagaaattttttaaaataaacagtagaaaaactcatctagggattttgaagtaacaatataaaaaagactasattaatgcatgcatgcaatttttaaaaaagataaacggtagaaaaactcacctagatattttgatgtaatgattaaaaaaagactagattaatgcatgtttacaatccttctgaatgctgcactaatactccctgattcagaacttggaacctaactactaaaaagggagcttgaagattcttggatata

SEQ ID NO: 936391 - DNA, 681 bp, Homo sapiens
agggctgctttagggtgacatggccttgaacctagaattaatgtatgggacagggaaaaacaacaaacatgttagatatgaaatttaaggctgggatttggaatcattatcttgaaataggcagttcaaacaaatcctaatctttacatgagtgatagaaaataagaaataaaaacttctgatgtataatggggaccctgccaaccatgaattccctcaaataaacactggttgagtgacataacctatttcacaactctagaaaatttggcaagctgagaatcatctcatattatgattttaggagagtggtttagagactctgaattgtaacatacgttacattctagatatctgattctaaatggtggaccctacctcagttttttttttcctaatatttctttaagataaaaccatttaaaaacatctttttaaaatataacagaaagagatcacgaagtttctagtgarcaagtcatgataagtaaaaatcaactgtacaatgcccatgatttctaatttaagacagataaatagcaatgatcgttcttagcgtgtcctcttgaatttttagagtgaaaaacaggctttcattaagtccacatcttaatcccccaaccttattttccccctcaaggcctgaagttcctcaaatgtaaattctctcacaaagtcttt

SEQ ID NO: 936392 - DNA, 569 bp, Homo sapiens
cacatggtttcataaactgtattttcattaaaattaaaaatatttaaacatttttcttgagatttttctttgatccatgggttatttagaagcatactgtttaatttccaaatatttggaaaatttccagcacttttttcagtattaacttttagtttaattctgtagtctcagaaagtattttgtatggtttctattcttttaaatttgttaagatgttttyaatgtctcaggatgtgcccctgggttatttggaagtgtgatgttcagttacaagatatttttccagattcctttctaatttaattccattatggtcagtgaacactctttgtatgatttaaatccttcagaattaattgacttattttcccacccagaatatggtctatcttgaaaaatgttctggctatgcttggaaaaagtgtgcagtttgctgttgagtagcgttctataaacgccaattaagtcaatgtggttgatagcactgttcaagtcttctatagccttcttggttttccaactacttgatctattatctattgaaggaagggtgctgaaatctgacc

SEQ ID NO: 936393 - DNA, 774 bp, Homo sapiens
aatctttaaaagccacaaatgcaaaggaattactgaattctcaggtggcttcgatgaagaaagtcaagtaagtttagagtaacctgattcagcaacacacatcttgagatgtacatttcagaggggaaggtggattttatagagttgaattctatatgcctccctgatgtagcattcagggaggtgtacaagttcatatcatatgcattttctttaccaacctgggtttagatcaaaagaggatgatgttaggaggtcccagtgaaatatggtaaatatcttgcacaagtgaccatttgcaagttaccagacatgaaaaccacacccrattcttctctgccacaggagtgtcattgccagagattcatcaggctctcacactctttcccattaagtaattcaaaacattttgacaaatgtgtccatttgtttactatatttatcatctgatttacctgtcataccacacagcaaagctgtatattagttatataaaactctagttagataacaaggatggttagactcagcattgaaaattccttctcggtgggcggagggcggtggggggggggggttccaagatggccgaataggaacagatccagtctacagctcccagtgtgagagacgcagaagacggtgatttctgcatttccaactgagctttgaagagagtagtggttctcccagcatggagtttgagatctgagaaaggacagactgcctcctcaagtgggtccctgacccccgtgtagcctaactgggaggcac

SEQ ID NO: 936394 - DNA, 605 bp, Homo sapiens
gcctacaaacattggttcggctgctagaacaccaaattttaactatctgcacacagaaaagcaccgtcacaagaaccaaaaatcaggtgagcaatcacagtggctggttttgacttcatatctttgaaagaggcattgaggagggcagaaaagatggtcttgcatcgccaatgccacccctccctcaccccctagcagcagccagccatgtggtgtggagacagaacctatgcacttgggaaagggagggtacagtggctgggggcctttacactgaactcagtgctgccctgtcacagtggagaataaagctgggctgggctcagccagcgccagcacatggagggagcatttggacctgccccagctagacaggaagcatccaycccagtggtcagaacttgagtttccctgcaagcctcaccaccgtgggctgaaaagctctggggtcctagataaacttgaaatacagtctagggcacaaggactccaactcctcagctactagcactaggctgggcttatagtcagtggactagggtggcatgtgatctagggagataccagccggcatagctaaaagagtgcttgcatcatccatcccc

SEQ ID NO: 936395 - DNA, 530 bp, Homo sapiens
agctggtagccagtgctgaggcaggagcggtggcccccacggtggggagggactgggccctgagacctggggagccccagtccctgtgcagggagaggctgggggacgtggggctccccgctgggctgtgcgggggccatctgcagggagacctcttcgtgttgcttcttgcttttctgatgacagaayttgaccatttccaccatggacatttgggagaatgtaagaaaaggcaaagcaaataaaaatcatttgctggccgggcgcggtggctcacgcctgtaatcccagcactttgggaggccgaggcgggcggatcacgaggtcaggagatctagaccatcctggctaacacggtgaaaccccgtctctactaaaaatacaaaaaattagccgggcgtggtagcgggcgcctgtagtcccagctactcgggaggctgaggcaggagaatggtgtgaacccgggaggcggagcttgcagtgagccgaggtcgcgccactgctctccagcctgggccacagagcgagac

SEQ ID NO: 936396 - DNA, 734 bp, Homo sapiens
ggtggatcttgggccctgaggagcttgtcatctactaagcacttaatgcagaagccagggattcctttattttttaaaataaatacaatttttcaagaaaaaaattttccacagaaaaataagagatataatttatttattttttcttttcttttctttttgtttttttttttgagacagactctcgctctgtcgcccaggctggagtgcagtggcgcgatctcggctcactgcaagctccgcctcccgggttcacaccattctcctgcctcagactcctgagtagctgggactacaggcacccgccaccacgcccgcctaaattttttgtatttttagtagagatggggtttcaccgtgttagccaggatggtcttgatctcctgacctcgtgatcctcccaccttggcctcccaaagtgctgggattagaggcgtgrgccaccgcacccggccgatataatttattttttgaaaagttaaagagaagttgaagaagaagacacactaaaggaagagaacaagagtgattccaagttctggtaccctacctaggggggccttgctgctctcgggcagcctggagcttgtcaagtgctcttcattgctttgggacaaatgggggtgttgtcagtgtccttgtccttgtcattctttcttaaaccatcatatcccccatgtgctgagcgacatgccaaaacttcagggggtgtttcctgctttgtgttccaggaa

SEQ ID NO: 936397 - DNA, 639 bp, Homo sapiens
aaaaatcaacaaagtaaacagataacccacagatcgggagaaaatatttgcaaactatgcatccaacaaagggctaatagccagaatctacaagcgactcaaacaaatcagcaagaaaaaaattaaataggatgttggctgtgggtttgtcatacatggcttcgaggtttattttattactttcaggtaaattccttctgttcctattttgttgagggtttttatcataaaatgatgctggattttatctaatgcctttgttgtgtttaytgagataatcatatggtttttgtttctgtttatgtgatgttttacatttattgacttgcatatgttaaaccatccctgcatcccagatctgaaacccacttgatcatgttgtgttatcttttagatacactgttggattcggttagctagtatttcgttgaggacttttgcatctgtgttcatcaagcatattgctctgtagttttcttttctctattatgtcctttcccggttttctatcatggtggtactggctttaacaaatgatttagggagaattttctctttctcttttttttgttttgttttgtttttgtttttcttttaatagtttctgtagaattcgtaccaattcttctttgaatgtct

SEQ ID NO: 936398 - DNA, 626 bp, Homo sapiens
gaaaaagttgccaccagagggcactactgctctttacaaaccaagttttagcaataacaaatactgaagatttaatggctagggggtcgacgtggcaaatttggatatgcatatgaaatgctccaaaaataataaattcattaaagttaatattatttatcagacagtttacgaactgagcactgaaactgccattcccatcaacccaatttgactagtctttgatatgtacatgcgggacaaaaaatacacataaaggaaaatatatttatggcatttcagttactttactcagmtaaattatctcatatattcattgtaaagaaggattctgcacctcttaatataaaataataatgtgaataataagctgggtacatagattaacatctctttgaagtgctgtgatgtatttacacatatgcaatttatattcataacacagtataaattcatgcatacacatccacagcgagaagggagacaagtagtataatcaccaatttaaaaaggaagaaattgaggtgcagaatgtcatagcttacctaaatcacagagcagctagggtgtaatacgtatttgtgtatgtgcacacataggggcaaaaatggggacaaaatattatt

SEQ ID NO: 936399 - DNA, 626 bp, Homo sapiens
gaaaaagttgccaccagagggcactactgctctttacaaaccaagttttagcaataacaaatactgaagatttaatggctagggggtcgacgtggcaaatttggatatgcatatgaaatgctccaaaaataataaattcattaaagttaatattatttatcagacagtttacgaactgagcactgaaactgccattcccatcaacccaatttgactagtctttgatatgtacatgcgggacaaaaaatacacataaaggaaaatatatttatggcatttcagttactttactcagataaattatctcatatattcattgtaaagaaggattctgcacmtcttaatataaaataataatgtgaataataagctgggtacatagattaacatctctttgaagtgctgtgatgtatttacacatatgcaatttatattcataacacagtataaattcatgcatacacatccacagcgagaagggagacaagtagtataatcaccaatttaaaaaggaagaaattgaggtgcagaatgtcatagcttacctaaatcacagagcagctagggtgtaatacgtatttgtgtatgtgcacacataggggcaaaaatggggacaaaatattatt

SEQ ID NO: 936400 - DNA, 760 bp, Homo sapiens
atatgagcaaatatacaattctcaggtgatgacttctcacattccagcttcattaaaattacttattaacatatttttttcttttctgacaatctatttcaattggtaactgtgatattgtgaaatacacatttgatcttcttccctgtctcctggtatacaactcctaaaatccttggaaaatctaaagtaataagtgtttttctgtatattaatgagttgactggtggctggtctccccaaggtagcttctggatgtgggctggtcacaggaaagaccaaagcattatcaaaggttgraactttcagcccatccccaacctttgtggaggggagaggggttacgggttaagtttattatcaatcgccaatagtttcatgcctatgtaataaagcctccataaaaacccaaagggacagagctcagagagcttccatatagctgaacatgtggagcttcctggagggtgacatgtatctcttgccctatgtatctcttcatctgtatcctttgtagtatctttcacaataaaccagtaaatttaaatgtttcttgtagattctgtgagccactttagcaaattaaacaaactcaaggagggtgttatgggaagcccaattaatagctggttggtcagaagaacaggtacaataacatggggattgtgattggcattggaagtgggaatagtattgtaggactgagcctttaacctgtgggatctgacactatctctagatagatagtgccagaattgaa

SEQ ID NO: 936401 - DNA, 760 bp, Homo sapiens
atatgagcaaatatacaattctcaggtgatgacttctcacattccagcttcattaaaattacttattaacatatttttttcttttctgacaatctatttcaattggtaactgtgatattgtgaaatacacatttgatcttcttccctgtctcctggtatacaactcctaaaatccttggaaaatctaaagtaataagtgtttttctgtatattaatgagttgactggtggctggtctccccaaggtagcttctggatgtgggctggtcacaggaaagaccaaagcattatcaaaggttggaactttcagcccatccccaacctttgtggaggggagaggggttacgggttaagtttattatcaatcgccaatagtttcatgcctatgtaataaagcctccataaaaacccaaagggacagagctcagagagcttccatatagctgaacatgtggagcttcctggagggtgasatgtatctcttgccctatgtatctcttcatctgtatcctttgtagtatctttcacaataaaccagtaaatttaaatgtttcttgtagattctgtgagccactttagcaaattaaacaaactcaaggagggtgttatgggaagcccaattaatagctggttggtcagaagaacaggtacaataacatggggattgtgattggcattggaagtgggaatagtattgtaggactgagcctttaacctgtgggatctgacactatctctagatagatagtgccagaattgaa

SEQ ID NO: 936402 - DNA, 559 bp, Homo sapiens
caaacaatatcacaatcttactgatactgttccaaaaaataaagatgaggagggattcctccctaactcagtttatgaaactagtatcatcatgatccagaatcaggaaaacatacaaccaaaaagcaaaactataggccaatatccctgattagcatagacaaaaaaacttcaacgmaatacttgcaacgtgtatccaaaagcatatcaggaagacaattgatatggtttggatgttttctactccaaatatcatgttgaaatctgatttgcaatgctggtggtgggtcctggtgggaagtatttggataatggggatggattcctcatggatggcttagcaccatcctcctggtaatgaatgagttctttctctgtagttcatgtgaaatctgattgtttaaaagagtgtggcacttccccttctgtctctttctctttcactctcttgttacctctctcatcatgtaacatgcctgctccttctttgccttccaccatgagtaaaagctccctgagacctcacccgaaggcaatcagatgctggtgctatgctttc

SEQ ID NO: 936403 - DNA, 658 bp, Homo sapiens
gaaagaacaatcctcagaggcccgatacgttccaagttaagttaaaagaaaaaacatagtctaggcgcagtggctcacacctgtaatcccagcacttagggaggccaaggcgggcaggtcacaaggtcaggacttccagagcagcctggccaatatggtgaaactcggtcgctactaaaaatacaaaaaaaattagccaggcatggtggtgcatgcctgtaagcctgtaatcccagctactcaggagggtgaggcaggagaattgcttgaacccgggaggcagaggttgcaatgagccgagattgcaccactgcactccagcctgggcaacagagcgagactccatctcaaaaaaagaaaaaacrtaagtgaaactgcagggaaccaaaaataaaggaaagatgtcctaagtacgagagaaaagatagattatacattgaagagggacaggctgacagttgacttttgtgcaaaaccaaaaggagtcagccagaagaccatggaatgatattttcaatgcgctgagaaaaaaatcactggcaacctgcaattctgtactcagcaaaaatatattgcaaaatgaagattaaattcagtcattttcacatagacaaaaacagaaaatttaccaccaatggactctcagtaaaggaatttt

SEQ ID NO: 936404 - DNA, 595 bp, Homo sapiens
agaattgaagaaagaacaatcctcagaggcccgatacgttccaagttaagttaaaagaaaaaacatagtctaggcgcagtggctcacacctgtaatcccagcacttagggaggccaaggcgggcaggtcacaaggtcaggacttccagagcagcctggccaatatggtgaaactcggtcgctactaaaaatacaaaaaaaattagccaggcatggtggtgcatgcctgtaagcctgtaatcccagctactcaggagggtgaggcaggagaattgcttgaacccgggaggcagaggttgcaatgagccgagattgcaccactgcactccagcctgggcaacagagcgagactccatctcaaaaaaagaaaaaacgtaagtgaaactgcagggaaccaaaaataaaggaaagatgtcctaagtacgagagaaaagatagatyatacattgaagagggacaggctgacagttgacttttgtgcaaaaccaaaaggagtcagccagaagaccatggaatgatattttcaatgcgctgagaaaaaaatcactggcaacctgcaattctgtactcagcaaaaatatattgcaaaatgaaga

SEQ ID NO: 936405 - DNA, 627 bp, Homo sapiens
ttcgatgaacataaacccacaccattgtcatttatttttgtttcattgcacttaccacagtcctgacagttattggggtgattgtgtcttcagaatctgtgtcaccggccacaccgcaagctccacaagggaggggcttgaattccctgctgctgtaccttgagtctatccagtgtccagggacttggtaggatgaaagaaatgaacaaaagtttgctgaatggggtccttagcatttttccaccagtttttagctttagttcctttatgtcccattattatgattgttatttcattccgtgaagcccctgagagggagagattcatagtcccattttatagattagaaaatagcggctcagaatttgaggctgtgttgccagtatcatagctatgagtcacatgttgctatttaaattaaaactaattaatattaaattaaattaaaaaattttcagttcctyacctgtattagctacattagtgcttcataggcacatggggctgatggctactgtactggacagcacagcatagaaaatattttcaggctgggcttggtggctcacgcctgtaatcccagcactttgggagaccaaggtgggtggatcacttgaggtcaggagt

SEQ ID NO: 936406 - DNA, 739 bp, Homo sapiens
ggctttgccaggtaggtgggcaccatcgcccttcccaatttacagacttgaacccagggacttgcccaaggccatataagacacatgaggtggaggcagggtccactcttaaacattgcctagttcccaaaggaggcaggtgcccatccaaacactagaaaacctgcccagaagaactctcctacactcagcatcaaacctcaggaccctgggatcagccaggcccgttcccttctccagccagagaactggaggctggagaaggggagaggccttccccaggtcgtgcaggctcaggtgcagcctgggaccctggtctccccaccttccctgacggtgtggcctcggcttcacactgcaaggccagcktgtcgcctgtagattgtcctctctgaagtgagctgggttgtgggactttcctgggtcccatttcgttgtgattcaaagaacaaaccctgggatggaacgggctccttctgatggcagagtgaggaaggtgtaaccctggcaaagccttcctgtcccctaaaaaaagacccaaacccccaacataaaatcaaaagaatcccctgttgggattcctgggcaaatcacaggcttatttgctgctgaattaaaagaagtaagagtgagcaagtcagaatcattaaaagatagatcactaaagtcacatttttcgatgtgccatattaaagagagcgggggagcacgccaattggcttgccatcttctcattaag

SEQ ID NO: 936407 - DNA, 739 bp, Homo sapiens
ggctttgccaggtaggtgggcaccatcgcccttcccaatttacagacttgaacccagggacttgcccaaggccatataagacacatgaggtggaggcagggtccactcttaaacattgcctagttcccaaaggaggcaggtgcccatccaaacactagaaaacctgcccagaagaactctcctacactcagcatcaaacctcaggaccctgggatcagccaggcccgttcccttctccagccagagaactggaggctggagaaggggagaggccttccccaggtcgtgcaggctcaggtgcagcctgggaccctggtctccccaccttccctgacggtgtggcctcggcttcacactgcaaggccagcttgtcgcckgtagattgtcctctctgaagtgagctgggttgtgggactttcctgggtcccatttcgttgtgattcaaagaacaaaccctgggatggaacgggctccttctgatggcagagtgaggaaggtgtaaccctggcaaagccttcctgtcccctaaaaaaagacccaaacccccaacataaaatcaaaagaatcccctgttgggattcctgggcaaatcacaggcttatttgctgctgaattaaaagaagtaagagtgagcaagtcagaatcattaaaagatagatcactaaagtcacatttttcgatgtgccatattaaagagagcgggggagcacgccaattggcttgccatcttctcattaag

SEQ ID NO: 936408 - DNA, 739 bp, Homo sapiens
ggctttgccaggtaggtgggcaccatcgcccttcccaatttacagacttgaacccagggacttgcccaaggccatataagacacatgaggtggaggcagggtccactcttaaacattgcctagttcccaaaggaggcaggtgcccatccaaacactagaaaacctgcccagaagaactctcctacactcagcatcaaacctcaggaccctgggatcagccaggcccgttcccttctccagccagagaactggaggctggagaaggggagaggccttccccaggtcgtgcaggctcaggtgcagcctgggaccctggtctccccaccttccctgacggtgtggcctcggcttcacactgcaaggccagcttgtcgcctgtagattgkcctctctgaagtgagctgggttgtgggactttcctgggtcccatttcgttgtgattcaaagaacaaaccctgggatggaacgggctccttctgatggcagagtgaggaaggtgtaaccctggcaaagccttcctgtcccctaaaaaaagacccaaacccccaacataaaatcaaaagaatcccctgttgggattcctgggcaaatcacaggcttatttgctgctgaattaaaagaagtaagagtgagcaagtcagaatcattaaaagatagatcactaaagtcacatttttcgatgtgccatattaaagagagcgggggagcacgccaattggcttgccatcttctcattaag

SEQ ID NO: 936409 - DNA, 739 bp, Homo sapiens
ggctttgccaggtaggtgggcaccatcgcccttcccaatttacagacttgaacccagggacttgcccaaggccatataagacacatgaggtggaggcagggtccactcttaaacattgcctagttcccaaaggaggcaggtgcccatccaaacactagaaaacctgcccagaagaactctcctacactcagcatcaaacctcaggaccctgggatcagccaggcccgttcccttctccagccagagaactggaggctggagaaggggagaggccttccccaggtcgtgcaggctcaggtgcagcctgggaccctggtctccccaccttccctgacggtgtggcctcggcttcacactgcaaggccagcttgtcgcctgtagattgtcctctctgaagtgagctgggttgtkggactttcctgggtcccatttcgttgtgattcaaagaacaaaccctgggatggaacgggctccttctgatggcagagtgaggaaggtgtaaccctggcaaagccttcctgtcccctaaaaaaagacccaaacccccaacataaaatcaaaagaatcccctgttgggattcctgggcaaatcacaggcttatttgctgctgaattaaaagaagtaagagtgagcaagtcagaatcattaaaagatagatcactaaagtcacatttttcgatgtgccatattaaagagagcgggggagcacgccaattggcttgccatcttctcattaag

SEQ ID NO: 936410 - DNA, 758 bp, Homo sapiens
acaaagcaatgcacactgggcagtgtaacaatagatggttattgtcctgtagttctggaggctggggctctgagattgagggttcggcagggctggctgtctcctgctctgtcctaggccagtctcctggcttctggtgatctgtgacattgctcggcttgtagaggcatcactctggtttctgcctttatcatcgtgtggtgctctcctaggaggctgtctgtgtccagactccccctttcrtaaggacacagcagtgtccgatcaggacccacctcataacctcattttttttttccaagacagagtcttgctctgttgcccaggctggagtgggcactaaccactaacctttggagttaatggtgtgatcttggctcactgcaacctccgcctcctgggttcaagcaattctcctgcctcagcctcccgagtagctgggattacaggcaccctccaccacacccggctaatttttgtatttttagtagagacagggttccaccatgttggccaggctggtcttgaactcctgacctcttgatccacccgcctcggcctcccaaagtgctgggattacaggtgtgaaccaccgtgcccggtgacctcatcttaacctgatcatctccaaggaccctattatgtctctgcccatgaacattcatggtctggggggagaatgagacatgacagaggcaggtgcaagatggggcagcgtgtgccctgagaaggggggtgctggggccccagcacaggag

SEQ ID NO: 936411 - DNA, 626 bp, Homo sapiens
gaaccagcccaaatgcccatcaatcaatgagtggataaccaaaatgtggtatatatatatatatatatataatggaatactattcagccataaaaaggaacaaaataatggcattcacagcaacctggatggaattggagatgattattctaagtgaagtaactcaggaatggaaaaccaarcatcatatgttctcactcatatgtaggagctaagctatgaggacactaaggcagaagaacgaaacattggactttgggcactcgggaaagggtgacgggtggtgagggattaaaaaaccacacattgggtacagtgtataccgcttgggtgcaccaaattctcataaatcaccactaaagaacttattcatttaaccaaacaccacctgttccccaaaaacctattgaaataaaaaaataaaaaatcatttttaaatacaaaagatcatcacagacgttatgaacaactatatgctgagaaactggaaaaacctagaggaaatggataaattcctggaaacatacaaactactacgtttgtacagcctactaaggttgaatcaggaagaaatagaaaaccttaacagacctataacaagtagcaagattgaaccagtaatacaa

SEQ ID NO: 936412 - DNA, 626 bp, Homo sapiens
gaaccagcccaaatgcccatcaatcaatgagtggataaccaaaatgtggtatatatatatatatatatataatggaatactattcagccataaaaaggaacaaaataatggcattcacagcaacctggatggaattggagatgattattctaagtgaagtaactcaggaatggaaaaccaagcatcatatgttctcactcatatgtaggagctaagctatgaggacactaaggcagaagaacgaaacattggactttgggcactcgggaaagggtgacgggtggtgagggattaaaaaaccacacattgggtacagtgtataccgcttgggtgcaccaaattctcataaatcaccactaaagaacttattcatttaaccaaacaccacctgttccccaaaaacctattgraataaaaaaataaaaaatcatttttaaatacaaaagatcatcacagacgttatgaacaactatatgctgagaaactggaaaaacctagaggaaatggataaattcctggaaacatacaaactactacgtttgtacagcctactaaggttgaatcaggaagaaatagaaaaccttaacagacctataacaagtagcaagattgaaccagtaatacaa

SEQ ID NO: 936413 - DNA, 628 bp, Homo sapiens
cctttcagttctcgtaattttaatctttagaacttactggtacagcaaagttaaaagttgagttgaaagtcgttaagagttgccagcgtacgtttttatttgcatttattaatcaagcaatttcatacttatggctgcaaaatactataaggtgtcaacatttggcacagaggctacaaaacgacaactcagcccaaacaaaataatctttgcttgtgtaattttttcaataaataaagcatgaatactggtttaacgaagatagctatatctttaactatttagtaaaatatgctaacttcyaaccttgtggccttaggcagtctagtccacagacatgaaggaaatttgttttgggaaagaactgttatctttaatattaaagaaaagataattggcataagaaagaatctcacatggtaaatttttgtcctaaagtaaattaactgttgtttaaaaaaagggatgactttacaacaagtcagaaaggtaaggcatgtcagaaattgtctgtgaaagtcctgaagaattttataaaagggaatttgtgcaagaaatgtcgcacaatttaaaagtaattcggcctcctcaatgccgtatacaatttcactctaactcttagctgtac

SEQ ID NO: 936414 - DNA, 466 bp, Homo sapiens
accctaggacacatggagttaaatgctggaataagccagaccttctccgcacttccgtctgggtcctaggccctacacctagtgcgtaattagattcccagacttaccaaggttttcatcaaaagtaaaggttgctaaaasttagcagtgtaacacgtatttaaaactaccgaagaaatagtttatgagcaaggtgtgtaaggaaagtaaaatatacttttggtaaaaagattataaggaggcctaagaatgtggatttttgcctacattaaaaggttaaaaaattgttttaaaggtttaagcaacttttggaaggttaattgtaaagaaaatttcgtgtgtgtacatactggctaaagttaaaggggtatcattcaggttttctgtaaatcgagcattaaaataaaagcacaacgggtttctgttaaagcactaacctgctctttaacaaaaagtataaacggtt

SEQ ID NO: 936415 - DNA, 557 bp, Homo sapiens
aatgttactattgataagtaggaacttactcctgtcattttgatttttatgttcagatgtttttgtgatcttatcttccttctttctttcctttctgtcttttcttaggatgatttttctgtgggtagatgatttagttccttgccttcgaatttttgtgtatatattgcatgttctttagtttcaggttaccttgaggcttgcaaataatatcttataaaccattatttttaatctgatatttacttaagacgattttgacaaacaaacagcaaacaaaaataaaactaataaagctgcatcttaactttgtcccacygctttctaattttttgtcatttctttctgtatctcattgtgttgactgtgtcttgaaaagttgtgcttttccattttgattggtttatcctttaggctttctacttagaataagagcgctttacacactacagttacttttttaaaatattctgtttttctgtgtacttacaatgaccactgagttttgtaccttcagttgattacttattgttcagttgattacttattgttcagta

SEQ ID NO: 936416 - DNA, 583 bp, Homo sapiens
tctagtcctgggcttttttttggttggttggctttttattactgattcaatttcataactcattattggtctgttcagggattcaatttctttctggttcaatcttgggatgttgtatgtttctaggaacttaatcatttcttctaagttttctagcttgtatgcatagaggtgttcatattagtctctgagcattttttggtatttctgtggggtcactagtaacgtcccctttgtcatttctgattgtgtttatttggatcttctcttttttctttattagtctagctagtagtccatctatcttattaatacattcaaaaatccaacttctggatttgttgatcttttgtatagatgtttgcctctcaatttccttcagttcagcyttcatgttgcttattttttgtcttctgcaagctttagagttgatttgcttttgtttctctaattcctctagttctgatgtcatgttcatttgagatctttctaactttttgttgtggatgtttattgctataaaattccctcttaacaccactttagctctgtcccagagattctggtatgtcatatatctttg

SEQ ID NO: 936417 - DNA, 672 bp, Homo sapiens
agctcctacctagcacagaccattccaaccacaggcatatcttagagacattttgggttcaattttggaccacctcaataaagcaaacgtttcaataaaacagattacagacattttttgggtttcccagtgcatataaaagttatatttacactatactttagtatattaggtgtgtagtaatattatrtctaaaaagaaacaatatacatatctcaatttaaatatatattattgcttaaaatcccgacaatcatctaacctttcagcaaattatgtaatctttttgactgctgagggtcttgcctcaatgcggatggctgctgattgatgagggtggtggctgctaagtctggggtaactgtggcatttttaaaaaaaataagacaacaatgaagtttgtcacatcaactgacttttcctttcacaaaagaattttctgtagcataaaatgctatttgatagcattatacccacaataagcttccttcaaaattggagtaaattctctcaaaccctgccactgctttatcaaacaggtttagtggacccttgaacaatttgtgggttaggagtactggcacccctcctcgtgcagtcaaaaatctgcatctaattttgactcctgtaagttttaattactaattgcctactgttgaccagaaactttac

SEQ ID NO: 936418 - DNA, 694 bp, Homo sapiens
tgcagtgagccgtattcttgccattgcacttcagtctggcagtctgagtaacagaatgagactctgtcaataaataaataaataaataaataaataaatcagagatgatcaaggatataaacagggaggacaggtaagaagctattacaaaattccaggtgagattttccacaaagatgataagaagacggtggttggattctcaatgtctttaaaagatgtaactgacatctytaaaagatgtatggatgagatacgaagttttagcgtccaagatgacttccaagttttggcctaagcagttggaacaatggagtgccatttactgaaataggaaagactgcaggagaagcaggtttgtgggaagagattaggaggagcccaattctggactctatcttcagcctgataggccttttgaatagccacaagaagctatgttaaggaggcagtgggatattgggatatatgtgtggaatactgaggatggggccaggatgggaggtacatttgggaaattcaggagttcttagtaggcagatggtatgtaaagttactagagtgagcggggtgcggtggctcatgcctgtaaatcccaacactttgggacgctgaggcgggaggattgcttgagcccaagagttcaagaccagcctgggcaacatagagagaccccatctgtttttttaaaaaa

SEQ ID NO: 936419 - DNA, 628 bp, Homo sapiens
gagactgaggtaggagaatcacttgaacctgagaggcagagattgcggtgagccaagattgtaccactgcactccagcctaggagacagagtgagactctgtctcaaaaaataaaacaaaacaaaacaaaaacaaaataaaacaaatttgagagaagcacattcatagaacttgccttgrcattgtcctgtcataaataacaaataaggcaagcccagtggaggcagcaaatggagatgacgctgccaagaaggcctcttattttcaatcctcagttacagcaatcacctattcagttttgcaacattatattattgaataattgccctttttcctcctcttattctacctcaataaagttaaatgtttcgttttccttagcaaactccatatatatatatatatggacatacttttttgcaattacttttaattgcaaaaactgcaattaattacttttgtaccaacctaatgcacgcatatgtatatatgtacatttgtgtatatatgtatatatgtatgtgtttatatacctatacatatacatatatacatacatatgtatatgtatatctgtgaatatatgtagaaattctctctataaaacaaattctatctaaaaaaacac

SEQ ID NO: 936420 - DNA, 568 bp, Homo sapiens
gtgctgctggatttggtgtgctagtatttcatttatttttacatctgtgttcatcacggatattggcctgaagttttctttcttcattgtgtctgccaggttttggtatcagaatgatgctggcttcatagaatgagttagggaggactccctccttcttgatttttttgggaatactttcagtagtaggattggtaccagctcttctttatatgtctggtagattttggctctgaatccatctggtccagggctttttttggttggtaggtttttaaattactgattcaattttggaactcgttaataggtctgtccagggtttcaattccttcctggttcaatctcgggagattccgtgtttctaggaatttatccatgtcttctaggttttctagttygtgtgcatagaggttgaacttgtattttctttttttgttgttgttttgtttttgtttttgtttttgagacggagtcttgctccgtcccccaggctggagtagagtggcgccatctcggctcagtgcaagccccgcctcccagattcacaccattctcctgcctcagc

SEQ ID NO: 936421 - DNA, 578 bp, Homo sapiens
cattaaagcaccatatctgtaatctacagtgagttaagagagagataaactgtatataagtctcatgacaatattcaatactctggttagaagtccagtcttttctctcctaggtgtcataagacaagtcattaggttacyggaaatatgattgtgactacattttttaaaaataatttcaacttttatcttagattcagagggtacatggtcaggttcattacatgagtatattgcgtgctgctgagatttaggatacaactgatcccaatactacccaataggtagtttttctctcgctcttctggtagtccccagtgtttattgtaggcttttttttttttgagatagagttttgctctgtcacccaggctggagtgcagtggcatgatcttggctcactgcaacctctgcctcccgggttcaagcgattctcctgccttagccttccatgtagctggattacaggcaaccaccaccatacccaggttatttttgtatttttagtagagatggggtttcaccatgttggtcaggctggtctcaaactcctaaaccttaagtgatccacccgcctc

SEQ ID NO: 936422 - DNA, 578 bp, Homo sapiens
cattaaagcaccatatctgtaatctacagtgagttaagagagagataaactgtatataagtctcatgacaatattcaatactctggttagaagtccagtcttttctctcctaggtgtcataagacaagtcattaggttaccggaaatatgattgtgactacattttttaaaaataatttcaacttttatcttagattcagagggtacatggtcaggttcattacatgagtatattgcgtgctgctgagatttaggatacaactgatcccaatactacccaataggtagtttttcyctcgctcttctggtagtccccagtgtttattgtaggcttttttttttttgagatagagttttgctctgtcacccaggctggagtgcagtggcatgatcttggctcactgcaacctctgcctcccgggttcaagcgattctcctgccttagccttccatgtagctggattacaggcaaccaccaccatacccaggttatttttgtatttttagtagagatggggtttcaccatgttggtcaggctggtctcaaactcctaaaccttaagtgatccacccgcctc

SEQ ID NO: 936423 - DNA, 723 bp, Homo sapiens
acttgcaagtattggtgtctgcttgctgtgccacaggaaaaaagcaggagaaaaatagtgtggttaagccagtcatttatgacaaggttagagatattttaactcagggaaaagacaaaaatcccactagtttctgggccatttggttgaggcactcagggaatagactaattcggacctagactccctggaagggcaagctttcctggttacacatttcattactcaatctgctgtgcctgacattaggaagaggctacaaaaagcagcaatgggacttcagatccctgtragccaacagggcctttaaagtttacaacaatagggaaaaggcagaagacgtgaaaaaacacaaaagaaataggcaaaaagtgcaattagcaatagctgctttaagccctctgccacctcagaattacctatcctgaggcagtgttgtaaaatcggtgtctgggatgcccagatgagagccaccaactcgctggtccttgggccagaatcagtgtgcctactatatacaaaaggaccattggcagtgagaatgtcctaatcgtgcccggtggcagaggaaaaggcttcctgtcaacactaaagctaaccttcttccactagccccaacaagctgccttgctcaaataagtttactgggggtcttgaatccttgatgaagcagacagcttcccacagtggaagacaagcagccacctgaacatttttctttgg

SEQ ID NO: 936424 - DNA, 602 bp, Homo sapiens
tggcatctattgattccaatttttcatttagtttgatgtcagcctggttctttgtgtgatgagtggattttgactgaaacctataccttttgagtattatattgtatgactctggatcttatttaagttttctgtcttagctgacctcttctggcaccttttctgcaggggaaatgaaggggctgcctcctcagtgctgggtcggagaatccagattgcccacgtgggctcagttgaactctggagatgggggcatctgttcctgctgggctgggcagcagttggcttctccccatgctccaccccacccatccccacctccactgatgtccctgatgcctcccttggtggggcaggctggaaggcctcattatgctccccacacagcctccagtgacactgccgggagaagagcctccttactactgcmcattggtgaaagctggctctgcactaggcctgctcagccgccaccccagcagggagagggacatgtgcctggtgacagcacagtaaaggtggaggtctaggcccccaacctggccctgctttctgtggtgatgagtggagtgaagcagctattgcctacaggtgttctgtct

SEQ ID NO: 936425 - DNA, 578 bp, Homo sapiens
cttatttctcttttgcttaggaagctaagttcagcttaatttaaaactcttggttgaagattttttatttaagaatgttgaatataaggaagcaatctcttctggcttatagggtttctcctgaaaggtccactgttagcctaatggtgacttgctctttctctctggctgtatttaacattgtttccttcatttcaaccttggaaaatctgatgtttatgtgtcttgtgaatgatattcttgtgtagmatcttgtagcatcctctgtatttactgaatataactgttggcctctgtagcaatgctggggaagttttcatggatgatatcgtgaagtgtgttttccaagttgtttgctctctcttggttcttttcggggatgtcaacaattcatggatttggcctctttacataaccccatatttctcagaggttttgttcattttattcattctctttacttcatttttgtctgtcttatttcagaaagctagccttcaatttctgagattctttcctcagcttggtctcttgtgccattaatacttgcaattgtattgtaaaattcttgcagtgtg

SEQ ID NO: 936426 - DNA, 731 bp, Homo sapiens
tgggctgagattatggggttttctagatacagcattttgtcatctgaaaacagagatagtttgaattcctctcttcctatttggatgtcctttattaccttttcttgcctgattactctggtcaggacttccaatactatgttgaatgggagtggtaagaggggacatccttgtcttgtgtcagtttgcaaggggaatgcttctagcttttgcccatttagtataatattggctgtgggtttgtcatatgtggctcttattattttgaggtatgttccttcaatacctagtttattgagagttttcaacatgaaagggtgttgaattttatcaaaagycttttctgcatctattgagataatcatgtgggttttgtctttagttctgtttatgtgatgaatcacatttattggtttgcatatgttgaatgaactttgcatcccagggatgaagcctacttgattatggtggattcactttttgatgtgcttatagcagcatttcaattaataatcccaaactggaaacagtccaatgtccatccaatggtgattggataaacacaatttagtgcattcataaaatggagtattatgtagtaatgaaaaagaacaaaccgctgaaacatgtaacaatataaatgaatatcaaaacattacactaagtgataaatgccagaaatactaaaagcatatttgtacttgcctgggctgaggataggggcatggatt

SEQ ID NO: 936427 - DNA, 793 bp, Homo sapiens
ttcccagctctctgctctggctgtgagggagatctgagtcaggtggcttaaaactaccagttatggccgggcacggtggctcacacctgtaatcccagcactttgggaggccgaggcaggcatatcacgaggtcaggagatcaagaccatcctggttaacacagtgaaatcccgcctctastaaaaatacaaaaaattagccgggcgcggtggcgggcgcctgtagtcccagctactccggaggctgaggcaggagagtggcgtgaacccgggaggcggagcttgcagtgagccgagatcgcgccactgcagtcctgcctgggcgaaagagcgagactccgtctcaaaaaaaaaaaacaaactaccagttatggccgggcgcagcagctcatgcctgtaatcccaccattttgggaggccaaggcaggtggatcacttgaggttgggagtttaagaccagcctgaacaacatggagaaaccccgtctctactaaaaaatacaaaagtagctgggcgtggtggcgcatgcctgtaatcccagctactcaggaggctgaggcaggagaatcactcaaacccgggaggcggaggttgcagtgagcagagatcgtgccattgcactccagcctgggcaacaagagcaaaactccctctcaaaaacaaacaaacaaacaaacaaaacctaccaattatgggattagggtctggacttttctttccttctgtttctaatgggagcagcctgaaaggaatgtgccagctctagggattccaggctagcttgggtctgctc

SEQ ID NO: 936428 - DNA, 793 bp, Homo sapiens
ttcccagctctctgctctggctgtgagggagatctgagtcaggtggcttaaaactaccagttatggccgggcacggtggctcacacctgtaatcccagcactttgggaggccgaggcaggcatatcacgaggtcaggagatcaagaccatcctggttaacacagtgaaatcccgcctctactaaaaatacaaaaaattagccgggcgcggtggcgggcgcctgtagtcccagctactccggaggctgaggcaggagagtggcgtgaacccgggaggcggagcttgcagtgagccgagatcgcgccactgcagtcctgcctgggcgaaagagcgagactccgtctcaaaaaaaaaaaacaaactaccagttatggccgggcgcagcagctcatgcctgtaatcccaccattttgggaggccaaggcaggtggatcacttgaggttgggagtttaagaccagcctgaacaacatggagaaaccccgtctctactaaaaaatacaraagtagctgggcgtggtggcgcatgcctgtaatcccagctactcaggaggctgaggcaggagaatcactcaaacccgggaggcggaggttgcagtgagcagagatcgtgccattgcactccagcctgggcaacaagagcaaaactccctctcaaaaacaaacaaacaaacaaacaaaacctaccaattatgggattagggtctggacttttctttccttctgtttctaatgggagcagcctgaaaggaatgtgccagctctagggattccaggctagcttgggtctgctc

SEQ ID NO: 936429 - DNA, 587 bp, Homo sapiens
atcacattggctattaagtttcaacatatgaattttgagggtacacattcagaccatagcaaccacatatgataaaaatcagcaatcacctgaggtcaggagttcaagaccagcctggccaacatggaccccatctctactaaaaatacaaaaatcagctgggcatggtggtgcatacctgtagtcccagctattcaggaagctgaggcagkagaatcactggaacccaggaggtgaaggttgcagtgagcagaaatcgtgccactgcactccagcctaggtgatggagcaagactctgtctcaaaaaaacaaacaaacaacaaaaaccaacaaataatcccatcaaaaagtaggcaaaggatatgaatagataattttcaaaataagatatacaaatgaaaaaatgctcaacatcactaattatcagggaaatgcaaattaaaaccacaatgagatactgccttattcctgaaagaatggccataatttaaaaattttttaaaaaatagaccttggcatggatgtggtaaaaagggaacacttttacactgttggtgggaatgtaaactagtataaacactatgga

SEQ ID NO: 936430 - DNA, 587 bp, Homo sapiens
atcacattggctattaagtttcaacatatgaattttgagggtacacattcagaccatagcaaccacatatgataaaaatcagcaatcacctgaggtcaggagttcaagaccagcctggccaacatggaccccatctctactaaaaatacaaaaatcagctgggcatggtggtgcatacctgtagtcccagctattcaggaagctgaggcagtagaatcactkgaacccaggaggtgaaggttgcagtgagcagaaatcgtgccactgcactccagcctaggtgatggagcaagactctgtctcaaaaaaacaaacaaacaacaaaaaccaacaaataatcccatcaaaaagtaggcaaaggatatgaatagataattttcaaaataagatatacaaatgaaaaaatgctcaacatcactaattatcagggaaatgcaaattaaaaccacaatgagatactgccttattcctgaaagaatggccataatttaaaaattttttaaaaaatagaccttggcatggatgtggtaaaaagggaacacttttacactgttggtgggaatgtaaactagtataaacactatgga

SEQ ID NO: 936431 - DNA, 594 bp, Homo sapiens
taataccatcacattggctattaagtttcaacatatgaattttgagggtacacattcagaccatagcaaccacatatgataaaaatcagcaatcacctgaggtcaggagttcaagaccagcctggccaacatggaccccatctctactaaaaatacaaaaatcagctgggcatggtggtgcatacctgtagtcccagctattcaggaagctgaggcagkagaatcactggaacccaggaggtgaaggttgcagtgagcagaaatcgtgccactgcactccagcctaggtgatggagcaagactctgtctcaaaaaaacaaacaaacaacaaaaaccaacaaataatcccatcaaaaagtaggcaaaggatatgaatagataattttcaaaataagatatacaaatgaaaaaatgctcaacatcactaattatcagggaaatgcaaattaaaaccacaatgagatactgccttattcctgaaagaatggccataatttaaaaattttttaaaaaatagaccttggcatggatgtggtaaaaagggaacacttttacactgttggtgggaatgtaaactagtataaacactatgga

SEQ ID NO: 936432 - DNA, 594 bp, Homo sapiens
taataccatcacattggctattaagtttcaacatatgaattttgagggtacacattcagaccatagcaaccacatatgataaaaatcagcaatcacctgaggtcaggagttcaagaccagcctggccaacatggaccccatctctactaaaaatacaaaaatcagctgggcatggtggtgcatacctgtagtcccagctattcaggaagctgaggcagtagaatcactkgaacccaggaggtgaaggttgcagtgagcagaaatcgtgccactgcactccagcctaggtgatggagcaagactctgtctcaaaaaaacaaacaaacaacaaaaaccaacaaataatcccatcaaaaagtaggcaaaggatatgaatagataattttcaaaataagatatacaaatgaaaaaatgctcaacatcactaattatcagggaaatgcaaattaaaaccacaatgagatactgccttattcctgaaagaatggccataatttaaaaattttttaaaaaatagaccttggcatggatgtggtaaaaagggaacacttttacactgttggtgggaatgtaaactagtataaacactatgga

SEQ ID NO: 936433 - DNA, 725 bp, Homo sapiens
cactaaacaacagatttttcttttcttttcttttttttttttttgagatggagtttcacttttgttgcccaggctggagtgcaatggcgtgatcttggctcaccgcaacctccgcctcccgggttcaagccattctcctgccttagcctcccaagtagctgggattataggcatgcgccaccatgcccagctaattttgtatttttagtagagacggggtttctccatgttggtcaggctggtctcgaactcccaacctcaggtgatctgcccgccttggcctcccaaactgctgggattacaggcgtgagccaccgcgcccggcctcttattccttttttttttcagatggagttccactcttggtgcaatggtgcgatctcggctcacttcaaactccacctcctgggttcaagtgattcttctgcctcagtcccccaagtagctgggcatgtaccaccacgcccagctaattttttatttttagtagaggcagagttctactatattggtcaggctggtcttaaactcctgacctcaggtgatccatccacctcggcctcccaaagtcctgggattataggcgtgaaccactgcrtccggcagagatttttaatatacacaaaacagccttctattggaaggagatgccatctaggactttcatagctagagaggagaagtaatacttggcttcaaagcttcaaaggacaggctgaatctct

SEQ ID NO: 936434 - DNA, 575 bp, Homo sapiens
ttttcttgtttttttgcaagcctggtaacttttgtggattccagacatgaattttaccttgtttgttactagaaggtcttgtataatttacaaatattcttaaattttgttctgggatgtagttatgttattttaaaataatttgatcctattttgtcttttaataattgttaagtgggacctaagcaatgtttggtctggggcacattttcctgctattgaggccaaatccttctgagcattttacccagcatcccatgaattacggttttctagtytggctgataggatcaggaactgtttctacctaatctgtatgaatgccaggtactacttcctctaatccttttagagagttctttccccagcctgagtagttccttatgtgtgtgtgctgatgagtactctgctaattccaaaatggtacctttgcagatttctggaattctctgtcctctacagttctctcttattcaaactctgtcttggtctttttagactcttagctccatttcttcaactcagtgaatgtactggctccatctgcatttcccctccatacactgtggtctgga

SEQ ID NO: 936435 - DNA, 695 bp, Homo sapiens
tatttttagtagagacagggtttcaccatgttggccagaatagtttcgatctcttgaccttgtgatctgcccgccttggcccgtttgtgctaggatgctaggatgacaggcgtgagcacccacgcctggcctatttgttcctctttttttttatttaagatggagtttcgctcttgttgcccaggctggagtgcaatggcacgatctcagctcgctgcaacctctgcctcccgagttcaagcgattatcctgtctcagcctcctgagtagctgggattacagtcgcctgccactacacccagctaattttgtatttttagtagagacagggtttctccatgttggccaggctggtcttgaactcctgatctcaggtgatccgcccaccttggcctcccaaagttgttcctttttgtttttgagatggagtctygctgtgtcatccaggcagaagtgcagtggcacgatcttggctcactgcaacctccgcctcccaggttcaagcaattctcgtgccccagcctccgggtagctgggactacaggcacacgccaccatgcctggctaattttcatatttttagtagagacgggatttcaccatgttggccaggctggtctcaaacttctgacttcaggtgatccatctactccagcctctcaaagtgctgggattacaggcgtcagccactgcgc

SEQ ID NO: 936436 - DNA, 586 bp, Homo sapiens
gttgcacatggcagaacctcattcttttttatggttgaataatactccatcgtgtaaatgtgccacatttgtttaatacattcatctactaatggacacttaggttgcttccaaatcttggttattgtaaatattgctgctgtaagtataggagtgcatacaactctttgatatactaatttcctttcttcggatatatatctaggagtgggattgctgaatcatatgggagctttattattagatttttgagraatctccgaattgttctccatagaagttttactaatttacatttccaccaacagtgtgtgagggttccctattctccacaccctcaccaacatttattattgcctgtctttggatataagccattttaattgggacaagataatatctcattgtagttttgatttgcatttgctgtccttgtggtctggactgcctttcaagtttacttagagccccagagctctttagcctattgtggtgaggcttgttgtaactcaagttctgaccctgggatcggcaattcccctctggctaggactggtttaattattccctctatgattgggcatca

SEQ ID NO: 936437 - DNA, 593 bp, Homo sapiens
aatgcttacttttgttgtttgcttgtttacttttctttttgtttttgcaccttagctggattagttgtgtaaaatttatttcacccaaagtatacaacctctgactttgctcatcatgaagagcagccatagacatgtgcattagtttgttctcatgctgatatgaagaaatacccaagactgggtactttataaagaaaagaggtttaattgactcacagttctgcatagctgaaaaggccttaggaaagttacaatcatgacagaaggcatcccttcacagggtgacaggagagggaatgagtgccgagcaraggggaaagccccttataaaaccatcagatctcgtgagaactcactttcatgagaacagcatgggagaaactgcccccatgattcaattatctccaccttgtcccacccttgacatctggggattattacaatgcaaggtgagatataggtggaaacacagagtgaaaccatatcaacatatatacagtcaccttaacaataaacagtgactggttttagcccggcttcctctttctctttatctgatatctccatcaagctcgtttgcttttattagt

SEQ ID NO: 936438 - DNA, 656 bp, Homo sapiens
tctgcccgccttggcctcccaaagcgctgggattacaggccaccgcacccggccccataaatttgtaagaccttgctacacttgtgtttgactattttcataatgaaaagttagaaataagaatgcactctcagagaaagtcccaacattaagagaaggttgtgtttagtccatcccctcggctttgccccatggggacccacctgaacacacgctagccaatgtgggttctgttttctgccctggagcctgtctgtaacaggaagctcaggagtgagtagagatgaatagaagggtcaggccctgtcctcatgttaattagctattcrtcgtaaggaatggattaactgattcatgattttcataaatttattggccctccagttaatgaagatcctaatgcagtatcttttggcatacatcattcctttgcgggactggcttgtccctttcggcagactgccgagcttggctatgcagagaatgacagctgctcacattttgggcttgagggaactggtgtgtcctgtacagaaggtggaaggaggcgggaaacctggagaaacaggctggaaagggtaaaaatgtcccagtgaattaataatgcatgtgcacttccagcacgcaggctggcactgagaggcttgctgttttct

SEQ ID NO: 936439 - DNA, 735 bp, Homo sapiens
ctttgcacctcagtttcctcatctgtaaggtaaggtgtattaggattctccagagaaacagaaccaacaggttgggggtggggggtggggtggagagagagaatgagagagggagagaaaaaagaagaagagaagagaaaagagacgagaagagaaaagaaaaagaagaactagagaaggagaaggaggagaagaagatttattttaagaaactggctcaagcgattgtggagactagcaagtccaaaacgttcagggcaggctggagacccagggaggagttgatggcgttccagtgggaaggtattctgaagcaggttctctcttccccaggggwcctcagtcatttctcttaaggccttccactgactggatgaggcccacccacattattcagggtaacctgctttgctcaaagactacggatgtaaatgttaatctcatctaaaaattacctgcacagcaatacctacactggtgtttgaccaaatatctgggtcccatggcctagctaagttggtgcatcagattaaccgtggggctaatgagatgtactacataaggttgctttgtgggttaagtgagctgatataggtgaagaatttagaactgtgtcaggtacagataaattcttgataagtgttatccatcattccttccaaaaggaatcattcattcccagggcagactctccctctgtggcttggacatgtcatcctggccactgggtccatg

SEQ ID NO: 936440 - DNA, 580 bp, Homo sapiens
gacttcttttggttattaagctactaattattgcctcaacttcagagcctgttattggtctattcagagattcaacttcttcctggtttagtcctggaagggtgtatgtgtccagaaatttgtctatttcttctagattttctagtttatttgtgtagaggtgtttatagtattctctgatggtartttgtattcctgtgggattggtggtgatatcccctttatcattttttattgtgtctgtttgattcttctctcttttcttctttattagtcttgctagcggtctatcaattttgttgattttttcaaaaaaccaggtcttggattcattgatattttgaagagtttttgtgtctctatctccttcagttctgctctgatcttagttgccttctgctagcttttgaatttctttgctcttgcttctctagttcttttaattttgatgtcagggtgttaattttagatctttcctgctttctcttgtgggcatttagtgctataaatttccctctacacactgctttaaatgtgtcccagagattctggtgaatgcacaagcttcagtagctgattc

SEQ ID NO: 936441 - DNA, 759 bp, Homo sapiens
ccctctccttagagcaccctttctccatgcaacgcccgtctcgggctctgcctccaggacccgccctgagccaggcggagaagcaggtgtccctcccggacccacactcgtgcgaaggcatgagggcacacgctggtgcgaaggcatgagggcacacgctggtgtgaaggcatgagggcacacactggtccaaaggcatgagggcacacactggtgcgraggcatgagggcacacactggtgcgaaggcatgagggcacacgctggtgcgaaggcatgagggcacgcagggcagggcgaaggcatgagggcacgcagggcagggcgaaggcatgagggcacatggggcagcgtgaaggcatgagggcacacgctggtgtgaaggcatgagggcacacagggcagcgcgaaggcacgagggcacacgctggtgcaaaggcatgagggcacacgctggtgtgaaggcatgagggcacacgctggtgtgaaggcatgagagcacacagggcagtgcgaggcatgagagcacgcagggcagtgcggctcactgcagagggctgcaaacccttgcccccggtggctgagctgagctccaaaggagtgagttcaagcagcagggcagggggtgggtggtgggtgggggagctctgtgcaggggctgaggaggagggacaaagagcgccaaggaggacagggaggtggggaggactaggggacatctgcagcctccccagaaacaggccccgggttccctgcagga

SEQ ID NO: 936442 - DNA, 735 bp, Homo sapiens
tccatgcaacgcccgtctcgggctctgcctccaggacccgccctgagccaggcggagaagcaggtgtccctcccggacccacactcgtgcgaaggcatgagggcacacgctggtgcgaaggcatgagggcacacgctggtgtgaaggcatgagggcacacactggtccaaaggcatgagggcacacactggtgcggaggcatgagggcacacactggtgcgaaggcatgagggcacacgctggtgcgaaggcatgagggcacgcagggcagggcgaaggcatgagggcacgcagggcagggcgaaggcatgagggcacatggggcagcgtgaaggcatgagggcacacgctggygtgaaggcatgagggcacacagggcagcgcgaaggcacgagggcacacgctggtgcaaaggcatgagggcacacgctggtgtgaaggcatgagggcacacgctggtgtgaaggcatgagagcacacagggcagtgcgaggcatgagagcacgcagggcagtgcggctcactgcagagggctgcaaacccttgcccccggtggctgagctgagctccaaaggagtgagttcaagcagcagggcagggggtgggtggtgggtgggggagctctgtgcaggggctgaggaggagggacaaagagcgccaaggaggacagggaggtggggaggactaggggacatctgcagcctccccagaaacaggccccgggttccctgcagg

SEQ ID NO: 936443 - DNA, 759 bp, Homo sapiens
ccctctccttagagcaccctttctccatgcaacgcccgtctcgggctctgcctccaggacccgccctgagccaggcggagaagcaggtgtccctcccggacccacactcgtgcgaaggcatgagggcacacgctggtgcgaaggcatgagggcacacgctggtgtgaaggcatgagggcacacactggtccaaaggcatgagggcacacactggtgcggaggcatgagggcacacactggtgcgaaggcatgagggcacacgctggtgcgaaggcatgagggcacgcagggcagggcgaaggcatgagggcacgcagggcagggcgaaggcatgagggcacatggggcagcgtgaaggcatgagggcacacgctggtgtgaaggcatgagggcacacagggcagygcgaaggcacgagggcacacgctggtgcaaaggcatgagggcacacgctggtgtgaaggcatgagggcacacgctggtgtgaaggcatgagagcacacagggcagtgcgaggcatgagagcacgcagggcagtgcggctcactgcagagggctgcaaacccttgcccccggtggctgagctgagctccaaaggagtgagttcaagcagcagggcagggggtgggtggtgggtgggggagctctgtgcaggggctgaggaggagggacaaagagcgccaaggaggacagggaggtggggaggactaggggacatctgcagcctccccagaaacaggccccgggttccctgcagga

SEQ ID NO: 936444 - DNA, 735 bp, Homo sapiens
tccatgcaacgcccgtctcgggctctgcctccaggacccgccctgagccaggcggagaagcaggtgtccctcccggacccacactcgtgcgaaggcatgagggcacacgctggtgcgaaggcatgagggcacacgctggtgtgaaggcatgagggcacacactggtccaaaggcatgagggcacacactggtgcggaggcatgagggcacacactggtgcgaaggcatgagggcacacgctggtgcgaaggcatgagggcacgcagggcagggcgaaggcatgagggcacgcagggcagggcgaaggcatgagggcacatggggcagcgtgaaggcatgagggcacacgctggtgtgaaggcatgagggcacacagggcagcgcgaaggcacgagggcacaygctggtgcaaaggcatgagggcacacgctggtgtgaaggcatgagggcacacgctggtgtgaaggcatgagagcacacagggcagtgcgaggcatgagagcacgcagggcagtgcggctcactgcagagggctgcaaacccttgcccccggtggctgagctgagctccaaaggagtgagttcaagcagcagggcagggggtgggtggtgggtgggggagctctgtgcaggggctgaggaggagggacaaagagcgccaaggaggacagggaggtggggaggactaggggacatctgcagcctccccagaaacaggccccgggttccctgcagg

SEQ ID NO: 936445 - DNA, 735 bp, Homo sapiens
tccatgcaacgcccgtctcgggctctgcctccaggacccgccctgagccaggcggagaagcaggtgtccctcccggacccacactcgtgcgaaggcatgagggcacacgctggtgcgaaggcatgagggcacacgctggtgtgaaggcatgagggcacacactggtccaaaggcatgagggcacacactggtgcggaggcatgagggcacacactggtgcgaaggcatgagggcacacgctggtgcgaaggcatgagggcacgcagggcagggcgaaggcatgagggcacgcagggcagggcgaaggcatgagggcacatggggcagcgtgaaggcatgagggcacacgctggtgtgaaggcatgagggcacacagggcagcgcgaaggcacgagggcacacgctggtgcaaaggcatgagggcacamgctggtgtgaaggcatgagggcacacgctggtgtgaaggcatgagagcacacagggcagtgcgaggcatgagagcacgcagggcagtgcggctcactgcagagggctgcaaacccttgcccccggtggctgagctgagctccaaaggagtgagttcaagcagcagggcagggggtgggtggtgggtgggggagctctgtgcaggggctgaggaggagggacaaagagcgccaaggaggacagggaggtggggaggactaggggacatctgcagcctccccagaaacaggccccgggttccctgcagg

SEQ ID NO: 936446 - DNA, 568 bp, Homo sapiens
cctactgggctgcattcccagatggttaaggcattctaagtcacaggaagagataggaggttggtacaaagtactggtcataaagcccttgctgataaaacatattgcagtaaagaagctggctaaaacccaccaaaaccaaaatggcgacgagagtgacctctggtcgtcctcactgctatactcccaccggcaccatgatagtttgtaaatgccatggcaatgycaggaagttaccctatatggtctaaaaaggggaggcatgaataatccaccccttgtttagcatatcatcaaaaactaaccataaaaatgggcaaccagcagccctcagggtgctctgcttatggagtagtcattctttagtcctttactttcttaataaacttgctttcactttactctatggactcgccctgaattctttcttgtgtgagatccaaataccctcttgggacccctttcctgtaacaatgccactgcactctagcctgggttacagagtgagatcctgtctcaaaaaaaagggagtgtctttatggtatgaatgagagctgatttattttgc

SEQ ID NO: 936447 - DNA, 794 bp, Homo sapiens
agagacccatagatggttcacatcacaggactctgtgcagacatcccctactaccagcccagagctgagtagacttgctgggtggctagacccagaagagagacagcaatcactgcaatttggttcacaggaagccacatccataggaaaagagagagaatactacatcaagggaacacttcgtggaacaaaagaatctgaacratagccttcatccctagaccttccctctgacagagcctaccccaatgagaaggaaccagaaaaccaaccctggtaacatgataaaacaaggctcttcaacacccccaaaaaatcatactaattcaccagcaatggatccaaaccaagaagattccctgatttacctgaaaaagaattcaggaggttagttattaagctaatcagggagggaccagagaaaggcaaagcccaaggcaaggaaatccaaaaatgatacaagaagtgaagggagaaacactcaagaaaatagatagcttaatgaaaaaacaaaaattcaggaaactttggacacacttttagaaatgcaaaatgctctagaaagtctcagtaatagatatgaacaagtagaagaaagaaattcagagctcaaagacaaggtctttgaattaacccaatccaacaaagacaaagaaaaaagaataagaaaatatgaacaagcctccaaaaagtctgggattatgttaaacaaccaaacctgagaataatcggtatatccgaggaagaagagaattctaaaagcctggaaaacatactcgggagagtaatcaagg

SEQ ID NO: 936448 - DNA, 762 bp, Homo sapiens
cactagttcctgcagtgaagggattactttcaagtattccattatcactgaccactgcatacctcgcttttcaaagtcctttttctacaaaggaacttccatcagtacacaagttaaggtcgggatcagtcaagggaacctctaaaatgtcccctcaagtggcgtatgtttgagcaattacttgttgacagttatgttctatcttttcttcattgtctggaagaaatgtggctgggttaagagttgcacaagtgcgcagtygcagcactggcccttcaagtaatagagcctgatatttaagtaaatggttgtctgacagccacaagtctcctttagcagttagtatgccattcacatcatggatgtccacacagtaagatccctgtattattttaactgcttcagatactaagcctgctactgctgccactacctgtaaaccatgaggccaacccttgccactacatcagtttccttactcaggtatgccacaggttgcaagcttgtccctcggacctgtgtaaggactcctagagctattcctgttcttttctgtgacatataaagtcaagtcttgccccattgacaagcttaacactggggcttgggttagggccttctttagggcctggaaagccacttctgattcaggtgtccatcttactaaatgggtattggatttctgagtttccttaattagtgtatataatggtctggctattttgccatacctaggaatccatattcggcagaaacctgtta

SEQ ID NO: 936449 - DNA, 709 bp, Homo sapiens
tcttttctgtgacatataaagtcaagtcttgccccattgacaagcttaacactggggcttgggttagggccttctttagggcctggaaagccacttctgattcaggtgtccatcttactaaatgggtattggatttctgagtttccttaattagtgtatataatggtctggctattttgccatacctaggaatccatattcggcagaaacctgttatgccaaggaacctcttagttgctttagggttttgggatgaggataagccagtataggcaggatacattcctgactgagggccctggtgcctttggatgattttagccctaagtatttaaactgctgtgagcagagctgagccttttgtttggaaaccttgtagccacaggtagcgaggaaatgtaagagctcttgggtggcttgatggcacaaggtttctgaaagggcagctaaaagtaaatcatccatgtaccaaaggacaagagtgtccagrtatgagaattgactcaagtcttgggctaatgcctaatagatgggggctatctctgaacccttggggtaaaacagtccaggtgagttgagacgttgggtttgaaggctcttcaaaggcaaccaagaattgatagtcaggatgtacagggatgcagaaaaagacatccttaaggtccaggactgtaaaccactctgcttcctccggtatttgggaaagcag

SEQ ID NO: 936450 - DNA, 487 bp, Homo sapiens
gccatactgcccaaggtaatttacagattcagtgccatccccatcaagctaccaatgcctttcttcacagaattgggaagatgacaattctaatcgccccagactggggaactcaatatttacctaagtgtttttcaatcagctcyggctctgttgcagggagcggtgatgctgaggaagtcagaggcaggggagataagtgtcggtggaaaggagcattttgagcaggactgtgcttctgggtgctgcacagtgtgctaggtctgaactcatgatccatgagacaaaacggggagggcaacatgaattcgctcaggcatacttcccttcagccacagggcaggagggtgaagaaacccagggaggtgcacaaagtcactcctgcacatgcagacacagggaacagcaccaaagcagaaaccacttcttgccgacagaagaggcattttcccctgcatggcagcttattctttacacaggcacagaa

SEQ ID NO: 936451 - DNA, 650 bp, Homo sapiens
agccggcctctggccttcaacatctgaccatgtctgtagaacacagagaaagaaatatgacaagggctgaaatcacagatagcagaaataaaaacagaaggaaaggaatgacattttctccaaaacacattgtatcyatgccatcacagaagaagtccagactgtaaaaaatacacctctcctgtaaatctggatgacttatgtgggaaaagaatgttatttctgtttgccttttgtaattgctcgctgggaggttgagcttctcatggttcagggttccatgtaaactgatggtaaaaggctcatttcaggagctctcagaattgaaaagcttgtcttttcctagggctcatggtgatggctcttggggtcaccagcattgcatggtattctgtgcattgtcccattcatttatcactcaacatatatgttcactgagggactcaggttgatgggtgctggatttctgttggccaagggctcattagcttccccacatgcagggaaggcatctatgcatttctgtagatcatcaccatcagatggcatccctatagtttagtagtagaatgtgacaacatgtgtgcagctagtgacgatatcttgcatggagttttcccaagagcacagaatgttcctggtgagtggat

SEQ ID NO: 936452 - DNA, 571 bp, Homo sapiens
ttatatgccagatcttgctgagccttcttgtaagagaaggtgaacacgctatttgacaatgtcactctgtggtggttgaagggcggtcgacaggtgtaaactggcctcggcaggaagctcactatttccagcaggaagccaatccagtacgtcagggataaaggcaggctccaactggaatcaaggcagaggccgaactctttgctcaaggtgtaactaaggttatcatagctttggtgaggcgtgtcatctgagatatagtagaactgtcctcggacacttggggccttcttgggytcccgcagggccctcaaggccagaatgtgggcccaggctatgttgccaacatagactgggttgactctggagaacttgctgaaacttgacaggattccatggttgtttagggcctcatttataccggcagaaaggattgggcttccttccccatagataaacattggtcttacggcacaagtgtacaaggtgccaccgtttttcagagtcagaccattagccgccagcacagccttctcagcaagctttttgctgtgtgggtatggagcgtacc

SEQ ID NO: 936453 - DNA, 607 bp, Homo sapiens; identical to SEQ ID NO: 935707

SEQ ID NO: 936454 - DNA, 607 bp, Homo sapiens; identical to SEQ ID NO: 935708

SEQ ID NO: 936455 - DNA, 607 bp, Homo sapiens; identical to SEQ ID NO: 935709

SEQ ID NO: 936456 - DNA, 863 bp, Homo sapiens
ggcattggctaattaatcatggtgttcctagaagtgaaattgatgggaaacctactgtattcctacttgatttatataaacaaaaaactgccaggtagaatggactaaagactaatctgaattataaaaacagagaatcatgggccctcaatcaatttccagactcgaacctgttacagttccagaacccactgaatgaaggggaggctggatccccttgaggaaggacaccactaggctactgacaacttatgctgttactctttctcccatccttccctaaggagacctctggccttttaccagggtaactgtgtgtactggagaaagggaagtaatgagacatttcagaaagtactggacactggctctgagctgacgttgattccagggtacccaaaacgttattgtggttccccagttaaagtaggggcttatggaggttaggtaattaatggagttttagctcatttctgacttacagtggttccagtgggtccctggacttatcctctggtcattttcccagtgccaaaatgcataatttgtatagacatacttattagctggcagaaatgccacattggctccctgactggtaggatgagggctattatggtgggaaaggccaaamagaagccattagagctgtctctacctagaaaaataaaaaaatcaaaaacaatatcccatccctggagggactgaagtgattagtgtcaccatcaaggacttgaaagacgcaggggtggtgattcccaccacatccctgttcaactctcccatttgacctgtgcagaggacagatggatcttggaaaatgatggtggattattttaagcttaaccaagtggtgactccaa

SEQ ID NO: 936457 - DNA, 648 bp, Homo sapiens
ctgtaaattagttcatccactgtagaaagcagtatggtgattctcaaagagctaaaagcagaactaactttcaacccagcaatcctactactggcgatatacctagaggaatataaatcattctaccctaaagacacatgcacatgaatgttcattgcagcactattcacagtagcaaagacatggaatcacctatatgaccatcaatgacacattggatgaagaawatgtggtacatatacaccatggaatactgtttagccataagaaagaatgaggtaatatcttttacaggaacatgaatggagctggaggccgttattcttagaaaactaacacaggaacagaaaaccaaataccacatgttcacagttataagtgggagctaagtgatgagaactcatggacacaaagaagagagcaacagacactggggcctacttgagggagaagagtgggaggagggagaggagcaggaaatactaagaattgggtactagggttagtacctaggtgacaaaataatctgcatgacaaaccactgtttacatatacaagaaacttgcacatgtacccctgaacctaaaataaaagttaaaaattaattaattgaaataaaaatgttctgaaaacagagagagagagaga

SEQ ID NO: 936458 - DNA, 668 bp, Homo sapiens
tgacatcattcgtagctgattgtcagcaaagtaatgacttgctacatgtcgtggccagccaaggacagccttagaaaaccagaacaggagctgttaaacctggaaatgccagggctttactgtgggatacccggttcctgcacctgaatgatgaggctaagaggatgagaaaatgtaacattaaatagtcccaatgatatttaggactttccctctctgggcctcaggtcttccaccagtaaaataaggaagatgaactagaccgctaagcctgcttgcagctcactcctgtgaacttgtccagtaggatgtgttcaggggtgagtcagggaatacttcctgtaggagataagtcttgaggcaagagaagagagrtctgttacaaaagatcaacaagagtgaccaacaagagtgaaagtccaaattagccgggcgtggtggcgggcgcctgtaatcccagctattcaggaggctgaggcaggagaattgcttgaacccaggaggtggaggttgcagtgagccgagatggcaccactgcactccagtctgggcaacagagcgagactccactgtcaaaaaaaaaaaaaaaaaaaaagcggaagtgcaaaaggccaggttaagccagtaagatactgggagtgagctgatggactgcctgccagaggaga

SEQ ID NO: 936459 - DNA, 753 bp, Homo sapiens
aacaaatattcacagcgtgtgccaccctcgacctgcagtgccgttgtcaggtggaagtgattttacttcaggagaggacagtgttctctccaggacttttccttagtagctagatctgcatcccactccttgctcttcccctcttaccccccattctctgcccccatttccgtctcttgtttccaccctgccgtcccctttcacctgctttctcctcttcagctttcatggctcaccccctccctgtccaccygcatcccccaggctaaggccctgcactgtcctgggtggggagatgtgtgtggttttaggcagtgccctctagatgtgtccaggatggggaaacatggctcagttgccagtataatgggttaaaagagaggccacttttgaaggccgttcccatctcccattccagaatcctgtaggacttagaatttatgggccacagtggaattcttggttccccaggaccttgtggtggacgccttctttcactgagcattcatggggtgactattaggtaccatgccctgctctgggctagagaccccataatgagtaaatctcaggtcactaccccatggaacccaccactgcaggcattgagagggggagaaagaaaggggcatggcctgtttgtatccttctcacgtggccgtccaccaggtcctgggggagtgggagccagtgcgaggagggaagtccagtgagaatgacaaatggacgatgtcagacccaggggctgaggcc

SEQ ID NO: 936460 - DNA, 578 bp, Homo sapiens
cttaatacattttccctgaatgcccaacacatctgaattaccaacacccgtatgtagccaagaaactgacaatcatttataaattatcacctatgactccatctgctctatgcacttattttttaaattttactcatttatttattatttttattttttgtagagatgggatctcactatattgcccaggttggtccagaaacagaaacagacccacactaatttcataaattggatgaccatgcagtcatccgatttaagaaaaaaagtgccaaacagtgcagaaggaaaagratagtcttttcaataaatggtgctggatcaagcagacacatccacgtagtaaaaagtgaatcatagccgggtggggtggctcatgcctgtaatccccacactctgggaggcttaagtgggaagattacttgagcccaagagtttgagaccaacctgggaaacatgttgaatcccatctctacaaaaaatatgaaaattaagccaggcatggtggcacactcctatagtcgcagctactcaggaggctgaggtgggaggatcgcttgagccaggaggtggaggtt

SEQ ID NO: 936461 - DNA, 578 bp, Homo sapiens
cttaatacattttccctgaatgcccaacacatctgaattaccaacacccgtatgtagccaagaaactgacaatcatttataaattatcacctatgactccatctgctctatgcacttattttttaaattttactcatttatttattatttttattttttgtagagatgggatctcactatattgcccaggttggtccagaaacagaaacagacccacactaatttcataaattggatgaccatgcagtcatccgatttaagaaaaaaagtgccaaacagtgcagaaggaaaagaatagtcttttcaataaatggtgctggatcaagcagacacatccaygtagtaaaaagtgaatcatagccgggtggggtggctcatgcctgtaatccccacactctgggaggcttaagtgggaagattacttgagcccaagagtttgagaccaacctgggaaacatgttgaatcccatctctacaaaaaatatgaaaattaagccaggcatggtggcacactcctatagtcgcagctactcaggaggctgaggtgggaggatcgcttgagccaggaggtggaggtt

SEQ ID NO: 936462 - DNA, 551 bp, Homo sapiens
atggtatcatatagagttgtttcactgccctgaaaaccctctgagctccacctacccatccctccttccccctcacccttggaaaccactgatctttttactatctccatagtgttgcctcttccagaatgtcagagagtctgactcatatagtatgcatcccttaaagactggcttcctttgcttactagtattcgtttaaggttcctctgttactaatattcgtttaaggttcccccgtgtcttttcgtggcttgatcactcatwtcttcttagtgctgaattgtattccattgtttggatgcaccatagttcatctgtttaccactggaaaggcatcttagttgctcccaatttttgacaattatgaataaagctgctagaaacactcatatgtaggtttttgtggacatcagggttcagcacatttggctaaataactaagaacacgattggtggatggtacagtaaaactctgtgtgtcttcataagaaactgccaagctgtcttctgtggtggccacgccattctgcagtctcagcctgctttgt

SEQ ID NO: 936463 - DNA, 556 bp, Homo sapiens
tccaatgctcatttactgttccgaaatttctagggttcttaggaattatgccaaatatactttgcctgtgcgctgtcaatgaaacaacaaagcctggacgacagcaaatctgtttacagcatgttttactaactattttaagcccattgttaagacctactgctcagaaaaatccctttgaaaayattactgttcattgacaatgcacctagtcactcaagagctctgatggcattgtacaaggagataaatattgctttaatgccttaacataacatctatttggcagcccatggatcaagaagtaatttaatctttcaagtcttattatttaagagatagatttcataaggctatagctgccatagatagtaattcttctgatggatctgggcaaagtacattgaaaacctggaaaagcacattcctgattcatgggaggaggtcaaaatatcagtcttaacaggagtttgaaagaagttgattccaaccctcatgggtaactttgagaggttttagacttcagtggacgaagtactgcagatgtggtagaaat

SEQ ID NO: 936464 - DNA, 622 bp, Homo sapiens
aaaagtcccttataaaaccatcagatctcgtgagaactcactatcatgagaacagcatgggggaaaccacccccacaattcaattacctcccactgggtccctctcattatgtggggattatgggaactacaattcaaaatgtgatttgggtggggacacagcaaaaccatatcattctgccctggcccctcccaaatctcatgtcctcacattttaaaacacaatcataccttccaaaagtcccscaaaattttaactcatcccataattagctcaaaagtccaagtccaaaatctcatccaaaggcaagtcccttctgtctatgagcctgtaaaatcaaaagcaagttagttacttccttgatacaatgagagtacaggcattgggtaaatacagccactgcaaatgggagaaattggccaaaacaaaggagctacaggccccaggcaagtccaaaattcaatagggcagtaattaaatccttaagctccaaaataatatcctttgactccatgtctcaaatccagatcacactgatgcaagaggtgggctcccatgatgttgggcagctctgaccctgtgactttgcagggtacagccctcttcctggcagctttcaca

SEQ ID NO: 936465 - DNA, 622 bp, Homo sapiens
aaaagtcccttataaaaccatcagatctcgtgagaactcactatcatgagaacagcatgggggaaaccacccccacaattcaattacctcccactgggtccctctcattatgtggggattatgggaactacaattcaaaatgtgatttgggtggggacacagcaaaaccatatcattctgccctggcccctcccaaatctcatgtcctcacattttaaaacacaatcataccttccaaaagtcccgcaaaattttaactcatcccataattagctcaaaagtccaagtccaaaatctcatccaaaggcaagtcccttctgtctatgagcctgtaaaatcaaaagcaagttagttacttccttgatacaatgagagtacaggcattgggtaaatacagccactgcaaatgggagarattggccaaaacaaaggagctacaggccccaggcaagtccaaaattcaatagggcagtaattaaatccttaagctccaaaataatatcctttgactccatgtctcaaatccagatcacactgatgcaagaggtgggctcccatgatgttgggcagctctgaccctgtgactttgcagggtacagccctcttcctggcagctttcaca

SEQ ID NO: 936466 - DNA, 464 bp, Homo sapiens
aatcaagaaataaccataaaaatgggcaaccagaatccctcatggctgttctctctatggagtagtcattcttttattcctctactttcctagtaaacttgttctcactttatggactggccctgaattccttcttgccggatatccaagaaccctctctaggggtctggatcgggacccctttcctgtaacacatattccagtggaatacgttacataataaaggcagaaattgtaaaaaatttgagcttacagtacaggtagtaagtatcagggaccagtagaaaggagaarggtgccaagttttatcaaatgagcaagatatttaaggaatgagtttatctcataatggggtaaggaaaaaagctgagactctcatggcttcttcaacttggtccagggctgcagaccattcaagagaaattcaaatcaggcatagggcttcatcaacccacaaaccaatt

SEQ ID NO: 936467 - DNA, 644 bp, Homo sapiens
ttagaagcaaaggctcctgggccgggcatgatggctaatgcttataatcccagcactttgggaggctaagacgggtggatcatttgaggtcaggagttcaagaccagcctggccaacatgatgaaaccccatctctattgaaaatacaaaaaattagccaggcatggtggtgcaggcctgtaattccaactactcgggaggctgaggcaggagaatcgcttgagcctgggaggcggaggttgcggtgagtygatatctcgccattgtactctagtctgggtgtcagagtgagaccctcttttttttttgagaaaaaaaataaaagaagaagcggaggctcctgctgttgaatagacaccctttgaggcaatgaatgacacatgttagcaaggagcccatcttatctacgactcatcctcaaaaggtccccaacctgaagcagccagtgcctgtggtggtgtagatggtgtctggaaaggctgagaggacctcacttctttcactcaccaaattgagtacctgtaatcccagcaccttggggtgccaagacaggaggatcccttaaggccaagagttcgagaccagcctgggcaacaaagtgagaccttgtctctataaaaaatcagaaaattagccgggtgtgg

SEQ ID NO: 936468 - DNA, 644 bp, Homo sapiens
ttagaagcaaaggctcctgggccgggcatgatggctaatgcttataatcccagcactttgggaggctaagacgggtggatcatttgaggtcaggagttcaagaccagcctggccaacatgatgaaaccccatctctattgaaaatacaaaaaattagccaggcatggtggtgcaggcctgtaattccaactactcgggaggctgaggcaggagaatcgcttgagcctgggaggcggaggttgcggtgagtcgatatctcgccattgtactctagtctgggtgtcagagtgagaccctcttttttttttgagaaaaaaaataaaagaagaagcggaggctcctgctgttgaatagacaccctttgaggcaatgaatgacacatgttagcaaggagcccatcttatctacgactcatcctcaaaaggtccccaacctgaagyagccagtgcctgtggtggtgtagatggtgtctggaaaggctgagaggacctcacttctttcactcaccaaattgagtacctgtaatcccagcaccttggggtgccaagacaggaggatcccttaaggccaagagttcgagaccagcctgggcaacaaagtgagaccttgtctctataaaaaatcagaaaattagccgggtgtgg

SEQ ID NO: 936469 - DNA, 619 bp, Homo sapiens
aaatattttctctgtttatatctttattctataagctttattctattatcttaaatttttaattttttctttttttttttgttaaaaactaggacacaaagacacacattagcttaggcctacacagggtcaggatcatcaatatcactgtcttccacctccacatcttgtcccactcggaggtctttagggacaataccatgcatagagctgtcatctcctatgattacaatgccttcttctggaatacttcctgaaggacctcccagaggctgtttaacagttacctttttttttttcaataagtaggagtacactctaaaacaacaaaatatatagtaaatacataaaccagtaacatggtcatttattatcattctcaagtattatgtactgtatataactgtatgtgctagactcttatatgactggcagcaagtggrtctgtttatactgggcatcaccataaacacataagtaatgcattgtgctaggactttatgacagctacatggttattaggctacaggaatttttcagctccgtgataatcttctgggaccccgtcatatatgtggtccatttggctgaaatgtcactatgcagtgcttgactataa

SEQ ID NO: 936470 - DNA, 607 bp, Homo sapiens
gtagtgagggagaacaatgggtaggtccaagacaccccgaagcagtcaaatcaacgaaagttcacgatgacttgaacctgggggtgggcagagggagatttctataaaagatgacatcaagtttctgtgctacaacacataaagaccattagaagaaatcaggcttggagaagatgatcgtgaattccattttgtcattttgaatttgagatgcctttaaaacattccaatggagaatcaartgcactgctggttctacagatgtacagagcaaaggaggggccagagtagacacacattttgcatttgttactgtaggatggtaacttgagctgaagatggggaggagactccccaagtaggtctctggactaccagcagcacagcattacctggaaagttgtttgaggtgcagaatctctggccccatcctgtccaagacctactgagtcagaaactctggggatgaggcctgcagaccctgttaacacacccttcagggcatttgcatgcacaggaaagcttgaaaatcactgactgcaggcagcgagtctcaaactttgcttcacactagaattacctggggagcttctaaaatcccaatgac

SEQ ID NO: 936471 - DNA, 674 bp, Homo sapiens
gaccatcctggctaacacggtgaaacctcatctctactaaaaatacaaaaaaattagccgagcgtggtggcgggcacctgtagtcccagctactcaggaggctgaggcaggagaatggcgtgaacccgggtggcggagcttgcagtgagcggagatcccgccactgcactccagcctggggaacagagcgagactctgtctcaaaaaaaaaaaaaaaaacaaaccctgtgaggagcaggtgttggctgggagagcaggcgtgtacatgagccaagtgtgcagtgtcacttggtgggtgttgagtgtcaggkagatgagcagggaagggggacagggctggcctcccagacatgcaaccaggacattcgtaccgggccctgctcttgatcgcatgctccgccgtcgtggcttcaaactctcaatcatttgaaaacaaccattcaagatttttatttttgcaccagctccggggatgtggggtgtagggctgggatgcgggggtgcagtctgggaaggccttgctgagaaggagacatggagtggaggagggagcctggtggttagtgcagacagtcagtgcgaaggccttgaggcggcagcatctggccaggtgctgtttctgtgcccatctgaccgatgaggaaagtcggggctcggggtggggggcggcacgc

SEQ ID NO: 936472 - DNA, 658 bp, Homo sapiens
gagctccaggatccaggcctgtctctgcctaaattaggagacatgtgacctcagaaatccctgcctttccctgggccttagttacccctcctatacaatgaggtggcgcatcaagatgatgcccagattcctcacagctatagattatccgagacagagaggacaaacaagtcaatagcgaacctttattgagcctctactctgtgccaggtgctgaatgcatgcttctcaagtgtatctcgtttaatttttatgaagctggccaggcactgtggctcatgcctgtaatcccaacactttgggaggccaaggcaagtggatcrcttgaggccagcagttcaagaccagcctggccaacatggtgaaaccccgtctctactatacaaaaattagctgggtgtggtggtgcgtgcctataatcccagctactcaggaggccgaggcaggagaatcacttgaacctggcggaagcagaggttgcagtgagccaagatcacaccactgcgccccagcctgggcaacagagcaagactctgtttaaaaaaaagaaagaaaaaaaagaataattttcatgaagtagtcaaataaggatcataatcttcactttagaggtgaggaaactgaggcttagaaaggatgagtcacttagaaaggattc

SEQ ID NO: 936473 - DNA, 585 bp, Homo sapiens
ccgtgtattcctttgctgatgtgttcctctgctgatgtgtgcctccactgatgtgcccttcctgacatccagccccttctgtcttcttctgccaatctgctcctctcaatgtccagcagcttgtgcatgtgcctgctagggtattggggggttttataggcagagaatgggagcatggcaggccagggtggtcttgggaaatgcaacatttgggcagaaaatgcttgtcctcatctaggtccctgagggtgcagccctagccagaaaccacaccctccttcacccagcacttyccttccccgctctcatatcatttaaagggaccacactcttcccttcccagcactcccatatcaagaacattcaaagccctcctgcccacctcaaagaagttctcttgagagaactagcaaagctggttctcagaggtctgtcaggacagaattatccagcacatgctttctcacaatattttcttaacaaaaagagtttcccagtatgcagaatatgatctcttcagctcaccaaagggcctgctattacagaaccatttcaaactaggtgcccaaagtgcaccttcattca

SEQ ID NO: 936474 - DNA, 585 bp, Homo sapiens
ccgtgtattcctttgctgatgtgttcctctgctgatgtgtgcctccactgatgtgcccttcctgacatccagccccttctgtcttcttctgccaatctgctcctctcaatgtccagcagcttgtgcatgtgcctgctagggtattggggggttttataggcagagaatgggagcatggcaggccagggtggtcttgggaaatgcaacatttgggcagaaaatgcttgtcctcatctaggtccctgagggtgcagccctagccagaaaccacaccctccttcacccagcacttcccttycccgctctcatatcatttaaagggaccacactcttcccttcccagcactcccatatcaagaacattcaaagccctcctgcccacctcaaagaagttctcttgagagaactagcaaagctggttctcagaggtctgtcaggacagaattatccagcacatgctttctcacaatattttcttaacaaaaagagtttcccagtatgcagaatatgatctcttcagctcaccaaagggcctgctattacagaaccatttcaaactaggtgcccaaagtgcaccttcattca

SEQ ID NO: 936475 - DNA, 610 bp, Homo sapiens
agccaggatgagccaggagaaggaatttcacaagacaatgtcatcagttaaggcaggaacaggccattttcacttcttttgtggtggaatgtcatcagttaaggcaggaaccggccatctggatgtgtatgtgcaggtcacaggggatatgatggcttagcttgggctcagaggcctgacgttcctgtcttcttatattaataagaagaataaaacaaaatagtgtcgaagtgttggggcggcgaaacatttttggcagggggtggtatggagagagagaatgggygatgtttctcaggattaggggaggcgtgggaacctggagtgggagagattaagctgaaggaagattttgtggtaaggggtgatattgtggggttattggaagaaacatttgtcatgtagaattattggtgatggcctggatacggttttatatgaattgaaaaactaaatggaataagagaaggagaaaaccaggtattaaagttctaagaatggggaggacctaggacatgtaattagagagtgcttaaggagatttagcatagttctgccagcaaagattatttatttaagagttaagagtggcagtttggggataacacca

SEQ ID NO: 936476 - DNA, 595 bp, Homo sapiens
cttggagaaacagtgtaaactggcagtgtaaacaagagcagggcacgtatgagtagttgagaacagtgaacaggagtatgactagacagaagatagtagggatgacaagtttttttggggcacagtcttaagttggtctggtgtctggaataagactggggcctaataaaaaggagcgtccatacaggagcttaaatgtgctgtaccttgtaggattccgaggacaggcctgaattctgagaagggaaagtggtaaaagtactgtccagttctttttaagttggtggctgagcttggtgaggtgtgtttttaaaagactattagtctgttctaccttttctgaagrctgaggaccgtaaggggtataaaggtttcactgaataccaagagcctgaaaagccggtctgctattggactgtatagaggtgggaaggccaaagcgaggaattatgtgtgacagaggggaagaaatgactgcggtgaccttctcagaccctgtgggaaaggcctctacctatccagtgaaagtgtctacctagactaagaggtattttagtttcctgactcagggcatgttgagtaaagctactttccc

SEQ ID NO: 936477 - DNA, 649 bp, Homo sapiens
aactaacctgtaaggcttgtctggttctaggacaggtaaaatggaggaattgtaaggagagtttataggctttaaaaggccatgctgtaacaggtgagtgataacaggctttaatccttttaaagcgtgctgtgggatgggatattggtactgagcggggtaagggtgattaggttttaatgagatggtaaggggtggattataggtcgctaaggagggagtagaggtatcttatacttgtgggttaaggtggggagatataaggggaggatgtgaaggaggctttgaactgggggaaaaggtggcaatgaggtgtgtctgtagcccaggaatagtcagggaagcagataatttagttaaaatatctcggcctaataagggaactgggcaggtggggataactaaaaggaktgcttaaaagagtattgtctaagttggcaccagagctggggagttttaagaggtttagaaacctggctgtcaatacaacagttatggaggcaagggaaacaggcctttgaaaagaaggtaatgtggagtgggtagcctccgtattgattaagaaggggatggacttaccttccactgtgagagttacctagagcgtctgtgatggtcttgtaggcttctgaggcaatccggcagtatc

SEQ ID NO: 936478 - DNA, 605 bp, Homo sapiens
ttgctggctcccttgtgtccgggtggggctggatgtctgcttctggccaatgcgtgctgagtgcaagtgacatgtattagtttcaggttagagcatttaactgcttgtgtgagaccctccagagtttttttgcttctgcctcaggacaatactgtgaggtcctgtaatagctactgtgccagcctgggtcrctgtatcagttaagagtttgatctgggaagtagaaccagttgagtcatgtggagtaagggatttattagagggattagagcttacacagttgtggaagttggtcaagacatctctggaagatggttgcctctgtgaacgggtttgggcctgaagtttgttgtaggtgcatgaagaaaagctggatgtaaagtggggaagaacagagataattggatgctctgaggatggcctggaatccatgtctgtctctcaccacctccacgctcagtgatgctggtgacctgcagaaggagctggtctccagtgccgtggcgctgcaggtgcatctggttcaggaccctaaaaatgctgaataagaacactcagtgggttcctcacatctgctgtctagatttcacatgtttccctgtggc

SEQ ID NO: 936479 - DNA, 605 bp, Homo sapiens
ttgctggctcccttgtgtccgggtggggctggatgtctgcttctggccaatgcgtgctgagtgcaagtgacatgtattagtttcaggttagagcatttaactgcttgtgtgagaccctccagagtttttttgcttctgcctcaggacaatactgtgaggtcctgtaatagctactgtgccagcctgggtcgctgtatcagttaagagtttgatctgggaagtagaaccagttgagtcatgtggagtaagggatttattagagggattagagcttacacagttgtggaagttggtcaagacatctctggaagatggttgcctctgtgaacgggtttgggcctgaagtttgttgtaggtgcatgaagaaaagctggatgtaaartggggaagaacagagataattggatgctctgaggatggcctggaatccatgtctgtctctcaccacctccacgctcagtgatgctggtgacctgcagaaggagctggtctccagtgccgtggcgctgcaggtgcatctggttcaggaccctaaaaatgctgaataagaacactcagtgggttcctcacatctgctgtctagatttcacatgtttccctgtggc

SEQ ID NO: 936480 - DNA, 605 bp, Homo sapiens
ttgctggctcccttgtgtccgggtggggctggatgtctgcttctggccaatgcgtgctgagtgcaagtgacatgtattagtttcaggttagagcatttaactgcttgtgtgagaccctccagagtttttttgcttctgcctcaggacaatactgtgaggtcctgtaatagctactgtgccagcctgggtcgctgtatcagttaagagtttgatctgggaagtagaaccagttgagtcatgtggagtaagggatttattagagggattagagcttacacagttgtggaagttggtcaagacatctctggaagatggttgcctctgtgaacgggtttgggcctgaagtttgttgtaggtgcatgaagaaaagctggatgtaaagtggggaagaacagagataattggatgctctgaggatggcctggaayccatgtctgtctctcaccacctccacgctcagtgatgctggtgacctgcagaaggagctggtctccagtgccgtggcgctgcaggtgcatctggttcaggaccctaaaaatgctgaataagaacactcagtgggttcctcacatctgctgtctagatttcacatgtttccctgtggc

SEQ ID NO: 936481 - DNA, 683 bp, Homo sapiens
tacacttttagggagattttcttttcctatacacttcaggtatcttattggaaatgagatattttttcattgtgtgtgtgtgtgtgtatgtgtgttttgagacagggtcactcaggctggagtgcagtggtacaatcatggctcactgcagccttgacctcttgggctcaatwgatcctcccacctcagcctcccaagtagctgagactacgggtgcatgccaccatgcctgcctaatttgaaaaaaatttttgtagagcaaggtctcactatgttgcctaggttggtctcaaagtcctggctcaagcaattccctcaccttggcctcccaaagtgctgggattataggcatgagcgaccacgccaggccctcattgtgattttttaaaaaaatagtttttgatggtatgtaggaagggtgttcatcttgcatgttttgtcatgaaaattaccatatgaaaattatattagtgcatatttttttgttgattctcttgtaatgcaaattatttgaagataatgataattttgtacatctctgttcttatgttacactcctattttttcctcttaattattgcactaattagatctttgagaacactcccaaacagcagtcttaccatcttcaattttatataagttttatataagttttttataagttcagtcaatacagattt

SEQ ID NO: 936482 - DNA, 572 bp, Homo sapiens
aaaatccagattcattaattgttttaatattattgttagcatagacaaagagccaaaaataagcaggcaaggaagcccctggaaaacgaagtcctggagatgctgcccactgtcagtaagcacaaagggaaatggctacattggttacatctggccttgtggttaggctcttccaggtctgaaggggactgaccatgccctagccaaagataaccacactagggactctccgcactgatragcatgcagtctccacaaaaactcaccctacagtagcctttttctcattatagtattaaaaattatacccctgagtaaagattttaaatgctaatggacatgcaatgtgtgtactagtatgtacaaccacagagcatgcgtgcccaaagagacctcctaaaacatgcttgcaagtaacactccttcttgcaccttcatgaataatcatgtaaaattctcataaagagagtcccccagcactactgctgctggttcattctttcaagcagcccgctctgtcttgtgtttcagagtatactttctctttaactacacactactactactatttt

SEQ ID NO: 936483 - DNA, 715 bp, Homo sapiens
gacaattggagctttcctatcagatcttcagagggaaggcacagagagtggatgcagggaagaaacaaaagctgggctgaaggtggaggaagccaggaaccctgaaagaaggctgccatgcactggaacttaatagtggcccccaatggctccaggggaacaggtgagttgaactggcaaagagcaactaatttttgccatggatctcaggaatgctggcaggaggagatccctcaaccaccacagacagttgagtcaacagggagaactgctcagagaagtggtaggggcaacagggaacccagagggtttggtgtgagagtacctgtattgaagcacagccatagatacctttcccccaaggcytgacttgctcccagaagaggctttagccatagggaaactttcacacctgaactctgcagggtggttcttgaccatcacatgaggctggtctgacctgagcatctgttggtttgctggcttctaccagggtccaagcttggctgtacttgctttcattgcagccttgagtatactaagggcctgcatcatagctcttctacttgctgaccatgtctgactggcagagagttttagcaaggtggcatttgcagccatgcaccagcctgcccattccatctctcaactgcacaactacaccttcctcagacctgtggccaagccccacatggctttcccagagcatgtgtgt

SEQ ID NO: 936484 - DNA, 715 bp, Homo sapiens
gacaattggagctttcctatcagatcttcagagggaaggcacagagagtggatgcagggaagaaacaaaagctgggctgaaggtggaggaagccaggaaccctgaaagaaggctgccatgcactggaacttaatagtggcccccaatggctccaggggaacaggtgagttgaactggcaaagagcaactaatttttgccatggatctcaggaatgctggcaggaggagatccctcaaccaccacagacagttgagtcaacagggagaactgctcagagaagtggtaggggcaacagggaacccagagggtttggtgtgagagtacctgtattgaagcacagccatagatacctttcccccaaggcctgacttgctcccagaagaggctttagccatagggaaactttcacacctgaactctgcagggtggttcttgaccatcacatgaggctggtctgacctgagcayctgttggtttgctggcttctaccagggtccaagcttggctgtacttgctttcattgcagccttgagtatactaagggcctgcatcatagctcttctacttgctgaccatgtctgactggcagagagttttagcaaggtggcatttgcagccatgcaccagcctgcccattccatctctcaactgcacaactacaccttcctcagacctgtggccaagccccacatggctttcccagagcatgtgtgt

SEQ ID NO: 936485 - DNA, 548 bp, Homo sapiens
actagaccagcctaacaagcagtccttaagggactgctaaacatggaatcaaaagaacatctgctaccgcaactactcacttaaaaacatagtccacagacattatgaagcaactatacaaccaagtctatgtaacaatcagctaacaaatgatgacaggatcacaatctcatatgtcaagtctaacctggaatataaatgggctaaacacaccacttaaaaacatagcatgccaagctggataaaaagaaaagacccaaccatctattgtcttcaagagactcatcttgtatgtaacaacacaaacagaatcaaagtaaagggttggagaaagatttactatacaaatggaaaacaaaaragaacaggcatctttattcttaaatcagataaaaaactgattctcatatcagtttaagcctttaacaattagaaggacaaagaaaggcattacattatgacaaaaggtacaatccaaactattctaaatatatatgcaccccaaattggagcacccattttcataatacaagttctttttgacccat

SEQ ID NO: 936486 - DNA, 551 bp, Homo sapiens
acagtcacagtttcccttcggaggtgtgtccttccactgtttctccctgtgcatggtttctccgtagctgtgaccacatggtgtattcagtttgtagctgcttttttcacttcacattaataacatcataaacattttctcatgttactgcaaaccttccttagttgtactattttctggattataaaaatatattcagaaaaactaaagaaagtatatcaatagagggaaaaataaataccacaacacagaagtagtcattaacattttggcatatctcatttcgggctttttatttatttattttaggacagagtctcactccgtcccccaggctggagtgcaatggcgccatcacagttcactgcagcctcaacctcttaggctcaaragatcctcctgcctcagcctcccaagtagctgggattataggcacgcaccaccacaccctgctaatgttttcttttttgagacggagtctcgctctgtcacccaggctggagtgcagtggcgcaatttcggctcactacaacatccacctcccaggttca

SEQ ID NO: 936487 - DNA, 586 bp, Homo sapiens
agaaagttggttaacatattttgtatgttatttgtattatatactatattaaagtaagctaaagaaaaaatgttcttaagaaaattatatggccatatgcagtggttcacacctgcaatcccagcactttgggaggtcaaggcgggtggatcacttgagttcagcagtttgagaccaacctggccaacatggtgaaaccccatctgtactaaaaatacaaaaattagctgggtatggtggcatgcacctgtaatcccagctacttgggaggctgaggcaggagaawcgcttgaacctgggaggcggaggttgcagtgagctgagatggcaccactgcactccagcctgggcaacagagcgagactgtgtctcaaaaaaaaggaagcaaatcataagataaactatatttacaattcattaaagaagtggatcatcataaaggccttcatcctggttgtcatcttcacattgagcaggctgagggggaaagggagggttggtcttgctgtctcagtggtggcagagacggaagaaaatctgtggataagtggacctgtgtagttcaagctcctgttgctcaagagtc

SEQ ID NO: 936488 - DNA, 595 bp, Homo sapiens
caaaagatactggtaagagaacaaaaatacaggtcacagactatgagagaatagttttgcattgcttaacgatagggatatgctctgagaaatgaattgttaagcaatttcatcgtcgtgtgaacatagaatatacttgcacaaacctggatgctatagcctactacacacctagaccatagcctattcttcctaggctacaaaactgtccagcatattactatactgaatactgtaggtagttgtaacacaatggtattcgtctatgtaaacatatctaaacatggaaaaggtacagtaaaaaaaaaaatatggtataaaaggtatattaaaacttgtacacccgtatcaggcacttaccttgaatggagcttggaggactggaaattgctctgggtgagtcagtgagtaagtggtgaactgcktaccactgtcaacgttataaacgctgtacacccaggctacactaaatttatttaaaaatttttcattcttcagtaaagagttaaccttagcttactgtaaatttttcgctttataaacttaattttttaacttttttgactcttataataatacttagcttgaaacacat

SEQ ID NO: 936489 - DNA, 650 bp, Homo sapiens
tttgaactttaccaaaagtaacctcacaggtgaaaccaacaagcctcaactaaggttatgacttaaccttggcatacaaagtattttcaaaaaggaggtaagcagtttttacaaaatgtagaattttcaaaggtagcacaaagaaagaaaaattcaagaaggaaagccagaagttgttcatggagaagacaatcaacaaatggcaaaggtcacacagataccaaccagcagtacttattccctaagccaggattgaacccaggccatcactgtaaaatggcaaagccttagctgctgagttgtaacattaggtagtttacattgctcttcccagaagagtatagagcagtcaattttgagcttgcaatggtttttaagtacycaaaataatttttagagctaactatgacataaacctcaaaattcttgttccttagacggcagagaccaagagaaaatactgttacatggttacaagatcaagttcacaaggacataaacaagatggagacctcatcccgtttcttcgtttgtttcagggatctgtaacaaagtttattactgaccagcttgctgggctatcttgaacagcaagcttatggggtcctaagctcatgttctattttaaggtacctctcttcatggcagaa

SEQ ID NO: 936490 - DNA, 859 bp, Homo sapiens
tgacctggcgaggctcagaggctgtggggtctttggctcagactgaaaacctcactaacatcaagtcttttcacatctggggctgggcgcttatctggtgcccttggaggcgaggtctcggaggagagatgggtcaaggataatggagttcagagtgacgctccctggagcctgggccctgaaagtcaccttgcgtcacgaagagaatttctgctctgggagaggggagtcaggctgtcttccaagccccatcccctgcctcagtgggttgtctagaagagtcctgggtgtgggaacacacagacacacagacacacacacacacacacacacacacacccttyaaattttagccctgtttttatgagttctgtgactgggtggttatggagcccctcggaacctcggtctctttgttgggggagtaggtgaaagttgctgtgcctccttgccaggcaaagcttagaatgaacagccctgacaaccatggtgatgatgtcttgagaggcccagggtcagtgcgccagaaccccggggttggtgtggaagctgcgagttagatggagagagccttggctgtagacagacccaggttcaaatctcagccctgcaaggttcccgccgggtgaccttggccttgctgcctaacatcgctgagtctcaggcgccttgtcgatgacacagtggtagcagttacaggatgtccctcgtcagcttggtgtgatggggttgtgctccgtgtgtgctggcatatggtgggtactcagcaaactgtgtgtgtgcgaatgggaaagatggttctcttctttatgccccaagtggatgggagaactcttttccacgcccagggcactggaag

SEQ ID NO: 936491 - DNA, 568 bp, Homo sapiens
cagtaccaacattccagaagctctcttcgttctttcctagtgactatcctcccaaagataactattctgacctctatttccatcaatttgttttgcctgtttttgaaggactgtgcgatgacacagtaccacttttacatttggtttcttctgctcaatattaagttcrtgggattcattcctgttgttgcataaagcagtatttgttcattctcactgccgcagagcagtggtttttaaacctgggacaattttgccccccaggggacatttggcaatgtctgaagacacttctggttttcctaactggggggttgccactggcatctagtgtgggtagaggccaggaatgttgctgaatgtcctcagtgcacagaacaatcccccatgacaagaaattatctggtccaacatgtcaatagtgccaaagctgagaaagtctgctgtacagtacagttatatcctatgaatgcaacacactttatctatacattctactgtttgggcatgtaaatgtttctggtgtttgattattaataagtgttaaacatgtacatatattcttata

SEQ ID NO: 936492 - DNA, 745 bp, Homo sapiens
aggggagctgttcccgtgggtggaccctgccctcagcctcgggtccttgccctatctccgccgcaggggctcagcccagccctgggcttctgtgcagggctttgcatctgtgcccttgggggctcggcatgcagtcattgaacagcctacctttacagaggcgctgccgaggctgagggatgccaygtgttcaagagccatgctgggtgcagtggctcacacctgtaatcccagcactttgggaggccgaggcaggcggatcatgaggtcaggagttcgagaccagcctggccagtatggtgaaaccccgtctctactaaaaacacaaaaattagccgggcgtggtggcacgtgcctgtagtcccatttactcgggaggctgaggcagaagaatcgcttgaacccaggaggcggaggttgcagtgagctgagatcgcaccattgcattccagcctgggcgacaaagcaggactctgtctcaaaaacaaacaaacaaaaaaaaaaccacacagggaattagtggcccccgtgtgagatttgaacccggagtttgtgcttgtgaagacttttgaagggcctgtgagaagattgtgacattcctctccccatgtcctgagctgcagggctctggcctgggtgttctggaatctatccagcatcctctcggcggctcagtgagggggcctcatccttcccatttacagatgagaacatgagaggctcagagacggtcagtcactggtgc

SEQ ID NO: 936493 - DNA, 611 bp, Homo sapiens
tgagccagaaatttagacccttagttgagatctgacctttcacctcaacagaacctctgcttatttatctgatggttcctgacctcaaacaactgagtcttgagctcagcaaaatgacaaactgtctttctgtttactcctcagttccaaagtctaacattggtatttgtttttagaattgctttgctaagtattcttaatgagtccagaggtgttcagttaaaccaactttgggattaagaataaatgttctgaaacgtggactgtaagtaggctgaccgttgatcattgttggctggataaggaacttgatggttttttaaaatgcgcgtgatacaatagttctctytttaaaacccaagcacagctcatacataaattgagagtgttctctagaagacattaaaaatagtgcattttaggccgggagcggtggctcacgcctgtaatcccagcactttgggaggtgagcagattgcctgactttaggattttgagatcagcctgggcaacatggtgaaaccctgtctctacttaaaataaaaaattttttttaaaaaagcaaaaaatttagccaggcgtggtggcgggaatctgtaaccccagctact

SEQ ID NO: 936494 - DNA, 576 bp, Homo sapiens
ggggaatcttcatgctcactctttttttgtcgtttttctttttctttttcttttttttttctgagacggaatctcgctctgtcacccaggctggagtgcaatggcatgatctcagctcactgccacctctgcctcccgggttcaaaygattctcctgcctcagccacccaagtagctgggattacaggcacgcgccaccacacccaactaatttttttgtattttttagcagagacagcgtttgaccttgttagccaggatggtctcgatctcctgacctcgtgatcttcccgcctcagcctcccagagtgttgagattacaggcgtgagccaccgcacccggcccatgctcactcttagatactgctattactactaataatcctgctattacagaggtctcctgatctcattttagtaaatattacattcatttgagatagtggccaacattcctaacttcattcagaattaaagctttttcagtcccttggccagggcctgatgtagggacctaagggccagacagcatcttggctcctggggactcttatgcatcatatgccccttgtctac

SEQ ID NO: 936495 - DNA, 740 bp, Homo sapiens
agggagacccaacagaggacaacacaaatgccagagagagtgtgaggggcaataaaagctgatgctcgcctccctcccagacatcttcccagggaaaagtgtgctttcttgaacacctgggggccggggaaggggctgccctaccactttgaatcgggtttcccgaaaagtttggtgagagtttatttttatgtaaataacatataaaaagtcagacttctccacaggcagattttttgaggctcatattttacagactttggcaagggtcactcggaaggaacagtggttacagtctccagaggttcataattcctggaaaaacttctggccaaacctgacttctcctaaatttcacagaaaattctccctgggctgggctcaggctaaatgagctttttgtgtgttagtacagccttacctagtggaagcatgacttgcacgttgccctttacacaaaagggaacctcctcggccgctgtgaacaaaggctccgctctccgaaatgtttgatttgtttactcgggagcgtgagcctgstcaggcacatgtctgatactggggctatttctctgcggccatatgtagagctgtccaggtctctgcaatttaaccctgcgcttcatgccagaatcccatttcctaacttcctcaagcaacggggcaagggaaccacagcaaaaaggagtgtagggggagtgttccctccgtgtccggcaggggctaaagggcttgctgcc

SEQ ID NO: 936496 - DNA, 740 bp, Homo sapiens
agggagacccaacagaggacaacacaaatgccagagagagtgtgaggggcaataaaagctgatgctcgcctccctcccagacatcttcccagggaaaagtgtgctttcttgaacacctgggggccggggaaggggctgccctaccactttgaatcgggtttcccgaaaagtttggtgagagtttatttttatgtaaataacatataaaaagtcagacttctccacaggcagattttttgaggctcatattttacagactttggcaagggtcactcggaaggaacagtggttacagtctccagaggttcataattcctggaaaaacttctggccaaacctgacttctcctaaatttcacagaaaattctccctgggctgggctcaggctaaatgagctttttgtgtgttagtacagccttacctagtggaagcatgacttgcacgttgccctttacacaaaagggaacctcctcggccgctgtgaacaaaggctccgctctccgaaatgtttgatttgtttactcgggagcgtgagcctggtcrggcacatgtctgatactggggctatttctctgcggccatatgtagagctgtccaggtctctgcaatttaaccctgcgcttcatgccagaatcccatttcctaacttcctcaagcaacggggcaagggaaccacagcaaaaaggagtgtagggggagtgttccctccgtgtccggcaggggctaaagggcttgctgcc

SEQ ID NO: 936497 - DNA, 658 bp, Homo sapiens
tctcgttccgcaacactctgcaccctggtacatcgtcctccgtccactcaacgtggaatgattctcttccctctggatccagcccctctagttcccttttcactttgaggcatttgccccctgtgaatcagttccctgctactccagaaaatttctctcataccccaggcccctctgttcttttaaatggcacccttcacccccagcccttcatcttctgcactgtattttcacttgttgatttaaaaatccctttattatgggaaattgcaaacaacacaaaagtagagaaaatagtacgtatttttactgtttactcaattttcatcttgccattacccggacacggttgccgtcaaaccctggcccctcttgtttcatctaaaccctaaactgtccctctactcccactgcccaacccctacccctggactatttcgaagcaaatttcagacamcatcctgtttcctctgagcattttttagtttgtatctctaaataagaagcttttgtttcttaaaaataaaaccacaacaccattatcacaagttaaaaaattaatagcctttccttaatatcatccaccatctatgtagcattccaatattcttgattgactcataaatttcttttacagttggcttggtcaagtcagtgt

SEQ ID NO: 936498 - DNA, 675 bp, Homo sapiens
ccttattgtcacattgcagagtctcttttctgtctgcctcctcactgtttcctggtcttctggagttcagtaacctctgtctccatgtctcctcaaccccactcctggagtcatatcacagggggaactgtcatgtggaaatggcaaaccccaacgccttctgccctgccggctcccagcacatctgccagtgggtgtggagagcacttgtctctttgtttctgctctccccattccctgcccatctggtggctcctcttccttggtctgcagacacacttgagactctcccctgctggcatgcaagcaccctggggtgactcgggctgcccctcccagcctcgtctctcaagtgggtctccactgacccaactctacttcatatcaaatgcacttcgccccctgccttytgctcccctgcagaatcccacggcacggcattctccccgtgaccaatccaaggggcactctctgtcctcatcacactgcagagtctgcagccttgatcgctgcggcctctctggcccctccgcatccttggagctccctccttcctgactctgcccagcagtctccttgctgtccctctgcttcatgtccctgggcactgtgccctgtacccctttaactgttgcaatcacccgggtctccagccttggcctttggctcttccca

SEQ ID NO: 936499 - DNA, 587 bp, Homo sapiens
gagaaccactactgtcttccaagctgtcagacagggacgtttaagtctgcagaggtttctgctgccttttgtttggctatgccctgcccccagaggtggagtctgcggaggcaggcaggcctccttgagctgcattgggctccacccagttcgagcttcctggctgctttgtttacctactcaagcctcggcaatggcrggcgcccctcccccagcctcactgccgacttgcagttagatctcagactgctgttctagcaatgagcgaggctccgtgggcctaggaccctccgagccaggtgtgggatatactcttctggtgtgccgtttgctaagactgttggaaaagtgcggtattagggtgggagtgacccgattttccaggtgtcgtctgtcacccctttctttgactaggaaagggaattccctgaccacttgtgcttcccaggtgaggcgatgcctcaccctgcttcagctcgcgctcggtgcactgcacccactgtcctgcaccccctgtctgacactccccagtgagatgaacctggtacctcagttggaaatgcagaaatcacccgtcttctgcgtcg

SEQ ID NO: 936500 - DNA, 587 bp, Homo sapiens
gagaaccactactgtcttccaagctgtcagacagggacgtttaagtctgcagaggtttctgctgccttttgtttggctatgccctgcccccagaggtggagtctgcggaggcaggcaggcctccttgagctgcattgggctccacccagttcgagcttcctggctgctttgtttacctactcaagcctcggcaatggcaggcgcccctcccccagcctcactgccgacttgcagttagatctcagactgctgttctagcaatgagcgaggctccgtgggcctaggaccctccgagccaggtgtgggatatactcttctggtgtgccgtttgctaagactgttggaaaagtgyggtattagggtgggagtgacccgattttccaggtgtcgtctgtcacccctttctttgactaggaaagggaattccctgaccacttgtgcttcccaggtgaggcgatgcctcaccctgcttcagctcgcgctcggtgcactgcacccactgtcctgcaccccctgtctgacactccccagtgagatgaacctggtacctcagttggaaatgcagaaatcacccgtcttctgcgtcg

SEQ ID NO: 936501 - DNA, 643 bp, Homo sapiens
tcaaaagcataagataccacttcacaccacacattgctagtgtgaatgtaagtgtgaatgtaaaaccatgtggctgcttggaaaacagtttctcagatgtttaaaatgttaaacatagaattaccatatgacttctaggtatatataactgaaagaactgaaaacagatgtaaaaaacttgtacacagatgttcatagaggtactattcataacagtcaaaagatggaaacagtccaaatgtccatcaactgatgaatggataaataaaatgggtatcttctatgagacagaatattattcagccatgaaaaggaatgaagtactgatacatgctacaacatggctgagcyttgaagacattacgccaagtgaaagaagccagatacaaaaggccacgtattgcatagttccatttacatgagatatccagaatagccaaaatagagacagaaagcaggttagttaattaccagggagtggctgggcacagtggctcacacctgtaatcccagaactttgggaggccaaagcaggtggatcgcttgagcccagaagttcaagaccagcctgggccacgtggcgaaaccccgtccctattaaaatacaaaaattagctgggcatgttggtgcattcatgtagtc

SEQ ID NO: 936502 - DNA, 639 bp, Homo sapiens
gtgttacccccagaaaccacagtgatttttatattgttgcttcagatgctggtatgactgggcatggtggtgtggcctatagtcccagtgctttgggaggctgaggcaggaggattacttaagctcaggagtttgatgccagcctgagcaacagagcaagaccttgcctctttaaaaattaaaaaatgaggccgggtgcagtggctcacgcctgtaatcccagcactttgggaggctgaggtgggcagatcacgaggtcaggagattgagatcatcctggctaacacggtgaaaccccatctctagtaaaaatacaaaaagttagccgggcatggtggcgggcgcctgtagtcccagctactcgggaggctgaggcaggagaatggtgtgaacccgggaggcggagcttgcagygagccgagattgtgccactgcactccagcctgggcgacagagcgagactccatctcaaaaaaaaaaaaaaaaaaagagccaggcacggtggctcacgcctgtaatcccagcactttgggagatcgaggcaggtggatcacctgaggtcagaagttcgagaccagcctggccaacatggcgaaaccctgtccctactaaaaatacaaaaattagccaggcgtggtg

SEQ ID NO: 936503 - DNA, 584 bp, Homo sapiens
ggctcattgtcccggacctgcaggacaaggaggcgttttgtccacaaaccttgagagtgagtgaatggggcatgactggggccactgggtgttattgcttgaatgacacctaacctgtctctagtgaagctcttgattcctccctacccccatccagatgctagaagactggggagcatttcttggtccctcttctctcacaatctgtcgttggtgctcacttctgcaccctgttttcccacgtccctggtccccagcccaggcaagccttctgctgatgccggtggccccaacttgtctatccacttcaccccagttttctccaggcctttctccatgctgctgtcagagagatctaaacataggtggcctcctgcccttccctgaaaacmctttacggcctctgactgcattcagtgcaccctgcattcctcctgataaggtcttgcgtctccctgctgccccagcttcagccccaggagcctgcctgcccaggaggccatcattgttccccctggacactgcctgtcctgcctgctgccttgtcctcctttctccaggggcctggggcctcagtctctcca

SEQ ID NO: 936504 - DNA, 582 bp, Homo sapiens
ccatttgagctgtttctactttttttttcgctattgtgaatagtgctgctgtgaacgtttgtgaacaagtttttgcgtgaacagactggttctcttggtatatacatagagatggaattgttgggtcatacggtaattctgtgtttaacttttggaggaactgccagattgtttccacaagggctgcaccattttacattcctgtcaacaatatgtgaagattcccatttctccatatccttgctaacacttgtgattttctgtttttaaaattttagccatccaagtgactaagtggttatagtaggttttggttttggttttgagacagagtcttacttttgtgttgcccaggctgcagtgcagtagtgcaaacatggctcactgcagcctcacctcctgggctcaagtgattcccacctcagccccccaratagctgggactacaggtgtgcaccaccacacccagctattttttgtatttttttgtagagatggggttttttactgtgttgcccaggcatgtcttgaactactggcttcaagtgatctgcccacctcagcctttcaaagtgctgggat

SEQ ID NO: 936505 - DNA, 802 bp, Homo sapiens
atgagggtttcagtttttccacatcctaacacttgttattttccttttttaaaaaaattataggccaggcgcagtggctcacacctgtaatcccagcactttgggaggccgaggcaggcagatcacctgagctcaggagtttgagaccaccctgggcaacatggtgaaaccccatctctactaaaatacaaaaaattagccaggcgtggtggcaccagcctgtagtcccagctactagggagcctgaggcacgagaatcacttgagcctgagggatggaggttgcagtgagccaagatcatgccaccgcactccagcttgggctacagaatgagactttatctaaaaaaaaaaaaaaaggccaggtacgttggctcatgcctgtaattccaacattttgggaggccagggtgggaggatcacttgagcccaggagtttgagaacaacctgggcaatataatgacaccccgtctctacagacaataaaataactagctgggcatggttgtgtatgcctgtattcccaggtattcgggaggctgagttgggaggattgcctgagcccaggagttcaaggctgcagcaagtcacgttcacaccactgcactccatccagcctgggcaacagagtaaaaccctgtctcmcaaaaaaaaaaaaaaaaaaaaaaaattacagccatcccagtgggtgtgaagtgggaactcactgtggttttgatttgtattttcttttttaagtgaaagcaagtttattaagaaagcaaaggaataaagaatggctattccataggcagagcccatt

SEQ ID NO: 936506 - DNA, 549 bp, Homo sapiens
gagagcaatacacactgtgagaatatccacaattgaataaaataaaatactgactaacatgacaaaagatgtaccaccttttctaatgtacctgacattatctccactgtgtgtaaaagggagatctccactcttctagatgtacattatatgtccaattctccttaccttgtgcttctgtaacagtggtcacaaataatgcttccatctgttgtttatactttttttttttctttgagacagagttttgctgttgtcacccaggctggagtgcagtggtgtgatctaggctcattgcaaccctcgccttttgggttcaagtgattcttctgcctcagcctcctgagtagctgggattacaggtgcctaccaacacacccagctaatttttgtatttttagtasagacgagggtttcctcatgttggccaggctggtctcgaactcctgacctcaggtgatccacccgcatcagcctcccaaagtgctgggattacaggtgtgagcctcctcagctggcctgttatttatactctttttacaaacttct

SEQ ID NO: 936507 - DNA, 549 bp, Homo sapiens
gagagcaatacacactgtgagaatatccacaattgaataaaataaaatactgactaacatgacaaaagatgtaccaccttttctaatgtacctgacattatctccactgtgtgtaaaagggagatctccactcttctagatgtacattatatgtccaattctccttaccttgtgcttctgtaacagtggtcacaaataatgcttccatctgttgtttatactttttttttttctttgagacagagttttgctgttgtcacccaggctggagtgcagtggtgtgatctaggctcattgcaaccctcgccttttgggttcaagtgattcttctgcctcagcctcctgagtagctgggattacaggtgcctaccaacacacccagctaatttttgtatttttagtacagaygagggtttcctcatgttggccaggctggtctcgaactcctgacctcaggtgatccacccgcatcagcctcccaaagtgctgggattacaggtgtgagcctcctcagctggcctgttatttatactctttttacaaacttct

SEQ ID NO: 936508 - DNA, 607 bp, Homo sapiens
gtagccattaataaccctttgaattcctgtggtattagttatgtctcctttttcttctctgattttatttctttgggtcttctttttttttcttattcagtctggctaaaagtttatcaattttgttcatcttttcaaaagaactttttttctgtttcattgacctgttgtattgttttcttcatgtcaaattcatttatttctgctctgatccatatttttgctttttttctcctaattttgggtttggtttgctcttgcttttctaattctttaagataatcattaggttatttgtttgaagttcttcttcctttttgatgtagrcacttatagctatacatttccctcttaatactgttttcactatatcccataggttttggtatgttgtgtttccattatcacttgtttcaaggcacttttcagtttccttcttaatatcttcattggcccactgttcattcagaagcatactgtttaatttccatgtgttcatatactttccaaaattcctcctgttattgatttttagttttattccactgtggtcagagaagatgcctgatattatttcagtttttttaaagttttcagatttgtttgg

SEQ ID NO: 936509 - DNA, 599 bp, Homo sapiens
ggatttatttttcaaactgtttgagcatcatttgttgaaaagtctatcctctctataatgaattgcctttgccccgtgtcaaaaacaaactgacaatttgtggggtaggtgtgagttttcttaaactttctctatgtctcattgattactttatctgtctttacaccaatcatacagtattaactgctgtggctatatattatgtcttgaaatcaggtaatgyaagtcctccaattttgttcctatttttcaaagttgttttggctattctaggtcctttacattctcatacgaatcttagaattagtttgtcatttcctacaaaaacctaacctacttgaattttgattattttgcattaaatatacgcattgatctggggcaaactgacatcttcacaatattgagtcttctgatccacgaatatgatctatatttcagttcacttagttctctcattatttcctctcagaaatgttctatagttttcagtttatagatcttatgtaacatttaccagatttatctctaagtatcacttattttaatgctattttgatagtttaagaaaaacttcagtttccaattgttggttgctg

SEQ ID NO: 936510 - DNA, 819 bp, Homo sapiens
gaatgttctccaggcacctctttacacttgactgtctcaatctgctgtgtgtttttatcatgcgagggtgtgttgaattatgtcaaatacttttttctgcaccaattaagatgatcatgtgattttttcttttattttgttaatatgatgtattacactgatcaatttttgtatgttgaaacatccttgcattacagaaataaatccaaattgggtatggcatataatcctattagtaggctctcaaaattaatttaatccattatattagtcagggttctccagagaaacagaatctataggatatatagaaatatatataagaggaggcattatgggaattgccttatgtaattacagaagctgagaagtcccacaatctgccatctgcaagctggagacccaggaaagccagccatgtaattcagtctgagtctgaaggcctgacaaccggaggagccaatggtgcagctccacaataggaaaagggcctaataaggctgctggtttaagtcccagagtttaaaggtccaagaagcaggaggcccagtgttcagggcyggtaaacacagatgtccagctcagggacagaagagagaatttgcccttctcctacctctttgttccattcagcctttaatagattaaaaatgcccacccatattggtaaaggtggctgtctttaactcaatccactgattcatatgccaatttcttccagaaatactgccacaggcctcttttatgtaggcactaattccttttatgagggtagagcccccatgaataggtttccacatatgaatttgtggggacaca

SEQ ID NO: 936511 - DNA, 644 bp, Homo sapiens
ggtaatgtgatgcctccagatttgttctttctgcttagaattactttgactatgtgggctgggcaggtttttgtttgtttgtttgagatggagtctcactctgttgcccaggctggagtgcaatggcacaatctccactcaccacaacctccacctcccaggttcaagtaattctcttgcctcagcctcccaagtagctgggattacaggtgcccaccaccaggcccagctaatttttgtrttttagtagagatgggtttcaccgtgttggccaggctggtctcgaactcctgacctcaggtgatccacccaccttggcctcccaacgtgctggaattacaggcatgagccactgtacccagcttatatgggctgttttacggttgcatatgaattttaggattttttctagttctgtgaaaaatgttgatattttgatgggaattgcattgaatctgtagattgctttgggcagtatggtcattttcacaatattaattcttcccatccgtgagcatgggatgtgtttccatttgtttgtgtcacgtatgatttctttcagcagtgttttgtagctttcctcgtagcgatctttcacctccttggttaagtatactcctaggtttatttttttgttttctttt

SEQ ID NO: 936512 - DNA, 766 bp, Homo sapiens
cctccattgaagtctgagcccctcagagtcatccatgagggttagaattaacttccttcaacccattctcctggtaatgttggtattttcccgtcccaggaatcacacatggttttgtttttgttgtttttagagatatggtcttgctctgtcaccaaggctaaagtgcagtgtcacgatcacagctcactgcagtctcaacctcttggtctcaagcgaacctcccgtctcagcctgccaggtagctgggactscaggtgtatgccaccaagcctggctaatttttaaatttttttttttttttcctgagatggagactcactccatcgcccaggctggagtgcagtgacgtgatcgcggctcactgcaacctctgcctcccaggttcaagcgaattctcctgcctcagcctcccgagtagctgggaccgcaggcacctgccggctaatttttttgtatttttagtagagacaggtttcaccatgttagccaggatggtctcgatctcctgaccttgtgatccacccgcctcggcctcccaaagtgctaggattacaggcgtgaactaccgcgcccagccaatgttttaattttttgtagagctggggttttgccatgttgcccaggctggtcacaaactcctgagctcatgcagtccacctgccttggcctcccaaggtgctgggattacagacatgagccactacagccagggatttccttcaagaactttcctttgcattcacgtcttggctgttggtacaag

SEQ ID NO: 936513 - DNA, 766 bp, Homo sapiens
cctccattgaagtctgagcccctcagagtcatccatgagggttagaattaacttccttcaacccattctcctggtaatgttggtattttcccgtcccaggaatcacacatggttttgtttttgttgtttttagagatatggtcttgctctgtcaccaaggctaaagtgcagtgtcacgatcacagctcactgcagtctcaacctcttggtctcaagcgaacctcccgtctcagcctgccaggtagctgggactgcaggtgtatgccaccaagcctggctaatttttaaatttttttttttttttcctgagatggagactcactccatcgcccaggctggagtgcagtgacgtgatcgcggctcactgcaacctctgcctcccaggttcaagcgaattctcctgcctcagcctcccgagtagctgggaccgcaggcacctgccggctaatttttttgtatttttagtagagacaggtttcaccatgttagccaggatggtctcgatctcctgaccttgtgatccacccgcctcggcctcccaaagtgctaggattacaggcgtgaacyaccgcgcccagccaatgttttaattttttgtagagctggggttttgccatgttgcccaggctggtcacaaactcctgagctcatgcagtccacctgccttggcctcccaaggtgctgggattacagacatgagccactacagccagggatttccttcaagaactttcctttgcattcacgtcttggctgttggtacaag

SEQ ID NO: 936514 - DNA, 556 bp, Homo sapiens
gtggtcagtataaacaccgaagaagagattggtggagcgatagagaatccagaaatagatccacacatatgcgagcaaccaattctcaacaaagttacatgggcacttcatggagaaaggattgtcctttcaacagattgtgttggaacagttagacatccatgtgcaaaaaaatgaacttcaatccttcaragatctaaatataaaacttaaaacttctaaaagacaacacagaagaaagtctttgaattaggcaaagatttctttggtacaagcccaaaagcacaatccataaagaacacatgagtgaagtggacttcatcaaaagtaaaaacttatgctcttcaaaatacactagtaaaagaattagaagacgaggtgggtggatcacctgaggtcaggagtttgagaccagcctggcaaacatgctgaaaccttgtctctactaaaaataaaaaaaatgagccgggagtgggccaggcgtggtggctcatgcatgtaaccccaacactttgggaggccgaggcgggcagatcacgaggtcaagagatagaga

SEQ ID NO: 936515 - DNA, 668 bp, Homo sapiens
tgatagggaagatgcggccatcactgggatattttcaaatcccaaggacatcagagtgaagtgtcagttgtcagatgattttaaaagttatgtcttcagagaaaaaaagattcattttctcattttaaaccaattaaatattctgagtgagactaatcactcatttgcctacgaccttttagaaaagttgttttgttgaaatactgtacgtacgcttaatctaaatttgcattgactatgttttagtgtatttataaatggtgaactcagtttctgaaattaaacttcttatttgcaattttctagtgctggcagacactggctttttatttttaggataagaaaacaggcatattctttgtggtccattatctagagcccatacttgggcagcatttgaaatttcaccttaaccmcagacagggctccagggaagtggagatgtaattcttacaacaacagttctgatcatggccatggtgatgactttccaggtctcgtgttcaagtggtgccagaatgcaggagccggtgggcagccctgaggggttgccttggccgcagcctctgtgcacgctcttcctggtgtcctcttacccggtagctgtgcgcttgttcccgtgagaacagcctgcttccagagtgcccaggagtgctggtcagggacag

SEQ ID NO: 936516 - DNA, 723 bp, Homo sapiens
aatttctcaggtctgtctcagataataaaaagctctttgtatgagcctcagaactgtctcttcagtgaatgaaattaccagtcattatacgaagggactttaaaaaatttgtggaaatactgaagtaaaagatgataaaaaaataaaaactttatttcttggctgggcacagtggcttatgtttgtaatcccagtactttgggaggctgaggtgggaggactgcttgaggccaggagttcaagaaattagccaggtttggtagtgcatgcctgtagtcccagctacttgggaggcagagggaggaggattacttgagcccaggagtttgaggttgcagtgagctgtgatcacaccactgcactctagcctggacaacagagcaagatcctctctcttaaaaccaccaacaatgacaacaacaaaacaacatttttatttctcaatgtaagctccatcaagrtcaagatacttttgtaagctgtgacaccagccatttagtccacctctaaagaattgcaggctctgggaatttaaccatgtcagtgcagcctttttaacattattaacggaagaaaaaatgagtgcttttaaagattttttaaaatgaggaaacaaagtcagaaggagcaaaatcgggactgtaaggtggatgcctaatgatttcccaacaaaactcttgaagaattgcccttatttgatgagaagaatgagccaggagcatt

SEQ ID NO: 936517 - DNA, 723 bp, Homo sapiens
aatttctcaggtctgtctcagataataaaaagctctttgtatgagcctcagaactgtctcttcagtgaatgaaattaccagtcattatacgaagggactttaaaaaatttgtggaaatactgaagtaaaagatgataaaaaaataaaaactttatttcttggctgggcacagtggcttatgtttgtaatcccagtactttgggaggctgaggtgggaggactgcttgaggccaggagttcaagaaattagccaggtttggtagtgcatgcctgtagtcccagctacttgggaggcagagggaggaggattacttgagcccaggagtttgaggttgcagtgagctgtgatcacaccactgcactctagcctggacaacagagcaagatcctctctcttaaaaccaccaacaatgacaacaacaaaacaacatttttatttctcaatgtaagctccatcaagatcaagatacttttgtaagctgtgacaccagccatttagtccacctctaaagaattgcrggctctgggaatttaaccatgtcagtgcagcctttttaacattattaacggaagaaaaaatgagtgcttttaaagattttttaaaatgaggaaacaaagtcagaaggagcaaaatcgggactgtaaggtggatgcctaatgatttcccaacaaaactcttgaagaattgcccttatttgatgagaagaatgagccaggagcatt

SEQ ID NO: 936518 - DNA, 606 bp, Homo sapiens
acatagaatacagtgataaatacaagcacactatgcgttactaaatggggtttattctggaaatgcaatgtttgtttaacattctaaaatcagttagtataattcatcactgtagggccccccggttccccgctctttctttctgtgtcctgaccaaaagtcatggagtgcattgaccactctgtgacccagccaggtgcaggttttccccagcagacttgaacccaaaccaggcccttgaacattcctgggcactgataaaggtatttaggttattgcccaaaacgatgaaagaaactggccgtggccctgagtcarattccttaagccctcatgaaaaccccatgccttgtccccctcgctgaggacatacttaggtagaacacctcttttctctcactgcctgtctctaggagtgctgcagccctccgcagttaagttccccattgctgcagccctctacaggtaagttcccctaatcaatgctttgggctgatcacccaggcattctgcgcttctttctttggaaccccaactggtctcatccccaactggggctcagtttggagatgcctttgtgggaactcccctaagttgggatgtctt

SEQ ID NO: 936519 - DNA, 606 bp, Homo sapiens
acatagaatacagtgataaatacaagcacactatgcgttactaaatggggtttattctggaaatgcaatgtttgtttaacattctaaaatcagttagtataattcatcactgtagggccccccggttccccgctctttctttctgtgtcctgaccaaaagtcatggagtgcattgaccactctgtgacccagccaggtgcaggttttccccagcagacttgaacccaaaccaggcccttgaacattcctgggcactgataaaggtatttaggttattgcccaaaacgatgaaagaaactggccgtggccctgagtcaaattccttaagccctcatgaaaaccccatgccttgtccccctcgctgaggacatacttaggtagaacacctcttttctctcactgcctgtctytaggagtgctgcagccctccgcagttaagttccccattgctgcagccctctacaggtaagttcccctaatcaatgctttgggctgatcacccaggcattctgcgcttctttctttggaaccccaactggtctcatccccaactggggctcagtttggagatgcctttgtgggaactcccctaagttgggatgtctt

SEQ ID NO: 936520 - DNA, 715 bp, Homo sapiens
tgacaatggcatgatctcggctcactacaaccttcatctcttgggttcaagtgattcttctgcctcagcctcctgagtagctgggattacaggtgcccgccaccatgcctggctaatgtttgtatttttattagagacagggttttgccatgttggccaggctagtcttgaactcctgacctcaggtgatctgcccacattggccttccaaagtgctgagattacaggcatgagccatcacacccccctctcccttttgaccttgagacagaactgaccagcattgacattaaaatcaagattctaagactgacaatacagactctttgtagtagtaagataccaactccaacctgactctggtaagtaccacatgacagataacaggtcctaaaggaaataaaagtattttatcccaaratatatttctgtgacatattttgaaatggccctgcaaagctgtctcttgtggggaaaatctacattctttagagaatctgcttccctttccatgttttctcctaatccaggagagatttaaatcagagtctgatacttttaagttctgataagagatatctactatctattctctctgaagcctgccacccagagccttcatctacataacaagaactttggcttccacaacccctcttatcttaaccctcaaatttctttctgctgactccaacactttagggaagcttaactt

SEQ ID NO: 936521 - DNA, 638 bp, Homo sapiens
tgtctcatcagcaaatgaacaccctggtagggtttgcatccggcaacctctgagcaggcctcactctccctatgggttggtccctcactgtgtcgtacctgtgtattcacccaagattcagtgagaacttgggcccagtactctgcgttcctgaccttcaagggccttctgttacttcagataaygggaagctgccgtttctgtgaaaactccttatcacttaagagagcatttttctgttttcctagaagagtcttcaaaacccagtttccatctcccactcacttctctttctctaagagactttgacacacaggagctttgaagaagaaagctgcctgtttctcagggatggaatttcttaatctgagctccatgtacatcttctgtgagatattcttacacattttttatcactgcagtgatgttaagtattcagtctagtgaaccctctgatttttattaacttttcttctttttattttgaagtaggtgtcagattgggcatggagtaggaggggggtgcttttcctgggacaagatgaagttaactttgggcagactcctgcattgataagctcacagctaaaaaattggctcccaatcccctgccgtctccaatcattgcaatgcaaatt

SEQ ID NO: 936522 - DNA, 659 bp, Homo sapiens
tttctcaacgcgttttctttacagaatcactgtctcagtatgctgaggggctgagctccttaagggaagtggccacatcatcaagggagaaagaggttcttaatgactgtccactacagcctcagttttcaggcagagcccaatttgctgtcttgggtaacactcatagaagccctgagatgcaggtactgtcagtccattgcaggggaggaattgaggttaaaaagtgtccaagatcatgtggccattcagggccaggtctgtgccttcagtttcatgaagcatttggaggggctggaatgacccatctgtacwtctgcctagttcatgcctgatactttatgtgaataaggcaatggaaggtgctggggttttcagaggatgaaaaaatatatagaatgctgtattagtctgttctcacatggctataaagatactacctgaggctgggtaatttattaaggaaagaggtttaattgattcacagttccacatggctgcggtggactcaggaaacttacaatcatggtggaaggtgaaggggaagcaaggcactttcttcacatgatggcaggacagagaagagtgagtgaaggaggaacttgccaaacacttataaaaccatcagatctcatgagaactcactcactatcaggaga

SEQ ID NO: 936523 - DNA, 787 bp, Homo sapiens
caaaagacttctctgtgatatgccacactatttgataacattttatttatttatttatttatttatttatttatttttaggaggagtctcgctctgttgcccaggctggggagcagtggcgtgatctcagctcactgcaacctctgcctcccgggttcaagcgattctcttgcctcagcctcctgagtagctgggattacaggkgcataccaccatgcccagctaatttttgtatttttagtagagacagggtttcaccatattggtcaggctggtcttgaacttctgacctcaggtgatccgcccaccttggcctcccaaagtgctgggattacaggcatgagccaccgtgcctggccgtgatagcattttacccacagtagaacttttttcaaaattagagtcaattctctcaaaccatgccactgctttattaactaagtttgcagaatattctaagttctttgttgaagtttcaacaatgttcacagcatcttcaccaggagtagattccatctcaagaaaccactttctttactcatccataagaagcaactccccatccattgaagtttttaacataagattgcagcaagtcagtcacatcttcaggctccacttctaattctagttgtcttgctatttctaccaaatctgcagtgactccctccactgaagtcttgaatccctcaaagtcattcatgagagctggaatccacttctcgcaaactcctgttaatgttgttattctgacatcctcctatgaatcatgaatgcccttaatgtc

SEQ ID NO: 936524 - DNA, 787 bp, Homo sapiens
caaaagacttctctgtgatatgccacactatttgataacattttatttatttatttatttatttatttatttatttttaggaggagtctcgctctgttgcccaggctggggagcagtggcgtgatctcagctcactgcaacctctgcctcccgggttcaagcgattctcttgcctcagcctcctgagtagctgggattacaggggcataccaccatgcccagctaatttttgtrtttttagtagagacagggtttcaccatattggtcaggctggtcttgaacttctgacctcaggtgatccgcccaccttggcctcccaaagtgctgggattacaggcatgagccaccgtgcctggccgtgatagcattttacccacagtagaacttttttcaaaattagagtcaattctctcaaaccatgccactgctttattaactaagtttgcagaatattctaagttctttgttgaagtttcaacaatgttcacagcatcttcaccaggagtagattccatctcaagaaaccactttctttactcatccataagaagcaactccccatccattgaagtttttaacataagattgcagcaagtcagtcacatcttcaggctccacttctaattctagttgtcttgctatttctaccaaatctgcagtgactccctccactgaagtcttgaatccctcaaagtcattcatgagagctggaatccacttctcgcaaactcctgttaatgttgttattctgacatcctcctatgaatcatgaatgcccttaatgtc

SEQ ID NO: 936525 - DNA, 787 bp, Homo sapiens
caaaagacttctctgtgatatgccacactatttgataacattttatttatttatttatttatttatttatttatttttaggaggagtctcgctctgttgcccaggctggggagcagtggcgtgatctcagctcactgcaacctctgcctcccgggttcaagcgattctcttgcctcagcctcctgagtagctgggattacaggggcataccaccatgcccagctaatttttgtatttttagtagagacagggtttcaccatattggtcaggctggtcttgaacttctgacctcaggtgatccgcccaccttggcctcccaaagtgctgggattacaggcatgagccaccgtgcctggcygtgatagcattttacccacagtagaacttttttcaaaattagagtcaattctctcaaaccatgccactgctttattaactaagtttgcagaatattctaagttctttgttgaagtttcaacaatgttcacagcatcttcaccaggagtagattccatctcaagaaaccactttctttactcatccataagaagcaactccccatccattgaagtttttaacataagattgcagcaagtcagtcacatcttcaggctccacttctaattctagttgtcttgctatttctaccaaatctgcagtgactccctccactgaagtcttgaatccctcaaagtcattcatgagagctggaatccacttctcgcaaactcctgttaatgttgttattctgacatcctcctatgaatcatgaatgcccttaatgtc

SEQ ID NO: 936526 - DNA, 746 bp, Homo sapiens
ttcctttcacaaaagacttctctgtgatatgccacactatttgataacattttatttatttatttatttatttatttatttatttttaggaggagtctcgctctgttgcccaggctggggagcagtggcgtgatctcagctcactgcaacctctgcctcccgggttcaagcgattctcttgcctcagcctcctgagtagctgggattacaggggcataccaccatgcccagctaatttttgtatttttagtagagacagggtttcaccatattggtcaggctggtcttgaacttctgacctcaggtgatccgcccaccttggcctcccaaagtgctgggattacaggcatgagccaccgtgcctggccgtgatagcmttttacccacagtagaacttttttcaaaattagagtcaattctctcaaaccatgccactgctttattaactaagtttgcagaatattctaagttctttgttgaagtttcaacaatgttcacagcatcttcaccaggagtagattccatctcaagaaaccactttctttactcatccataagaagcaactccccatccattgaagtttttaacataagattgcagcaagtcagtcacatcttcaggctccacttctaattctagttgtcttgctatttctaccaaatctgcagtgactccctccactgaagtcttgaatccctcaaagtcattcatgagagctggaatccacttctcgcaaactcctgtt

SEQ ID NO: 936527 - DNA, 642 bp, Homo sapiens
agcaagtcagtcacatcttcaggctccacttctaattctagttgtcttgctatttctaccaaatctgcagtgactccctccactgaagtcttgaatccctcaaagtcattcatgagagctggaatccacttctcgcaaactcctgttaatgttgttattctgacatcctcctatgaatcatgaatgcccttaatgtcatctagattggtgaatctttttgagaaggctttcaatttttttttgcccagatccatcagaggaatctattgcctaacaaaatgtatttcttaaataataagccttgaaagtcgaaatgacttgatccatgggctgcagaatggatgttgtgttagtaggcatgaaaacaacattaatcctcttgtayacctccattagagctctttgctgtctagctgccctgtcaatcagcagtaatacttgaaaggaattttttttttctgagaagtaggactcaatagtgggcttaaaatattcagtaagccatgctgtaaacagatgtgctatcatccagcctttggtgatccatttaaagagcacagagtagatttggcataatccctaagggccctaggatttccagaatggtaaatgagcactggcttcaacttaaagtcaccagct

SEQ ID NO: 936528 - DNA, 575 bp, Homo sapiens
ctgggattttacaagcgcctgccaccacgcctggctaatttttctatttttagtagagacggggtttcgccatgttggccaggctggtcttgaactcctgacctcaggtaatccggcctcccaaagtgcagggattaaagttgtaagccaccgcgcctggtctatttttactttaaaaatctcaatttggttttcctttttcttttttttttttttttgagatggagtctcgctctgtcgcccaggctggaggcagtggcacgatctcggctcactgcaagctccgcctcccgggttcacaccgttctcctgcctcagcctcccaagtagctgggactacaggagcctgccaccacacccagctaattttttctatttttagtagagatggggtttcaccatgttaaccaggatggtctcgatttcctgacctygtgatctgcccacctcggcttctctaagtgctgggattacaggcgtgagccaccacgcctggcctcaatttggtttttctacacatcttctatttcgttgttgaaactttctatcatttactccaagggtatttgtagttg

SEQ ID NO: 936529 - DNA, 623 bp, Homo sapiens
acttgaactgcagtggatggattgctgaaggttcagcgtggagaagcctgagagttaaaaacttcagggggagccattcagaaaagagtcccacacactcctttgaatttacctcccagagctctaccaggtcctcacaatgaaggctgaagaaaaatcccctgtgcttctggcagggggaagggaaagtctccattctgaaatacccgagcattctgttctcaacaaggccagccctcaggagaaactattttaccagagcctaacctgctaggcttttctgaaagacagggtcacccaggctaaagtgcagcctgactgctgtcctctgagaggagaaatctgagcttcccactctgcacctccaycatctgtctttgcagctcattccctccttcaccgatgccagagtggcccctccaaccccactggggcttgtaatccatttccttggcgctttgccctctgccccccttggcaacccccttgggttccacagtgcattattataattaacctctggcttacaccctcaactcacatgctcctttctttctgttgtacttgaggtacaatgctggccccagtgaaaataccactaatggctcactcttcacttgcac

SEQ ID NO: 936530 - DNA, 629 bp, Homo sapiens
caaaaacaggtcgtctatgtactggagaagcgtgcagttagggtgactggctcagaacggtataagatcttgttggagggcttccccaaaaagggtgggggaattttttaaaccctggggtaaccaagtccaggttaattgagtggtgtctcctgagccagggtccatccattcagaagcaaatataggttggcttttaggggccagaggaatagcaaagaaagcatcctttaagtcaagaacagtgtatgctgtatgttctggtggaagcaggccgagtaaaatataagggttaggracagttggatggacagtgactgtccacttgttaacttcctgcaagtcctgtacaggccggtaatcatttgttccaggtttctggaccagcaaaaatggagtattccaggcagactgaatatggggattgattccctctctagcccactgactcataggatattgttttacctggactggcagggcagtggccaggagttctacaactactggcagatggtgctttgccagtcctgggggggtttgacttggcccagacttgaggaaagagagtctgtaaatccagtaggagaggattagttttattctccagcggttgtgagggtgaaact

SEQ ID NO: 936531 - DNA, 709 bp, Homo sapiens
taccctgccgtgtgaggtgtcagtgtgcccctggttgggggtgcctcccagttaggctgcctgggggtcaggggtcagggacccacttgaggaggcagtctgcccgttctcagatctccagttgcgtgctgggagaaccactgctctcttcaaagctgtcagggacatttaagtctgcagaggttactgctgtctttttgtttgtgtgtgccctgcccccagaggtggagcctacagaggcaggcaggcctccttgagctgtggtgggctccacccactttgagcttcccgaacttcccggcttctttgtttacctaatcaagcctgggcaatggcgggcgcccctcccccagcctcgctgccrtcttgcagtttgatctcagactgctgtgctagcaatcagcgagactccgtgggcgtaggaccctccgagccaggtgcaggatataatctcatggtgtgccattttttaagcctgttggaaaagcgcagtattcgggtgggagtgacccgattttccaggtgctgtccgtcacccctttctttgacttggaaagcaaactccctgaccccttgcgcttcccaaatgaggcaatgccttgccctgcttcggctcgcacccactgacctgcgcccactgtctggcactccctagtgagatgaacccggtacctcagatggaaatgcagaaatcacccgtcttctgcgt

SEQ ID NO: 936532 - DNA, 545 bp, Homo sapiens
ttgtcttggattgttacttggctccatttgagtcatgctaatctctctagcaagtggttgctccacagcctgcttgggcttggattctttctgtaccacaggaccaggctgtaaactttccagactttatgctttgattcccttttaaatatcagttccaactttaagtcatttctttgctcctatatttgatcaaaggctrttaggagcagtcaggccacatcttgaatgctttgctgcttagaaatttcttctgccagataccctaggtcatcagtcttaagttcagtcttccacagatccgtaggacatgcagccaagctctgtgccaggacaaaacatgggtgacctatactccggtttccaatacattcctcattttcttctgagacctcatcagcttagccttcactgtccatgtcactatcagcattttggtcacgaccatttaatccgtctcttagaagtttcaaacattccctcagcttagtgtcttcttctgagccctccaaattcttccaacctctgcttgttactcagttcca

SEQ ID NO: 936533 - DNA, 544 bp, Homo sapiens
acactctcaaagagtgatctaatccccttttagtggttcattttagatgtcagcttgactggactatgggggtcctcagatatttgggtggacattattctgggtgtgagggcgtttctggatgagactgacatttgaatcaatagactaagtaaagcatctaatatgggtgagcctcatccagtcagttgaaggcctgaatagaacaaaatgctgaacaagagagaattcactgtttctgcctgaaggtcttaagctgagtcattggtcttctcctgccctcaggcttggactagaacmtacatcattgactctcctgattctcaagccttcatacttggactagaatttacactgccagctctcctcttgcaagcttttggactcacactgaaattcccaccctggttctcaggccttcagactgctgatcctgggacttctcagccttcaaaattgcataaggcaactccttataataaatctgtctgtctaaatctacctatctacctgtccatccatccgtccatctatcctattggtt

SEQ ID NO: 936534 - DNA, 568 bp, Homo sapiens
attaaagcattatatgatttacattcctatagtcttatggttatatgaataggaaagtaatattagaagtagtttcagtggggttttcagttaaacaaatgagaaaaccacatatctgcttatatcctaactgctttccataccagagaatatcaagcatttgttgacttagctaatggataaaactttaaaaccaagaaaccaaatatgttgttgaggtattaattgtttttataaagttaagtctttacagggattactatgmaagtggtaagattactctagttctatatttatttaaacatttgacaaagtgctggacacagtggctcatgtctgtaataccagcaatttgggaggccaaggtgggagtatcacttgatcacaggagtttaacaccagcctgggcaacaggtgagaccctgtctctacaaaaagaattttaaaaaaatagcccagcatgaacctgtagtcccagttacttgaaaggctaggatcatgccactgcacttcagtctgagtgacagagaaagaccctatctcaaaacaaacaaacaaacaaacaaaa

SEQ ID NO: 936535 - DNA, 604 bp, Homo sapiens
tttatattaatagaacatctctattttgactttcatgacatttcctcaggtgattcctgaggattcagttcagaataatcgtgtagttttctgcattctcagaaaactacaaaagtgatattttcttctctggatatcacatctaaaggcacaaaaagtctatctgccccagcttggttatgytaattttgatcacccagccaaggtgttgtccaacttttccaatgaaaaattactactttttcccttgcagctaacaagtaatctgtgggaagacactttaagaccatgtaaatatcttgtccctcatcaaaatttccccctagatttagtatccattagtgatgtctgcctgataaaaactttatactgtgatggctgcaacatgctgacttttccaactccagcaatccctccatattaccattcattactcagcattatacattgtttaccaatatatctatttatgatcacctgagatacatgaagtcctattttttcagtgacttataatttatccttgtacttaagtattttggtgctccagctgtctcagacttagccagtgggaagcccttcaagctggctcctttatccctgt

SEQ ID NO: 936536 - DNA, 601 bp, Homo sapiens
cataaaaagaactaaaaacaaaaccaacatgattatctcaatagacgcagaaaagggttttgataaaattcaacatccattcatgttaaaaactgtcaataaactaggtattgaaggaacatacctcagaataataagagccatctacaacaaacccacagccaacattgtactgaatgggcaaaagctggaagcattcttcttgaaaactgccacaaggcaaagatgccctgtctcaccactcctattcaacatagtattggaagttctggccatggcaatcaggcaagagaaagaaataatgmgaagagagtcagtcaaactatccttgtttgcagatgacatgatcctatatctagaaaaccccatcgtctcagcccaaaagcttaagctgataaacaacttcagcaaagtctcaaaatacaaaatcaatgtgcaaaaatcactagcattcctacacaccaacaatagtcaaaccaagagccaaatcaggaacaaactctcattcacaatagccacaaaaagaataaaatacctaggaatacaggtaaccggggaggtgaaagacctctacaaagagaactacaaaccactgctcaaa

SEQ ID NO: 936537 - DNA, 885 bp, Homo sapiens
gaaagcccattgagtgggctttcatcaaaagtgtccttttggaaagctcagaatggaaatataaaaagggatgaacttcaatttggggcaatatgacaaactaagaagcctcctcagtactaaatacctaaaaatgcagcatcctatgaaaacagattttttttttttttttgagacggagtctcgctctgtcgcccaggctggactgcagtggcgcgatctcggctcactgcaagctccgcctcccgggttcacgccattctcctgcctcagcctccctaatagctgggactacaggcacccaccaccacgcctggctaatttttgrtatttttagtagagatggggtttcaccgtgttagccaggatggtctcgatctgctgaccttgtgatccgcccgcctcggcctcccaaagtgctgggattacaggcgtgagccactgcgcccggccaataacttttaattacatagcatagatcgcaagaaagtgaaaggacttctaagagacccgacatgatgggaaagcataaactcagagtggtaatgtaggactgaaaccaaagcctgtcccaagtatgtctgcctgtccctggcaacaaagcctgcagttttatgagaaaactgcacatgtggtagacagggaataaatcatgggacccacacaggtggaaaattagattgaggtgcctgctttaaactaaaacttcaaaactaaaatctgaatgaaagatgaactttaaaaaattacactgcagaaaagtcctctaagaaatcttgcctgtgtggtcttgtctctgatggaggggataaaataactctaattcccagttataagctactcctcttattagtgtgaggccagcattcatccagctgaagaagc

SEQ ID NO: 936538 - DNA, 580 bp, Homo sapiens
tcacaagaacagcacaggaaagacctgcccccataattcaatcacctcccactgggttcctcccacaatgtgtgggaactgtgggagttacaattcaagatgagatttgggtggggacacagccaaaccatatcaaccttcatggtccatttggatctaaccaggtgtattagctttctcttattctctctctctatatatatatattgtctgtgatctctggagagasagagagagtgagatttattataaagaattggctcacacagtcacagaggctgaggagtctcatgatctgccatctataactggagccccaggaaaactgctgggagaagttctaatctgagtccaaagacctaagagtcagagagccaatggtgtgattttcagtccaagagccaggaaagaatgatgtctgagctgtagcagagagcagattgtctgtctcccgctcctccttttgttctatcaaggcctctaacagactggctggggcccagcacatgggatggcaacctgcattacttgttctacctgttagggtctgagtgtttgtgatccctttgaaaaagattca

SEQ ID NO: 936539 - DNA, 580 bp, Homo sapiens
tcacaagaacagcacaggaaagacctgcccccataattcaatcacctcccactgggttcctcccacaatgtgtgggaactgtgggagttacaattcaagatgagatttgggtggggacacagccaaaccatatcaaccttcatggtccatttggatctaaccaggtgtattagctttctcttattctctctctctatatatatatattgtctgtgatctctggagagacagagagagtgagatttattataaagaattggctcacacagtcacagaggctgaggagtctcatgrtctgccatctataactggagccccaggaaaactgctgggagaagttctaatctgagtccaaagacctaagagtcagagagccaatggtgtgattttcagtccaagagccaggaaagaatgatgtctgagctgtagcagagagcagattgtctgtctcccgctcctccttttgttctatcaaggcctctaacagactggctggggcccagcacatgggatggcaacctgcattacttgttctacctgttagggtctgagtgtttgtgatccctttgaaaaagattca

SEQ ID NO: 936540 - DNA, 644 bp, Homo sapiens
agattgatttcaatgcacagttgacccttgaacaacacgggtttgaactgtgtggatccacttatatgtagatatttttcaataaatatattgaaagatttttttggagatctatgacaaaaatacagaacaacatatcctagaaatataaaaaatttaagtatgccataagtgcataaaatatatgtagatactagtcgattttatcatttactaccataaaatatacaaaaatctatgataagttaaaatttatcaaaacttatatacacacttatagactggagagaaatgtaaacaaacagatgccgtgttaaattgtaactgcgtaaagttaaccatagtacatacggcagtactgtaataattttgcagcaaccttcttttgctgttacggtgagctcaagtgttacaagtatccacttaaaatgctgtgtttaaaaygctctgtgatgctaattgtctctgagctattcgtctctccagtaaattgtgtatcacagtaaaaagtgatctctcgtggttcttgcatagttttcattgtgtttagtgcaatacctaagtcctccgtaacaccatagcacctatacagagttacactaggatgctggaagtgctcccaagaagcagagaaaagtcatgac

SEQ ID NO: 936541 - DNA, 564 bp, Homo sapiens
atgtttttcattttcttggttccaggcaatgatcattttattgcaaaaatatttttaagaaaaatgaggggccgggcgcggtggctcaacacctgtaatcccagcactttgggaggccgacgtgggcggatcacgaggtcaggagatcaagaccatcctggctaacatggtgaaaccccgtctccactaaaaatacacaaaattagccgggcgtggtggcgggcacctgtagtcccagctactcgggaggctgaggcaggagaatggtgtgaacccgggaggcggagtttgcagtgagccaagatcgcgccacggcactctagcctgggcgacagagcgagactccgtctcaaaaaaaaaaaawttaaaaaaaaaagattaatgaacagtccatctttttcctttcccaaaaggtatctagaagactaaaatcctgtttttttttctaagccctacagattgttggtttttccttgtacacttgttgtttttactatattattctaattactttcatttcttagggtaaaatctaagcttcatagcataccgaggccctcctgc

SEQ ID NO: 936542 - DNA, 757 bp, Homo sapiens
atctgcagggggtcttttcaccatggatgctgcaaccccctggtctgagcccccatcctctcttgcttggataactgcaacagcttcctgcagagcctcctgtttctccccttgatcctctatagtctgtgctcaacacaatggctatacaataatttaaaatatatgtgccattttatgcttctccttagttcaacccctgtgtgacttcccatctgcctcagagtgaaagccaaagtcttaacaatggcccacagtgccctccacaatctgccctgcccttctgtccctcacctccctggctcagctcatcgcactcatcccctagactgctctactctgctgcactgacctccttgccattcctcaatcctgccagccctgctccctctgcctggaaggctctttctacagttatttccatgcctccctccctcataccttttggatctttgctcgaatgtcgtaagccatcctctcatggagaccttttcacaccctttaaaattgctaccaccwccctagcgccctctccccaaccccattcctcttccattctcattaccgtatgacttaactctctatttgcttgttttattgtccttcctccactgggatgtaagctccatgaaggcagggattttagtctgtttcgttcacctaatagaatcttgtcggctcatagtagggtcaataaatattagtttaataaacaaatgactgatgaggactttttccagcaatttatttacctatt

SEQ ID NO: 936543 - DNA, 757 bp, Homo sapiens
atctgcagggggtcttttcaccatggatgctgcaaccccctggtctgagcccccatcctctcttgcttggataactgcaacagcttcctgcagagcctcctgtttctccccttgatcctctatagtctgtgctcaacacaatggctatacaataatttaaaatatatgtgccattttatgcttctccttagttcaacccctgtgtgacttcccatctgcctcagagtgaaagccaaagtcttaacaatggcccacagtgccctccacaatctgccctgcccttctgtccctcacctccctggctcagctcatcgcactcatcccctagactgctctactctgctgcactgacctccttgccattcctcaatcctgccagccctgctccctctgcctggaaggctctttctacagttatttccatgcctccctccctcataccttttggatctttgctcgaatgtcgtaagccatcctctcatggagaccttttcacaccctttaaaattgctaccacctmcctagcgccctctccccaaccccattcctcttccattctcattaccgtatgacttaactctctatttgcttgttttattgtccttcctccactgggatgtaagctccatgaaggcagggattttagtctgtttcgttcacctaatagaatcttgtcggctcatagtagggtcaataaatattagtttaataaacaaatgactgatgaggactttttccagcaatttatttacctatt

SEQ ID NO: 936544 - DNA, 604 bp, Homo sapiens
ccaaccctaatgtaaactctgaactctgggttataatcatgtgtctgtggccgggcgtggtggctcatgcctgtaatcccagcactttgggaggccaaggcgagtggatcacctgaggtcaggagtttgagaccagcctggccaacacagtgaaaccccatctctactaaaaatacaaaaattagctgggtgtggtggtgggcacctgtaatctcaactactcgggaggctgaggcaggagaatcccttgaaccctgaagggcacagaggttgcagtgagccgaggctgtgccactgcactccagcctggtgacagagcaagactctgtctcaaaaaacaaacaaacaaaaaaacaaacaaaatgatgtgtctgtgtaggtttatcaratttaacaactgtaccaggctggtggggacattgatagtgggggagtttatacatatagggggagagagtatataggaattttttgtgctttcctctcaattttgctgtgaacctaaaactgctctaaaaaataaagtctactagagaaaaaaaacaaacctccagtgacttcttattacacgttggataaaattcaaatttcttcccatgtcctt

SEQ ID NO: 936545 - DNA, 604 bp, Homo sapiens
ccaaccctaatgtaaactctgaactctgggttataatcatgtgtctgtggccgggcgtggtggctcatgcctgtaatcccagcactttgggaggccaaggcgagtggatcacctgaggtcaggagtttgagaccagcctggccaacacagtgaaaccccatctctactaaaaatacaaaaattagctgggtgtggtggtgggcacctgtaatctcaactactcgggaggctgaggcaggagaatcccttgaaccctgaagggcacagaggttgcagtgagccgaggctgtgccactgcactccagcctggtgacagagcaagactctgtctcaaaaaacaaacaaacaaaaaaacaaacaaaatgatgtgtctgtgtaggtttatcaaatttaacaactgtaccaggctggtggggacattgatagtgggggagtttatacatrtagggggagagagtatataggaattttttgtgctttcctctcaattttgctgtgaacctaaaactgctctaaaaaataaagtctactagagaaaaaaaacaaacctccagtgacttcttattacacgttggataaaattcaaatttcttcccatgtcctt

SEQ ID NO: 936546 - DNA, 626 bp, Homo sapiens
ttaataatcactttataactttattatttccagactttgctaaaaaatcttttattttcttcataaatctaatacattgtatctatttattaagcacttcaagcccagatataacaagcaaaatatccccaaggactagaaccactcttgtaaatctaatcaattatatgtataaatatagtaaatttcaaattatcttaagcattacaatactattgttagccaatgaaataaaattctcctacatatttcaactacaaatcaaaattcaataatttatttctcatttcatttgtaatcacatgtcctcataccctaaaaccaaattcctttaaatatcatgaacactttaaaacaccatttatagatttgttcctacattaaacccaaaattatttctgtaaaatrttttctttattatctcaatttctaatttgtaaactttcccaagattagaaagacactgttacccacttcttcttacacaacctttaccattgtaataataagtaacccccaaaactcagtgtttacaacaacaaaagtttatttttcactacaattacttggctccatattggctagggctctgctctaccttctctttgttccagaatttagaaaga

SEQ ID NO: 936547 - DNA, 494 bp, Homo sapiens
ggggtggttgcttggtgtaacaatgcctttacagggcgagctgcctttctgtggccacttatttaaggtttggagcaccaggtttagcctggaactttagccctgcaaagaagggggtgtgacatgcaagtgtaacttattttttaagagccctttatgtttttaaattatacccacagtttgcgggttgtacggcacatggaattcccactttatgtttatttgttgtgcccagtgttgtacctgttgtttagtaaaatgtgttttcctgttacttttaacagccagggggaaccatacagggcacataagtgttgaagggctggratggtgtgctgttggtcagccaccctacaagggtaggtgaacaacaggcctgtgaccgtgtttaccgctgttagcgcatgcttatacctttgagacgttggcagtagcccgatgtagtttgcttgccacctggttaagggcacttgctgtattgttacttgtgtaac

SEQ ID NO: 936548 - DNA, 734 bp, Homo sapiens
aggaattgtgtgttccttgcctgattctctcccaacttgttttctgcattgtatcattggaaataagcctaggaattacttaagtcatgcatataaaaatgaaaactagagaaagaaaacatgaggtagtaaggtggtaaattactaagcactggggtcggcaaatgtttgaatttttgcttctgcttttcaaggttttgtgctgttgggtgcattccaaactaggcttcaagcctagtcatctcagtaggtatttttttccttttccttttttttcagactgtgttatcaatcatgctttcctaaaggttcacagactatttgcaaagcaaaggggagcctcagtgtcccaaggcaggattaccatttgcwgcaggaattaggaatgaaaccaggaaggattcagtcttgcattgctctctgtgtttgaaagggaaaaaaaaaaaaaggctgagagtgctctgaggacttaaaaacaaccagcatgacttgaccatttgaaaaagaaatcctggagcagcattccagaaacacgaagacaagctcagcactgtgcaaccgaaggaggtcactcctctgggagtatttcatggaattaagagaaatgacttttaagaagtagctgtctgaatgagaacaattgcagactttctttttttctaggactgagctccatgctcactagtcttaaaacgcaaaagttaaacataaaatgaaacaggaaaaactaaata

SEQ ID NO: 936549 - DNA, 565 bp, Homo sapiens
ccacatgcaccacttgtgggcctgtgtactgtcccagccagccggtcacagacaccaataccagtccaaacctcttgggagccaaaaggttatcccaccattgctattgccattgcccacaccacacctgccatccaggggccttggaacctgcccacctgcgtgtcctacccctgacactgctggtactcaagcaagttgcttggaggcccaagaatcagcccacttggaccactaacactggtgctracatacacaaccctggagcccaaagacagatatagtcagccctattgctgccaccactggagccccagggactggcccacctgacatccctgtccctaacataacttcaccacagcctccactaacaattacaccctaagctactgaggaaaccacagatcccactgatgctgctgacagccaaagaaattgcatgaaacacactactgtaagcacccagaattaaagcctaagttccctactcagccaaatccatagatacattataaggaaaaagttatcccctacaaaaacaaatttaaactattggaagaaa

SEQ ID NO: 936550 - DNA, 685 bp, Homo sapiens
ccagttgttccacatgcttgtcaacccttagcatggtctatattttccattttagtcattcacttcatttagtcattttagtcattccagcttcagtcatttgagccatgtccagtgtgttcacattgtggttctaatttgcatttccctgtggtatactgaggttgacaatcttttcatgtgcttattggccatttgggtgtcctcttttgtgatgtaccagtttgaatctcttggccatcttcctaatgggttgtctgtccttattggtttgtgggtattttaatatattctggcaagtcatttgtcatataaatgcactgcgatatccactcccactttgtagcttgcctttttattctcataatgcttttcaataaacagaaattcttaattttagtgtagtacagtttgtacagtttttccttaacacttactgttgtttgtgtcctgttaagaaaactttgtctatctcraaatcatgaggatatcaaactctacaattaatttgttgtgtactgttctctttctctctgcatgtgtatacatacacatacacaccctctctctgtgtacatatatatgtatacataaaatatgggggcaaaaattttacataaagtcaggctgacatgggttcaaattctggctcttcacaataaccctataaggcaaatactattcc

SEQ ID NO: 936551 - DNA, 575 bp, Homo sapiens
ggagaaccactgctctcttcgaagctgtcagacagggacatttaattctgcagaggttactgctgcctttttgtttgtctgtgccctgcccccagaggtggagcctacagaggcaggcaggtctccttgagctgtggtgggctccacccagtttgagcttcctggctgctttgtttacctaagcaagcctgggcaatggcgggcacccctctcccagcctcgctgccgccttgcagtttgatctcagactgctgtgctagcaatcagcgagactccgtgggcgtagcaccctccgagccaggtgcgggatataatctcgtggtgcactgttttttaaacccgttggaaaagcgcagtattcgggtgggagtgacccgatttcccaggtgccgtccgtcacccctttctttgcctcagaaagggaactccctgacsccttgcgcttcccaagtgaggcaatgcctcgccctgcttcggctgccgcacggtgcacgcacccactgacctgcgcccactgtctggcactccttagtgagatgaacccggtacctcagatggaaatgcagaaatcaccc

SEQ ID NO: 936552 - DNA, 616 bp, Homo sapiens
acagtgggagtcaagaattaaagactagcatctgtatatataatacttttaaaacatagtattaaagtataatatacatacagaaaagtgcacatatcacaagggaagaactggatgtattttcaaaatctgcacacactgtgtaaccagcactcgcatcaagaarcagaacactgccagcacccccagagctgcacttgctcccttccaggcactccctctcacccctacaaaagttaacgcaggcctgacactatgacaatagcatcgcttggtttttcctacttttgaacttcatgcaaaagatgtcatacagtatgaactcttttgtgtctacctccttttgttcagcatcatgtttgtgagatccaaccatgttgttatgcgtagcaatagtttgctcattttcactgcagtacagtattccaccatgtgaacattccataatgtatttgttcattatcttgctgttgggctttttgttagtttccagtttgtggttactagaattgtgctgctatgatcactttcctatagatcttctgataaacatatgtacgtatttctgatagtcatactcttacgtgttgcaaatgctgggttatagagtgtgtgt

SEQ ID NO: 936553 - DNA, 616 bp, Homo sapiens
acagtgggagtcaagaattaaagactagcatctgtatatataatacttttaaaacatagtattaaagtataatatacatacagaaaagtgcacatatcacaagggaagaactggatgtattttcaaaatctgcacacactgtgtaaccagcactcgcatcaagaagcagaacactgccagcacccccagagctgcacttgctcccttccaggcactccctctcacccctacaaaagttaacgcaggcctgacactatgacaatagcatygcttggtttttcctacttttgaacttcatgcaaaagatgtcatacagtatgaactcttttgtgtctacctccttttgttcagcatcatgtttgtgagatccaaccatgttgttatgcgtagcaatagtttgctcattttcactgcagtacagtattccaccatgtgaacattccataatgtatttgttcattatcttgctgttgggctttttgttagtttccagtttgtggttactagaattgtgctgctatgatcactttcctatagatcttctgataaacatatgtacgtatttctgatagtcatactcttacgtgttgcaaatgctgggttatagagtgtgtgt

SEQ ID NO: 936554 - DNA, 465 bp, Homo sapiens
tgacaagcacatcattctccttaaggagacattaaggtaaataattaaccaaatgaatgtgagtgaacagggggattagaaggcttagctgaatgatggttaaggaattcttaaactttctcactagggtgatggctttcaggactctcagtctacctaacttagtgcattcttkactgatcttggtttttcagaaagtctttaagaacatttaagcaattatcagatttcttcacaaagaaagtctaacacatgaaccagaagacatataggtatgttcaagaatgtttacagagaagtagtcacaacagcaataattgggaaactacccaaatattcatcaacaggattctggaaacctgataaggtgacatgccaagtttgttatgagacaatgttgctcatgcttatggtaaaaatgacacccctgactccctgcctcaataagttgcatctggacaggca

SEQ ID NO: 936555 - DNA, 565 bp, Homo sapiens
cacttgtcattctgtgtgcctggtatccttctcctgagaataactgagctgctgctaacatgaagatggtttagggcaaaaattttaaaaaggcactccctttgggtagacaaattgcaaaattcgtgcccactccatgtgatgaattacagacagtttgcaccttccccttcctgctyatgcaaggaagtgttgcgcccttcctctttccctttgtgtctgcttggaattgggtctgattggaattgggtttcgtcacttgcaaccaaagaatcctgactgacatagatggtacttggcgccatgaattaatgtgttgcctctcataactaatttcctggaggtaatccattcacttgaatgaagattggagcactgtgaccagcagtgcaactttatggctttggctgttagggatctccatgccccctaggtccagtttaggctgctccctgttagacctgtagcaggtgctcttcttgcccaccatgtcccctcactctgacctctccatcgggcggggccctactcatggccccttggaagtaggggcccttatttcctc

SEQ ID NO: 936556 - DNA, 602 bp, Homo sapiens
aactcctacactcaagcaatcctcctgccttggctcccccaaattttgggattacaggcgtgagccaccatgcgcagccttttagtgttgacacccttgttgaaaattagttcagtgtagacatactgatttaattctgggttctctattctttcccattggtctatctgtctgtttttatgccagtactatgctgttttggttacagtataatttgaagccaggtaatgtgatttctccagttttattctttagctttggctattcyggatctttcatggttctatataaattttaggattattttttatatttctgtgaagaatgtaattggtattttgatagggattgcactgaatctgtagattgctttgggtagtatggacatttaaacagtattaattcttccaatccatgaacatggagtatctttccctttttttggtatgtcctcttcaacttcttacatcaatgttttgtagttttcattatagagatctttcacttctttggttaaattaatttttaggtttttattttacttgtagctattgtaaatgagattattttcttgatttcttttgcagattgtttgctgttgg

SEQ ID NO: 936557 - DNA, 792 bp, Homo sapiens
tatatgtgctcacagcaattgtgtattacattgtgattcacgtttgaaaattttttgttttttgaggtgcagtctcgctctgttgcccaggctggagtgcagtggcatgatcttggctcactgcaagctccgcctcccgggttcacgccattctcctgcctcagtctcccaagtagctgggactacaggtgcccaccaccacgcccggctaatttttttgtatttttagtagagacggggtttcaccatgttagccaggatggtctcgatctcttgacctcataatcctcctgcctcggcctcccaaagtgttgggattacaggcgtgagccaccgcgcccagcccacatttaaaatattttttaaaaaagaaagggtttctgagtagatcatccaatagtgatctatcacattcacacttcttctccatagttyactcttaattaaagtttaaaaagtggcattgattgaacagcaatctcccttttttgttatactgatccgactctaaaaatcacttactccaagtttagaaagatgctctgatatagaaagcctcacagtatacatttaagaaaaaaaattccattgcaactagtaacactgatgcatgctgtcaaaatttctcgctacattttattcaacttggctttctttatatagtatgttagcatctaggaaagccatagctcagtgctgggtgtatgacatgtgcctggccactcgtgtttatgttgtgtagataagaagagtctaaatgtggggtccaaaccaatggctacttgtaagaat

SEQ ID NO: 936558 - DNA, 559 bp, Homo sapiens
tctcaggtatgtctttatcagcagcatgaaaatggactaatatagtaaattggtaacagtagagtggggcactgctgaaaagttacctgaaaatgtggaagcaactttggaactgggtaataggcagaggttggtaccgtttggagagctcagaagcagacaggaaaatgtgggaaagtttggaacttcctagagagatgttgaatggctttgacaaaaatgctgatagtgatatgaacaataaggtccaggccgagatggtctcagatggagatgaagaactggttgggaattggagcaaaggtgactcttgttatgttttagcaaagagactggcagcattttgtccctgccctagagatttgtggaactttgaactcgagagagatgacttagcgtatctgayggaagaaatttctaaacagcaaaggattcaaaaggtgacttgggtgctgttaaaggcattcagttttagaagggaagcagagcataaacgtttggaaaatttgcagcctgacaatgcgatagaaaagaaaatcccatttttctgaggagaaat

SEQ ID NO: 936559 - DNA, 565 bp, Homo sapiens
cctaggtgtcacctcctctccctgacctgcagtggcttcctgttgggtctctcagctcccccacctgacctcccatcatctgttctccacatagcatccagccaccctcctaaacctaagtcatgccactcctttgcccaaaacctccatggcctcccatcagacrgagagaaacaggtggaccccactcgtcccagtgactcggccctgcctgcccctcactctgttcaccacggcactctgttgtccctccactcaacccctttggcctccttgccacacctcgtgtgtgtcaaggtccttctggcctcagaacctctgtacttgctgttctttctgcctgaaacacccttccccgcagatccgcaggtttccccatcttacaccattcaggcttctctctactcattgctgtcttctcaggggactgcgcggaaccttccacactagtcactccctctccgaaacttgctgcatgcttcttcctcacactcatggcccaacttgattacatcagatattggattgtttcttgtcctgcctgctgcctgtttcatatgtaagc

SEQ ID NO: 936560 - DNA, 708 bp, Homo sapiens
atataaattatgtttcctgcttttaaaatatttagcagcacatgggccgggcacggtggctcacgcctgtaatcccagcactttgggaggccgaggcgggcagatcacgaggtcatcaggagatcgagaccatcctggccaacatggtgaaaccccatgtctactaaaaatacaaaaattagctgggcgtggtggcgcatgcctgtaatcccagctacttgggaggctgaggcaggagaatcgcttgaaccagggagtcagaggttgcagtgagccaagatcatgccactgcactccagcctggtgacagagcgagactcygtttcaaaaaaaaaaaaaaattggcggcacattattggaatttctgccctggctccatagtcttctcatgtagacgtctgcagaaaggctgcacgtccactcccctaacccttcactgccctactgtgagttgctgggccctcagcttgccctagtgtggatgtctccatgttcaggatggatttttttttttgtattttaataattgagattttattggttgaagatcagtacagacgtttcaatttgtacacaattcttaacatacgtaatgaaattctaaaaagccatgtagtgtaattcttttttaaagttattccagtgactttccagcttaaaatcgggaagcaaattttccttaagaggctatcaagtaccagtattttc

SEQ ID NO: 936561 - DNA, 708 bp, Homo sapiens
atataaattatgtttcctgcttttaaaatatttagcagcacatgggccgggcacggtggctcacgcctgtaatcccagcactttgggaggccgaggcgggcagatcacgaggtcatcaggagatcgagaccatcctggccaacatggtgaaaccccatgtctactaaaaatacaaaaattagctgggcgtggtggcgcatgcctgtaatcccagctacttgggaggctgaggcaggagaatcgcttgaaccagggagtcagaggttgcagtgagccaagatcatgccactgcactccagcctggtgacagagcgagactccgtttcaaaaaaaaaaaaaaattggcggcacattattggaatttctgccctggctccatagtcttctcatgtagacgtctgcagaaaggctgcacgtccactcccctaacccttcactgccctactgtgagttgctgggccctcagcttgccctagtgtggatgtctccatgttcaggatggatttttttttttgtattttaataattgagattttattggttraagatcagtacagacgtttcaatttgtacacaattcttaacatacgtaatgaaattctaaaaagccatgtagtgtaattcttttttaaagttattccagtgactttccagcttaaaatcgggaagcaaattttccttaagaggctatcaagtaccagtattttc

SEQ ID NO: 936562 - DNA, 772 bp, Homo sapiens
tgcaccctgcaagccaccctccccacatgtccccaggccaagctacatctgtcccccagaaagggtactttgtctaattctcatagagcacccttaggctagcagtggctctggccacctaaaagctactgattcagccttggagccccgaaatgactgcaattttccaaactgcatacccacttgcaatgtattctccctccatgaccccctgggctgccgtctccccacgatgctgtctgcctttcaccctccccttctagacctgtcatgtgcccatgacactcctgttacttttcacttaaggacaaaaagctgcgtcatggcaaatttcttacattttcttctgtgtgtttctctggcttatgaaatttttccctaagttgtggggacagggtcaagaaggatgaataacaaaaataacctaaaagaagagtattttatgacatggaaagctggtcagaatataatgtaagattgggggttttcctaaagcagcttattatataaaacaggctttagttatctgtcaggggacacttgagtacagaaaccgggaaaaaatgttyaatttcaaatacatatactttaggattccctcaaatatttacacgaaaaaaccaaaaggattaaaatcattttttttaaagttgatactgggtagtaagattttcagtaatttccatgttctgtattttgcttatttgtatctttgaaatatactacccaaaaaaacccacaaaactattacttcaataataatattttttaa

SEQ ID NO: 936563 - DNA, 821 bp, Homo sapiens
agaaggatgaataacaaaaataacctaaaagaagagtattttatgacatggaaagctggtcagaatataatgtaagattgggggttttcctaaagcagcttattatataaaacaggctttagttatctgtcaggggacacttgagtacagaaaccgggaaaaaatgtttaatttcaaatacatayactttaggattccctcaaatatttacacgaaaaaaccaaaaggattaaaatcattttttttaaagttgatactgggtagtaagattttcagtaatttccatgttctgtattttgcttatttgtatctttgaaatatactacccaaaaaaacccacaaaactattacttcaataataatattttttaactacttaagattccatggaagtagaaatcaacttgactgcgattcaattatgccctgtttggttcagggtgtcaaaagcattgtgttcatagggatgattttttgtgagagggaggtctggagtagatgctcaggggtctggaagggcaagcctgacccagaatggtctgggcagagggggctgccccacatggccgagtttgggattgagcctgggtggtaactggaagggggaagtgacttctggagcagtgtatgtaggtagaagcaaacacgcccatccgcacccccataaagctgaatttgaccacaactaggagcagctcagaggtggaggcagtccagtctgggggcccaggctcacccccagtgctcaccgagaccatcctgccctcagagggcatgaaggcaggccggttgctgagccgcagcttggtctgcagcgtgtt

SEQ ID NO: 936564 - DNA, 478 bp, Homo sapiens
aagatgtcagttcttcccaacttgatctatagattcaaggcaatcttattcaaaatcccaacaagttatttcatagatatcaataaattggttctaaagtgtatagggagagataaaagacccagaatagccaacaaaatattgaaggagaagaacaaaggtaaacgactcatactacctgactctaagacataatataaagctacagtaatcaagacagtgtagtactgacaaaagaataggcaaatagatcaatggaacagactagagagccagagaatagacctacaccaatagagtcagttgacctttgwcaagggatgaaagacaacacagtggagaaaggagtttctttaataagtgttattggaaaaagtgagcattcacatgcaaaacaaatgaatctagtcacagactttatacccttcacaaaaattaactcaaaatgaatcatagacctaaatgtgaaacataagat

SEQ ID NO: 936565 - DNA, 610 bp, Homo sapiens
cgatttggctgttgacacttgtgtatgcttcacaaagttcttgtgctgggtttttcagctccatccggtcatttatgttcttctctagactggttattctagttagcattcctctaatcttttttcaaggttcttagcttcctatcattgggttagaacatgctcctttagcttggaggagtttgttattacccaccttctgaagcctatttctgtcaattcatcaaactcattctccatccagttttgttcccttgctggtaaggagttgtgatccttgggaggagaagaggcattctggtttttggaattttcagcctttttgtgctggtttttcctcatctttgtggawttatctacctttggtctttgatgttggtgaccttcacatggagtttttgtgtgggcgtcctttttgttggtgttaatgctattcctttttgtttgttagttttccttctaacagtcaggcctctctgctgcaggtctgctggagtttgctggaggtccactccagaccctgtttgcctgggtatcaccagcagaggctgcagaacagcaaagactacagcctgttccttcctctggaagcttcgtcccagaggggcac

SEQ ID NO: 936566 - DNA, 559 bp, Homo sapiens
ctgggttggccaggctggttttgaactcctggtctcaactgatccgcctgtcttggcctcccaaagtgctgagatcacaggcatgagctaccgcacctggcctgtggttgttaactgtagtcccaggaaatgaatacacacacaaaaccagttaatacctaagacaattccagctagtggcaagtgctttggaaaaacaaaacaaaacaaaacaaaacaaaacaggtgagaagggcgtgggatagagagggactgggaacggtgccacattagccagggtggtcagggaagscctcttggaggaggaggcatttcagtggagaggagaagcccagcatgtgaggaccaggcagaggtgctggtgagggggcacttggtgggcgtgaaagctactggatgcagctctgacgatggaggatacctgactgggattttggaggaagtctccaggaatgaaccgggaaggggctatcctctctttgcctctgcaggtctcagaacctgctgcatggctgctgcaggctgtccctcggcctaggccggctggcagccgatgaag

SEQ ID NO: 936567 - DNA, 667 bp, Homo sapiens
caggcatgcgccactacgcccggctgatttttgtattttttagtagagacggggtttcaccatgttggccaggatgatctcgatctcttgacctcatggtctgcgcaccttggcctcccaaagtgctgggattacaggtgtgagccactgcgctcggcccatctcaaacttttaataaggctcttcgtatagaaatttttaaaaaattaaaaacatttttggccaggcttagtggtttaagcctgtaatcccagtgctttgggaggccaaggcaagcagattacatgaggccaggagtttgagactagcctggccaacatggcgaaaccacgtctctactaaaaatacaaaaatttgggcaggtgcagtggctgacacctgtaaycccaacactttgggaggctgaggtggatagatctctcgagttcaggaatttgagaccagcctgggtaacatgaggaaaccccatctctgcagaaaatacaaaagttagctgggcgtggtggtgcatgcctgtggtcccagctactcgagaggctgaggtcaggctgaggtgggaggatccctggagcctgggaagcggaggttgcagtgggggatgaaaaagaataccccgtgtccaaatagcaaaacactctgaaatgaggcaaaccgtggtttgttgaac

SEQ ID NO: 936568 - DNA, 648 bp, Homo sapiens
tggcgaacagtatgcaggttcttcaaaaaagtagaaatagaaccaccatgtgatccagcaattctacatctgggtatgcacccaggagaagggaaagcaggggctggaagacttatttgtacatacacgttcacagcagcactattcctaacagacaacaatagccagaaggtggaagcaacccaagtgtctgtcgatggatgagtggatacacaaaatgtggtctaaccacacgatggaatattagccttagaaggcaattctacacttgctacaacatgaatgagccttgaagacgtcacattaagtaaartaagtcagtcacaaaagggtaaatactatatggtgctacttatatgaggtacctagaggagtcaaattcacagacacagaaagtggaatggtggttgccaggagcttgcggggagggatgaatgagaagttagtgttgaacgggtccagagctttagttctgcaggatgaaaggagttctggagatggatggtagtgatggttacacagcattgagaatgtactgaaatgccaccaaatttatactgtaaaatggttaaaatggtaaatgtttgtatattttaccataataaaaacttttaaaattcagtatatggaaccagcccaaatgcccac

SEQ ID NO: 936569 - DNA, 609 bp, Homo sapiens
ccctctgccggcttccccctctccagtcaccctgctctccctctgctggcctccatctctccagtcaccctgcccccctctgccagcctccccctcctcaatcaccctgcgtccctctgcagacctcctcctatccaatcacrctgcccccctctaccagcctccccctcctcaatcaacgtgcgtccctctgcaggcctcctcctctgcaatcaccctgcgcccctctgctgacctcctcctctttcacagactctctggttgggtgtctttatttttgttattaatttagacagcagctctttctggccttcaccagccatcaccagtgacagcacatcaccaaagccccgggtacagtccatcttcattgcgacctttgtgctttggtttgcatcaggccatttggttagaaagctgctcttcctcaggcccacctgtccaagttctaccaatttctgaaggtctgggttaaatgccatctcaccgacctttaccgcatcccctctgctctatgctatggtcactgttgctgccatggccacagcaggaagcagactgtgggtgctgactgccacaaaaggacaacagtcacacagctccggcaac

SEQ ID NO: 936570 - DNA, 557 bp, Homo sapiens
aagactccaaaaatataataaaatatgttatatatacatacatacatatatatatatatatatatacattttcctataatccagctttctactcttaaatatgcacccaagaggagcaaaagcatagcccctaaagggtcagggtgtctttatccacawagtcaaggtgaatggactgcaaactgtccagaagcccatcagcaggtgaacggatacactagtgcacccacacaatgcaatatgacttagtaaccagaaagaaggaactgctgacatgatgaatcttaaaaaaaacaaaatgagataaagcagccgggcacaaagacgtgcacatggcatgattccatttacatgagataaagcagccgggcacaaagacgtgcacatggcatgattccatttacatgagataaagcagccgggcacaaagacgtgcacatggcatgattccatttacatgaaactctattagcatcgtgcctgtccctggtgagaaaacagcccagggcccaggagaaggtgctgggctgctgcgatccgggtgatgtttacacagg

SEQ ID NO: 936571 - DNA, 676 bp, Homo sapiens
ttgcttcggctccatttcctggagtttatttttcactctactttaattttcagtttttgaaaaatgagatagctagacaggatttagacccaggagtttggagcctttcccagcctcttgcttgttggtctcggatggcagtgttgagtgatctgagggccttagggtcttcccttgggctgacccggtcccgggttgctgggtggaacgtgctgtctcaccacctgcttggatccccctgggcctgtccrtcttgggggtcagtggggccatggtgggcagcagcagagggcgggagggagggcgggcagcttgtactctagtgccactgcggtcactgcctgtggtggggtctgggaaggtgccatccctcacctgtctggcttcctttgtttccttgggatgagggtccctgtgggaccttcctcccagggcactggtgagacccaggagggccaggcaggtggcggggttgggcacgctcttgagatggcaggtgagagccctcgcagcgccctggttcctgctgtgtccccactgttgccttctgtcctcagcacctctgcaggctttctcctttccctcatggtaactcacgggcttgccctccgcactcaggcctggctgacccgagggcaccgtcctacacagaccctctgggtcatgtcacctgggc

SEQ ID NO: 936572 - DNA, 647 bp, Homo sapiens
tacaagaaggaaaaaacattaatccaaaaacagcaagaaattaggggctaaaatgtgataaaaatggaaagcactaaaatagataatacaaataaatctaaaaaaattactattaataaaaattaaataaattctcaagttaaaaaacacaaaccattattttgtttagaaatacagaattttcctatattctatttgctgtggactcaactgaaagacaagcaaccatgcaattgaaagtgaaagcctagagaaagagatgccagcaaacattaacatctgaaatgccggtgttgttctagtaatacagactttacctggacaaaatcaagaaaaaataggaaatctgaattwttctataactatcaaaggaattggatcatttttcaaacatttttacagagaaaacataaagcctaagaagctttatatgtaggcctaccaaccattcaaggaacaaaaaattccaataatacacaaaaactttaaaaataggaaaagagtgaagatggtctgattatttatttatttatttattgagacagagtctcactctgtcgcccaggctggagtgcagtggcgtgatcttggctcactgcaagctccacttcccgggttcacaccattctccttcctcagccttccga

SEQ ID NO: 936573 - DNA, 716 bp, Homo sapiens
aacaaaagccactgtagccacaaactggtaagaagacttaaacagtattttttttaatgtaataaaattaaaataacaaaatttatcattttgaccacttaaagtatacagctcagcggcacgaagtacattcacactgccatgcaactttcaccaccaagtatctccagaatgttttcatctccccaagttgaaacactgtaccccttaaacaatagcttcccaattgccccttgctcagcccctggccgccactaccctactttctgtccctttgagttgacctctctatgtgtctcacataagtggaatcatataatatttgttcttttgtaagtggcttctttatttaccataatggcttcaagcttcatccatgttgtagcatatgtccaaatttctttcctttttaaggctcaataatattccattgtatttctaagccacattttgtttatttgttcatctstcaataaaaatttgtgttgctttcacttttgagtactgtgaataatgctgccatacccattggtgtacaaatatctgtttgagtctttgctttcaactcttttgggtatattctcagaagcagaattgccacatgatatagttttcccatgttaaatttctttagcaatggccatactgccttccacagtggctagactattttacattcccaccagcaatgcataaaggttccaatttcttcacat

SEQ ID NO: 936574 - DNA, 716 bp, Homo sapiens
aacaaaagccactgtagccacaaactggtaagaagacttaaacagtattttttttaatgtaataaaattaaaataacaaaatttatcattttgaccacttaaagtatacagctcagcggcacgaagtacattcacactgccatgcaactttcaccaccaagtatctccagaatgttttcatctccccaagttgaaacactgtaccccttaaacaatagcttcccaattgccccttgctcagcccctggccgccactaccctactttctgtccctttgagttgacctctctatgtgtctcacataagtggaatcatataatatttgttcttttgtaagtggcttctttatttaccataatggcttcaagcttcatccatgttgtagcatatgtccaaatttctttcctttttaaggctcaataatattccattgtatttctaagccacattttgtttatttgttcatctctcaataaaaatttgtgttgctttcacttttgagtactgtgaataatgctgccatacccattgstgtacaaatatctgtttgagtctttgctttcaactcttttgggtatattctcagaagcagaattgccacatgatatagttttcccatgttaaatttctttagcaatggccatactgccttccacagtggctagactattttacattcccaccagcaatgcataaaggttccaatttcttcacat

SEQ ID NO: 936575 - DNA, 768 bp, Homo sapiens
tggaaaacagtatggggatttctcaaagaaccaaaaatagaactaccattcaacccagaaatcccactactggatatctgcccaaaggaaaataaagcattatattaaaaaaggcacctgcatttgtatatttattgcaactctatacacaatagcaaagtcatcaaactaagtgtccaccaatgatggactagaagaaaatgtgatgcatataccatgggatactatgcatccataaaaaagaatgaaatcatggcctttgtgcaacatggttggagctggaggccattatcctaagggaactaactcagaagcagatcaaatatcgcatgttctcacctgtaagaggcagtgaaacaatggatacacgtggacatgaacatggagataatagacactgggaactccaaaagsggggagggtgggagaggagtgagtgttgaaaaatttcctgttgggtacagtgttcaacatttgggtgatgggttcactagaggcccagtcctcctcatttcacgagcaattcccatgtaacaaacaagcacacgtacccccggaattgaaaataaaacattgaaagaaagaaattatctgacctactctgtttgactgtaggtggtaagactgtaattccagagagggtcctgccacatacccagaaggaaggaatgctgctcagagaggccaagaagaatccggacagacaggccctgctgagtccccactcagcctatcagcattagatcacatcctttttgtccaaactta

SEQ ID NO: 936576 - DNA, 583 bp, Homo sapiens
ctcacaccatgggcagatggactcaaactaagccaggcttttggctttctgccacttgcctcttctctctgaagtgaatcctgtcctgatcatcacctccttgctgacagggccattaagcgcagttcacacaaacaaaccacgatgccttgaggttgagactgggaggtatgttaagggagcatggagccagccattctgcagatggggaaactgaggcaaagaaaaaggaagtgacttgcccaggctcaggcagtgagcccaggacagaccaagactgaaatctgacaatcagcccagggtttatacacacacacacacacacacacacacacacacmccccacaatttgagttacgctcaaattcagacatcgtgggttgaacaacaaagctttttttttttttttttttttttttttttgccagagtcttgctctgttgcccaggctggagtgcagtggtgcgatctcagcttactgcaacctccacctcttgggttcaagtgattcgcctgcctcagcctcccgagtagctgggattaaaagcacctgccatcactcctggctaatttttgtattttt

SEQ ID NO: 936577 - DNA, 585 bp, Homo sapiens
gtgtggtgctgaaaaaaatgtatattctgttgatttggggtggagagttctgtagatatctattaggtccgcttggtgcagagctgagttcaattcctgggtatccttgttgactttctgtctcgttgatctgtctaatgttgacagtggggtgttaaagtctcccattattattgcgtgggagtctaagtctctttgtaggtcactcaggacttgctttatgaatcttggtgctcctgtattgggtgcatatatatttaggatagttagctcttcttgttgaattccrggaagctggaactgggtggagcccaccacagctcaaggaggcctgcctgcctctgtaggctccgcctctgggggcagggcacagacaaacaaaaagacagcagtaacctctgcagacttaaatgtccctgtctgacagctttgaagagaacagtggttctcccagcacgtagctggagatctgagaacgggcagactgcctcctcaagtgggtccctgacccctgacccccgagcagcctaactgggaggcaccccccagcaggggcatactgacacctcacacggcagggtactc

SEQ ID NO: 936578 - DNA, 568 bp, Homo sapiens
tgtaggtatgtgtgaggcaacaacaaaagatccaacatttttattacgtgtaccagaaaaaaagtaaaatgaggctgaaagaatacttgaagaaatagtgcttcaaaaaaacctcaaatttgcagaagacacaaatgtatagattcaagaagcctaagataccctacacggaataaacacatttcaagaaatattttgattaaacttttaaaaactaaagacaaaatatttttatttggtagtttagaaacataaatctaccactttaaaattataaaggtcagaaatcttaaatggttttcattaggctaaaatcaaggtgycagcagcaccgctttccttctggggactctaaaggagaatacatgttcttgccttttccagcttctaggggctgtcttcatttcttgtctcttgtccgctttccccattccttgtctcggttctttcctccagtacaattagcaatgtagtatatttaaatattttctaccacactcttccacatttaaaggatccttgtgattaaattggccccccccagataatcaagtatgatctcttattt

SEQ ID NO: 936579 - DNA, 568 bp, Homo sapiens
tgtaggtatgtgtgaggcaacaacaaaagatccaacatttttattacgtgtaccagaaaaaaagtaaaatgaggctgaaagaatacttgaagaaatagtgcttcaaaaaaacctcaaatttgcagaagacacaaatgtatagattcaagaagcctaagataccctacacggaataaacacatttcaagaaatattttgattaaacttttaaaaactaaagacaaaatatttttatttggtagtttagaaacataaatctaccactttaaaattataaaggtcagaaatcttaaatggttttcattaggctaaaatcaaggtgtcagcagcacygctttccttctggggactctaaaggagaatacatgttcttgccttttccagcttctaggggctgtcttcatttcttgtctcttgtccgctttccccattccttgtctcggttctttcctccagtacaattagcaatgtagtatatttaaatattttctaccacactcttccacatttaaaggatccttgtgattaaattggccccccccagataatcaagtatgatctcttattt

SEQ ID NO: 936580 - DNA, 625 bp, Homo sapiens
tggggtccagctctgtttcccaggctggagtgttgtggcaccatcatagttcactgaagcctcaatctcctgggctcaagtagtcctcccaccttagcctcttaagtatgtgagactgcaggcatgtgccacaccgccaggctgggtagctgcctttcaatgtgcttctgcacccacagatttggaaaagggcatttttaggcagcagtctttcaactctcttcatcctgtaggtttagcctgccatttacatttgatrcacatgaagaggctaatgggaaggaaatctatagaactggaattggaagtcctttcgaatcccaaattcccttggtctaagagccagtctctcttctttctagcattttgacaatggtcgtgccacagcagaggtggtggtcaaagatctcccaaagaccaggatctaaggcccctttgtgatctaaggctctgagtacttggagagacaaaactcactccttctttgtagattcagagagacagagagagagagagagagggaatgaggagataccttgaagctgagggtctgcttggcttttcgaggtttttttttaagatatgttttttaaaaattttctggagtgggaattgggattgtgtg

SEQ ID NO: 936581 - DNA, 625 bp, Homo sapiens
tggggtccagctctgtttcccaggctggagtgttgtggcaccatcatagttcactgaagcctcaatctcctgggctcaagtagtcctcccaccttagcctcttaagtatgtgagactgcaggcatgtgccacaccgccaggctgggtagctgcctttcaatgtgcttctgcacccacagatttggaaaagggcatttttaggcagcagtctttcaactctcttcatcctgtaggtttagcctgccatttacatttgatacacatgaagaggctaatgggaaggaaatctatagaactggaattggaagtcctttcraatcccaaattcccttggtctaagagccagtctctcttctttctagcattttgacaatggtcgtgccacagcagaggtggtggtcaaagatctcccaaagaccaggatctaaggcccctttgtgatctaaggctctgagtacttggagagacaaaactcactccttctttgtagattcagagagacagagagagagagagagagggaatgaggagataccttgaagctgagggtctgcttggcttttcgaggtttttttttaagatatgttttttaaaaattttctggagtgggaattgggattgtgtg

SEQ ID NO: 936582 - DNA, 621 bp, Homo sapiens
tgatgaaagagcccctgcaaatccattaaggagagataattgaaaactccggggtaatatttaagaccgcgtgcctacgcggggtggagggcctgactgcgcccgctttgcccctcagtgctggtgcgtgccagtccctagcgctctaggcccaccaaagccccgggacgcccagccaaggcccgccgtcttagcggtgcctcctsactccctgcactcaaagggctggctctgcgctaacctggctcttccgaagacttgcctggagacccgagttccaaaaggagccacagggcatgctgtgtgacagatgcattagggccagaatgcacgggggccaaagcatcttgtcccactccttcagcttcggtttgatgtaccagcatcaggcactgctcaagcttctgagcacagcatcccctctgcctgcaaacttttccctccagcactttctgcttggggaattgctgttcctctttcaaaaccaacccagttccaccccaagtaatggtgcagtggggtatggaacgtgggtgggagtatagacacgccaagatcctggtgtgaccattgttgcagttgcatgatgaggacactatactgctctgttttcatatgttt

SEQ ID NO: 936583 - DNA, 597 bp, Homo sapiens
ttctttagctattttatcagcataagcattgccctgagcaatgggatctgatgccttttgatggcctttgcagtgaatgactccagcttcctttggaagtaaagtggccttgagaagagcttttattaaagaggcattaatgatggaggacccttgcgcagtgaggaaacctctttctgcccatataatggtatggtggcgtaggatatggaaggcatatttagagtcagtttaaatattgatgtgtagtccctttaaaagagtgacgctcgagttaaggcaatgaatttggcttgctgagaggtaggggagtggggcagagcggtagcctcaatgatagatgtggaagatactatagcatagcctgcctttgctggtgaatggcaattaggcctggtggaamtgccattgataaaccaagtgtgatcagggtgaggaacaggaaagaaggaaatatgggaaacggagtgaatgtcaggtggatcagagagatacagccatggaggtcaggtgtgatatccggaataatgtgggaggccagattgaagtccgggccaggaaaaacggtaattgtgggagactcaacaaagagtgagt

SEQ ID NO: 936584 - DNA, 676 bp, Homo sapiens
tttacatgatgatacttgccttcctcaaatactgcccacaatcccgtattattctagatggttcattatagtcaagtctcaggatgatctggctgggaaaggacttgctctgtggtgggaggaacaagtgtctcccctgaaggagcttcaggatttgacartttccaggaggaattggtggagtgtgcttagcaatggatctcggggggttcagacagggatatggggggtggggtgccagaatataagactggataagaagatttcatccatatgcaggcattatcagaatgtaatgtaatcaaaaggacacctggatctggtcccagtgtgctgttgggaagtgtccttcaagagtgaggaaaatggtggcttgcattaatgaaaagaagataccagaactgtcctggcagagtactgaggaacaaaaggcacagagaggtgggcctgccagaatggatttattacataagaccagagaactcgccagttggctgtgttcatctggagggtttagtggccatttcttttacaaaccaacaaagaatgactagtgaggggtgcgtctcagaaaagcttgatcgtcactgtcctttctaggctgaggttgatgccaggggaagctgctgtggcactgggcttctggtgtcagcgtaggagacagggatctaggaca

SEQ ID NO: 936585 - DNA, 650 bp, Homo sapiens
catttttacccctcactattaggaaggctccttcgatggtggctggccctaccttatatttacccctgatagtgtttgtccaacttcccaaccaactttaattaaaactcacaatctgaccatcctggctaacatggtgaaaccccatctctactaaaagtaaaaaaattagccaggcctggtggcaggcgcctgtagtcccagctacttgggagactgaggcaggagaatcgcttgaacccgggaggcggaggttgcagtgagccaagattgtgccactgcactccagcctgggcaacagggygagactctgtctcaagcaaaacaaaacaaaaaaaaaacaacaaaaaactcacagtctgtttccctttttggatggagatggggctcccaaggacaggtcatataggtaatgatcattttagttgatgtgatatataggcagttttagagtctcttgctaagtagaaaatgctaattctttaaaaaaagataattcttattaactcttaaaaagtagtttccaatttacgtcaagttgtgtcacattatgtcttgccatcaagcctggagtgtgacctgtccagagacggaggacaggctggctgagtagagcctccttaccatttctccacccctgcctgtctcct

SEQ ID NO: 936586 - DNA, 634 bp, Homo sapiens
actattaggaaggctccttcgatggtggctggccctaccttatatttacccctgatagtgtttgtccaacttcccaaccaactttaattaaaactcacaatctgaccatcctggctaacatggtgaaaccccatctctactaaaagtaaaaaaattagccaggcctggtggcaggcgcctgtagtcccagctacttgggagactgaggcaggagaatcgcttgaacccgggaggcggaggttgcagtgagccaagattgtgccactgcactccagcctgggcaacagggtgagactctgtctcaagcaaaacaaaacaaaaaaamaacaacaaaaaactcacagtctgtttccctttttggatggagatggggctcccaaggacaggtcatataggtaatgatcattttagttgatgtgatatataggcagttttagagtctcttgctaagtagaaaatgctaattctttaaaaaaagataattcttattaactcttaaaaagtagtttccaatttacgtcaagttgtgtcacattatgtcttgccatcaagcctggagtgtgacctgtccagagacggaggacaggctggctgagtagagcctccttaccatttctccacccctgcctgtctc

SEQ ID NO: 936587 - DNA, 696 bp, Homo sapiens
agagctggggccgtggcttcagagggtgcaagcctccagccttggcagcttccacgtggtgttgagccttctagtacacagaagtcaagaattgaggtttgggaatctttgcctagatttcagatgatgtatggaaatgcctggatgtccaggcagaagttttctgcaggggtagtgccctcacggagaacctctgctagggtggtgcgaaagggaaatgtggggtcagagcccccagacagagttcctactgaggtactgcctagtggagctgtgttaagagggccactgtcctccagatcacagaatggtrgatccactgacagcttgcaccgtgcacctggaaaagctgcagacactcaacatggctttcccatgaaagcagccagagggaggctgtaccctgcaaagccacaggggcagagctgcccaagaccatgggaaccaacctcttgcatcagcatgacttagatgtgagacatggagtcaaaggagatcattttggatctttaagatatgactgccccacttgatttcagacttgcagggggcctgtagcccctttgttttggcccatttctcccattttgaatggctgtagttacccaatgcctgtactcccagtgtatctaggaagtaactaacctgcttttgattttacaggctcattggtggaagggacttgcctttgtctca

SEQ ID NO: 936588 - DNA, 595 bp, Homo sapiens
gggcagattacggggtcaagagaatgagaccatcctggccaacatggtgaaaccatctctactaaaaatacaaaaattagcttggcgtggtggcatgtgcctgtagtcccagctactcgggaggccgagacaggagaatcactcgaacccaggaggcggaggatgcattgagccgagattgcgccactgtactacagcctggcaacagagtgagactccgtctccamaaaaaagaaagaaacactgggctgggcacagtagcttacacctgtaatcccagtactttggaaggctgaagtgggaggatcccttgaggccaggagtttgagaccagcctgggcaacatagtgagaccctgtctctataacaaacaaacaaacaaaacttagccagttgtggtggcacatcctatagtcccagctacacaagaggctgaggagggaggatctcttgagcccaggagtttgaggttgcagtgagttatgatcatgacactgcactccagcctggataacacagcaaaatcctgtctcaaaaaaaaaaaaaaaaaaaaaaaactaccagaaaataaatctagatccttgccataggtctg

SEQ ID NO: 936589 - DNA, 762 bp, Homo sapiens
tttttttttgtcaaacatatatttgatacagtactgtccttttgatagaggaaggaggcagccaaatgtctaggcagataagggtccccagtgaaaccccaccttcaagccgaagacagtcctgggtaaatccttggaccacactgaggacctgtcttctcatttggtgcactttcctctgatcaatccccacccttcacctattttacatatacctacactttcctaattggttttctacactatcatgcccacctttgagtggtgtcttccctttaaccgtttttgkgtactcacaaaccaatcagcatgcactccctattctgagcccataagggccccaggctcagccatattagggaacttttcctgcctttgtgtagtgggaccactcccacatccccttcctgctgaaagctgtttctcaccttgtatactcttcgattgtcagcatcctcattcttcttggacactagaagagaactcaggaagcagtgggcaagccagactcaactggggtgggccaaatgagtgggcagtctcctgcagcaggtagcatggccaagcgaggcccaggcatggtgtcaccggccgggggtccctggcttgcaaagtgacagagagaaaaatccttttatcattttattaagcttttaattttttcacatttcatgatgatcatttattataagaagtacttggcatttttattttaaaaaatagcacaactttctgccttaagagaagaattaaaatgataaa

SEQ ID NO: 936590 - DNA, 752 bp, Homo sapiens
ggcacatgcctatagtctcagctacttgggaggctgaggcaggagaattgcttgaacccaggaggcggaggttgcagtgagccgagatcgtgccgctgcactccagcctgggtggcagagcaggactccgtctcaaaaaaaaaaaaagaaacaaaaggaaaatgaagtcataatttttatcccatctctgtccactgaaaaggcctagaggcaacaatcaacccattgaaataagaacaattagcactgtcaatatcattcctcactaaaaggagtcagaactctttgggtaaacgtcagattctgagtctgaggtagaaaggcacaagaagctggaacatcttatcacgttggaaagaaagaaaacaatcaaagaatattraagacaaattgaaaagtgtcctactgattaaaaatggcccaatttgagcatcaaaaataatttgaggtagatttgaaaagcatcatgttggaatccataagtctatgatgatctatctatatatatgtatgtatatgtttgtgtgtatacatatatatacacacatacacacacacatatatatacacacatagatacattaaaattgatagtagttgcgcatggtggtgcacgcctgtaatcccagctacttgggaggctgaggcaagagaatcgcttgaaccagggaggcagaggttgcagtgagctgagatcacaccactgcactccagcctgggtgacagagcgagactccaactcaaaaaaaaaa

SEQ ID NO: 936591 - DNA, 695 bp, Homo sapiens
acgtcctatacgagaacccgaacctgaagggtgtcaccgaccacacacagcgcctgtccattataacaaaggacctcttccaggtagagtgaggtcctcagccgctccctggcgggggggaagcagggtgctgcttctcttatggaacaacatcgtctcctgctcttgtcccaggtggcgtttaaccgagtggctcgaggcatgctgcatcaggaccacattacctttgccatgctgctggcaagaatcaaactgaagggcaccgtggggtaagagmactcacgcccacaggaggatgccatattgctggtggcccccaagggtttcatgatcagatacatgcttttattatttcttttattttctcttttattttctttattttattttttgagacggagtctccctttgttgcctaggctggagtgccgtggtgtaatctcacctcactgcaacctccacctcccaggttcaagcaattctcctgcttcagtctccgaagtagctaggactataggcgcaggccaccacatctggctaattttttttgtatttttagtagagacgggttttcttcatgttggcagcccagcctggtctcaaactcctgacctcaagtgatccgcccacctcggcctcccagagtgctgagattataggcctgagccactgtgcccggcctgttttctcttttc

SEQ ID NO: 936592 - DNA, 757 bp, Homo sapiens
gccccctgaagggcatgggccaatcacaatgcctctccttcctggccgctgggattggtccgagggtgcacatgaccggactgcgggacatgtgaccgtgccgatctaggtcgtgtgacccgtctggtgtagtcctggaacaagggttttgctgcggagggaaacggccagagacctcgatctaagaccggggtttggagactggcgggcctcggaacagcagagctagcggacttccggtctggccctcygctcacggccgagggcaaggcgggttaggtcacttgctgaggaaagagctcaatatgtcacgtgttcctctcccaatgacgtggacctcagttccctctccagtgaagtgggcacagtgttgcccgaaaaagggtgctctggggcttgcctgagacgggacgcgtggaaatgccctgccgaatatgaatggggcgatggcctcgcgggacggagcagcccaggaaagctgaccgtgggctgggttgtggagcggagccccagggcctcggctgacttagcggccagtcgtacatagtgggtatgcggcgggcccgacgccagtcgttgtggaccactgacttgtaatctttacgacctcagtgagggtcagaagtgtccgcgagccctgtaggcgaggagaggcctggctgagggcgcacagcctggaaggggagaaactagagctggactctgcttgacccacagaccctccgccaggttgcctttgcgaggcaagaagcgaagg

SEQ ID NO: 936593 - DNA, 629 bp, Homo sapiens
gatgaaataagccccagtctcccgtagcgctcccaggcttattaggacaaggaaattcccacctaataaattttggtcagaccatttgtctgctctcaaaccttgtctcctgataagatgttatcaatgacaatgcgtgcccgaaacttcattagcaattttaatttcgcccccgtcctgtggtcctgtgatctcgccctgcctacatttaccttgtgatatcttattaccttgtgaagcatgtgatctctgtgacccataccctattcgtacacctcctccccttttgaaaatcactaataaaaacttgctggttttgcagcttgtggggcatgacggaccctgccgatgtgatgtctcccctggacactcagctttaaaatttctctcttttgtactctgtccctttatttctcatactggcccacacttasggaaaatagaaaagaaactacatgaaatatcgggggtgaattttgcctgatatctggctgaatttcccccgatattgtccctttgagatattaattttcttccagtgctagtatcttaccagtttcacaacccaggaatatctttctcaaggacctgggagccattcctttgaaatgtaaatatcaagagagagt

SEQ ID NO: 936594 - DNA, 734 bp, Homo sapiens
ttaaaaatgaaaatgaacaaaaagtaaagaatgtcaacaaagtaaaaaggcaatacttgaaaagactagtaaaatttgtaatcctctggaaagagaaaagctacaaattaccaaaataagaaatgaaataatggatgtcatttctcagtactacattactaagaaaatgcaacaaataattcggtgtgaataagtttgacaacgtgaatggagtagaaaaaaattgttttgaattttttgaaagacgtaattggcacaagacatagaaaaatctcaacagtattattwatatttaaaaaaataaaattttaatgatggaatcttcttgcaaagataactctaggactgttttgcttcactagtggattctaggcatttaagaaaatgacaatatactaattatattagaaaacagaagaaaaagaagtatttaaaacttattttattaggcaagtatgtctttgattccaaaaccagacaaggatactcaaacagagaagtattgcagacaaatacctctcatgaataagaggcaaatatttcttttaaaaatatcagcaaattgaatgctacatataaaacatattacaagaaaatatggtttaccgcacctggctcggagggtcctacgcccacggagtctccctgattgctagcacagcagtctgagatcaaactgcaaggcggcagccaggctgggggaggggcgcccgccattgcccaggcttgattag

SEQ ID NO: 936595 - DNA, 734 bp, Homo sapiens
ttaaaaatgaaaatgaacaaaaagtaaagaatgtcaacaaagtaaaaaggcaatacttgaaaagactagtaaaatttgtaatcctctggaaagagaaaagctacaaattaccaaaataagaaatgaaataatggatgtcatttctcagtactacattactaagaaaatgcaacaaataattcggtgtgaataagtttgacaacgtgaatggagtagaaaaaaattgttttgaattttttgaaagacgtaattggcacaagacatagaaaaatctcaacagtattattaatatttaaaaaaataaaattttaatgatggaatcttcttgcaaagataactctaggactgttttgcttcactagtggattctaggcatttaagaaaatgacaatatactaattatattagaaaayagaagaaaaagaagtatttaaaacttattttattaggcaagtatgtctttgattccaaaaccagacaaggatactcaaacagagaagtattgcagacaaatacctctcatgaataagaggcaaatatttcttttaaaaatatcagcaaattgaatgctacatataaaacatattacaagaaaatatggtttaccgcacctggctcggagggtcctacgcccacggagtctccctgattgctagcacagcagtctgagatcaaactgcaaggcggcagccaggctgggggaggggcgcccgccattgcccaggcttgattag

SEQ ID NO: 936596 - DNA, 622 bp, Homo sapiens
gggtctgaggctgagatgtaagaattgacataagcaggcttcagaagatgggtgacaatgaactttgccaagctaaaggatgatggtctaactcactgcaaagaagctaagaaccatgataaaacattacaggagctgttaaccagaataaccagtctgaagaggaacataaatgatcagatggagctgaaaaacacaacacaagaacttcaaaatgcaaacacaagtaccaatagccaaatagactaagtggaagaaaggayatcagagcttgaagactatcttgctgaaataagtcaaataagattagagaaaaaataatgaaaaggaatgaacaaaacctcttagaactatgggattatattaaaagactgaacctaagtatgataggggtacctgaaagagacagggagaacagaaccaagttggaaaacatgcttcaggatatcatccaggagaacttccacaacctagaaaaacaggccaatatttaaattcaggaaatccagagaactctggtaaaatactccacaagaagaataaccccaagacacataatcataagatactccaaggtcgaaatgaaagaaataatgttaatggcagctagagacaagggtca

SEQ ID NO: 936597 - DNA, 596 bp, Homo sapiens
caatatgaagcagagcaggagtttgttgaatagactgaactaatggagaactgaaataatttttatggctttttaaatttgaaatatcagtgattatttttgttttgcttttcagggtctggagaactttttttgagctatttatagcttttaaatacactttaggtatactgagtagastatacagaatttgaggcatatttatctctctttgcctaatttccccagaatttgtaaactatttgtgattcttaatttatggcaatgtgtttgtttgcatacatttaataagaatctgtttccttttataatgggacacagttgaaagaactgattattttcccatggttttgactgaaatgaccttgtgagaggttccagcaaagccaatttagaagagcctttgtggacaatgattcttgctgcactttgtgtgggtaatcagtccaagtatatgagactgaagattatttggtaagtaagttagtcctgctgtgattagtctttggtagaagtggaggactagagagagaaagattgtttttcagaagaaaactacagtattagattaacctttgattcctgggtggtcacgt

SEQ ID NO: 936598 - DNA, 596 bp, Homo sapiens
caatatgaagcagagcaggagtttgttgaatagactgaactaatggagaactgaaataatttttatggctttttaaatttgaaatatcagtgattatttttgttttgcttttcagggtctggagaactttttttgagctatttatagcttttaaatacactttaggtatactgagtagagtatacagawtttgaggcatatttatctctctttgcctaatttccccagaatttgtaaactatttgtgattcttaatttatggcaatgtgtttgtttgcatacatttaataagaatctgtttccttttataatgggacacagttgaaagaactgattattttcccatggttttgactgaaatgaccttgtgagaggttccagcaaagccaatttagaagagcctttgtggacaatgattcttgctgcactttgtgtgggtaatcagtccaagtatatgagactgaagattatttggtaagtaagttagtcctgctgtgattagtctttggtagaagtggaggactagagagagaaagattgtttttcagaagaaaactacagtattagattaacctttgattcctgggtggtcacgt

SEQ ID NO: 936599 - DNA, 435 bp, Homo sapiens
gcttgtttctctgcccgcgaagatcttggggtttttataagcacaggataggggtgtggtgggccagcgtggtcttgggaaatgcaacatttgggcaggaaaaaatgtctgtcctcacctaggtccctggtcacaggcccaggggtggagccctagccacagaccacaccctcccctacccagcacttccctgccctcctcccatatcaacatgagatattttgatgyaggtcttcaatacgtaatcatcacatcagggtaaatggggtatccatgacctcaagcatttatcctttgtgttataaacaatccagttatagtttctttgttaatttaaaatgtacaattaaattattttggactatagtcactgttgtgctagcaaatactagcatagaaaaactagaaagaattaatgtcttatttattctttct

SEQ ID NO: 936600 - DNA, 705 bp, Homo sapiens
ttttcatatcaccattaatctttaaggaactaccacttgttgacttttggtgaagtgtcaaaaaaatattcacagttatctaaataggctattaaaatactcctcccttttccaaatacatatatgtgcgtgtgtgtatatatgtgtgtgtgtgtgtgtgtgtgtgtrtatctgtgaagccagattttcttcttatatttcaatcaaaataacatattgcaagagactgaataggaaagcatatatgagaaactagctatcttctattatgccagacttgaagagacttgcaaaaatgtaaaataatgctgctcatcttactttttggttttgcaaaacatacttagattttctcaaaaatatgttatctacatcatcatgcaataaatttattttttgaaatgcatcgaaatataatttttaaaatttctctgttttgatttctaacctggtaaatattgagagatgtaactcacacaaagaaaagtactttggaatccttcaaaggtttgagaactgctggtttaaggaaatttttatagacctaggctgttcacatttttgtttttgcagacagttaaattactaattcacccagcttggtgttgtggaagcttgattttaggctttgttaaggaggtctactttgatttaactgaatcctgaatcttgttctttacttttgaagagtagtcctgaattttc

SEQ ID NO: 936601 - DNA, 485 bp, Homo sapiens
attatcaccactatgtattttctttttcatcactcataacagaaagtctatgtccattaagcaataaccacattctcccgtacttccagcccttggtaacctctaatctactttctgcctctataaatttgcctatgcttgatatttcatataagtggaatcatacaatatttgtccttttgtgtctagcttatttcacatagcataatatttttcaaggtttatccatgttttagcatgtattagaacttcattcctttttatggctgaatagwattccattgtatgtatacgccacattttgtttatccattcttctgttgatagactcttggattatttccaccttttggctattgtgaataatgctgctatgaacattggtgtacaagtatttttttgagtaactcttttccattattttgagtatatacccaggtgtgctcatatggtaattatgtctaacttgttgaggaactgccaaa

SEQ ID NO: 936602 - DNA, 711 bp, Homo sapiens
cagatactgcttctaccttggaatgtttttcttctcagaagaaacaaggatactaaaagaagcaagtaaaagcattgccctatgacggctgacaagaatagacagaaggacagaaggtgcatttcattcaatcacccagagaaaactgtgctcctggagacagaggtaacacccccagcttagcacaagacacagggcagtcagtggcgaatcctgccctggtaaggtctccaggcacccgaggcctggaggtttgtaacaagaaaaggagccaagttccctgtccccaggaaggagctggactcagatgaatagtgtgagggggataaagaaaaagtgtgctctcctcycgccgagaggcttcaagagcccctgcagattcggagtgataaggagcttagaccagcaactgctgtttgatgaagttgccatctgtgggatttgctgactttgagcaggactcagggatatctctgtgttacagcctggtcaggactgtgcagacgcgctttatctgatcctcggggaaatcattttctgagtaagctaagctatgatggcttctagagactctgccagctcccccagtggaaaggtcaatgaatcttccaccaagaaaaaataatcgtgggagggactctgcacattaaacaccacttctgagttccaaagaatgttcacaaaatagcatggcaaaaatggaaagaggtg

SEQ ID NO: 936603 - DNA, 599 bp, Homo sapiens
gcttcatagatgacaccctctcactgtgtcctcatgtggtggaagggggagggtctctctcaggcctctgttataagggcacaggtatggtttgtatctgtgtccccacccaaatctcacgttcaactgtaattgcaatgttggaggtgaagtctggcggaaggcgattggatgatgggtgcggtttcttgtgctttaacactatcctccttggtgctgtcatcgagatagtgagttctcacaagatctggttgtttaaaagtatgtggcrtctcctccccctctctctttctcctgctccagccatgtgaagtgctggctcccctttcagcttccaccataattgtgtttcctgaggcctctccagaagcagaagctgctatgcttcctctacagcctgcagaaccatgagccaattaagccacttttctttataaattacccagcctcaggtatttctttacagcagtgtgagaatggaggaatacaggcactaatcctattcacgaaggtggaactatcatgatttaatcacctccgaaaggcctcatctccaaataccatgacctgggcggggttgggggtgggggcggttagga

SEQ ID NO: 936604 - DNA, 547 bp, Homo sapiens
gtgaagaatgtcaatggtagtttgatgggaatagcattgaatctataaattactttgcgcagtaggccattttcatgatattgattcttcccatccatgaggatggaatgtttttccatttgtttgtgtcctctcttatttccttgagcagtggtttgtagttccccttgaagaggtccttcacatctcttgtaagttggatgcctagatattttattccctttgtagcaattgcgaatgggagttcactcatgattatgctctctgtttgtctgttgttgrtgtataggaatgtttgtgattttcgcacattggttttgtaccctgagactttcctgaagttgcagggaacaacacacaccagggcctatcggagggtggggagcaaggggagggagagcattagggcaaatatctaacgcatgtggggcttaaaacctcaatgacgggttcaaaggtgcagcaaaccaccatggcacatgtatacctatataaaactgcatgttctgcacatgtatcctggaacttaaagtaaaacttaaaaaaa

SEQ ID NO: 936605 - DNA, 547 bp, Homo sapiens
gtgaagaatgtcaatggtagtttgatgggaatagcattgaatctataaattactttgcgcagtaggccattttcatgatattgattcttcccatccatgaggatggaatgtttttccatttgtttgtgtcctctcttatttccttgagcagtggtttgtagttccccttgaagaggtccttcacatctcttgtaagttggatgcctagatattttattccctttgtagcaattgcgaatgggagttcactcatgattatgctctctgtttgtctgttgttgatgtataggaatgtttgtgattttcgcacattggttttgtaccctgagactttcctgaagttgcagggaacaacacacaccagggcctaycggagggtggggagcaaggggagggagagcattagggcaaatatctaacgcatgtggggcttaaaacctcaatgacgggttcaaaggtgcagcaaaccaccatggcacatgtatacctatataaaactgcatgttctgcacatgtatcctggaacttaaagtaaaacttaaaaaaa

SEQ ID NO: 936606 - DNA, 707 bp, Homo sapiens
gaatgaaagataacagagacccagggtggggagtgggatggagacaggacaagaaattacttagtgggtacaatgtacattattcagctgatggatatgttaaagccctcacttcaccacaatgcaatatatccatgtaacaaaattacacttgtatcccataaatttacacaaaacagaaataggcaaaagatggaaaaagacattttaccaaacgatcacaaggaagggaaatcatcacataaaaatattttccctcatttgccgttgatgaagtgcaaaataaaaccataatgagatgccgttgcacatcaattacaatggccaaaatgaaattactgagaatgccaagtgctagcaagactagaaagactggatctctcatttcctgctggtgggaatgcaacaggatgcagccactctgagacatagtttggcagcttcttcatgattaagcagacaccgtatggctgagatcctgctcccggggaaagtaaacttgtgtgcacacatgtaagaaaatttcatagcaattttattaatgatcaccccaaattggagctaatccaratgcccttcagcaggtgaatggataaacaaactgtgatccatccatacaaaagaatgttactcagcaacaaaaggaaatgaactattgataatatgcaacaatttggatgaatttcaaaggcattatgtggaaagaa

SEQ ID NO: 936607 - DNA, 736 bp, Homo sapiens
agaaataatttaagaacatttcccagtactgaggtcataagtttccaaattgagttttctcttaacccccacttttcccaccaactactacatttatttttactctgttttgcaacaaagattattatctgtgacctgtctctcattcttttctaaactgacatcaatgaggcatccagtcaccagtaactttcatattgctagaccagcagtcagttctcaggtgccgtgtggtttgctctcacagcagagcttgtatgtgctgtttgcatggcttcccaacctcgccccctcttgctcattttgtcttctccttcccgcctcactgattgctctttctcagcctcctgttctggcacctcctmttctctttgagctttaattgttggagtgccccaatattggatgttctgcatgaggtccaaactcaccgtctccatggctctcattcagggcaagatcttgaagcccatccctattttaaggactctatgtctgcagattagaactttcctcctaatcccagactaatctatctagctgtacttgtcacattctctggatgtctgtcatctcagactcaaaatgtacaaaattagatgcctcaccatccccccaaattccacttcacccacagccttcctcatctcagcaatgctacgtctactccttttagttgctcaagccgaacattttgcaatcatcttaagctcctctttttcttttttctttccac

SEQ ID NO: 936608 - DNA, 780 bp, Homo sapiens
tgcagattagaactttcctcctaatcccagactaatctatctagctgtacttgtcacattctctggatgtctgtcatctcagactcaaaatgtacaaaattagatgcctcaccatccccccaaattccacttcacccacagccttcctcatctcagcaatgctacgtctactccttttagttgctcaagccgaacattttgcaatcatcttaagctcctctttttcttttttctttccacctccaatataacaggaaatcccactggctctgccttcaggatgtatttagaatgtaaccagttctctccttcactgctgctgctgtactgagagcatccactttgtctctcgtcggcactgctacgggtcttcccaacaggccttcctgcttctaccctcacacaggctgtccttaactccggagtgacagtaagactgtaaagctgtgttaactcattgtcactactctgctaagaggcctgcttgggtccctctataactcggaagaaaagycagagcaccccatccccactcctagaagctgataagggcctcatgatctctctgtctcatcatctaccactctccctagctgtcagtctacccctgccactctaattccctgatgtttcttcaacattgccaggaacctgcttacctcagagcctgctgcggactgagttgtcttctccaaaatccatttgtggaggccctcatccccagtgggagagtatttggagatgaagcatttggaggtgattaagcttagatgagctcag

SEQ ID NO: 936609 - DNA, 780 bp, Homo sapiens
tgcagattagaactttcctcctaatcccagactaatctatctagctgtacttgtcacattctctggatgtctgtcatctcagactcaaaatgtacaaaattagatgcctcaccatccccccaaattccacttcacccacagccttcctcatctcagcaatgctacgtctactccttttagttgctcaagccgaacattttgcaatcatcttaagctcctctttttcttttttctttccacctccaatataacaggaaatcccactggctctgccttcaggatgtatttagaatgtaaccagttctctccttcactgctgctgctgtactgagagcatccactttgtctctcgtcggcactgctacgggtcttcccaacaggccttcctgcttctaccctcacacaggctgtccttaactccggagtgacagtaagactgtaaagctgtgttaactcattgtcactactctgctaagaggcctgcttgggtccctctataactcggaagaaaagtcagagcaccccatccccactcctagaagctgataagggcctcatgatctctctgyctcatcatctaccactctccctagctgtcagtctacccctgccactctaattccctgatgtttcttcaacattgccaggaacctgcttacctcagagcctgctgcggactgagttgtcttctccaaaatccatttgtggaggccctcatccccagtgggagagtatttggagatgaagcatttggaggtgattaagcttagatgagctcag

SEQ ID NO: 936610 - DNA, 476 bp, Homo sapiens
tgggagaaaatatttgtaaagcatacatctgataagaaacttgtatccaaaatacataaagtactcatatacctcattaattaaaagacagataacacaattttggattaggcaagggttctgaatagatatttctccatataagttattcaaattgctaataagcacatgaaaagatgctgaacatcattagctctcagggaaatgtaaatcaaaaccacaatgagaagccactttyattcagtaggatagctattaccaaaaaagacagataataagaattgttgaccaagataaggagaaattagaacacttacccattgctggtgggattgtaagatggtgcagtcactgtgaaaaatggtatagcagttcatcaaattgttaaacatagaattactatattagctggcaattctactcataggtatatacccaagagattaaaaaaatttacataaaaacttgcacattaa

SEQ ID NO: 936611 - DNA, 598 bp, Homo sapiens
agggctgcagacccaggcatttctgcatgcttggggggcctgggaaggcaccccacaccattgcagacatgcaggttcctgctcccactgcctggcttctcctggctcctggcacctgctctgatctttgagcaaggttaaggacaagcccaggtgctgtcacagcctggccaggtatgcccaggcttgggggcagtgttgacatgccaacaccctggcaccccaatcccctctggactttgggcacctagaagtgcaggaggggaagctgagggtgactgggtgctktcctgcaggtaccctttggtgccagcagcctggccaccatggatggctgtgggagacagacaagctcctgggcagaagggggtggttcccagtaaggcctcaccttcaggtctgaaggccaagggctgggatcccagtcctgcagatgggagtggggacttgtggtgcctcttccagccccacccatggctgcccttgtaccaatcagcacacactttctcccttctgaggttcataaaagccccaggctcaggcacagcagggcagaggatggagaggatgaagagacctctggacaaccagctacaga

SEQ ID NO: 936612 - DNA, 433 bp, Homo sapiens
ttgacttgaattgctggatactttggttttggttttgacttgtcttggattttttggtactcggattttgaatttcgtgattttggtttggtataaacggtaaaagtgtatgtgtgccctttttacctgttctttgtcttgtggtgagtgtgtgtgatgtgagcatggtattttgtatcaaaaaaaaaaagcagcatgggtcaggcaaataagcccaccccactaggaactatgttaaaaagagaatttcaagagagaatttaagggagattacggtgttactgtgrcaccaggaaaacttaaaactttgtgtgaaatagactggacagcattagaggtgggttggcctggacaggtccgttgtttcaaaggtatgacagaaggccacctgtaagccaaggcacccagaccagtttctgtacatagacagtta

SEQ ID NO: 936613 - DNA, 620 bp, Homo sapiens
ataacactgtcagagcattgaggtttgctctacataaagcatcaccccttcactcccaggaagagtgtccccttcctctgtgctcccacctcactgtgctcccatctctcccagctcaaaacatatgactgtattcctgtctacatgtcagcccccagctcccctccttgccaagactgcccctgtagggcacacatttggtgactgagacaaagactagacacagtagagtgttgtagcatattagaagttgtgagaaaaagaacactcagcacagggtgaggggaggcttgggcatgggaagacggatcagtctgcagtattaatcagggtggtcagaaaaggtctctgagaaagtgagcgtaatggttcattttatgtgtcaacttgcctgggccatgggktgcccagattaaatattgcttctgtgtgtgtctgtgcgggtgtctctggatgagatcaacatttgaatcagtgggctcagtcaggtagattgccttccccaatgtgtgtgagcatcatccaacattgagcacccaaggaaagagctggcagagcaaaggacagaggagagagggattccccttcaccttttttttttcctgcctgtttgacctggg

SEQ ID NO: 936614 - DNA, 579 bp, Homo sapiens
tcatttacattttcaaaagatgatcctggctgaaatatagaacaaaaatggattaatgtggaaggtaagaatagaaagtggtagtatagaatttaacctttctctaaggatgttcttcctctactttctcaaagcactctaaagacactataattcccagagagtgcctctttcaagagaattcaactgtgactgtcaattattaattttacacttagaccttaaaatttattcattcagaattcagttattatatactaattacaaaaaataatttgatcgggctgggcacagtggctcatgcctgtaatcccagcactttgggaggccgaggtgggcggatcacccgcagtcaggaatttgaaaccagcctggccaaagccaggcgaaagcgtgtctccactaaaaatrcaaaaaattaactcagtgtggtggcgtgcacctgtagtcctagctacctgggaggatgaggcaggagaactgactgaacctgggggcagaagttgcagtgagccaagactgcaccactgcactccagcatgggtgacagagccagactgtgtctcaaaaatacttaat

SEQ ID NO: 936615 - DNA, 560 bp, Homo sapiens
aaaggggccaacatagagctcagcccatggcttcagagtgcaatccccagcccttggcagcttccatgtggtgttgagcctgtgagtgcacagaagtcaagaattggggtttgggaacctccacctagatttcagaagatgtatggaaatccctggatgctcaggcagaagtttgctgcaggggtgggacccccatggagaatctctggtagggcagtgcagaagggaratgtggggtcagagcccccatacagagtccccactggggctgtaagagggctaccgtcctccagaccccagaatggtatatccaccaatagcttgcaccatttgcctggaaaagctgcagtcactcaacgccagcccatgaaagcagccaggagggaggctgtaccctgcaaagccacaggggtggagctgcccaagaccatgggaacccacctcttgcattggcatgacctgggtttgagacatggagtcaaaggagatcattttggagttttaagatttgactgccctgctggatttcagacttgcatgggtactgtagcctctttgtt

SEQ ID NO: 936616 - DNA, 630 bp, Homo sapiens
agtctccactcgacccaggaagtccagctggcttcacctctcattaggactttgagaccagcctggccaacatggcaagaccctgtctctactaaaaatacaaaacttagccgggcgaggtggcaggcatccataatcccagctacttaggaggctgaggcaggagaatcgcatgaacccgggaggcagaggttgcagtgagccaagattgtgccattgcactccagcctgggtgacagcrttaagactctgtctcaaaaaaaaaaaaaaaaaaaaaaaaaaaaatcaaatggcaccaaactgtactactagtcattggactttcatcatcatgtactcattgtaaagaaaggaaaaagaaaagccagtttcgtttaagaatgtctttgatgaggcagtaaaaattgttaaattttgacccttgagtgcatgtacatgtatttttaaatattctgtgtaatggaataggaattatgcatgaaacatttccgtatactgaagtaggatggatgtctcaggtaaaaacacctgtgtgaatgagttacaagctgaattagctgccttttctgtgggacaccatttttacttgaaggaagaagtgacagactatagttattcagacttggatat

SEQ ID NO: 936617 - DNA, 784 bp, Homo sapiens
accctgatataaactggtgtcaaacctgttagcatggctataattaaaaagttgagataatgtgtgttggtgagggtgtggaggaaagggaacccttgtacactgttggtgggaatataaattagtacagtcattactgaaaacagcatggaggttctgcaaaaaattaaaaataggactatcatatggcccagcaatccctctgccaggtatttatccaaagagatgaagtcaggccgggtgcaatggctcacgcctttaatcccagcactttgggaggccgaggcgggcagatcactggaggtcagaagttcaagaccagcctggccaayatggtgaaacccccgtctactaaaaatacaaaaattagccaggtgtggtggtgtacgcctgtaattccagctacttaggaggctgaggcaggagaatcgcttgaaccaaggagacggaggttgcagtgagctgagattgtgtcactggactccagcctgggtgacagagtaaaattccgtctcaaaaaaaaaaaaaaaaaagaaaaaaagaaaacaaaccaacaaaacacacaaataaccaaagaaatgaagtcaacacctcatcgagatatctgcgctcccttgttcattgcagcattattcacaatagccaagatatggaatcaacccaaatgtctatccaatggaggaatggataaagaaactgtggtatctgtatctctctatatagatcaatacaatgcaatattattcgactttaaaaaagaagatctttccactgatgacagcat

SEQ ID NO: 936618 - DNA, 733 bp, Homo sapiens
ggtctcctttgtttggcactgtactttacccatgcctttgaccatgattctagcccagagtgtcctcttgccatggccttagagttcaggagggagcaccacaggctctccatctactagaggggcagagataccctttcctttcccaagaagtctcccttagaaaaacgcatgccaaggcagttccaggcaactcccaaacaaatcacccctgctcctttgggatgctaagaccactgtgtgtatctttgcatgctcagaaaacacaggctggacaactcaaagatcctctcatagtcttgttcctgaactaaactgagggtcaggctgcttattctaataagctgcttattcattatttttctaatactaacgagatacacatgaactgggagaaaagggagtttttatttctgtaactggttgtaggaagaaggcccagaaattctccccagactaactcaaaattataaagttttccagagcttatataccttctaagttatatgtctaggtgtaagtgcgcattcatctaaagacataagtgattaaattmttttaatatgtaactgaggtctgagtctcgaagacctttctctggagcctcagtaaatatacttaatctaaataggtccaggacttgtctcctgctaaatcatggaggtttggggagttccttcagacccccataaatttgtttgtggaggcctggggagtttcttcagacccccca

SEQ ID NO: 936619 - DNA, 772 bp, Homo sapiens
gagaggagaccagcatgtgcccaggattaaaatcaggcaagttctccacttacgagggaaagaaggacattgtcaaactgcctttagagaaaggacagagacagaagggagttttgttcttgttgttgttgttgttgttgttgtgtttgtttgtttgttttttgagatggagtctcgctctctctccaggctggagtgtagtggcactatctcagctcactgcaacctccacctcccaggttcaagcgattctcctgcctcagcctcctgagtagctgggactacaggcacgtgccaccatgcccagttcatttttgtatttttagtagagatggggtttcaccatgttggccaggatggtctcgatctcttgaccgtgtgatctgcctgcctcggcctcccaaagtgctgggattacaggcgtgagccaccatgcccagccgagagaagggagttttaaatgttcttcagtgtttccaaagggccttctccatgaccattgctgctgtaagctttcccctataaccaggaggtctggctacccatggccccacatccgaaggctcagtgggtagaagagctgagccttctctggtgagaagtgaggtgctgggcttggatmtcggtttttcagcacactaacccagttaccaccctctttccttctctctccactagtcacacacccctgttttctaggtgtgaaccactgacaaagcatttttcatgcaccttgctttggtggtgatgtggcccacatctacataggctc

SEQ ID NO: 936620 - DNA, 534 bp, Homo sapiens
gccttcactacgtccctcccaggctcgatgtttaaaaaggagcccttgccacagctcttcaacttcctttgcaggcccttattgggtagcgccaaggattctggaggggcctgtgggtcaaggctgccacacgcacgccttttcctagcccgccctcctgcagccacatcacaaaggctgggccaggcgagaacagagctggagggcggcacccacactctcyggtttgctgctcgcctggcccggccccgcacagttcccttttctgaatggaggggccatgtgaccacctgtttgctcagccgtggatgctgcttctgcacaggggccgtttgctctagaaagttcacaggaagcaggctgctgggctcagggagtgcagagtggtgggaggaagctgttcaagctgcccaaagctttccggttcttggcacaccccccgtcccccgcgcccccagcaggatggaggattcccagcctggggtcctagtcaggcctcaggtagccgactgtctgggccatcctctccagcct

SEQ ID NO: 936621 - DNA, 723 bp, Homo sapiens
ctccccgttgctctcccccagccccggcaaccccattccactttgtgtctcgaccgtaagtgtggctgctctgggaccagtgccagtgggcgcacgctgggtttgcctacgtctggcttacttcactcagcagagtgtccttcggttttatcagttttgtcacaagtgtcagcatttttctcatttttaaggctgaataaaatattgtgtggataagccatgttttgtgtatctgttcacccattgatggacctgtgaacacgagtgtgcaattagcaccttttatttttattttatttattttttggagacagaggctcgctgtctcccccaggctggagtgcagtggcttgatctgggctcactgcaacctccacctctcgggttcaagcgattcttctgcctcagcctcccaagtagctgggattacaggtggctgccaccaagcccggctaatttttgtatttttagtagagatggggtttcaccatgttggccaggctggtctcgaactcccgacctcaggtgatccacctgcctyggcctcccaaagtagtgggattgcaggcatgagccaccacgcccggccccggccctacttttttttttttcttggagacagggtctttctccgtcacctaggctggaatgcagtggcacaatcacagatcactgcagcctcaacttccctgactccagtcgatcctcccacctcagcctccc

SEQ ID NO: 936622 - DNA, 772 bp, Homo sapiens
gtggggtctgcatgttgttgtctgctgcagacaggcccagatgccatctgcaccccgtggggcagctctgcaggatcgtggtgcaggagctgtgggagcccaaccccctggccccccagtctggaataaggtgcaccgcgggatggagctcctcagccgcagagtgagcgctgatggcagagcatgctcgtccattcgcccgtgtgctggctccttcttccaggagctgttcggccatagctgctgactgcctctgccaggtcagctccaggcttgggtggcagtcctgacacggctggggcgcaggggccgggacgtgggcrggaatgagagggaacctgcctgggaaggctggggaggagcgtccaggccccgtggtcatttgcggaggtagcgagtggcagggcctgcttgggtggattctgagcctggaggcctctatgcaggccagcacagacagcctcgggcaggagactcccagccgcacacaggctcctggtcctccagctcggtgcccgccctcctgggaccttgctagaaggcagaacgtgctgtcagtgccacgtcagacccggctcccaaagcccccccacctcagatcctgatgctggcccacgaggagctcccatttctgggtctggattttcagaacccccccaacaaaccactctgctgctaggttggagccctgcgggcagccgaaagccaggaggaggcagcagggcccacggcacctctcatcagcgcccttgtgccctggaagcaggggctc

SEQ ID NO: 936623 - DNA, 452 bp, Homo sapiens
tctgttggagtttgctggaggtccactccagaccctgtttgcctgggtgtcagcagcggaggctgcagaacagtgaatattgctgaacagcaaatgttgctgcctgatcattcctctgcaagcttcgtctcagaggtgtacccggccagttgacgtgtcagtctgcccctactgggaggtgcctcctggataggctactcggrggtcagggacccacttgaggaggcagtctgtctgttctcagatctcaaactccgtgccgggagaaccactactctcttcaaaggtgtcagacatggacgtttaaatctgcagaggtttctgctgccttttgttcggctatgtcctgcccccagagttggagcctacagaggcaggcagtcctccttgagctgtggtgggctccaccctgttccatcttccaggccgctttgtttacctattcaagcctt

SEQ ID NO: 936624 - DNA, 807 bp, Homo sapiens
caaagacagatccccaaaattaagggtaccattttataccggatcccggatccccaaaaggaggaaaatactcaggagaagatagtgcaatgcttctaccctgcattttattgcaaggtaacccaaagccaatcagcccattttgtaatcagcccatctctcctgggagtctcatctcccagtgggggtagtgggggcgttttcttgtcttccaagtagccaagagcatgcttctcctatccaagtgtgcaaagaattaagtatccctccataactactattagccatcccttatatttcctacctaattatcataatacgaagtaatttctgatacccccaaaactcaaaaccatcagataacagtatgcaaaacagaacagatcctttaattttgagagggatttatckgcttttaaattcctggggttttataaggaaatcagagggttttttttttccaaaacagggtatgtggtgcctcctctgtttttcccaatgaatctcaggctaccagaagttatcttagggcctctcatgagtgctttaagaaggacaaggcaaaaaaatggagaaaaataatacagtcgactgagaagaaaaatcctttttccagaaaaacaagttccaagaagagaaaaacataaaggccttttaaatatatctataggccgggcgcggtggctcacacctataatcccagcactttgggaggccgaggcaggtggatcacaggatcaggagttcaagatcagtctggccaacatggtgaaaacccatctctactacaaatacaaaaaattatgc

SEQ ID NO: 936625 - DNA, 680 bp, Homo sapiens
tttattcttaatcttttatatgcataattataaattttccttttattacaataaaactaaatggctacagcatcttaaagaatcttattcttaatgaattcaaactagtattttttttcaaaaatcaagggcaaattatatgagtagtgggaggctgtatttaaaatactcatctggagtttattaaaaacattttttgaaggacatctgtcagttctaagggtgaaaaacagcaccttggggaaaaatcctttcaatttagttactacactgagatacktcagataaaaactaatttgtactaatgatgaagggaacgtgtgtaaaatagttgcactgatttattctaaatggtaaagaaattccatttcattgactctcctctaatttcattcaagttatacttttcttatacatctcaatctgttgattaacctgcctccagagtaatattttagtgattatattttaatgtggagatgttatacttggtactttttgatactatatcattgcattaagttttctattcctttttattaatttacttttttattacattttatatagtctaattgagattcttctattaactctaattcttgggcatcctaacactcttgctgttagagcgcttgtcgtgtactgtcatgtactttacaaagctttaaaacaaggct

SEQ ID NO: 936626 - DNA, 625 bp, Homo sapiens
aggagatctgcagtgggtagctccttacagcaagcaggtaatccccacgtctgtatgagtctggctgagcctggggtttttctaggctcagaagggaggaagtgcatgctgattggtccatggctggccatggacagggccagaaaaagtacaagttctcactttgggtgggagactccacctggaaccggcagcctggtccccaggctcaggccatccctggttagaaggtggggtttcactggggattcactcctttttgcccaggagcctgcctgttgccatcaacatgccatccagggtgcccaggcagcccatactaagccaccttcagcaccccctggcctccctccctgagcttgtaggtgcccaaagcttcagagggggctgaggcagtggggggcgggggggggctggtgtgtcagtaccgccccaagtgcaggcacacccagccaggtcrtgacagtgcctgggcttggcttcaactttgctgcaaaattggagcaggcaccggcaacagggagaggccagggagtggaagcaggcacttccgaacctgcaggggcagggggccttccccaggcccccaagagcacagggatgacctggtctcaagctgtggctg

SEQ ID NO: 936627 - DNA, 813 bp, Homo sapiens
ctaagagatcaggaggaggagtcatccaccagcctctgtccagggaacaggagatcctggctggctgccaccccttcctactctgttcccaggaacactgcccatgagccctgagtcactactagaagccaccctgggcccacggggagcacagagctgggtccacggggagcacagagctgggtccacrgggagcacagagctgggacagctctccctcaaggtggtccttgggcttggttgcccagcaaccccagcctcggcagcctgcttctctccacaccgtccctcccttctcagggctgacaacacttggaaacccatgctggcaaacctgcttccaagcagggaacttggacataagtagaatatcaggaattcctggaggacttacaatccagaaactgggacaggtgtaggtagatgattcctacccacgaccccagctctgaacctgcctccagctctggcacagttctcttctctctggtttcccagagccacgtctaggtcaccatcccctcccccaccccctcgttcagagcagagagcactgggtacacagccaggagccctgtttccagatcttgctcagccttttaccctctgtgtgacctcaggcagcccacttcacctctctgggactcagtttcttcatctgtaaaacaggggtggatttgattggttcttgattttttttgtaagcattatatattttactgttctttctaaaattctagggcatgaaccagaggagctgaaactacgctggtttccttctccaaatagagaaatgggtacctgcattcctgg

SEQ ID NO: 936628 - DNA, 625 bp, Homo sapiens
ctatttgaataccctttacttctttctcttgacagattgtccttgctgcacttccaatactatgttgaataagagtggtgagaaagggcatccttgttttgtgatggttttcaaagggaatgtttccagcatttgtccattcagtatgatattgactatgggtttgtcataaatagctcttattattttgagatatgttcaatcagtacctagtttgttgagtgtttttaggatgaaagggtgttaaattttatcaaagaatttttatgcatctattgagataatcgtggtttttgtcattggttcagtttatgtgatggattacatctatcaatttgcaaatgttgaaccagccttgcgtcccagggatgaagccaacttgatcgtggtggatcatcttttgatgtgctgctagattkggtttgccagtattttactgaggattttcacatcaatgttcatcagggatattgaactgaaattttgttttttgctgtgtctctgtcaggtttgggtatcaggatgatgctggcctcataaaatgaggtagggaggagtccctctttttctattgtttggaatagtttcaggaagaatggtaccagctcttctttgtacatctagt

SEQ ID NO: 936629 - DNA, 589 bp, Homo sapiens
cattcaagtttaatacaactttagaattttatgaatctaggttacttgcttgggatcagggagcaaattcaattttatgtgttactataacccagaatctaaatgttcttgctatcctgtacaaatataggttgcatattttgaagagtacactttctgattttttatttacttttttgtggtggataaaggctgcaatttagctcaaaatcacatgactcagtgattcatggagttgcagttaggtgtataggctcttcactatgcataggaagccagccgttgtgccactgggaggtattttgtcacttaacaacctactatagaagtaaacaagaaagcaaatttttcatgcctttttttttttttttgtatttcagtgaaacctacaaaccattatattgtaaataaatcctttggcacataaccaatatatttcttttctgtctctaactccagtaacttctgtctttgttgacagratagcatgtcaccagtgccttttgggagtatacaatttatctgtataacattttggtacagagaattgtctattggtctttcttccaattggtttagagcaaaataa

SEQ ID NO: 936630 - DNA, 589 bp, Homo sapiens
cattcaagtttaatacaactttagaattttatgaatctaggttacttgcttgggatcagggagcaaattcaattttatgtgttactataacccagaatctaaatgttcttgctatcctgtacaaatataggttgcatattttgaagagtacactttctgattttttatttacttttttgtggtggataaaggctgcaatttagctcaaaatcacatgactcagtgattcatggagttgcagttaggtgtataggctcttcactatgcataggaagccagccgttgtgccactgggaggtattttgtcacttaacaacctactatagaagtaaacaagaaagcaaatttttcatgcctttttttttttttttgtatttcagtgaaacctacaaaccattatattgtaaataaatcctttggcacataaccaatatatttcttttctgtctctaactccagtaacttctgtctttgttgacagaatagcatgtcaccagtgccttttgggagtatacaatttatctgtataacattttggtrcagagaattgtctattggtctttcttccaattggtttagagcaaaataa

SEQ ID NO: 936631 - DNA, 826 bp, Homo sapiens
tcagctgcaggtctgttagagtttgctggaggtccactccagaccctgtttgcctaggtgtcaccagtggtggctgcaaaacagcaaatattgcagaacagcaaacgttgctgcctgatccttcctctggaagcttcgtctcagaggggcacccggctgtatgaggtgtcagtcggcccctactggtaggtgtctcccagttaggctactcgggggtcagggacacacttgagggggcagtctgtctgttctcagatctcaaactcgatgctgggagaaccactgctctcttcaaaactgagttggaaatgcagaaatcacctgtcttctstgtcgctcacactgggacctgtagactggatctgttcctatttgatcatcatggaatgatcccctggagccagaaaagtttattccacttccctgttctgccactcttttggggaggacatcaaaactttctgagcatcagattccttttccataaagtggatattatttaatactacctttctcagtatattgtaaggtcaaaataagataaagtacacaaccatttactatgttaccatgttctttacatgtaacatatgtaaataagttattgtgtttataagaataagaataggagatacaatgaaatgtggggacttaaggggaagagtgagaagggggcgagggataaaacactacaaataaagtacagggtatactgctcgggtggctggtgcaccaaaatctcacaaaacaccactaaagaacttactcatggaaccaaataccacctgtactccaataacctatggaaaaaaaaaagaataagaat

SEQ ID NO: 936632 - DNA, 589 bp, Homo sapiens
ctttcagtcttatgttgttttactcatatatttgatgctctgttacaagtgcatctaaattattgcttgttgtatcatcttggagaattgattcttttatcattatgtaatgcctcctcttatcccaagcagttttcctcgttcagaagtctgctttgtcttaacctaatatagctactcctgcttactgttattaatgttagcatgatatatctcttttgttttttatatttgcttttaacttattagtatcattatatttaaaatgtgtttcttacrgataagatatacttaggtgtaatttttaatccattccaaccatcttttaattaatgtattgagacaactcatatttaacagtgattatttgtaaaaattttattaatagcttccatgtttgcaactgatttctactggtggctttcattcttcttttttctttattcccctgactttcttcccttatcttgttttcatttataatgtaatgatattcattttagctcttcttttagcatcttaattatattttaaaaatattgtttttcatggtcaacccaaagttttcaatatatattttaactaatcc

SEQ ID NO: 936633 - DNA, 734 bp, Homo sapiens
gggctcttcaccactaggccgcactgcctctagcaaagggacgcggggaagctcagcagaccttaggcctcccaagggcgccacggtggttcctttgagcccagagtcagctcttaagtccataggccttcctgaagcttctgaaccacttgcccatagctgggcctcaggctggctctcagtagaatgtggagaatggagattcccgcatgtccacttctcctaaaggttttataaggcagtgctgggaatgtgctttataaaaaaggggaagcaccccgacaacagtcactgtttgctcttttaagcaccatcctgagaaggaggaatgttcttcccatttcataggtggggaaaccgaggctcagaagagcaaatttttggccgggcgcggtggctcacgcctgtaatcccagcactttgggaggccgaggcgggtggatcacgaggtcaggagatcgagaccatcctggctaacaaggtgaaaccccgtctctactaaaaatacaaaaaattagccgggcgyggtgcgggcgcctgtagtcccagctactcgggaggctgaggcaggagaatggcgtgaacccgggaggcggagcttgcagtgagccgagatcgcgccaccgccctccagcctgggcgacagagcaagactctgtctcaaaaaaaaaaaaaaaaagagcaaattttttttccaaggtgatagggagagtccgtggctgatgtctgcactg

SEQ ID NO: 936634 - DNA, 662 bp, Homo sapiens; identical to SEQ ID NO: 935885

SEQ ID NO: 936635 - DNA, 602 bp, Homo sapiens
taggattgctgggttgagtagaagttctatttttagttctttgaaaactctccatactgtttatcacagagttgagctaatttacatcctcaccaacaaagcgtaagtgttcccttctctccacatccatgccaacatctgcacaaccaaggaggatttagcaagaggattttattccttgcaactagtaacaagaacacctgggataactcccaaagcagtgcctcctcgagctgggggctaggtccggttttataaggatagggtaataaggtgtgatctgattggatttcacamtgaagtgatgtcaaaagccacgatctgactagatcctgccatgaggtgatgccagggctcgatctgattggatcctgatcctgccctgcagtgtccgcttcttatttcagtccccactcctcagtccaagcacttaggttcccctgtggttgcatgccttggctcatcagggcatgctcatgatcttcaacctgggagtcccgggcaactgaaaaacaaatcacaactttgttacataaaagttgaaccagattggtctggtgcagctacagcactggcaatagtggagccatgggctgtgtgtc

SEQ ID NO: 936636 - DNA, 602 bp, Homo sapiens
taggattgctgggttgagtagaagttctatttttagttctttgaaaactctccatactgtttatcacagagttgagctaatttacatcctcaccaacaaagcgtaagtgttcccttctctccacatccatgccaacatctgcacaaccaaggaggatttagcaagaggattttattccttgcaactagtaacaagaacacctgggataactcccaaagcagtgcctcctcgagctgggggctaggtccggttttataaggatagggtaataaggtgtgatctgattggatttcacaatgaagtgatgycaaaagccacgatctgactagatcctgccatgaggtgatgccagggctcgatctgattggatcctgatcctgccctgcagtgtccgcttcttatttcagtccccactcctcagtccaagcacttaggttcccctgtggttgcatgccttggctcatcagggcatgctcatgatcttcaacctgggagtcccgggcaactgaaaaacaaatcacaactttgttacataaaagttgaaccagattggtctggtgcagctacagcactggcaatagtggagccatgggctgtgtgtc

SEQ ID NO: 936637 - DNA, 494 bp, Homo sapiens
ggacatggtggcaaacaccgatagtcccagctacttgggaggctgaggctggaaaatcacttgagcccaagagtttgaggctgcaacgagctatgatttcattagcttactccagtctgtgcaacagagcaaaacctcatctctttaaaaaaaaaatgacttttgttcactccttgctggtccccatacgatatcyctgacctcctgatagcagtaattcctctagactcactccctgttgtagaagtagaaaatagtgatgggaataatggaaaacagaatgatctcaattgaacaaaagaaagatacagagctccgtacatctctaaaaccttccattcctcagttcctggctgtataatgaggatagggatgatagccaccatcctgagttattaggaaggttatatgttacaaagcctaaaacagtgcctggcacttagaaagtgctagtgaagtgctagtgaaggccgggcgtggggctcatgcacttt

SEQ ID NO: 936638 - DNA, 548 bp, Homo sapiens
ggtgaagcaggataattacttgaacctgggaggtagaggttgcagtgagctgagatggtgccactgcactccagcctgggcgacagagtgagactcatctcaaaaaaagaaaaaaaagtttttgttttattgttttaaataaaaatgtttccatgtgcatttttgttttgtttatttaatttttattgtggtaaaaacacacacacacacacacaggccaggtgtggtggctcacacctgtaatcccagcattttgggaggccgaggcaggcggatcacctgaggtcaggagttygagaccagcctggccaacatagggaaaccctgtctctactaaaaatacaaaaattaaccaggcatggtggcaggcacctgtaatcccagctactcaggaggctgagacagaagaatcgcttgaacccaggaggttgtagtgagccgagatcgtgccactgcactccagcctgggcaacaagagtgaaactccgtctcaaaaaaaaaccacataaactgtatttactatcttaaccatttgtaagtatatagtt

SEQ ID NO: 936639 - DNA, 592 bp, Homo sapiens
gtgcatggtggcacatgcctgtaatcccagctactcgggaggctgaggcaggagaaccgcttgaacccaggaggcagaggttgtggtgagccgagatcatccacataaatggtgttctctggctataccaaaattaaataagaaatcaataatagaaaactcccccagcctgaccaacatggcaaaaccctgtctctactaaaaatacaaaatgtcattgcataacattgtatgcaatgtctaatgttattagacataatgttattgcacatttattagactataatatagtataaacataacttttatttattattgtttttctttttagacgaactcttgggcrtgatagtgcgcgcctgtaatctcagctattcaggaggctgaggcaggagaattgcttgaatccaggaggtggaggttgcagtgagctgagatcgcaccactgcactccagcctgggtaacagaacaagactctgtctcaaaaaaaaagaaaaaaaagaaaaaaaagagaactctcaaatatttagaaattgttaatatacttctaaataatccatgggtcagagaaaaaatcttaaagtaaatcag

SEQ ID NO: 936640 - DNA, 592 bp, Homo sapiens
gtgcatggtggcacatgcctgtaatcccagctactcgggaggctgaggcaggagaaccgcttgaacccaggaggcagaggttgtggtgagccgagatcatccacataaatggtgttctctggctataccaaaattaaataagaaatcaataatagaaaactcccccagcctgaccaacatggcaaaaccctgtctctactaaaaatacaaaatgtcattgcataacattgtatgcaatgtctaatgttattagacataatgttattgcacatttattagactataatatagtataaacataacttttatttattattgtttttctttttagacgaactcttgggcgtgatagtgcgcgcctgtaatctcagctaytcaggaggctgaggcaggagaattgcttgaatccaggaggtggaggttgcagtgagctgagatcgcaccactgcactccagcctgggtaacagaacaagactctgtctcaaaaaaaaagaaaaaaaagaaaaaaaagagaactctcaaatatttagaaattgttaatatacttctaaataatccatgggtcagagaaaaaatcttaaagtaaatcag

SEQ ID NO: 936641 - DNA, 578 bp, Homo sapiens
ctttatctttgataactttccttgctctgaaatctgctctgtctgaaattaatatagttattcccacttttttttttttttagatggagtcttgctctgtcgccaggctggagtgcagtggcatgatcttgactcaccgcaacctccgccttccrggttcaagtgattttcctgcctcggcctcccaagtagctgggactacagacgtccagccaccatgcccagctaatttttgtaattttagtagagcaaggtttcaccatgttggcctccatctcttgaccgtgtgatccacccacctcggcctcccaaagtgctgggattacaggtgtgagccactgcatctggcctattcccattttttatgattaatgctagcatagcatatctttttccatctctttacttttaatctatatgtgtctttatattctaaatgggtttcttgtggacaacatatacaggtgttcctcaacttatgatgaggttatgtcttgataaacccagaatagtttatcgtaagtcaaaaatgcatttaatacatccaacctacaaaatctcatagcttagcctacctt

SEQ ID NO: 936642 - DNA, 578 bp, Homo sapiens
ctttatctttgataactttccttgctctgaaatctgctctgtctgaaattaatatagttattcccacttttttttttttttagatggagtcttgctctgtcgccaggctggagtgcagtggcatgatcttgactcaccgcaacctccgccttccgggttcaagtgattttcctgcctcggcctcccaagtagctgggactacagacgtccagccaccatgcccagctaatttttgtaattttagtagagcaaggtttcaccatgttggcctccatctcttgaccgtgtgatccacccacctcggcctcccaaagtgctgggattacaggtgtgagccactgcatctggcctattcccaytttttatgattaatgctagcatagcatatctttttccatctctttacttttaatctatatgtgtctttatattctaaatgggtttcttgtggacaacatatacaggtgttcctcaacttatgatgaggttatgtcttgataaacccagaatagtttatcgtaagtcaaaaatgcatttaatacatccaacctacaaaatctcatagcttagcctacctt

SEQ ID NO: 936643 - DNA, 592 bp, Homo sapiens
ggagaacaatacccttcctttagtgctataaaacagggaccaaaagaaccatacgtggattttatagctcagttacagtagtctcttaaaaagatgattgcagattcggctgttcaggatagagtgttgcagttattagctttcgacaatgctaatcccgattgccaggctgctctgcgacctatcagagggaaagcacatttagttgaktatatcaaggcctgtgatggtatcggaggtaatctgcataaggctactctgctagcacaggcagtggcaggactgagagtggataaaggaaatactctatttcctggagtttgttttaactgtgggaagcatggtcatactaaaaaagaatgtagaaaaaatcagtgagtcaggccaccagataggggaaaaaagaaaactgctgagcccaaaatatgtccaaaatgtaaaaaaggaaaacattgggctaatcagttcactctaagtttgagaaagatgggaacctgatttcggaaaacaccatgagcggcccgtcccgggccccattctaaactggggcatttccagctcaggccattccctgacccctgtacaatgtctg

SEQ ID NO: 936644 - DNA, 592 bp, Homo sapiens
ggagaacaatacccttcctttagtgctataaaacagggaccaaaagaaccatacgtggattttatagctcagttacagtagtctcttaaaaagatgattgcagattcggctgttcaggatagagtgttgcagttattagctttcgacaatgctaatcccgattgccaggctgctctgcgacctatcagagggaaagcacatttagttgattatatcaaggcctgtkatggtatcggaggtaatctgcataaggctactctgctagcacaggcagtggcaggactgagagtggataaaggaaatactctatttcctggagtttgttttaactgtgggaagcatggtcatactaaaaaagaatgtagaaaaaatcagtgagtcaggccaccagataggggaaaaaagaaaactgctgagcccaaaatatgtccaaaatgtaaaaaaggaaaacattgggctaatcagttcactctaagtttgagaaagatgggaacctgatttcggaaaacaccatgagcggcccgtcccgggccccattctaaactggggcatttccagctcaggccattccctgacccctgtacaatgtctg

SEQ ID NO: 936645 - DNA, 592 bp, Homo sapiens
ggagaacaatacccttcctttagtgctataaaacagggaccaaaagaaccatacgtggattttatagctcagttacagtagtctcttaaaaagatgattgcagattcggctgttcaggatagagtgttgcagttattagctttcgacaatgctaatcccgattgccaggctgctctgcgacctatcagagggaaagcacatttagttgattatatcaaggcctgtgatggkatcggaggtaatctgcataaggctactctgctagcacaggcagtggcaggactgagagtggataaaggaaatactctatttcctggagtttgttttaactgtgggaagcatggtcatactaaaaaagaatgtagaaaaaatcagtgagtcaggccaccagataggggaaaaaagaaaactgctgagcccaaaatatgtccaaaatgtaaaaaaggaaaacattgggctaatcagttcactctaagtttgagaaagatgggaacctgatttcggaaaacaccatgagcggcccgtcccgggccccattctaaactggggcatttccagctcaggccattccctgacccctgtacaatgtctg

SEQ ID NO: 936646 - DNA, 593 bp, Homo sapiens
atataaattgtgaagatttcatggacatttgtcagttccccaagttaatacttttataatttcttatgcctgtctttactgcaatctctgaacataagttgtgaagatttcatggacatttatcacttcctcaatcaatacttttataatttcctacgcctgtccttactttaatctcttaatcccgtcatcttcgtaagctgaggatgtatgtcgcctcagaaccctgtgatgattgtgttatctgcacaaattgtttgtaaagcgtgtgtatytgaacaatatgaaatctgggaaccttgaaaagaacaggataacagtgattttcagggaacaagggagataaccataaagtctgactgcctgctaggccgggcaaaacagagtcatatttcttttctttcagaaagcgaataggagaaatatcgctgaattcttttctcagcaaggaataaccctgggaaaacgaatgcattctcagggggaggtctctaaaatggccgctctgggagtgtctgtcttatgcagttgtacataagggacgaaatacgccctggtctcctgcagcgcccccaggcttgttaggattggga

SEQ ID NO: 936647 - DNA, 561 bp, Homo sapiens
aggggatgccggatcaaggcaggtgggtgagcaccttaagaccctcctcggccctgtttcctgcccctgcagcctatcgtgaagagtgtagctggtgatatcattgacttccccaagtcccgtgccccagccaaggtgccccccaagaaggaccacacatcccaggtgatggtgccactgtacctcttcaacaccaygtttggactcctgcagaccaacggcgccctcgacatggacatcacccctgagctggtgagtgtggtgcccgggggatggggatgggggctccttgccctgctgtgccttggcattactagtgttgacctaggccctgatcagccttgctgagccctcctctctataataaaagggagttgaacaagtttagagtgtgtacactgctgttctccactcctatacttaggggagacattgctaatcgatcgtggtcctctacctggttaaacctgactgggacttctgaatccttctcaacttggcactccaggaggtcactttcaattggtcaggactggcatgtggaatgaagcccactttcca

SEQ ID NO: 936648 - DNA, 561 bp, Homo sapiens
aggggatgccggatcaaggcaggtgggtgagcaccttaagaccctcctcggccctgtttcctgcccctgcagcctatcgtgaagagtgtagctggtgatatcattgacttccccaagtcccgtgccccagccaaggtgccccccaagaaggaccacacatcccaggtgatggtgccactgtacctcttcaacaccacgtttggactcctgcagaccaacggcgccctcgacatggacatcacccctgagctggtgagtgtggtgcccgggggatggggatgggggctccttgccctgctgtgccttggcattactagtgttgacctaggccctgatcagccttgctgagccctcctctctataataaaagggagttgaacaagtttagagtgtgtacactgctgttctccactcctrtacttaggggagacattgctaatcgatcgtggtcctctacctggttaaacctgactgggacttctgaatccttctcaacttggcactccaggaggtcactttcaattggtcaggactggcatgtggaatgaagcccactttcca

SEQ ID NO: 936649 - DNA, 607 bp, Homo sapiens
gatctaagaaacttagtgttttttgttttttttttttctggaaggggaagaatatgaataagagggaaaggcaaaagagagaggaagtcgcacacaaaaaattttccattcctgttggacacctgtggagagagaggccatgtgtgtcatcaatttggtgacatataaatattcaagtcgattccaaactgtgttactcacaggagagtcacagccagagaacacccaaaaaggtgacatttggggcaaggctttgggcttttttcacctttgatcagaagcaaagctgtagagatgtatagagcattggaaaacttttaagccagtacttagatgtcagaaagtgtcacggatttcacaatgsggggaagaaaacctgaaaaataaaatcatcttcattacattcatcatgcttcttcctcaacctacatggtctcccaagcgattctaaatgtacagccaaatttaatcttgtaatacccccaaattcctattttaaagcataaaacagaagtttgatccttgtgtgtaaacactgcattcttatttgtgttctctttgagagagcatgtggcccagcaggaggcctcttctccctgcctgccca

SEQ ID NO: 936650 - DNA, 748 bp, Homo sapiens
acaatcaatgttagcatactttcattcctgaaaaagaaaccccatacctgttgggaatcactgtttacctccccccgattccttctactccccaccacccaccccagcccttcggtccccagcctggggcaaacagttaactacttcctgtctctaaaaatttgcctattctgaacattttctataaatgagatcttacagtatatggtcttttatgactggcttctcatttagcatgatattttcaaagttcatccatgatgtaacaggtatcagtaattcatytcttttcatggctgaaaattattctcttgtatgaatgtattacattttatctagtcatctaatgttggccattggagttatctccacttttggctatcataaataatgttgctatgcacatccttttacaagattttgtgtagtcatatgtttacactctccgtacttctgcctagatatggaattgctggttagatggtaactctgtttaactttttcaggagctgccaaactcttctaaagtgggtgcaccgttttatattcccatcagcagtgtatgattctaatttctccacatcctggactacactcgttattgcctgttgtagtgaattcttataattttatgttgcctcagcatccattttaaatctaagttgaaccttctcataccagaagcaggactcagtcacccctgacacagttggcagttccaccctccttcgcagttcctcagtgtggt

SEQ ID NO: 936651 - DNA, 545 bp, Homo sapiens
aataaacacagcctaacttctaaccagatgaacataaaacctcagcttgaaggcctgtgtacctgttcaccctaaaggactatttacctagtacatcatgcctggctttcaacaaaaaacattacaaggcacaaaaaaggcaaaaaaaaaaaaaaaatacagtttgaatagacagagcaagcatcagagccagactcagatatggcagatgttggatttttcagactaggaatttaaaataactgattaatatgctagggctctagggctctagagctctaaaggaaaaagaggacaacgtgcaagaaaggataggtaatgtaaacagaaagatggaaattataataaagaataaaaaagtaatgctagaattaaactctgtaacagaaataaagaatgcctttggtgggcttatcagtagattggacttggtagagaaatkatgtctagcttatttcacttagcatgttgtcttcagaattcatccatgtcaagatgtgtgtcaaaatttccttcctttttaaggcagaataatatttcattgt

SEQ ID NO: 936652 - DNA, 638 bp, Homo sapiens
ccatataagcttagagatgccagaaatgtgagtggattagatcagttttctaatccgaactcccaaaatatgaggcaaaactaaaggtgaatggagaattgggctaatccagagggtaaacatgcacacacgtgagkgcaagtgtgtgcttgcatgagatatgtaccctctgcggccctaagaaagtagtggcagagataggcttctcagggacacctgggcactgctcctgcctttacacatttgtcaggtatatgggctcatgggctcatactctttatcagagaaagattactggtttctgatataaacaacaaaagatcaggtgatatattattgaaagttcactgcctattataatctgagtaatataaaataataatggcatatggatggtctgatggcaatattagtttcttctaataggtaggaaaggaggtgtctttctccttttgtgaatttgggcctttgttgtaaatcgggagttgacatatttctggaacataagggaaaaccacatccaaccagaatctaaccttttaatccatccaagagtttacttaattcacccaattaaaatatggattctctacaatacttattcataatctctttagtccatattttctccattatgt

SEQ ID NO: 936653 - DNA, 503 bp, Homo sapiens
tagatgtcaagggtgaacaagacaaaatcccttccccacaggggctcccggtctagagaggggaggaggaaggaagatgcacagtgatttgtatcatatgctgaggaaagagagtcatttactatcgccgtttgacatcctcacccccagtgcggtccttctctttgtctctccatgctgggagtgggcagtccctgccctgctgcccttcagacacagccctcttccctcaagctgccctctgcctggatcccaccttccttgtgagctggagtrtttgcgttgaaggagtcttgactctctttccctgtcagtcactgtttggctgcaggtagtgatagaggtggcaataaagcagcagagagaaggctttggtatcagagcagggactcgcgggtgggatgggatggggatggttttctgtttgccccactgtgttctctgtgctgctctgcccagggaggctgacctctgcagactgtgtcacctgggccccctgatct

SEQ ID NO: 936654 - DNA, 503 bp, Homo sapiens
tagatgtcaagggtgaacaagacaaaatcccttccccacaggggctcccggtctagagaggggaggaggaaggaagatgcacagtgatttgtatcatatgctgaggaaagagagtcatttactatcgccgtttgacatcctcacccccagtgcggtccttctctttgtctctccatgctgggagtgggcagtccctgccctgctgcccttcagacacagccctcttccctcaagctgccctctgcctggatcccaccttccttgtgagctggagtgtttgygttgaaggagtcttgactctctttccctgtcagtcactgtttggctgcaggtagtgatagaggtggcaataaagcagcagagagaaggctttggtatcagagcagggactcgcgggtgggatgggatggggatggttttctgtttgccccactgtgttctctgtgctgctctgcccagggaggctgacctctgcagactgtgtcacctgggccccctgatct

SEQ ID NO: 936655 - DNA, 597 bp, Homo sapiens
caggagaatcctttgaacctgggaggtagaggttgcagtgagccaagatcacaccatcgcactccagtctgggctacaagagtcaaattccatctcaaaactaataatgatagtaataatgttttctacaagcaaggagttactttktactgtgaactggtgtgaagggatcccccatgtgtaagcttttggattgatgacagttatttctagatcacagaggtgggaatgcttgttgatcatcttctgtgttctttgttatattgattgattttttaaaattagcatttttataacaataaagtcataaaaataagtaactaaaataaagtaatctaaaaaggccgagcatggtggctcatgcccaaaatcccagcagtttgggaggccgaggtgggtggatcccctgaggtcaggagttcaagaccagcctagccaacatggtgaaaccccatctctactgaaaatacaaaaattaaccaggtgtggtggcagacacctgtaatcccagctactcgggaagttgaagcaggagaatcgcttgaacccaggagaaggtgcttgcagtgagctgagattttgccattgcacttcagt

SEQ ID NO: 936656 - DNA, 573 bp, Homo sapiens
actcctcaacaaaatactgtggatctgaatcctgcaacttataaaaagcgtgcatacaggctgggtgtagtggctaacgcctgtaatcccagcactttaggaagctgaggtgggaggattgtttgagcacagtagtttgagaccagcttggacaacatagtgataccctgtctctacaaaaaaatttaatttctaggtgtggyggcacatttctgtgattccagccactcaggaggtggaaggataacttgagtttggaaagtctcaggctgcggtgatctgtgatctcaccactgtgctccagcctgtgtgacaaagcgagactctgtctcagaaaaaaagaaaaaagttataccacatacaacatgaccaagtgggatttatcttagaaatgcaaggtttgtttaatatctgaaaatcaattagtatcataaaccatattaatagaagaaaggataaacttcatatcatcatctcaatataggcagcaaacattaaaaaatacaataccatttcatgataaaaacacccaacaaactaggaatagaaaactacctcctcaacttggtgtag

SEQ ID NO: 936657 - DNA, 537 bp, Homo sapiens
aggtgatatgtcattgtggttttgatgtgcattttgttgatgatttgtgatgttgagcacattttcctgtatctgttgaacattagtacatcttctttggagaaatgtttattcaggtcttttggctattttaaaataaggttacttgtttctattgctattgaattattggagttccttatatattttgcatgttaatcctttatcaaatatattatttgtataggcttatgttgttataatatctgtccagtgttagaatcagttatttctccaaaccctcctgaatgtttttaattgaagaatggtactaaacccatgatctggatgctaggtttgctttttgctactsagatgtttcttttagggcctctccggtaacagagcaaataaatatatgtgtgtgtagtaacccatgtatatagacacacctgtaactatttctttatgtaaccatctatctatattaagttaaacatgagttcttgttcatattcttcttcaattttaatccattaccacacaagtcattctagt

SEQ ID NO: 936658 - DNA, 650 bp, Homo sapiens
caggcgtgccacagatggcttccaccttgggcaccagtgtctggatgagggggtgcgtagcaatgcccaaaaatttagagacgccaccaactgcagagcccaagggctgtcacagcctttgctagaagagtcctgaggcctgagctcccagcaagtgttacagatcttgtttgttcccgcagcttccatgaacagggttgtgtcacagattgtttggtcctgctacccacaggtcagtgaatgagggcttgtggtrcccactggtttttttttctcccccactgcttggtgagcaggagggagggttacagtgttaaagctcttttcacacccgctgttccctcaggtctgggttcttgtcccacaaccaagaagaatgaagtactcagacactggagtatgaggaaggcagagaaaaatgttattgagcaacagaaaagctctcaacaatgagaaaggacctgggagggtagccctctgtgtgacagggagcctgaaagcaggtagttgcctctgtgaccgagtctgaagtttttgtgagctcagaatgggggactgcatgctgattagtccaagggtgggcctagtaaaagcaccatttgattggctaacagccatcaaggaagttttcactctggtcgtgaactcta

SEQ ID NO: 936659 - DNA, 630 bp, Homo sapiens
agcaagatgtggctatggaagaatggctggagaaatataacgtaactggctttgaaaatggagggaggggaccatgaccaaggaatgtaagtgcatgtaagtgccctctagaaatctgaaaagacaaggaagtggattcttccccagaagctccagaaaaaacaaaaaatgtagcactgccgacacctctattttaattcaggaagaattgtgctggactgctaactctagaagtgtaacatcataaatttgtggggtttttaagtcactaaaagctwacaacagcaaagaaaaactatatacaaagaattcccacaataaaactccataaccaaatgccatcgcttgtgaattgtaccaaacatttagagaagaataaataccattgctacccaaagtcttccaaaaatagaagagcagggtcaggagtgatgattcacatctgtaatcccagaatgttgggagttcaaggcaagagttcaagaccagcctggtcaacatagtgaaaccccatctctaccccaaaaaaaaaaaagaaacaaaattagccaagcatggtggtacatgtttgtagttctagctaattgggaggctgaggtggaaggatcacttgagttggagtctatagtg

SEQ ID NO: 936660 - DNA, 630 bp, Homo sapiens
agcaagatgtggctatggaagaatggctggagaaatataacgtaactggctttgaaaatggagggaggggaccatgaccaaggaatgtaagtgcatgtaagtgccctctagaaatctgaaaagacaaggaagtggattcttccccagaagctccagaaaaaacaaaaaatgtagcactgccgacacctctattttaattcaggaagaattgtgctggactgctaactctagaagtgtaacatcataaatttgtggggtttttaagtcactaaaagctaacaacagcaaagaaaaactatatacaaagaattcccacaataaaactccataaccaaatgccatygcttgtgaattgtaccaaacatttagagaagaataaataccattgctacccaaagtcttccaaaaatagaagagcagggtcaggagtgatgattcacatctgtaatcccagaatgttgggagttcaaggcaagagttcaagaccagcctggtcaacatagtgaaaccccatctctaccccaaaaaaaaaaaagaaacaaaattagccaagcatggtggtacatgtttgtagttctagctaattgggaggctgaggtggaaggatcacttgagttggagtctatagtg

SEQ ID NO: 936661 - DNA, 614 bp, Homo sapiens
atgttggattcctacttatacacacctgatattttagctcattagttaggaggaaaaatgacatacatcaatggctttttcctattgatatttaaaagtggatgtcggggtcattagaataagaacagatatgggtgactaagttaagaagacccaaaggtagtacagatgttgcttctattgttcctatgaaagaaattcaactgtgccataaaggcctctgagattcaggtttaccacatacaatggtcataaggtgagcagggtatgcaagcttatgtctctctacttgcaggatgaagcatatttttcacacacaaatgatagctgatggcccagccttgctcmtaagatcctacctacatcttccaaaaggagggccccttttaattatttgctcaaatgtgaccctcaagctaatggtgtccacaattccattactaaaaatgtatcttccttcctccaagcagcaaaaccgtcttaactggcaaattttagttttctttacaaccgtggaaattgaatgactatttgtttcccatctctctgcaaagcctggaaagagaaaaggaaggcaggagctcaaaacattgtggattgttttggcagcccaa

SEQ ID NO: 936662 - DNA, 577 bp, Homo sapiens
attttagctaatttcttcaagttgaataactaaattgtactatcagtttagttggggaaaatcaacatggatttttgtggatattctttttaataattttattgatcttcatttttggagtaagaaaaaggtatttaatcatattattttctattgttcatcaaaatgtagtctatgataaaagggtatccttaaagccrgtattgaacaaattagtaaccaagctatattagtcagggttctctagagggacagaactaataggatagatgtatatatgaaggggagattattaagaagcactgactcacacgatcacaagatgaagttccacaataggtcatctgcaagctaaggagcaaggaagccagtctgagtcacaaaacctaaaaagtagggaagccaaaaatgcagccttcagtctctggttaatgtccaagagtccaaaagttgaagaacctggaatccaatgttcaagggcaggaagcatgcagcacatgagaaagatgtaggctggaggacacagccagtgtagtccttccatgctcctttgcctgctttaatcctagccatgttg

SEQ ID NO: 936663 - DNA, 682 bp, Homo sapiens
taaaatacttctgctacataatgaagcacaatgactgtctcaaggaaaagcacttgattgcattttaagctgaactagtcaattttccaagaaattcaatatttacttaaaagaatgacaggaaaaaaacacaggaactcaaacttggatatttgatggaaattttcaaaaaatattcaaagtgagcctgtcacttcaaggaaaacaattgacagcatttgttgctaatgataaaatttgagcattcaagttaaatttagaatttttaaaaacctatatcttacctrcatgagcttatagtttttcatacttaaagactttcctgatgacattgatggtgatatttatacattatattaataaatttgatctttaaattattgtataatgaagcatgctaacatttttaagatctgcataactcggtgaatcaacattttcccaatgattaatacatgatgtcacataattactcaaagtgcaagaaagacaaatgggttttaacataattatgaaatgttcactaagaatttagattccacactgcaactaatctctattaaaatattatttgttgaatgttggtgcaatatcaaagaattgccacaattttctgtattggttttaaaatactcctatttccaactgtgcagctgatgttattcctgacaggaatatctcc

SEQ ID NO: 936664 - DNA, 682 bp, Homo sapiens
taaaatacttctgctacataatgaagcacaatgactgtctcaaggaaaagcacttgattgcattttaagctgaactagtcaattttccaagaaattcaatatttacttaaaagaatgacaggaaaaaaacacaggaactcaaacttggatatttgatggaaattttcaaaaaatattcaaagtgagcctgtcacttcaaggaaaacaattgacagcatttgttgctaatgataaaatttgagcattcaagttaaatttagaatttttaaaaacctatatcttacctacatgagcttatagtttttcatacttaaagactttcctgatgacattgatggtgatatttatacattatattaataaatttgatctttaaattattgtataatgaagcatgctaacatttttaagatctgcataactcggtgaatcaacattttcccaatgattaatacatgatgtcacataattactcaaagtgcaagaaagacaaatgggttttaacataattatgaaatgttcactaagaatttagattccacacygcaactaatctctattaaaatattatttgttgaatgttggtgcaatatcaaagaattgccacaattttctgtattggttttaaaatactcctatttccaactgtgcagctgatgttattcctgacaggaatatctcc

SEQ ID NO: 936665 - DNA, 682 bp, Homo sapiens
taaaatacttctgctacataatgaagcacaatgactgtctcaaggaaaagcacttgattgcattttaagctgaactagtcaattttccaagaaattcaatatttacttaaaagaatgacaggaaaaaaacacaggaactcaaacttggatatttgatggaaattttcaaaaaatattcaaagtgagcctgtcacttcaaggaaaacaattgacagcatttgttgctaatgataaaatttgagcattcaagttaaatttagaatttttaaaaacctatatcttacctacatgagcttatagtttttcatacttaaagactttcctgatgacattgatggtgatatttatacattatattaataaatttgatctttaaattattgtataatgaagcatgctaacatttttaagatctgcataactcggtgaatcaacattttcccaatgattaatacatgatgtcacataattactcaaagtgcaagaaagacaaatgggttttaacataattatgaaatgttcactaagaatttagattccacactkcaactaatctctattaaaatattatttgttgaatgttggtgcaatatcaaagaattgccacaattttctgtattggttttaaaatactcctatttccaactgtgcagctgatgttattcctgacaggaatatctcc

SEQ ID NO: 936666 - DNA, 454 bp, Homo sapiens
tatggaaccaaaatagagcccgtacagccaagtcaatcctaagcaaaaagaacaaggcaggaagcatcacgctactgaacctcaaactatattacaaggctacagtaaccaaaacagcatgatgctggtataaaaacagatgggtagaccaatggaacagaatagagaattcagaaataagaccacacatctacaaccatctgatcttcaacaaacctgacaaaaacaagcaagggggaaaggatctcctattcaataaatggtgctgggaaaactggccagctatatgcrgaaaactgaaactggaccccttccttacaccttatacaaaaattaactcaagagggattaaagacttaaatgtaaaacacaaagttacaaaaaaccctagaagaaaatctaggcaatgccattcaggtcatgggcatgcgcaaagatttcatgaagaaatcgc

SEQ ID NO: 936667 - DNA, 625 bp, Homo sapiens
gtagtcccagctactcaggaggctgaggcaggagaatcgcttgaacctcggaggcaggggttgcagtgagccaagatcactgcactccaggctgggcgacagtgagactctgactcaaaaaaaaaaaaaaaaaaaaagaaagaaaaaaaaaaaagaaagaaatctaaagctgatttctgtccctgctaatccagcaggactctattaatcaaaaatgggattgcacaccayatggagtactcagaggcatgcatagaggcaagaaaagttcaggataaaaataatcttcccattaatgaaatttcaattttatttagatatctaaggaaatcaactgataaataatttcattagaaagtagaagcaaatacatatgagttagaaaaaaataaaacaaaaaacccacttcaaacttttaattaagctactttgagctatgtcttaacatttttctttgcctagattgtctaggggatatgttttcgcttttctctattgatagtttatatcactaaaaaactgggcccaccaaagtgggcttacggtttaagttgcatagccaataaatgttgggtttttgtaaaatcagtttatattccctgtccaggcccttccatagtgtcta

SEQ ID NO: 936668 - DNA, 754 bp, Homo sapiens
ctctcactgccaactctgcactgtagtcatttttccccctctatgcttgtttctttatcctctttcattttatttttttaatttcttttgagacagagttctgctcttgtcgcccaggctggagtgcaatggcgcaatctcggcccactgcaacctccacatcctgagttcaagtgattctcctgcctcagcctcccgagtagctgggattacgggtgcccgccaccatgcccagctaatttttgttatctttaatagagacggggtttcaccatgttggccaagctggtctcaaactcccgacctcaggtgatccaccggcatcagcctctcaaagtgttgagattacaggcatgagccactgcgcccggcctttatcctctttcatttgctgcttcttcccagcttgaacatagcatgacatagcttatatgtagaagttaaacagggtctgagaagactggcatgaagaaaaatgtaggaccttgagtcctcgaccttcttggctacatgcaaataagcaagggtgctgggtggctgagttccaaataagagtttagggtaggagaggtgttattggatattatggaacayattatgggaagaactatatccaacgctataaatacaccctgctgtccactttggggccaacttgcatgggagcaaaatgtgtagcaagctttggaagacaggtcccaatgactgtaggtctccttcttacatgctgcaggaatacagggcttcctgtccc

SEQ ID NO: 936669 - DNA, 576 bp, Homo sapiens
tacagctgatcatgtgccctatcatcctagtgaaagaagacatatacaaataaattcattcatttgttcaattagtattcattaaatacctaccaagtactaagtagtagtttttttcttgtttgtttgtttttgaggcagggtcttgctctgtcacccaggcggaagtrcagtggcacgatcatggctcactgcagtctcgacctcctgggctcaggcgatcctcccacctcagcctcctgagtagcagggaacacaggtgcacaccaccatgctcagctaaaatggtttttttgtactttttgtagagacagggtcttaccatattgcttaggctggtcttgaattcctgaggtcaagcaatctgccagcttcagcctccctaaattctgggattactggcatgaggcaccgctcttggccgtgagtggttaataagacaaaagtagtctgtgccctcagggacactgagcacaattacaacagtatatgatgaatgctacagtagaagttagggtttctttgagcattgccagggccttgatcttacttagagtaaagaaagatatctcgagt

SEQ ID NO: 936670 - DNA, 576 bp, Homo sapiens
tacagctgatcatgtgccctatcatcctagtgaaagaagacatatacaaataaattcattcatttgttcaattagtattcattaaatacctaccaagtactaagtagtagtttttttcttgtttgtttgtttttgaggcagggtcttgctctgtcacccaggcggaagtgcagtggcacgatyatggctcactgcagtctcgacctcctgggctcaggcgatcctcccacctcagcctcctgagtagcagggaacacaggtgcacaccaccatgctcagctaaaatggtttttttgtactttttgtagagacagggtcttaccatattgcttaggctggtcttgaattcctgaggtcaagcaatctgccagcttcagcctccctaaattctgggattactggcatgaggcaccgctcttggccgtgagtggttaataagacaaaagtagtctgtgccctcagggacactgagcacaattacaacagtatatgatgaatgctacagtagaagttagggtttctttgagcattgccagggccttgatcttacttagagtaaagaaagatatctcgagt

SEQ ID NO: 936671 - DNA, 777 bp, Homo sapiens
gaacataaagcatctcctcagtctcacctgctctcttctcttttgatcacctgttgagaaagtgtttctcctttagagtatagctccgcgggagcatagactgtatcatcagtgcctggcatatagcaggagtttaattaatattgarctgaatctcaaattgttccatttctaagaattatgtcaccctgttttcaatttttgtacccacaatattgacggggggaatccctcattcttttatcctgagtgtgtttatcatcagggttcccacatcgtaatccttgactgacttttctttggttcttgtcctaagaacaaattgtcctgtggttcagggcacagccgactctcccaccaagatttgggctgtctcttgcctctcatttcttccctgtcagccttctcttacccttagtgaagtcaaacactaatgagtagaagtaggtaaaattccaaggctcccctctttcttctttcttttgaattaatttctcctcactttgaacttcttcattttttcctcatctcatttactctgtacatatttgtcaccacattcctgttggaacacactctgaggagacagggccgtggccaagtcacttctcctgtgagaatgtgctgactcctcggctgactcatctctaaggccactctccctctccatccactttttttttctccatttattcctccacctaattgttccagtttcattgcttctgggtgttctataaggccattttctcataccagcagaaaactttaggagag

SEQ ID NO: 936672 - DNA, 633 bp, Homo sapiens
gagtggatctgtgtcccttctctgactctcctgtgtgacttgggcaaggccagccacttaacctcaccaagccaggtcccatcatctatgaaatgaggacactgacagacctgcctcattgggagggttctctgttttgttttttgtttgtttatttgtttgttttgacagggagtcttgctgtcgcctaggctggagtgcaatggcacgatctcggctcactacaacctcctcctccccggttcaagcgattctcctgtctcagcctcctgagtwgctaggattacagacacgtgctaccacgtctggctaatttttgtatttttagtagagacggagtttcaccatgttggccaggctgctctcaaactcctgacctcaagtgatctgcccgcctcggcctcccaaagtgctgggattatgggcgtgagcctgcgctcccggctggttctctgaattaatcggtgcagagcagtgattcccaaccaggagtgactctgcccccgaggggacatttgacagcatctgtagacatttggctgtcacatctagaggggaggcgtgctgcgggcgcctagtgggtagaggtcagggttgctgccaaacatcctacgatgcacaggacatccccca

SEQ ID NO: 936673 - DNA, 756 bp, Homo sapiens
ggaggagaggtcttgttctagattgatttttgtggagctgaggacccaggcaggagcaaggttgttgcaatttgaggatcgggaagctggagacttagggaggagacgtcttgttctagtttcagggtcgtggagctgcagactgaggcaggagcattattgttatagttggagggtcagaaagctggcgacccagggaggagaggtcttgttgtggtctgagggtcgtggagctgctgacccagggaggagcaattttgttgtagttcgagggtctggaagctggcgacccagggaggagaggtcttgttctagattgatttttgtggagctgaagacccaggcaggagcaaagttgttgcaattcgaggatctggaagctgcagacttagggaggagacgtgttgttctagtttcagggtcatggagctgcagactgaggcaggagcattgttgttatagttcgagggtcagaaagctggcgacccagggaggagaggtcttgttgtggtctgagggtcgtggagctgctgacgcagggaggagcaattttgttgtagttcsagggtcaggaagctggcgacccagggaggagaggtcttcttctggtgtgagggtcgtggagctgcagacccagggaggagcaattttgttgtagtttgagggtctggaagctggcgaccccgggagaggtcttgtactagtctgagggtcgtggagctgcagacccagggaggggcaatgttgttgtaattc

SEQ ID NO: 936674 - DNA, 519 bp, Homo sapiens
tgtaattttagtagagacggggtctttccatgttgcctaggctggtcttgaactcctggcctcaagcaatctgcctgcctcggcctcccaaagtgttgggattacaggcgtgagccaatgtgcccagccttagagttttctattgcctaatattaatcaaactatactctctcttctttgtttgcatttgcctagtcttttttccattcttttgcgttcaaccattctacttatgttttaagtttatccttcaaatygtgtaaatctacattgtaaaaatccagtccagaaattattacctattaattgacatttatgggcactaatgacatatttggattcatttctacaattttattacaagttatctactctcagtcctcattattcagattctgtacttgccaatttgcctacttgctgaaatttatttattacccaaaaatcaatactcatgatgcttttgtggtcattcagggatatgtgcagaatggcaaaaaatttgagtcccccaacgta

SEQ ID NO: 936675 - DNA, 706 bp, Homo sapiens
gttactaccaatgttcacttagggccccagggactccacaatcagcaggtggcaaatccagccaggcttgtgtccctcacttcagagcaatgagttccccaagcctgggaccagcagacatgctgtctgggagctggggcctagagttggggaccttaggaatctacctggtgctctattctactgtggctgagctggcaccaaagcccaagacaaagtccttcccacctttctcttttctttcctcaagcagaggagtcttttcttatggccaccattaccacaggcccatggtaaatagtgtctggctattgctgatggtcactcaagacccaagggctctccagtcagtgtgtggtgaatgctgtcagtcctgagactctcctttcagggcagtgggmccccctctggcccagagcaggtccagaaattctgcctaagggcaaaggcctagaatcagcaggcccaggagcctacttggttctctactccactgtggtggagctgcaagaaaaactcccgtttgctcttgcctccttttctcaagctgaaataggctttcctcatagccaccacagttggcaatatgctgatttacacctgaagccagtatggctctgagtttcacccaaggcctgtggcgagtactgcctggctaccactgccaattattcagggttcaagggctctttagtcagcaggtcat

SEQ ID NO: 936676 - DNA, 612 bp, Homo sapiens
aaatgaagacatttttagaaaaatacaagctgccaagactaaatcataaagaaatagaaaaatgaacagatcaaaaatgattaaagaaattgaaaccaaaaacctcacaacaacaaatccagaaatatgtggtttcattgataaattctaccaaatctttaaagaagaattaacttcagttcttcacaaaatcttcccaaaaatcgaagaggaggaaacacttccaaacttattttatgagaccaggattactctaatattaaagtcagacaaaaacactataagaaaagaaaactacaggttaatatccttgatgagcagtaatgcaaaaatcctcaamaaaatactagcaaactaaattcaatagtacagtaaaaaagtcatatcccatgatcaagtgatacctctaggattcaaggatggttcaatatacacaaattaataaatgtgttacaccatattaatagaaagaaaaataaaaatcacatgattatctccatagacacagaaaaagcactggacaaaattcaacaacctttcattataaacacacttaacaaactaggtatagcaagaatgtacttcaacatagtaaaggccatttatgacaaa

SEQ ID NO: 936677 - DNA, 612 bp, Homo sapiens
aaatgaagacatttttagaaaaatacaagctgccaagactaaatcataaagaaatagaaaaatgaacagatcaaaaatgattaaagaaattgaaaccaaaaacctcacaacaacaaatccagaaatatgtggtttcattgataaattctaccaaatctttaaagaagaattaacttcagttcttcacaaaatcttcccaaaaatcgaagaggaggaaacacttccaaacttattttatgagaccaggattactctaatattaaagtcagacaaaaacactataagaaaagaaaactacaggttaatatccttgatgagcagtaatgcaaaaatcctcaacaaaatactagcaaactaaattcaatagtacagtaaaaaagtcatatmccatgatcaagtgatacctctaggattcaaggatggttcaatatacacaaattaataaatgtgttacaccatattaatagaaagaaaaataaaaatcacatgattatctccatagacacagaaaaagcactggacaaaattcaacaacctttcattataaacacacttaacaaactaggtatagcaagaatgtacttcaacatagtaaaggccatttatgacaaa

SEQ ID NO: 936678 - DNA, 700 bp, Homo sapiens
tatcctaagtaaattaattcagaaacagaaaaatgaaatatcatatgttctcacttataagtgggagctaaatcttgggtacatacggacataaagatgggaaccatagacactggggactccaaaagaagagggggagggagagagcaagggctggaaaacttcctattgggtactatgtttgctatctggctgatgggatcaatagaagcctaaatctcagcatcacacaayatacccttgtaacaaacctgcacatgtacctcctgaatgtaaaatagaaatggaaattgggcaggtgtgatggctcatgcctgtaatcccagcattttgggaggccaaggtgggtggatcacctgaggcggggagttcgagaccagcctggccaacatggtgaaaccccatctctactaaaaatacaaaaattagccaggtgtggtggcaggtgcctgtagtcccagctatttgggaggctgaggtggaagaattgcttgaacctggaggcagaggttgcagtaagccaagattgcgccactgtactccatcctgggcgacagagtgagactctgtctcaaaaaagaaaaaaaaggaaattaaaaaaaattctctccccttgctatccagatactacttatttatgaggccctgagaagctgcctaaatgttaccctggattattcaccaaaggtctctgcctacc

SEQ ID NO: 936679 - DNA, 700 bp, Homo sapiens
tatcctaagtaaattaattcagaaacagaaaaatgaaatatcatatgttctcacttataagtgggagctaaatcttgggtacatacggacataaagatgggaaccatagacactggggactccaaaagaagagggggagggagagagcaagggctggaaaacttcctattgggtactatgtttgctatctggctgatgggatcaatagaagcctaaatctcagcatcacacaatatacccttgtaacaaacctgcacatgtacctcctgaatgtaaaatagaaatggaaattgggcaggtgtgatggctcatgcctgtaatcccagcattttgggaggccaaggtgggtggatcmcctgaggcggggagttcgagaccagcctggccaacatggtgaaaccccatctctactaaaaatacaaaaattagccaggtgtggtggcaggtgcctgtagtcccagctatttgggaggctgaggtggaagaattgcttgaacctggaggcagaggttgcagtaagccaagattgcgccactgtactccatcctgggcgacagagtgagactctgtctcaaaaaagaaaaaaaaggaaattaaaaaaaattctctccccttgctatccagatactacttatttatgaggccctgagaagctgcctaaatgttaccctggattattcaccaaaggtctctgcctacc

SEQ ID NO: 936680 - DNA, 601 bp, Homo sapiens
tgttgacacttgtgtatgcttcacaaagttcttgtgctgggtttttcagctccatccggtcatttatgttcttctctagactggttattctagttagcactcctctaatcttttttcaaggttcttagcttcctatcattgggttagaacatgctcctttagcttggaggagtttgttattacccaccttctgaagcctatttctgtcaattcatcaaactcattctccatccagttttgttcccttgctggtaaggagttgtgatccttgggaggagaagaggcattctggtttttggaattttcagcctttttgtgctggtttttcctcatctttgtggawttatctacctttggtctttgatgttggtgaccttcacatggagtttttgtgtgggcgtcctttttgttggtgttaatgctattcctttttgtttgttagttttccttctaacagtcaggcctctctgctgcaggtctgctggagtttgctggaggtccactccagaccctgtttgcctgggtatcaccagcagaggctgcagaacagcaaagactacagcctgttccttcctctggaagcttcgtcccagaggggcac

SEQ ID NO: 936681 - DNA, 815 bp, Homo sapiens
tgcctaaagtcacagagcaactggccttgaacccaggtctcctgattttaaagcctgtgcgcccttctgcctcttcagcttagggtggttggcacattgtcccccaagctggaggagaaccagaaccagaaccagctttttttcaacatccccttttttttttcaagacagagtctcactctgtcgcccaggctggagtgcaatggcaccatctccgctcactgcaacctctgccttccaggttcaagtgattctcctgcctcaatcttcccagtagctgggattacaggtgcctgccaccatgcccagcttaattttgtatttttagtagagatggggttgcaccatgttggccaggctggactcaaactcctggcctcaagtgatccacccgcctyggcctcccaaagtgctgggattccaggcatgagccaccatgcctggcctcagcatcccatttcctattgcaactgtcacaaattaccacaaactgggtggcttaagacagcccaattatattatcttacaggtctggaggtcagaggttggaaatgggtctggctgggctaatatcgagtattggcaaggctgtgctcctttctgcaggctccagggagctcatttcctggcctccagcctttggaggccacctgcattccttgattcatggccccttcctccatcttcaaagccagcagtggccagtggagtcattctcatgccgcagccctctgccgctccatctcctgctttctttttccacaaataaggaccctgttgattacactgggcccacccagatcatccaagataat

SEQ ID NO: 936682 - DNA, 636 bp, Homo sapiens
ctttgagaagagggggcgtctgggttttcttttggggctgatggaaaggttctaaagttagatagcggcgatggttgcacaatttggggaatgtactaaaaaccacagaatttcccacttttgaaagatgaattttatgtatgtaaattacatttcaataaggctattttaaaaagaaaatatataaaatcaagaagctactctacataattgtttttttctttcgaaaaagggggagggtggtttagacacaaagactctggattcgaatcctgactctcctgacttgtagccgtgggattctggggacctactcagcctccctgaaacccaattgttccatctgtaaagtggggatgttaaaaatgtcctttcctcgcagggctgctgtgaggacgagtgtgatgctgtttgtaggagcccgacacaagggaagtgctcgctgagctctgcagaatgagatgaatggatggtttgtaggakgctggaaaagctccactcacaggtgcttaggtggaaaaatgggctggaaatggggtgaaccaacaactttcagatgacaggactagggaaccctgtggtgacagcgtagtctcctcagacccttgcatgatcacttgccctagagctgtagca

SEQ ID NO: 936683 - DNA, 602 bp, Homo sapiens
tgttgctgcctgattgttcctctggaagcttcgtctcagaggggtacctggccgtgtgaggtgtcagtctgcccctactggggggtgcctcccagttaggctacttgggggtcagggacccacttgaggaggcagtctgtcygttctgagatctgaaactctgtgctgggagaaccactactctcttcaaagctgtcagacagggacatttaagtctgcagaggtttctgctgccttttgtttggctatgccctgcccccagaggtggagtctacagaggcaggcaggcctccttgagctgtggtgggatccacccagttcgagcttcctggttgctttgtttacctactcaagcctcagcgatggcaggcgcccctcccccagactcactggcacattgcagttcgatctcagactgctgtgctagcaatgagtgaggctctctgggcgtgggaccctccgagccaggcgcaggatataatttcctggtgtgccatttgctaagaccattggaaaagcgcagtattagggttggagtgacccgattttccaggtgccttctgtcacagctttgcttggctaggaaagggaattccctgacc

SEQ ID NO: 936684 - DNA, 645 bp, Homo sapiens
atgtggagcgtgtggttctgtggacagtcagagactgtggcctgggggcagcgtctttcaactctcacctctgcagctcagggacctcgggagacctcaccaaacctgcagggcctccgtgtccctaagtgtgctgtgtaaatgccccatctcatgggggagagacagccacggaggccttcctctgaccatagctgatggactggcggttgctcaggtccggctccgagaatgttcctgtgtctgagcctggaagaggctcgggtctggctccrggcgtggttcccttcccgtgtctgagcctggaagaggctcgggtccggctccgagcgtggttcccttcccgtgtctgagtctggaagaggctcgggtccggctccgagcgtggttcccttcctgtgtctgagcctggaagaggctcgggtccggctccgagcgtggttcccttcccgtgtctgagcctggaagaggctcgggtccggctctgggcgtggttcccttcccgtgtctgagcctggaagaggctcgggtccggctctgggcgtggttcccgtgtctgagcctggaagaggctcgggtccgggtccagctccgagcgtggttcccgtgtttgaacctggaagaggctccaccaggcgtattgtg

SEQ ID NO: 936685 - DNA, 566 bp, Homo sapiens
ctgctggtctgtcttggggtctgccttctgctctgtcatgtcccccgctgagcctcagtttccccaaatataaatgtaattgaggtttttagtaccttccttactggtagctgggaggaccaagtgagaaaacgcctctgaaataacctaatcaagtagacartgctcgccagatgagctcagaggctgcagtggagaccacgttcctgcacccgacagacactccaggcccgccccaaggagcccgtccgatggaggaggcacgcacatgtgttacaggaccagcagatgtgtatgcccacagcgctgtaacacacccctgacgtggagacagcagggtttgcagcagagaaagggcttattgatcacagggcagtgagtgagggggtgggagggagccgcaaatccctgtccctgaagagttccgggctggggtttttaaggggatcatggaaggtgagaggctggagaactgggttggctgattggccagggtaagggactgaaatcatcaaggtgtggggacttgatgattcttcggtagctcaggtcctccagggtcctac

SEQ ID NO: 936686 - DNA, 620 bp, Homo sapiens
tgatgggaggccggccccaggcttggggtgtgggtggtttcaattggaaaacttttataataaaaaattggaagaaagaatgtaattccctctacaaaaatatgtcctcgtgatgccacgtacccacctatacccacctgaccccaggcgcctccttccacagccagccactgcaaaggaggccagggaatgcgtcttcctggtgcccacgaaggagacacagagctggagggcatggggacccaaggttccaggcttcggaagggaaagcgtccacagcgaccccacagtaakgacagcctctgatggcagcccccactggccaaactacatccccctgggcagagtgcaccgggcctggcttccctccatgctggttccaactcacagccggggtgaggccagggcgaggccaggtccccctcacggggaaggctccctgggtgcttccctggtcagggctgtgcattctggtcaccagtccctccctgaccccagtgactctggctgggcctccacccctgcccagacccaccccaccacagaagaccctgatctaccattcactcttttttaaatattttattttttcagagacagggtctcactgtgtttcccag

SEQ ID NO: 936687 - DNA, 821 bp, Homo sapiens
aagccatggctacggacctgggcgtcccctcttgggggcctgggaaaggccccctcccacctgcaggcttggaagtgcctgctcccactacctggcctctccctgctccctgcacctactctgatcttggagcaaagttgaggtcgagcccaggagctgttgcaacctggytgggtgtgtgcacaattggggcagcactgacgctccagccccctgctgccttggctgcctctggactttgggcactggtaagcatgggagggagcctgagtgggggctaagggcggctctgcatgggcctttaggtgtccctcagcatgaatagcctgggtgacagcaggaggcagacaggctcctgggtggaaaggagtgggtccctagtgaagctctaccttcgagctggggaaggcctgaagcctgacggccaggctgccggccccacagaccagagtgggaacttacggtactttttccaggcccacccatggccacccacggaccaatcagtaggcacttcttcctctctgaagtccataaaaaccccagactcagacagactcaaggagatgacaggacaacctgcctgcagagaggagctccccactccagggtctcctctctgttgagaactgaacactcatcgggacgccctgcctgtggagaggagctacccaatgcaggtctcctctgagctgttctgtcactcaataaagctcctctttgccttgctaactgtccacttttccctgtacctcattcttcctggatgcaggacaataactcaggactcactgaatggtggggctgaaagagctgtaaca

SEQ ID NO: 936688 - DNA, 743 bp, Homo sapiens
gaaatgtcactacttacaagttatgcgtaaagctaaaggaagctaacaaggaaagatgaagccctccagggctagcagcggggggagcctgaagggtaaagggggcgaagtgaaagagaaagtatctggaggagagagccattcatcaggggctatggccttagatacaggggcagtggagagacacagccaagcaagggcccattacagtagaamcaggaggataaataaatatcttgaccttgtcccacccatctctctctctctctctctctctctttgtttttgagatggagtctcactctgtcacccaggctggagcacagtggctagatctcaactcactgcaacctcaaccctgctggtttcaagcaactctcctgcctcagcctcctgagtagctgggattataggtgcgcaccaccacgcctagctaattttttgtatttttagtagagatagaatttcaccatgttggccaggctggtctcaaactccggacctcaggtgatccacccaccttggcttcccacagtgctgggattacaggggtgacccaccacgcctggccccaccctcctgtctcttgctggtgcctcccactggcagaacccaactgaagccagagggcaagggtgcccagtaatgcggtccacaaggtcagcttcctggggtacagagcagtggggaggaggatggggtggctgtggaggggcaaatggagatgcccagcataatgaatt

SEQ ID NO: 936689 - DNA, 560 bp, Homo sapiens
acaacttcagcaaattctcaggatacaaaatcaacatacaaaaactactagcatttctatacccacaaattcaagctgaaagccacatcaggaatgcaatcccatacacaatagcctcaaaaaagaataaaatacctaggtatacaaataaccaagaaggtgcaagatccctacaataagaactacaaaacactgctcaaagaaatcagagaygacacatacaaatggaaaaaacattccgtgctcattgatagaaagaatcaacattattaaaatggccatgctgccccaagccatctatagaatcaatgctacttctatcaaattaccaatgacattcctcacagaactagacaaatctattttaaaattcatatggaaccaaaaagagcctgaatagccaaggcaatcctaggcaaaaaaacacaaagctgaaggaatcacactaccactacccaacttcaaactttactatgggactactgtaaacaaagtagcatggtactgctacaaaaaaagacacatagactaaaggaactgaatagagagcccagaaataa

SEQ ID NO: 936690 - DNA, 558 bp, Homo sapiens
aaaagaagtgctggcatcacccctcccctaagcccaggctgcagagctcatggctccaaaagagaacccttccttctgcttaaggagaggagggataagagtgaagaggactttgtcttacatgtaggataccagctcagccatagcagaatagggcactggtcagagtcctaaagcccttgttccaggccctggttcctagatgacatttttagrtataccctggttcagaagggaaacagtttctccgaaaaaattaagccagtcctgtcagcatttatcacctgctaacgtgggacctgaataaacagccacaacacccaggtacattaagggctttggatgagcctcttgagacttcctggtttcaggtaccaggatgccaacaggagggtagagcaccaaacaggcttttggggtccccaattccagcacttgacttttgtatggcatttctgaacctaccctgggccagaagggagcccattgccccaaagggtgagtcctagtcctggaagcattcacaacaagctgaattcagagaccttgagacaaagg

SEQ ID NO: 936691 - DNA, 612 bp, Homo sapiens
ggcggaagttgcagtgagctgagatcctgccaccactgcactccagcctgggtgacagagtgagattctgtctcaaaaaaaaaaaaaaaaaaaaaaaagaagaagagacaaaaaagaaaaaagaaatagtaagtagcaagatggatgaatagatcgaaacttagaggagagttccgggaattttcagcatatagatagtaattaaaataaaaggtcatagtactacttaagtagaaaagttgtagaaaaaagaaaaagtgtctagaaaagatcacagaggaataaaatgatgctttgaaggaataccttgcacagagcagaaactcaatatattcattctamttcaaattgaaatctatctatatgtaattatgggattcacatttgattagtacaatactgtaatctatgacatactattagtaggatatattttttttccatgttgtagttacatcctaaatcattttgcacacctcctcatgggtcacgctctgtacttcacctttagggatctgctgggactggagtgtatttccaggtttagaagcaaacatgggtggtggatgtaggtcctgaggaaaatcagcagtgccttataaggtaagtacc

SEQ ID NO: 936692 - DNA, 674 bp, Homo sapiens
tcattaaatataataaatctcttcctcttaccaaagaaaccagaatgaaaaagtaacatatatttagaagcaagaacacttctcaccatattaactgaacaaaatacagcaacagcctagaaattaaggtcaggttcatatttcacctgggaggatataggtaccacagaagcctcaagggtaataccgagkcataccatcaagattcagttaaatttaatctcacaaataatcactccagagaaaatattatcatttgctcattctaggtggcttgaacatttgttgtattagtttgtgcattttttgtctttaatgtgttttttagttgtcataaaaaaacacataacaccaaaatttactatcttagtcatttttaaagattcagtttagtggtgttaagtatattaacattgttttgcaacagatttccagaacattttcatcctgaaaaactgaaactctacactcactgaacaactatccatttccccacttttcccagtctctggcaaccaccattctactttctatataactctctgttttttaaatcataatattacattgtaacaacacccaggccccttcaaaagaaactatgcacgtaagcatctgaattgctggtttagtttgtttttgtttaaacacaatttcctaaaccaaaatgtgta

SEQ ID NO: 936693 - DNA, 674 bp, Homo sapiens
tcattaaatataataaatctcttcctcttaccaaagaaaccagaatgaaaaagtaacatatatttagaagcaagaacacttctcaccatattaactgaacaaaatacagcaacagcctagaaattaaggtcaggttcatatttcacctgggaggatataggtaccacagaagcctcaagggtaataccgagtcataccatcaagattcagttaaatttaatctcacaaataatcactccagagaaaakattatcatttgctcattctaggtggcttgaacatttgttgtattagtttgtgcattttttgtctttaatgtgttttttagttgtcataaaaaaacacataacaccaaaatttactatcttagtcatttttaaagattcagtttagtggtgttaagtatattaacattgttttgcaacagatttccagaacattttcatcctgaaaaactgaaactctacactcactgaacaactatccatttccccacttttcccagtctctggcaaccaccattctactttctatataactctctgttttttaaatcataatattacattgtaacaacacccaggccccttcaaaagaaactatgcacgtaagcatctgaattgctggtttagtttgtttttgtttaaacacaatttcctaaaccaaaatgtgta

SEQ ID NO: 936694 - DNA, 672 bp, Homo sapiens
cgtcgtcggtaatggaaggcagagcagaaggggctggagaggtccggtgaccctccgcattcacgcccctccctccaaggctgcaaggctgctggtcgggcgagggggctccgtcaggagttccctgcagcaaccccctctccagcacaggcctctggagccctacagctcctgcccctcccatcgctctcccatctcccctgtccctaccccctaccttccttctcctcctccccccagcttccctgagcagccactgctcctgcccacccctctcccccctccctgcccacctctggttccaggttgagctcatggctcctcatacacctgctttgggacgggcaggagctcttcctcactggccagagctgtctgtccgctctgtgggcagtgcctacaattagagctttcagaacacacagccgctgcacagtggctggtccaacgacgacrctgccctcctgaattgcctggtccagcgacaacacctgccctgcttctgtggccttcccacatgctggtccaagcaagctggatgcagggaccccctgcacttccacggcccccttgaggtggcctcttcaattgtccctacgttaccaaagagataacacaggtgcggagaggccgagcgacttgccgaagctcacagtcagtactgggattcca

SEQ ID NO: 936695 - DNA, 739 bp, Homo sapiens
ccggggggcgtagacccatcctgggactaaacccccatcagatccttctggcacccctgcaaggagaaggtgtggtccccctgactttctccccaggggctcatctcgaaggaggcctcccggctgcacggctcccacaaggccaagaggaggagatctgaaatcggctccactccctcccactgcagaccctatcacctcctccactaggggtgtgagcttttggctggtgggagggcgcccgggagggtctctggaaagatgggaaccgggtgttaaagacctgcttaagcgagttatacccagaggccgtcagttcctgcccgagagcacatggcccacagtcacaggtaaactgaggcctggccctaagccctggggacctccacctgcttcgtgacgctggggacagtgtgtacgttttcctgcagggttcaggtgatggcagacggcagagggcagcagacggcaggctggcactggggggccatggaacccactggcagggacgctgggtgaggaggacctagggaccgggatgagacaagctgagggtgttgggcagacatttcttactttgtattttgatatartaatttaaacaaacgtacacaaatgttgcaaaaatagaacaaaggactccctgtgctctatgcggactcaccagtcgctttgttctggcccatttgccggttctgtagaagcctgtagttccaggcaattgagactaagacacgat

SEQ ID NO: 936696 - DNA, 444 bp, Homo sapiens
ggttgaaaggtttcctgggctcagaagaacagagaaataatccagaaggtcctacccttgaggaaagcaaagacatttcctaggtagcacccatagccccttctggaggctgtatcaccatcctcctattattcaaagtagtaggaaatgtactgacagctaacctttactgagtaaaacatgrtagatgcactatcttatttgatttaaacaacagctctgtgaaataagcacaatcatacccccattttatggacaagaaaattgaggcttagagaggacaaacctcatccctaaggctgacccacctgcagtgccctctaagtgacaggtcccagaggtcagttttcagagtgtgacagatccttccctccttcaaagccaagctcacaggctcacagcttaccttcccaaacagattccccagatggccacacccttctg

SEQ ID NO: 936697 - DNA, 700 bp, Homo sapiens
tcaaaaaacctaaattaaactggctcccacaaaaagggaatttacatgagtgaaagtctagaggcaggctgggctctggccttgacttaatgcaatgactctggccccatttccatgcattgctctgtgttcttccttctgccatgaggctttgtcttcagattgtcagawaagtagctttagccattctggccttacacccatactctttctatggctcccacttaaaagtagggaaactttttccagaatagcccttctgccaagtttaccttcatatcccatttatccagactgtcatagcacaaattctttgaccaagccctccagccaaggatatgctatgggagcttaagcctcacatcctgaaaacggtactggtgctggcttgggagtaaggctttactgggattttcatagactaattagagctcatccttttagctgaaatcaatgccccaaacctcctagctgctgcaaaatggatgactcaaagccccatgttcaatagaaagtccaacccaagcctcattaaagagcagacgacctacaatgtaaactaataaagataaataataatttagaacattataaaatgaagtaatgtgacaagagatgtttttgataatagatacttccaaaagagaaagattgcctaaagagaattgagaggttagactgtctgtgtgtctgagtgtag

SEQ ID NO: 936698 - DNA, 615 bp, Homo sapiens
aacatatcatttcaagattaattttttaaaatacgtggtctcaaatgggatcactgctggaaaatagctcaaagatacacggattcaagcgaaagaagtacattgttggtttcacttacaaattatgataattatttttcaaatccatccaccaattaagcaaaagtttttgtctcaactcatccagtatgtttacatcttccctgctgtcaattgcttatcaatatgcaaataaatttgttctcatattttacacaatatgttcacaarccattgaaactgttcaaactgttcacctgaacatttttaagcagattggaaaactgtaagtttaagtacctatattaggcagttcttgaagctggtgcataccatttccagcaacaaacatcatataacaacaaaaacattgtttttgaaatgctctctttgaagcacaggtttctcccttaaagaggttactctagcccccttactgtcacctgtagcaagaaggaacaaatttgtgattttttttgtgcgtgtgaaaataaatgtatcccagtgatatgtatgattatcacattgatgattttacctcctcttgatgctgactgagagcacaaactggaaaca

SEQ ID NO: 936699 - DNA, 615 bp, Homo sapiens
aacatatcatttcaagattaattttttaaaatacgtggtctcaaatgggatcactgctggaaaatagctcaaagatacacggattcaagcgaaagaagtacattgttggtttcacttacaaattatgataattatttttcaaatccatccaccaattaagcaaaagtttttgtctcaactcatccagtatgtttacatcttccctgctgtcaattgcttatcaatatgcaaataaatttgttctcatattttacacaatatgttcacaagccattgaaactgttcaaactgttcacctgaacatttttaagcmgattggaaaactgtaagtttaagtacctatattaggcagttcttgaagctggtgcataccatttccagcaacaaacatcatataacaacaaaaacattgtttttgaaatgctctctttgaagcacaggtttctcccttaaagaggttactctagcccccttactgtcacctgtagcaagaaggaacaaatttgtgattttttttgtgcgtgtgaaaataaatgtatcccagtgatatgtatgattatcacattgatgattttacctcctcttgatgctgactgagagcacaaactggaaaca

SEQ ID NO: 936700 - DNA, 814 bp, Homo sapiens
ctaccaaaggtacaaagaggagttgataccattccttctgaaactattccaaacaatagaaaaagtgagactcctccctaactcattttatgaggccagcatcatcctgataccaaaacctggcagagacacaacaaaaaaaaatttcaggctgatatccctgatgaacattaatgtgaaaatcctcaacaaaatactggcaaactgaatccagcagcgcatcaaaaagcttatccaccacratcaagtcagcttcatccctggcatgcaaggctggttcaacatatgtaaatcaataaacataataaacataatccatcacataaacagaaccaataacaaaaagcacatggttatctcaatagataaagaaaagaccttgataaaattcaacaccacttcttgctaaaaactctcaataaactaggtactgatggaacatatctcaaaataataagagctatttatgacaaaccacagccaaaatcataccgaatgggcaaaagctagaagcattccctttgaaaactggcacaaggcaaggatgccgtctctaaccactcctattcaacatagtattggaagttccagccaaggcaatcaggcaagagaaaaaaataaagggtattcaaataggaaaagaggaagtcaaattgtctctgtttgcagatgacatgattgtatatttagaaaacaccaacatctcagcacaaaatctccttaagctgataagcaacttcagcaaagtctcaggatacaaaatcaatgtgcaaaaatcacaagcattcctatacaccaataatagacaaacaga

SEQ ID NO: 936701 - DNA, 814 bp, Homo sapiens
ctaccaaaggtacaaagaggagttgataccattccttctgaaactattccaaacaatagaaaaagtgagactcctccctaactcattttatgaggccagcatcatcctgataccaaaacctggcagagacacaacaaaaaaaaatttcaggctgatatccctgatgaacattaatgtgaaaatcctcaacaaaatactggcaaactgaatccagcagcgcatcaaaaagcttatccaccacgatcaagtcrgcttcatccctggcatgcaaggctggttcaacatatgtaaatcaataaacataataaacataatccatcacataaacagaaccaataacaaaaagcacatggttatctcaatagataaagaaaagaccttgataaaattcaacaccacttcttgctaaaaactctcaataaactaggtactgatggaacatatctcaaaataataagagctatttatgacaaaccacagccaaaatcataccgaatgggcaaaagctagaagcattccctttgaaaactggcacaaggcaaggatgccgtctctaaccactcctattcaacatagtattggaagttccagccaaggcaatcaggcaagagaaaaaaataaagggtattcaaataggaaaagaggaagtcaaattgtctctgtttgcagatgacatgattgtatatttagaaaacaccaacatctcagcacaaaatctccttaagctgataagcaacttcagcaaagtctcaggatacaaaatcaatgtgcaaaaatcacaagcattcctatacaccaataatagacaaacaga

SEQ ID NO: 936702 - DNA, 598 bp, Homo sapiens
acactgagctagctacaggagttttttcataccccagtggcacctggaatgccagtgagacagaactgttcacttccctggaaagggggctgaagccagggagccaagcggtctagctcattggatcccaccccaatggagcccagcaagctaagatctactggcttgaaattcttgctgccagcacagcagtctgaagtctgggatgcttgagcttggttgtgggaggagcatccgccattactgaggcttgagtaggygattttctcctcacagtataaacaaagctgccaggaattcagactgggtggagcccaccacagcttggcaaagccactgtagccagactgcccctctagattcctcctctctgggtagggcatttctgaaagaaaggcaacagccccagtgaggggcttatagataaaactcccatctccctgagacagagcacctcggtgaaggggtggctgtgagtgcagcttcagcgacttaaacatttctgcttgccagctctgaagatagcagtgtatctcccagcacagcactcgagctctgctaaaggacagactgccttctgaagtggatccctgactac

SEQ ID NO: 936703 - DNA, 558 bp, Homo sapiens
ttcctggacacatacattctcccaagactaaaccaggaagaagtcgaatccctgaatagaccaataagaagttctgaaattgaggcagtaattaatagcctaccaaccaaaaaaagcccaggaccagacagattcacagctgaattctaccagaggtacaaagaggagatggtaccattccttctgaaactattccaaacaaaagaaaaagagggactcctccctaactcattttatgaggccagcatcatcctgataccaaaacctggcagagacacaaccaaaaaataaaatttcaggccaatrtccctgatgaatatagatacaaaactcctcaataaaatactggcaagccgaatccagcagcacatcaaaaagcttatccaccacaatcaagtcggcttcatccctggcatgcaaggctgtttcaacatatgtaaatcaataaacgtaatccatcacgtaaacagaaccaatgacaaaaaccacatgattatctcaatagactcagaaaaggccttcaataaaattcaacatcgcttcattttaaaaactctc

SEQ ID NO: 936704 - DNA, 596 bp, Homo sapiens
cacctcaatggagttaactatcttctctatacctgcaccaaaacagcaaaatcttgctggaaaaaaattatctattgacaagttttactctaaattcatattcacaatcctcagtcagttaacactgcctggagttccaagtatgtttccctagtaggtttcctactctcaggaacaaaacaaaacaaaacaaacaaacaaacaaamaaaaaatcacaaaactatttatatcttttctcctcaaagcttccatacctttcctctctcattctcaaatagtgatttcacattatatttaattgagacattagaagacatcaaatgcaaatgccttcatttctttatcaccaaatttaactttcacttgcaaccaccttctccttccctccagtgacagggaagcttgctgcatgtactctatggaggaatccattcctccacttgtactctgggtcccatccacattcacctgcttaaggaacttgctttttaagttaccctctttgactcctaccccatcaaactttccctctctgtggatcattcctaagaagtatgaagacataatgtaacatcttttatctttataacctccc

SEQ ID NO: 936705 - DNA, 805 bp, Homo sapiens
gcatctgcagtggatactacaaaataatctcaattttcttttcgactttacagccatgaaaagaagtaatgtaaatacagctttctttgtatgggattgtacgtctactctgattttacttaaataagccagctatatttaagttgttaaaatataaagaataaatctatgatatggtaatacatatgtttattaatgtattaaataataagatctagtagtgggtctactaactacagcaatatggaagtactggtgaacacaaccaatagttcataatatccacaacgttcctgagagaaagtaaaggagttctaaataaatggagagacagcccataatcacagactggaagacgtaatattgttaagattcctatcaaaattccagaaggcttgttagaaacatataagcaaaaaagacagtaatctctgtcattttggatcccttgggggtagaaggaagagatgtaacaattaatataataagaaaataatttggtagttgccaaaggatgaggaaaaaatataaaagacgataaggggttttggaaagtctgggggtgggaggctgaaatttaaatagggtgattggtatagatcttatggaaaaaattccacttaagcaatgacctgaagttcgtacgagagtgaaccatgtacaggtttsgggggagcatattttagagaacagcccggcagaggaaacagccacgatacacgctctgagttaggcacgtgcctggcgttttcaaggagcagtgagaaggccagggtggctggagcagagtgtgcaagggtgagat

SEQ ID NO: 936706 - DNA, 697 bp, Homo sapiens
tattagtttatttaaaacagcattttttttctctttttttaaacaagatgaggtctcgccatgttgcccaggctggtcttgaactcctgggctcaagcgatcctcccgccttggcctccaaaagtgatggggattataggtgtkagccactgtgcctggcccaaaacaactttttttttttttagacggagtctcactctgtcacccaggctggagtgcagtggctcgatctcagctcactgcaagctctgcctcccgggttcacatcattctcctgcctcagcctcccgagtagctgggactacaggcgcccgccaccacacccagctaattttttgtatttttagtagagacggggtttcaccgtgttagccaggatggtctcgatctcctgacctcgtgatccgcccgcctcggcctctcaaagttatgggattacaggcgtgagccaccgcgcctggccaaaactcttttgagaatatattcattcatggtttctactcttcctatataaacatgaaaattaaaattttgaattatatattttagccatttttatttaattcagacctacatgttaaatatttatctctgtatagaaaccctgtatttttttacctagaaaaacaacttagaatggacatgagcaggactcagcgttaataaccccgtgagaataaacgccacggacccaggg

SEQ ID NO: 936707 - DNA, 787 bp, Homo sapiens
tatttaactttcatattttttcagaaacctttaactttttcaaaaagtttattctatatgtggaggcttcaaaaagtttatggaaaaatggaattaaaagataaaaaatataaactttatttctcaacataagtgtcatcaagttcaggacacttttgttggtaatgataccagccatttagtccatccctaaagaactgagggtcctaggaatttaaccatgtcagtgcggtcatttttacatcattagctgacgaaaaatgaatgccttttacakattttttaagattaggaaacacaaagaagtcagaaggagccaaatcaggactataaggtgaatacttaatgatttcccatcagaactctcacaaaattgcccttgtttgatgagaggaatgagcaggagcattgctgtgggggaggaggcctctctggtgaagcttttctaggcatttttctgctaaagctttagctaactttctcaaaacactttcataataagcgagatgttatcattctttggccttctagaaagtcaacaatcaaaatgcctcgaacatcttaaaaaactgttgccatggcctttgctcttgaccagtccacttttgctttgactggaccactttcactttttggtagccattgctttggttggacttggtcttcaggatcatactggtataaaaccatgtttatctctgttacagtcttcaaagaaatgcttcaggatcttgatcctacttatttaaaatttccattgaaagctctgctgttgtctgcagctgat

SEQ ID NO: 936708 - DNA, 787 bp, Homo sapiens
tatttaactttcatattttttcagaaacctttaactttttcaaaaagtttattctatatgtggaggcttcaaaaagtttatggaaaaatggaattaaaagataaaaaatataaactttatttctcaacataagtgtcatcaagttcaggacacttttgttggtaatgataccagccatttagtccatccctaaagaactgagggtcctaggaatttaaccatgtcagtgcggtcatttttacatcattagctgacgaaaaatgaatgccttttacagattttttaagattaggaaacacaaagaagtcagaaggagccaaatcaggactataaggtgaatrcttaatgatttcccatcagaactctcacaaaattgcccttgtttgatgagaggaatgagcaggagcattgctgtgggggaggaggcctctctggtgaagcttttctaggcatttttctgctaaagctttagctaactttctcaaaacactttcataataagcgagatgttatcattctttggccttctagaaagtcaacaatcaaaatgcctcgaacatcttaaaaaactgttgccatggcctttgctcttgaccagtccacttttgctttgactggaccactttcactttttggtagccattgctttggttggacttggtcttcaggatcatactggtataaaaccatgtttatctctgttacagtcttcaaagaaatgcttcaggatcttgatcctacttatttaaaatttccattgaaagctctgctgttgtctgcagctgat

SEQ ID NO: 936709 - DNA, 634 bp, Homo sapiens
gaaagtttgctcaggtttattcttcaatcagaattgtgtaagctgattccattgagacgtctgtggtgttagttattgtttctgctgttaatcattggtcctgttcagttagggcatggtcacgacaatttttttttttcttgaaaatagaggtgaacaatctgctgcagtgagcttcatcttcaatattgtctggtcccttctttttttcttttcttttcttttctttttttttttttcaggtgggatcttgctgtattgccctggctggcctcgaactcctaggctcaagtgatccacccaccttggcatctcaacgtgctggtattacaggcatgagccaccatgctttgccttaatttttaatttttaaattttttgtagagatgaggtctggctatgttacccaggcagctcttkaactcctggcctcaagtaattctcctgtcttagcctcccagagtgctggtattacaggcatgaggcaccacacctggacccaaacctttaatttaattcctgacagttgcttttgttaaagtgttagcaaagcctaaaatatagtaggcttccattctagttactactcatttattggtccctgcagtactgatagaggtctaatgtggtccac

SEQ ID NO: 936710 - DNA, 583 bp, Homo sapiens
cacactgcaagaattttacaatacaattgcaagtattaatggcacaagagaccaagctgaggaaagaatctcagaaattgaaggctagctttctgaaataagacagacaaaaatgaagtaaagagaatgaataaaatgaacaaaacctctgagaaatatggggttatgtaaagaggccaaatccatgaattgttgacatccccgaaaagaaccaagagagagcaaacaacttggaaaacacacttcacgatatcatccatgaaaacttccccagcattgctacagaggccaacagttatattcagtaaatacagaggatgctacaagatkctacacaagaatatcattcacaagacacataaacatcagattttccaaggttgaaatgaaggaaacaatgttaaatacagccagagagaaagagcaagtcaccattaggctaacagtggacctttcaggagaaaccctataagccagaagagattgcttccttatattcaacattcttaaataaaaaatcttcaaccaagagttttaaattaagctgaacttagcttcctaagcaaaagagaaataagatgct

SEQ ID NO: 936711 - DNA, 442 bp, Homo sapiens
aattttttacctttcttctgagtttcttcattgacccactggtcattcaggagcatattgtttaatttgtatgtatttgtatagttttcaaaattcctcttgttattaatcccaaattttattgcattgtggtcaaagaaaatgctagatattatgtcaagttcttgaatkttttaaggcttgttttgtgtcttaacatatggtctataattgagaataatctatgtgctgcagaaaaaaaaatgtgcattctatagatcctggatgaaatgttctgtaaatatctattagatccatttgttctatagtgaagattaactctgatgtttctttcttgattttctgtctgaaagatttgtctaatgctgaaagtagagtgttaaagacatttgaactgaggcctacatctctattatatggtatctctttacatatctcggga

SEQ ID NO: 936712 - DNA, 593 bp, Homo sapiens
tggctacccatggaccaatcagcacacactttctctcctctgaaacccataaataccctggactcagccagagttgggtagatgacaggacgacctgcctgcagatagtagatacccaaactgggtctcctctttgatgagggctgcakatattgggatgatctgcctgcagaaaggagctacccactgcaggtttcctctctgctgagagctggacactgattggaatgacctgcctgcagaaaggagctacccactttgggtctcctgagaactgttctgctgctcaatgaagctctgctctgccttgctcaccctctagttgtccacatacctcatccttcccagacatgggacaaaacctcaggacctgctgaatggcatgaccaaaagagcagtaacacaagcagggctgaaacatgcccccctgcttgccacattgtgggcagtgagaaggagggaagagatattgaccttcaggaagcccagacctaggggctccctgagccaaggctgtgacatcctctttggggttctgtggttcttgatgtctccaagcttccaggcaccactgtgttctcctcgtccagaca

SEQ ID NO: 936713 - DNA, 606 bp, Homo sapiens
tttcactacaacaatttcataatacaattggaagtatttacagcagaatagaccaagctgcaggaagaatctcagagttcaaagaccagttctttgaatctcagtcagacaaaaataaagaagaaaaaaatacaaaagaattaacaaaacctacaagaaatatggaattatataaagagaccaccacacctatgacacattggtgtctctgaaaaacaaggagagggaactagaaacttggaaaatatattcaagggtattgtccacaaaaatttctccaacctcagtagagaaagcaatgttcaaagtaaggaaattcagggaacccctgtgaaacagtatgcaaggcaaccatccccaatgcagtatatatatatatatacacacatatatatatatcacatatatacatatataagtwtatatatggcatatatatatcacatatatatacatatataagtatatatatgccatatatatcacatatatacatatataagtatatatatgccatatatatcacatatatacatatataagtatatatggcatatatatggcatattatatatggcatattatatatggcatattatatatggc

SEQ ID NO: 936714 - DNA, 594 bp, Homo sapiens
ttgattgtttattttagaagtcacctttggccgggtgcggtggctcacgcctgtaatcccagcactttgggaggctgaggcgggcggatcacgaggtcaggagatcgagaccatcctggctaacacggtgaaaccccgtctccactaaaaatacaaaaaattagccaggcgtggtggcgggcgcctgtagtcccagctactcgggaggctgaggcaggagaatggagtgaacctgggaggyggagcttgcagtgagccaagatcgtgccactgcactccagcctgggcgacagagcgagactccgtctcaaaaaaaaaaaaaaaaaaaaaaaaaaagtcacctttaaaaagtgggaagtagctttagatgactgatgtatttcacatgttggttggagatctgttaccattgcgtgtcaactaaaatcctacatgttgttagcttggatggctgctcttcaggcagcagatttgattgtagagcactttaatggctttcacactgtgtctgccatgagtcgcatgtatgcagagaccctactaaggtctctgggtttggaacaaagggaccgcactggataggtaaatgaactc

SEQ ID NO: 936715 - DNA, 478 bp, Homo sapiens
caggggtagctttatgtcgtgattctttgaggtttgctctaaccccaagaaaactcctcttagctgggcctttccctggttctctctgataaacaagattgtctgtggttaggctttttgctctgatagatctatcagcctcccttaattgctcaccattaaartctccatcattttctagagtatccttaggcttgaactgccacatactccttcaaagtcagttcctttgaggagaacttcagctacatctgttcttatggactgactctccccctgggcaaaatctctgagccactgctttgagcattgggaatctcttgccttgctgggttgcttctcccagtatgaaacctctgctctgcaaactagctggagtgagagtcatcaaggccctagtattcttggcctgttgcacctggcctatagagacaagcctagtatatacacaaggtctgggtggaggtagggaacaccc

SEQ ID NO: 936716 - DNA, 644 bp, Homo sapiens
tctatctgagaccacctcagccaggacttcattgtacatatcactattagtattttagtcaaagccactcaacaagtctctggcaagttccaaacttttccacatttttcagtctttttctgaggtgtccaaactgttccaacccctgcctattactcagttccaaagttggttccacatgttcaggtatgtttatagcagcaccccattctctctggtaccgatgtactgtattagttcattttcatactgctataaagaacttccaaatgctgggtaatttataaaggaaagaagtttaatttacttacagtttagcatggctgggaagrcctcaggaaacttacaataatggcagaagttaaaggggaagcaaagcaccttcttcacaaggcagcaggaagaagaagtgccaagcaaagggggaagagtctcttataaaaccatcaaatatcatgtgaactcactcactgtcatgagaacagaatgggagaaccccctctttccccatggtttatctacctccacctagtctctccctcaactcatgggaattatgggaattgcaattcaagataagctttggctggggatacaaagcctaagtatattaccctccctgcatattaataaatttgtatgac

SEQ ID NO: 936717 - DNA, 599 bp, Homo sapiens
aatccaatctcctcagggtcactttctctgaacctcttgagacagttccccaggtcatggccattcatatgagctcagaataaacctctttaaatattttagataatttggctttttttttgtcaacaatggtataagtctgtccacgtgtgttgaaagactttaatctttcttccagtaatatgaattcagtgaacaaaaactcagggaagggaccagagttattatttttcttcctttggcatttccagactttaggcaggtaakagaactttagagaaaaacttcatcctgtgctttgggagagacacaaaattgagaaacaggaggggttggagaagtttagagagaccttaaggcttctttagtttagcatgtcaaagtgtcacatttgggggtacccatttatgattcccaacaatctcttattgtaccaaatttataaatttaacttttcatacatatgattgaatgcaataaaaatagtacatatcgggttcaatactatctgtgatttgaagcataggctagggacttgaaatgcgtcttccatagataaggaaattgatactgtacctatatttgaaagaataatacag

SEQ ID NO: 936718 - DNA, 599 bp, Homo sapiens
aatccaatctcctcagggtcactttctctgaacctcttgagacagttccccaggtcatggccattcatatgagctcagaataaacctctttaaatattttagataatttggctttttttttgtcaacaatggtataagtctgtccacgtgtgttgaaagactttaatctttcttccagtaatatgaattcagtgaacaaaaactcagggaagggaccagagttattatttttcttcctttggcatttccagactttaggcaggtaatagaactttagagaaaaacttcatcctgtgctttgggagagacacaaaattgagaaacaggaggggttggagaagtttagagagaccttaaggcttctttagtttagcatgtcaaagtgtcacatttgggggtacccatttatgrttcccaacaatctcttattgtaccaaatttataaatttaacttttcatacatatgattgaatgcaataaaaatagtacatatcgggttcaatactatctgtgatttgaagcataggctagggacttgaaatgcgtcttccatagataaggaaattgatactgtacctatatttgaaagaataatacag

SEQ ID NO: 936719 - DNA, 593 bp, Homo sapiens
cacctggggctaatattcataaaccttcacttatttagtgaattaacaaataatgtaattaattattactgatttttccccattggggtgaggtgccttgtttttagttcattttctaaagatatcttgagcaaattttagaagcaccatacccttaagcctagtcctcagtcattgaaatttgtacatatgacattcactattaaaaacatagtttgaattgaattaacttacagctataaacaaattttttcaggctaagtgacatgtcattcacctcctttaacaattatcacccaattattcccaatttctaacttacactcaaaaggaaaaaattcagttttctaacctgcatattgctcaattcctagctagtgtcaamaaataacccacagcctaccattagttgaagcagtgaagacaaattttaggtaactgacagtatgtgatagagcagtgctccattcacatttatacaaagataactgaacattttcaagggagaatgagggaggagagagtgtggggggttcagtagagtcaaagaagtaaaaacgtacaaagggttaattcatgtaaatgtgattaga

SEQ ID NO: 936720 - DNA, 577 bp, Homo sapiens
agcccttaagaattatgtgaaatctactcttcctctcttcctgtgccctataaatgtaacaacaaagcctggatgacaacacatctgtttacatcatgatgtactgaatattttaggtccactactgagacctactgctcatcaaaaaaagattcctctcaaaatattactgctcatttaaactgtacccagtcacccaagagctgtgttggagctgtgcaagattaatgttgttttcatgcctaataacacaacatccattctgcagtccacggatcaargagtaatattaacttgcaagaaatacatttcctaaggctatagttgccacagatagcaatttctctgatggatctgggtaaagtaaattgaaaacctttagaaagaagtcagcattctagatgctgttaagaacatttgcaattcatgggaagaagtcaaaatatcaacattaatacaagtttggaagaagttgattccaattgtcatggatgactttgagggattcaaaacatcagtggaggaagtaactgtggatgtggtggaaacaccaagtgaactagaataagaagtggaa

SEQ ID NO: 936721 - DNA, 577 bp, Homo sapiens
agcccttaagaattatgtgaaatctactcttcctctcttcctgtgccctataaatgtaacaacaaagcctggatgacaacacatctgtttacatcatgatgtactgaatattttaggtccactactgagacctactgctcatcaaaaaaagattcctctcaaaatattactgctcatttaaactgtacccagtcacccaagagctgtgttggagctgtgcaagattaatgttgttttcatgcctaataacacaacatccattctgcagtccacggatcaaggagtaatattaacttgcaagaaatacatttcctaaggctatagttgccacagatagcaatttctcygatggatctgggtaaagtaaattgaaaacctttagaaagaagtcagcattctagatgctgttaagaacatttgcaattcatgggaagaagtcaaaatatcaacattaatacaagtttggaagaagttgattccaattgtcatggatgactttgagggattcaaaacatcagtggaggaagtaactgtggatgtggtggaaacaccaagtgaactagaataagaagtggaa

SEQ ID NO: 936722 - DNA, 605 bp, Homo sapiens
agagtcaaataaagttctgaagtgcatctgtggaggttctatgggcaagtcttggaattaacacatgtaacttctgctcccatttgactggagcgaatttagtcagatggtctaacctaactgcaagacaggctgggaaatgtagtctaagctgtgtgcccaggacaaaggggagaatagatattggtagacaataataacaaatcctatttattatacctctatctgtgtttcatttattcaaactgttctttttcaaatggatcatagaagaacttcatactaaagcacatgatttccttatggcctggcaaggttagtattttctctccctctttctccttctctttccccagtccatctttaaraccgaggtggccttaaatagagttaagcctctatgtagtccttctctcctctcatatttctgaaggccatctaggctgtctcctagagttccctagagcaacaaggcagaagtatctgcccctatagtacatactgctcccctgcaaaaatggagaaaaaccaatcaaatagaatacacacacacacgcgcgcgcgcatgcacgtgagagagagagagacttgccaaacagattctg

SEQ ID NO: 936723 - DNA, 596 bp, Homo sapiens
aggtttgccataggaagaaagagaaaacaatatatatgcacacaacatcagaacacccaaatacataatgcaaatagtaacagaactgaagggagaaatggatagcaatacaataatagtaggggacttcaataccccattttcaaccatggatagaccatccagacagaaaaatcaataaggaaacagtataccaggacaaaactctagagcaaataaacctaacagacatatacagaacattccatccaacagcagcagaatacacattcttctcaagtgcacacagaacattctccaggataggttktatgttaagccacaaaatgagtcttaaaaaatttaagtatgaaatattatcaagcatcaattctgaccacaatagtatgaaactagaaatcagtaacaagagggaaactggaaaattcacaaatgtatggaaattaaacatcacacttctgaacaacgaatgggtcaaaaaacaaaagggaaatcaaaaaataaatggagacaaacaaatatgggaacacaacatactaaaatgtactggatgcagcaaaagcagttctaagagagaattttatagtgataaatgc

SEQ ID NO: 936724 - DNA, 648 bp, Homo sapiens
agtgcagtcagccagaagtattcccagaaactgggggaacgagcccttcagttcttacagggaatcttggcagtgcatcacagcatccactacaagtgtctttcttgaaataattattatatgagatattaatcagtgtttcaagaagaaaaatgacttctatggtcaactcagtttagcaaatcctaggctaaacaagttttttttttaagtggaagaattttcagaaatttaaatatgctgttttaaatggtgaattgtsactctccaagggtgggatagaataggtagaagatagcaaccacaagtgaccagaaggcacatgttttgaggaatatcccttatgcatagtactactgaacatcagtttaaacaatgctgtttcagaggcaacggtgacaggaaaagtactatggggatcattgggatggggatctggagctctagtatctcagattttgtctcaaccaacatgacaaagcacttgtcatggttcaattattagcaagatctattacctgtgattagattgctgtagactattaaatctgatccgtgactaaatcaaacaggacttatctattaatgaaagtctaacttagtatgaagacaaagtatttgctttattgttgactacacttcttctca

SEQ ID NO: 936725 - DNA, 571 bp, Homo sapiens
accatgttggccaggctggtcttgaactcctcacctcatgatccaccagccttggcctcccaaaatgctaggattacaggtgtgagccaccacgccaggcctaattctctgtgtttgaatgtgagatctcttctgaggagtcctagggctttgtgaaacacagccacatgatcaaatacacattccttaaattagcattcaaggccttgtaaaatcttacctcacaatagctgctcaacagaatgctcattgtttctaaacaacctacaaacatcctggacaccacacctttgttcayactgctccccagtctggaatgccctacacaccctcctccttgcatttccctaaagtatagcctctttggagttcagattatgttccacttcctctaagaagtattccctgatcagttacttttcacaattgttcttacactctgatccattttcatacttctctatatttgacacaatgtaagtgatgatgctttgatttttttttctaatatttattttgtctcctcactgagggagcaggcaacaagagctcctagactatctgtatctct

SEQ ID NO: 936726 - DNA, 549 bp, Homo sapiens
aatttagccacttgatatccattttcaacgtctgatagccacaatggtaagataataaatttatgttgttttaagctgtaaagttcataatcctttgttaaagcagccacaagacactaatacagttgttacagtaggtagctagtcaggcatgaacagggcaggagagggctccaccttcctccccccgccacacaccaggaatgtcaagcgatcatcagatgatagtcaggcagttgttaactgtctctctaaaataataattggttacagccagtgccagagaaaggcagtctcctgatrgatagaaaatacctgaaactggtgatcagcagcttcctgataagatctcagaaattgggcaagtggcctcaagcatgcactcttagggtcccaatttgtatatcttaacattgatagcgattaaaataaattgaaaaaagttacatgcttccactagcttctcttccaactaaggcagatactcacaatggttcactgcacccttttccctgaatccagatagcttcacaatcctaaacccaacaa

SEQ ID NO: 936727 - DNA, 588 bp, Homo sapiens
agagctcactgccatttacacactaggttctgtcccttattgcctattcaagcaatatcccctttctcgtctgcatcatcaaattcttccctgctatcatttgaatgtgttcccaaagttcatacgtggaaaacttggttcccagtgcaatagtgttgggcggtggggtgtaataagaggtgattgagtcaggagggctctgcttttatgaataaattaatgtcattattactggagtcagttagttatcatgagagtggcttaacctcaccttatcttgcctttctgcctttcaccaggagatgacacagcatgaagctccctgcctagatgccagggccatggtcttggtcttcgtagcttgcagaactgtaacacaaataaatttttattatacattttccaatctatggaaatttattatggcaacataaaacagacmaaaaacaacacctctctgctagatcattgcctttagcatacagacatttcaatattgctctcactgtgttcacaaaaaagctccaactgtacctcattttaacctgcaacaaatgtcccattttctttttctcttgacagaaaaac

SEQ ID NO: 936728 - DNA, 554 bp, Homo sapiens
gaaacagaagtttccatggttttataggtgatcgtgtggctgcattttgcaatttaaatttaaaaaatgtcttggtgataaacagacacctagagcttttgtctgatcaactggaataaaatgtgaaaactttctatggaaacctcaggggaacgaaggtgaggttggtgatttcactgtgttagcaaatggaaatgcactgggagtgatgacgaatgttattgtctgtgttcctgggagataacacaattgcattccactggcttttaatgagttttcacttgagatacagtgagtacatttgcatgtcaactacagagaccaaaaatatatttcttgtcatcactgcaggaggagaaatcatttctgtgctgyataaagtagaaggaaagtaggttcacgtactgccttttgtattaatgataaataattgagttcagttagcttgttcttacacaatctgaggaagaagaactgagtacagtggctcccattttgtaacagtttgttatttttttctgggatgacctgaagctaagaacatgggggtagag

SEQ ID NO: 936729 - DNA, 457 bp, Homo sapiens
accctaggacacatggagttaaatgctggaataagccagatcttctccgcacttccgtctgggtcctaggccctacacctagtgcgtaattagattcccagacttaccaaggttttcatcaaaagtaaaggttgctaaaasttagcagtgtaacacgtatttaaaactaccgaagaaatagtttatgagcaaggtgtgtaaggaaagtaaaatatacttttggtaaaaagattataaggaggcctaagaatgtggatttttgcctacattaaaaggttaaaaaattgttttaaaggtttaagcaacttttggaaggttaattgtaaagaaagtttcgtgtgtgtacatactggctaaagttaaaggggtatcattcaggttttctgtaaatcgagcattaaaataaaagcacaatgggtttctgttaaagcactaacctgctctttaacaaaaagta

SEQ ID NO: 936730 - DNA, 609 bp, Homo sapiens
ttgtaattttagattttacattaaagtctttcatatatctttagttaattttttaaatggtgtaagaaagtagtcctgtttcaatcttctgcatatggctagccagttatcccagcatcgtttattgaatagggaatcctttmtccattgcttgttattgttgactttgttgaatatcagattgttgcagttgtgtggctttatttctggccttttttgttccattggtttatgtgtttgtttatgtatgagtatcatgctattttagttactgtagccttgtaacatggtttgaagtcaggtaatgtaatgttttaggtttgtttttttttcttaggaatgctttggctcttcaagctctttttgggtcctgtatgaattttagcataattttctctaattctgtgaagaaagtcattgggagtttgataggaatagcattgaatctgtaaatttctttgggcagtatggcaattttaacaatattaattcttactatccatgaggatggattgtagggaccagccctacagggtctgtgggtttttctactcttgtgcggaaatgagagattgtagaaataaagacacaagacaaagagatagaaga

SEQ ID NO: 936731 - DNA, 608 bp, Homo sapiens
agccatgtagccaaaaaacaaagggcattttctctggctatataatttgcagagcccagtgcaaaatgaaaatgggattctccttgttcaaaatgcagggaaaaagtaccattaaaataattaaaacataaaatttttttccttcttttgcmatctctctctctagatgtgtaatagtgtttattatttgctttttattgtggctatatataaatacaaattaaaattttaaatattagtgtgaagtttacaattaatctttgtattgtgcaatgacagatttaaatgcaaatatcagcatttaaatataagcatttaaattcagatataactcatatgtgaaatcacctatattacacaattcttattttatagcttgtacatgcacatatgttttgtttttacaaaagcggtggaaatgctgcacaaaaccaactcaactgttgttattacaccgcctgacacagcatacattctagcaacattctctacttttggctccctattgaggaagaaaggactgaaaactaatatatatatcatatactatatgatatatataatctgtatattatataatatataatgtatattatataatatagaat

SEQ ID NO: 936732 - DNA, 649 bp, Homo sapiens
acggtgactcaacgcctgtaatcccagcactttgggaggccgaggtgggtggatcacttgaggccaggagtttgagaccagcctggccaacatggtgaaaccccatctctactaaaaatagaaaaaaagtagctaggcatggtggcacacgcctgtagtcccagctactcgggagggtaaggcaggagagtcacttgaacccgggtggcagaagttgcagtgagccaagaacacaccactggactccagcctgggcaacagagcaagactccatctcagaraaaaaaaaaaagaaaggaagaaatagaaaagccaaaagaagagatggaaaagcgccagcgagtgtgagatgaagaaaatcaagtgcatggtattctgagagccaagcaaagaaagtctgtcaagatggaaagggtaatcagcagtgtcagatacttctgatgggtcataaaaaatgagggttgagaatttatcattggatttagcaacatggaggtaactggtgatctagacagggtcttctttatgacatggtgagggtgaaagctcatttgaaattggtttaagagagaattggacatagcaaacatagatagctcttttatggtatttgctacagagaggaacagagcaggggcaagggccaggg

SEQ ID NO: 936733 - DNA, 649 bp, Homo sapiens
acggtgactcaacgcctgtaatcccagcactttgggaggccgaggtgggtggatcacttgaggccaggagtttgagaccagcctggccaacatggtgaaaccccatctctactaaaaatagaaaaaaagtagctaggcatggtggcacacgcctgtagtcccagctactcgggagggtaaggcaggagagtcacttgaacccgggtggcagaagttgcagtgagccaagaacacaccactggactccagcctgggcaacagagcaagactccatctcagaaaaaaaaaaaaagaaaggaagaaatagaaaagccaaaagaagagatggaaaagcrccagcgagtgtgagatgaagaaaatcaagtgcatggtattctgagagccaagcaaagaaagtctgtcaagatggaaagggtaatcagcagtgtcagatacttctgatgggtcataaaaaatgagggttgagaatttatcattggatttagcaacatggaggtaactggtgatctagacagggtcttctttatgacatggtgagggtgaaagctcatttgaaattggtttaagagagaattggacatagcaaacatagatagctcttttatggtatttgctacagagaggaacagagcaggggcaagggccaggg

SEQ ID NO: 936734 - DNA, 609 bp, Homo sapiens
cctgcagggctgtctggattccgggccccaccagctcacctgctcagcaccttgggtctaatcttctgatgcgtccctgcccttggagccccacagggaaatgacacaatcccctgtttactacgaggctgggcttcctcatgggccctgcctccaacttcgagacccagttccaccccaggtagctttggacaaatgatggagcctctcggagcctccagtttccctctaacatctcatggatgatgatgtcagcccacagggctgacgggaggatggtcagacaaagcctggattcgccctgcatggttcctggcacgagggcaagcttgaatggaggtaaaaataagatggtcccttccagtcccacccacactcaccagggccartgttcctccccagtgctctgtgagctgagtggtctctgccttcctgggcccccacctggatgtccagaggccatggctatgatggttaatactgagtgtcaacttgattagactgaaggatgcaaagtattgttcctgggtgtatgtctgagggtgctgccaaaagagattaacatttgagccagtgggctaagaaagccaaactcaacctcaatctggg

SEQ ID NO: 936735 - DNA, 556 bp, Homo sapiens
tccaacactgggatttacaagttgacatgagatttgggtagggacccagaacaaaactgtatcaaatcccaaactccacttccatagccaagaacttggtggttattgattgagggcctcctaggggccagccccttsctacatactttgcatgaactctcttgtctcatgtgtaagtaccacaggctaatgtctgcacctgtgcaccctctataatgatatctctcattttcatgattgagcagactgtaatggttgttgtgagcagaatagcggactctgagtgaagaaccttggcattcatgcctctaactgcagggaaatccttccactgcctaaagcctgccctcaggtctcctgtgaattcgctcaagctaccctcgagccccccaggccccatccatccactcaacaacatttacataggccaggcaaggcaccctgggggacagagacaagccagtcatatctgtgtccttgggaagctcaggtcaagggtgctttccccccactgttaacaaggttcttccctctccaggcctccgagcctccaact

SEQ ID NO: 936736 - DNA, 708 bp, Homo sapiens
gtgtgaatgttcaaacagagcagcaaaggtcattcctcaggggactctggaggagattcctaccccaggtaggaagttggttgatttctgctctgatcctatgactactaaatgcatagtatgaaaaactacacttataatgtgcattaacaagaatatgactgatctccatggatatggaaagatatacaaaatagaattgggggggggaaattatagaaccatacaatgggagcccaagttttaaaaaccagatatatatttatgtgcttagagcatttcaggaagggtatattaagaaatttatttggaaaatcttgagaggtaagctggagtgaatgtacactctccactccatgcccaaatgtttacttttcactttatacccttctgtttatttttttgaccagcagcatcaactttttaaaaaaggaccaaataggccaggctcagtagctcatgcctataatcccaacactttgggaggcaaaggtgggaagatcacttgagcccaggaattcaaggctgcagtgagaaatgactgtgycactgcactccagcctgggcagtagagcaagactctgtctcaaaataaataaataaataaataaataaataaataaataaataaatcaatcaatcaataataaataaaaaaaccaaatcatttggttggccaaaaccttctgatctgagctttgctcggca

SEQ ID NO: 936737 - DNA, 871 bp, Homo sapiens
tatagaaccatacaatgggagcccaagttttaaaaaccagatatatatttatgtgcttagagcatttcaggaagggtatattaagaaatttatttggaaaatcttgagaggtaagctggagtgaatgtacactctccactccatgcccaaatgtttacttttcactttatacccttctgtttatttttttgaccagcagcatcaactttttaaaaaaggaccaaataggccaggctcagtagctcatgcctataatcccaacactttgggaggcaaaggtgggaagatcacttgagcccaggaattcaaggctgcagtgagaaatgactgtgccactgcactccagcctgggcagtagagcaagactctgtctcaaaataaataaataaataaataaataaataaataaataaataaatmaatcaatcaataataaataaaaaaaccaaatcatttggttggccaaaaccttctgatctgagctttgctcggcaaccactctccaagataaagctttatgtatcacctcacatattcactgtcaaggctcaggcactctagattactggactccccagtcaacattcccattaccaaaagtccctaatcttggaggctgcttcaggtcaccctctctttgtccctcacttcctgagttttttttttttcctccaactatactcactctactggtgatctcaaacagccctctagcttttaagatactgtccaaatgctgactcccaaatttctatttccatccaagacccactcttaaactctagacacacacatgcatcgcaactgcctcctcaacagctccacttggatattgagtagacatctaaaacttgctcttcccacagccttg

SEQ ID NO: 936738 - DNA, 871 bp, Homo sapiens
tatagaaccatacaatgggagcccaagttttaaaaaccagatatatatttatgtgcttagagcatttcaggaagggtatattaagaaatttatttggaaaatcttgagaggtaagctggagtgaatgtacactctccactccatgcccaaatgtttacttttcactttatacccttctgtttatttttttgaccagcagcatcaactttttaaaaaaggaccaaataggccaggctcagtagctcatgcctataatcccaacactttgggaggcaaaggtgggaagatcacttgagcccaggaattcaaggctgcagtgagaaatgactgtgccactgcactccagcctgggcagtagagcaagactctgtctcaaaataaataaataaataaataaataaataaataaataaataaatcaatcaatmaataataaataaaaaaaccaaatcatttggttggccaaaaccttctgatctgagctttgctcggcaaccactctccaagataaagctttatgtatcacctcacatattcactgtcaaggctcaggcactctagattactggactccccagtcaacattcccattaccaaaagtccctaatcttggaggctgcttcaggtcaccctctctttgtccctcacttcctgagttttttttttttcctccaactatactcactctactggtgatctcaaacagccctctagcttttaagatactgtccaaatgctgactcccaaatttctatttccatccaagacccactcttaaactctagacacacacatgcatcgcaactgcctcctcaacagctccacttggatattgagtagacatctaaaacttgctcttcccacagccttg

SEQ ID NO: 936739 - DNA, 629 bp, Homo sapiens
atcctagcttctagggaggctgaggcaggaggatcgcttgagcccaggagtttgagaccctgtctcaaaaaacaaaaacaaaaacatattttggagaacatttagggctggggctgaggatttagcagtcgcttgcagagacaagatactttgaagtctctaatttttcatttggctatcctggttcagcctgaaagaattctgacttaccttgtactactagttggtgagyatgcagatgtttggaggctctgtagctctgtttaagggtgagatcatgcttgatgttagtgggactttgtggacctagaaggtgtgaggagagagagaagaaagaaggcatgatagctggtgggccatgtttttgaaaagctaactatgtacaataattagaatgtcaaaaaacaaccttgggattatgagatgcaacataaagattctaccctccttcccggactcgttggatccatcccccagagataaagtgcgagttgaaccgtcttactttcacatcctgtactttagactgggaggacctgaggagctgtccagctagaggtgcacttatatcacttatacagtgacagaatgcctggggtcatgaggtccacttgtggcgtgttgtttcc

SEQ ID NO: 936740 - DNA, 629 bp, Homo sapiens
atcctagcttctagggaggctgaggcaggaggatcgcttgagcccaggagtttgagaccctgtctcaaaaaacaaaaacaaaaacatattttggagaacatttagggctggggctgaggatttagcagtcgcttgcagagacaagatactttgaagtctctaatttttcatttggctatcctggttcagcctgaaagaattctgacttaccttgtactactagttggtgagtatgcagatgtttggaggctctgtagctctgtttaagggtgagatcatgcttgatgttagtgggactttgtggacctagaaggtgtgaggagagagagaagaaagaaggcrtgatagctggtgggccatgtttttgaaaagctaactatgtacaataattagaatgtcaaaaaacaaccttgggattatgagatgcaacataaagattctaccctccttcccggactcgttggatccatcccccagagataaagtgcgagttgaaccgtcttactttcacatcctgtactttagactgggaggacctgaggagctgtccagctagaggtgcacttatatcacttatacagtgacagaatgcctggggtcatgaggtccacttgtggcgtgttgtttcc

SEQ ID NO: 936741 - DNA, 641 bp, Homo sapiens
aggtgcacacacacacatatgcacatgcacactcacaccatacatttatagatacataattttaaccctacatgatttttcctcataaaaccttgcagaaagtggtcacttatatttagcattttttaagttataaaagtgattcatgttcagcaaagaaaatttataaaaatcagaaaaatacaaatgaggaaattcaaaatcatggattatcttactatccagagataactacaatttaataaatgcagagatcaaaagcaagatataaaactatatataatgatttcaattaagtaatatgcrtcttgcttttcttatcttgaaagttatagcattaacatttctctatgtaatttaaaaatttagaaaaccaacctgtcagttaagggctgaaaggtgctttattgtaattctatggttttattaaacaaatcattttcttatcaccaggtatttaagttgttgccaatttttttctacattgtacacaatcctatgattaacatattttctgtcaatcttcactgcacctctgataattttattactgtatgtccttagaaaaaagattattgggtcagagaatatgccatgtttttatatttttaaaaatgcgtgttttcaggagtctttgaaaa

SEQ ID NO: 936742 - DNA, 752 bp, Homo sapiens
gtttaaggtcacaagacttaatttagaatttgatttgggatataaatttttaaaaaatttaaaaaaattaaaaaaagaagaaaaaaataaaaaaagcagaaaaacaatttgatttggggaagtggtcaaaaatattaaggcttgaatacytgattaaataggatatgaagtcactgtgacaaagtgttgttactcaagatgatgatgaatagattttaaaggcaaatacagaaagttacattgttatagtgaaaaccttgcctcttttaatagagaggttttggttttctaaagtaactaaagacttgacaaaagacaacatgaagcatagtaaattgttttgctaagacacagtctttgtttcctagctagaattcttaaaaggctaaaaaacatctttcacaatctcatattagggcagtccaataattcaagatatccttgtcattttaacataggaggccaaattctagtgttacatcagtgtacttttgatatgaataatcaaacaaattataaataatttctttcaaatcttatcaaactttatcacacatgaaatatttcccaagatttctttccacaaaccttctacaacttcttttatatcaatttggttttgtcctatttgctttctcttttccattgtggaacaaccagccattctactttaggttaaaaaaattacttttttcttaaagaaaaacacatcctttatatctcgtagcttcccctacctaaaacttgtctta

SEQ ID NO: 936743 - DNA, 675 bp, Homo sapiens
actgaactttcctatatcctacacctggttgggattccctgtgccctggaccttgtgtctcaaacttctagattgtggatttactctgtcatctctgtgcagcacatctttctgtagattcctgagaaaggttgcaaagaagcaaatatatttagtccttgtatgtctaaatatgcatttatactgttttcacacttgattaatagtttagcagggtatagaaatctaggctgaaggccaggcgccatgtcttatgcctgtaatcccagcactttgggaggtcgaggcaggcagatcacctgaggtcaagtgtttgagaccagcctggccaacatgctgaaaccttgtctctactaaaaatacaaaaaaaamattagctgggcatggtggcacatgcctgtagtcccagctactcggggaggctgaggcaggataatcacttgaacccaggaggcagaggttgcagtaagccaagattgcaccactgcactccagcctgagcgacagagggagcctccatttcaaaaaaaaaaaaaaaaaagaaatctaggctgaaaattatttctctcagaatttttaaaacattgcattattgtttctagtatccagatttaagacatctaatgccattcttaatcctgttgctttatatgtgtcttgttctttttttatttt

SEQ ID NO: 936744 - DNA, 475 bp, Homo sapiens
catgtaagaaaggaaattcattgtcttttttttttttttttttttttttgaaatagagtctcgctctgtcgcccaggctggagggcagtggcgcgatctcggctcactgcaagctccgcctcccgggttcatgccattctcctgcctcagcctcccgagtagctgggactacaggtgcccgcgacctcgcccggctaattttttgtagttttagtagagacggggtttcaccatgttagccaggatggtcttgatctcctgacctcgtaatccacccgcctcggcctcccaaagtgttgggattacaggcgtgagccactgctccyagcctggaaattcgttgtcttttatgggaacgtttctttcctctccttccaggttgtaatcctttgttttatataaatagtgaggaaataggagaaatggaaatagaaatgactgtctgttggtggaggaacatgccccagtcttcctc

SEQ ID NO: 936745 - DNA, 622 bp, Homo sapiens
aagctccagagagcatgttcattctgcattccagatttggacataataaatgccaaatgaaactcttggtctgctccctgaacctgctccatccacagtcctgtccaccctagtgaatagcaactccattcttctagttgccctggccaaagtaactgtggtcatctttgcctgatctctttacctcacagtccatggccaatctgttagctaatgtggttggcattccctttaaaaccagaacttcatcattctcaccaccttcactgttctcrtggtcccagtcagcacgatctcttgcctgcactgttagaatatctctctgcatggccctatgatatccatccttggcccacaacattcttaagggggcagcaagagtgatccctcgaaaacacaaatcaggccaagtgtggtggctcacacctataatcacagcactttgggaggcagagtcaggaggattgcttgagcctaggagttactccctgtgtagcaacacagggagaccccatcaatacaaaaaataaaaaaaactttccgggtgtggtggcgcacacctgtggtcccatctactcaggaggctgaggcaggaggatcacttgagcctgggagttcaaga

SEQ ID NO: 936746 - DNA, 622 bp, Homo sapiens
aagctccagagagcatgttcattctgcattccagatttggacataataaatgccaaatgaaactcttggtctgctccctgaacctgctccatccacagtcctgtccaccctagtgaatagcaactccattcttctagttgccctggccaaagtaactgtggtcatctttgcctgatctctttacctcacagtccatggccaatctgttagctaatgtggttggcattccctttaaaaccagaacttcatcattctcaccaccttcactgttctcatggtcccagtcagcacgatctcttgcctgcactgttagaatatctctctgcatggccctatgatatccatccttggcccacaacattcttaagggggcagcaagagtgatccctcgaaaacacaaatcaggccaagtgtggtggctcacacctataatcacagcactttgggaggcagagtcaggaggattgcttgagcctaggagttaytccctgtgtagcaacacagggagaccccatcaatacaaaaaataaaaaaaactttccgggtgtggtggcgcacacctgtggtcccatctactcaggaggctgaggcaggaggatcacttgagcctgggagttcaaga

SEQ ID NO: 936747 - DNA, 709 bp, Homo sapiens
gaatgcatcgacaaaacatggaatattcatataatagactctcattcagccataagaaaagaatgagctactgatgcatcctccaacatgaccgagccttgaaaacattatgctaagtaaaataagtcagacccaaatcacatattgtgtggttccatttgttaatttatgaaatgcccagaayagggctgagcgaggtggctcacaactgtaatcccagcactttggaggctgaggtgggcggatcatttgaggtcgggagttcgacaacaggatggccaacatggcgaaaccctgtctctattaaaaatacaaaaaaattagccgggcgtggtggtgcatgcctgtaatcccagctactcaggaggctgaggcaggagaatcacttgaacccggaaggcggaggttgcagtgagccaagatcgtacctctgcactccagcctgggcgacagagggagactccatctcaaaaaaaaagaaaagaaaaaaaagaaaaagaaatgcccagaataggcaaatccacagagacagaaagagttggggttggcaggggctggggataggcggaaatggggagttcctgctaatggagttgggggattctttgaggagtgatgaaaaagctctgccactagatagtggagataattgcatattgtgagtgtactaaatgcccctgaattgtacattttaaaatggtttaaatgg

SEQ ID NO: 936748 - DNA, 709 bp, Homo sapiens
gaatgcatcgacaaaacatggaatattcatataatagactctcattcagccataagaaaagaatgagctactgatgcatcctccaacatgaccgagccttgaaaacattatgctaagtaaaataagtcagacccaaatcacatattgtgtggttccatttgttaatttatgaaatgcccagaatagggcygagcgaggtggctcacaactgtaatcccagcactttggaggctgaggtgggcggatcatttgaggtcgggagttcgacaacaggatggccaacatggcgaaaccctgtctctattaaaaatacaaaaaaattagccgggcgtggtggtgcatgcctgtaatcccagctactcaggaggctgaggcaggagaatcacttgaacccggaaggcggaggttgcagtgagccaagatcgtacctctgcactccagcctgggcgacagagggagactccatctcaaaaaaaaagaaaagaaaaaaaagaaaaagaaatgcccagaataggcaaatccacagagacagaaagagttggggttggcaggggctggggataggcggaaatggggagttcctgctaatggagttgggggattctttgaggagtgatgaaaaagctctgccactagatagtggagataattgcatattgtgagtgtactaaatgcccctgaattgtacattttaaaatggtttaaatgg

SEQ ID NO: 936749 - DNA, 709 bp, Homo sapiens
gaatgcatcgacaaaacatggaatattcatataatagactctcattcagccataagaaaagaatgagctactgatgcatcctccaacatgaccgagccttgaaaacattatgctaagtaaaataagtcagacccaaatcacatattgtgtggttccatttgttaatttatgaaatgcccagaatagggctgagcgaggtggctcacractgtaatcccagcactttggaggctgaggtgggcggatcatttgaggtcgggagttcgacaacaggatggccaacatggcgaaaccctgtctctattaaaaatacaaaaaaattagccgggcgtggtggtgcatgcctgtaatcccagctactcaggaggctgaggcaggagaatcacttgaacccggaaggcggaggttgcagtgagccaagatcgtacctctgcactccagcctgggcgacagagggagactccatctcaaaaaaaaagaaaagaaaaaaaagaaaaagaaatgcccagaataggcaaatccacagagacagaaagagttggggttggcaggggctggggataggcggaaatggggagttcctgctaatggagttgggggattctttgaggagtgatgaaaaagctctgccactagatagtggagataattgcatattgtgagtgtactaaatgcccctgaattgtacattttaaaatggtttaaatgg

SEQ ID NO: 936750 - DNA, 609 bp, Homo sapiens
tgggatgcagaacggatgttgtgttagcaggcatgaaaacgtttatctcctttatatctccgtcagagctcttgagtgaccaggtgcattgtcagtgagcagtaatattttgaaaggagtcttttttttcctgagcagcaggtctcaacagtgggctttaaatatttagtaattgctrtacacagatgtgctgtcatccaggctttgttgttccttttgtagagcacaggaagcgtagattgagcacaattcttaagagtcctaggatacttggaatggtaaatgagcattggcttcaacttaaagtcaccagatgcccaggtatggtggctcacacctgtaatcccagcactttgggaggccaaggtgggtggattgcttgatctcaggagctcaagaccagcctgggcaatgctgtgaggcctcatctctaccaaaaatacagaaattagccagatgtggtggtgtacgcctgtagtcccaactacctgggaagctgaggtgggagaatctcttgagcctgggaagccgaggttgcagtgagctgagatcatgccattccactccagcctgggtgacagagcaagaacctgtcttagaaaaaccaaa

SEQ ID NO: 936751 - DNA, 793 bp, Homo sapiens
tgaactaatgaaagatgatatgtgggttttatttcttagaagtccatggtgccctaagcattgattcaagacctccacctatgacagatattttctagcttttgctactcaaagtggggtccctggattcgcatcccctgttagagcctgtcagaaatgcggcatctggccgggcgcggtggctcacgcctgtaatcccagcactttgggaggctgaggtgggcggatcacgaggtcaggagatcgagaccatcctggctaacacggtgaaacccccgtctctactaaaaatacaaaaattagccaggtgtggtggtgggcgcctgcaatcccagctactcgggaggctgaggcaggagaatcacttgaacctgagaggcagaggttgcagtgagctgagatcgcgccactgcactccagcctgggcaacagagtgagactctgtctcaaaaaaaaaaaaatgcagcatctgaggcaccactcaagtcctactttatcagaacccacattttccacaacatcctcaggtgtttcctatacacatgaaggtttgtgaggttgtgytctacattgaggttctcaccttgacactgttggcatttagggccagatcattgtttctttgcaggcctctttcttgggcactgtgggatgtttggcaacatccctggtctccacccactagatgccagtagcaacccctgagtcgtgacaaccaaaaatgtctccagacttgtcaagtgtacccgggagagcaaagtcacccttgtggcaactcaaaagtgtggtctgt

SEQ ID NO: 936752 - DNA, 634 bp, Homo sapiens
aataagcacagaaccagctgccatttattcgggtgctcactgtgtacctggcactgtgctaaaaataagcagtgtgttactcttcattgcaaccccgttgggtagaaataattactagactcgtgttactgagaaggaaactgggggtcagggaggcccagtccacagccaagaagtggcaagcgggtctgagtttaggtgtgactccaaagcccacactgctgcacctgactctatactaccttttaattcaaagtaccaagatgaataaaattttaaatatcccctgctctaaatgtcctttcctgtaatttcggctcaattaaccaaataaattacatatgaagagtcaatcttcttggacacagttattccactttattaaaacaatacataatatatgtatgtatgtatacactatatttaggggtacaaataagtgcccctaacgttcttaaatattcataaaatttttatttaggagtgygttttattcatttaagcattaatgtatatagatcgttaactatttaacagaaagattggcattggtaaccactgttaattgatgatcaatcataaagagacaaagcaactttgataatacagtaaaactcaatagaaagttggtttg

SEQ ID NO: 936753 - DNA, 784 bp, Homo sapiens
ctccaagtttttgtcagtaaagttattttctttgtgagattattcctttttctcttgcacaaaaccttgccaaacactggtgtacctttgtccactgaggaaataactagcccacgtgtgactctctctcttcttattgttttcttcatttgtatatgtctttttttcttcttagtattattstaatgtcattaacacagggaaagagccctgtgtcaatggccatggaaacagagcaacggagcacagctttaattgaactacagcctcctttccatcacaccttttgcttggcccaaaccattttgtaatcactggagtataaatattgtagtttttgtcccttgttttgtctttctctccataaggtctgagtgacctcacacattccacttttccagataagacctaataccttccccttctccaaaacaatagattttctcctctgatacctctcattcaacatctacatttgcaaactgttgcaaggatttaatgaggtgatacatgcaaagttcttagaaccaatcataatgcacagtaaatgctaaattaaaagttggctcctccacaaacaacatagagttggttctgagtttagcttccaatccctccccactaagaaatgggtcaagccattatccaaatgtatctaatggaattatctatgttctttggcttaaattcttcattattcattcttccatgccagagcagtcttcactgaaacatcaaaaggctgcttactaatatcagggaattccctgactgcaattgccca

SEQ ID NO: 936754 - DNA, 569 bp, Homo sapiens
tgcgagggtaaacaaccgtgagatattcaacgcttaactataaaataggctttgtgttagatgattttgctccactgtaggccaatgtaagcattcggagcacatttaaggtaggctgggctaagctatggtgtttggcatgttaggtatgttaaatgtatttttgacttaccgtattttcaacttaggatggatttttcaggatgtaaccttattctaaatctagagcatctgtatattattaaaattaaatttacctttttaacttttaattttgaggtaattacagagtcatatgcagttgtaaaatataatacagagaaatctcatatatcctttacccagttttccccactggtaatattttacaaaacagcagtacagtggcagaaccatgcaaytgacgttgatgtaatccactgaccttattaagattttaccagttttacatgcactcatttgtgtgtgtgtgtttttagttctatgcaatttaatcacctttgtaaattcattatgacacgaccacagtcagaaatggaattccatcccaaggatctctgtgccacagc

SEQ ID NO: 936755 - DNA, 741 bp, Homo sapiens
gtatgtaccaacacacaatcctctctcttgctgagtagtattccatcctgtggatgtgccacggtctgcttatccagtcactcactgaaggataactgggcgtttgtgattatgaagagtactgtgttctgcagcgggcaggcctatgcaaacagacctccaagtcagaggaagctgagaggccaagaggctgacaaatccagtttctcagaaagaaacatttactaggggcttatgaacacaagtcacatctgtgtttcaggtggckttgagaagagatggtggatccctgtgctgcgccttcccagacacagggctcatagaccataggaaaggaatgcagtggatacttggagttgactccttggggaaaggcaagaatgtcatgtgaatctgcctgagggcaggattaatggtcaagattgttttgacctaagggcaggatttaaggtaagtgcaatgctcttccacaaggaacagttgatgaaatagaaatcttaaaggcattcccgggactggggtgaatcacaagccaacatgcagatcaacatccgagtgggagctgcgccagcctccgggtactgctttaaacactcatggacaattctatgtgaacatcgattttatttctttagggtaataccaaggagtcagagtgctgggggataaagtaactgtatgtataatgttttacaaaactgctaaatggctttccagagaggccagactcttttgcattct

SEQ ID NO: 936756 - DNA, 599 bp, Homo sapiens
gtcattgtccattatctttctttagctaatattcatcttgtgttctaaatgatgcattaaaaaaaagaaatgctcaatctgtacaatgaaaactataaaacaccaatgcaagaaatagaaggcaacaccaaaagatgaaaagatattccatgttcatggattgaaagatttcatattgttaaaaatatccataccacctaaagcaatctacagattcaatgcaatccctatcaaaatacccawgggattcttcatatcaatagaaaaaacaaccctaaaatgtatatagaaccgcaaaagacccaggatagccaaagctatcttgagcaaaatgaacaaaactgaaataattacattacctgacttcaaattatactacagagctatagtaaacaaaacagcatggtactggcataaaaacaaatatataaaccaatgaaacagaatagagaaccaagaaacaaatccatacatctatggtgaactcattttcaacaaaaatgccaagaacatacactggggaaaggacagtcccttcaacaaataatgctgggaaaactggatatctatatgcagaagaatgaaactagactccatct

SEQ ID NO: 936757 - DNA, 617 bp, Homo sapiens
aaaatgtcaatccgaaaaggttccatactgtatgattctatacatatgtacagcattctggaagtgacaaaatgagagatgcagaacaggttagtggttactcaggattatggaagagggagggagatggatgtggccctaaaagagcagcaaagagatccttgtgggactgtcctgtgtcttgaccatgtgtggtcaaaggaacctacacatatgataaaactccatagaagtaacacatgcatgcacatacacatgcacacacatgcatacatacatgcacacatgcacacacatgcacacatgcatacatactcatgcacacatagatgcacacacgtgcacacatacccacacatgtacacacgcacaatcacgtgcacacacaygcatacatgtacatgtacacacacgcacacacatgcacacacatgcatgcaaacgcacacaagtacacacatgtgcaggcacacccacgcacccacgcacacccatgcacccacgcacacacacatgcaaacaagcacgtgcacacacatgcatgcacacacacgcacacacatgtatgcgtgcacgcacacgagtgcatgaaaacctggcaacatctgaatcctggt

SEQ ID NO: 936758 - DNA, 560 bp, Homo sapiens
agtgtaatatatatatatatgtatataccacataatatataacattttctttatatatctaaaacgtgatatatatttctttaatcagtcatccactgatggacacttaggttgattccatatcattgctattgtgaatagtgctgcaataaacatacgagtgcaggtatcattttgatataattatttctttttctttgtgtagatacccagtagtgggattactgaattgaatggtagttcttttgagaaatatccatactgtttcccatagaggttgcactaacttatgttcccacyaacagtgtgtatgcattaccttttctttgcatccttgctgacatttgctatttttgactttttttttttttttttttttttgagctggagtttcactcttgttgcccaggctggagtgcaatggtgcaattttggctcactgcaacctccacatcccaggttcaagtgattttcctgactcagcctcccaagtagctgggtctacaggtgcctgccaccacacccaactaattttttgtatttttagtagagacggggtt

SEQ ID NO: 936759 - DNA, 768 bp, Homo sapiens
atatatatatatgtatataccacataatatataacattttctttatatatctaaaacgtgatatatatttctttaatcagtcatccactgatggacacttaggttgattccatatcattgctattgtgaatagtgctgcaataaacatacgagtgcaggtatcattttgatataattatttctttttctttgtgtagatacccagtagtgggattactgaattgaatggtagttcttttgagaaatatccatactgtttcccatagaggttgcactaacttatgttcccactaacagtgtgtatgcattaccttttctttgcatccttgctgacatttgctatttttgactttttttttttttttttttttttgagctggagtttcactcttgttgcccaggctggagtgcaatggtgcaattttggctcacygcaacctccacatcccaggttcaagtgattttcctgactcagcctcccaagtagctgggtctacaggtgcctgccaccacacccaactaattttttgtatttttagtagagacggggtttaaccatgttggctaggctggtcttgaactcctgacctcaggtgatccacctgcctcagcttcccaaagttctgggattacaggcgtgagccactgcacccgtcctatttttgactttataatgaccattctgactggtgtaagatgatatgtcattgtggttttaatttgcatttccctgatgattggtgatgttgagcattttttcatatgctt

SEQ ID NO: 936760 - DNA, 718 bp, Homo sapiens
gcctttgcacaggtacagctctgggctgtcacctaggtcccctgcctggagaactactctgtcaaagctcccgctgagggtgggatccaggtcagtgctttcttgggagcccagccttgcactcccatatcctccctggtcctccaggggtgggcacagagctggtgccaatggtgagtgccagggcttgctcccatgccccccagtaattctacatacaaaggatctagacccacaacagaggcagttaccttctcacagcatgcctgccagcatgggggctccccacaggcaccctgggagagcctgggggacccagggtatccaggtactctttttttttaactttaggatttcacttttcgttattcttttattttttaaaaattttttaatttttatatatttttttatttttttgtgatggagtttcactcttgttgcccaggctggagtgcaatgacgtgatctcggcgtccacttcctggattcaagtgattctcctaccacagtctcctgagtagctgggattacaggcacytatcaccatgcccagctaatctttttgtatttttagtagagatggggtttcaccatgttggccaggctggtcttgaactcctgacctagaactcctgatccatctgccttggcctcccaaagttctgggattataggcgtgagccactgagcccggcctctttattcttttaaaatt

SEQ ID NO: 936761 - DNA, 727 bp, Homo sapiens
aaagcaggcagaaaaatgtgagaaggacagatgggcctaacctaccagcccacatctttctcccgtgctggatgcctcttgccctagaacatccgactgcaggttcttcagttttgggtcttctctccttgctcgtcagcatgcagacagcctatgtgggaccttgtgatcatgtaagttaatacttaataaactatatatatatagagagacagagagagagagaaagagagagtgtgtttattagagtttatatatatgcttattataagtrtatatatatatatatatatatatatatagagagagagagagagagagagagagagagagagagagagagagagagatctcctattagttctgttcctctaacagaactctaatacagaaattggtaacagtagagtggggcattgctgaaaagatacctgaaaatgtgaatgtgactttggaactggataacagccagaggttggaacagtttgaagggcttagaaaaagacaggaaaatgtgggaaagtttggaacttgctagagaatcgttgaatggatttacccaaaatgttgacagtgatattgacaataaaattcagatggaggtgatctcagatggagatgaggaacttgttggaagctggaacaaaggtgactcttgtcatgttttagcaaagagactggcagcattttgcccctgccctagagatttgtagaactttgaacttga

SEQ ID NO: 936762 - DNA, 727 bp, Homo sapiens
aaagcaggcagaaaaatgtgagaaggacagatgggcctaacctaccagcccacatctttctcccgtgctggatgcctcttgccctagaacatccgactgcaggttcttcagttttgggtcttctctccttgctcgtcagcatgcagacagcctatgtgggaccttgtgatcatgtaagttaatacttaataaactatatatatatagagagacagagagagagagaaagagagagtgtgtttattagagtttatatatatgcttattataagtatatatatatatatatatatatatatatagagagagagagagagagagagagagagagagagagagagagagagagatctcctattagttctgttcctctaacagaactctaatacagaaattggtaacagtagagtggggcattgctgaaaagatacctgaaaatrtgaatgtgactttggaactggataacagccagaggttggaacagtttgaagggcttagaaaaagacaggaaaatgtgggaaagtttggaacttgctagagaatcgttgaatggatttacccaaaatgttgacagtgatattgacaataaaattcagatggaggtgatctcagatggagatgaggaacttgttggaagctggaacaaaggtgactcttgtcatgttttagcaaagagactggcagcattttgcccctgccctagagatttgtagaactttgaacttga

SEQ ID NO: 936763 - DNA, 727 bp, Homo sapiens
aaagcaggcagaaaaatgtgagaaggacagatgggcctaacctaccagcccacatctttctcccgtgctggatgcctcttgccctagaacatccgactgcaggttcttcagttttgggtcttctctccttgctcgtcagcatgcagacagcctatgtgggaccttgtgatcatgtaagttaatacttaataaactatatatatatagagagacagagagagagagaaagagagagtgtgtttattagagtttatatatatgcttattataagtatatatatatatatatatatatatatatagagagagagagagagagagagagagagagagagagagagagagagagatctcctattagttctgttcctctaacagaactctaatacagaaattggtaacagtagagtggggcattgctgaaaagatacctgaaaatgtkaatgtgactttggaactggataacagccagaggttggaacagtttgaagggcttagaaaaagacaggaaaatgtgggaaagtttggaacttgctagagaatcgttgaatggatttacccaaaatgttgacagtgatattgacaataaaattcagatggaggtgatctcagatggagatgaggaacttgttggaagctggaacaaaggtgactcttgtcatgttttagcaaagagactggcagcattttgcccctgccctagagatttgtagaactttgaacttga

SEQ ID NO: 936764 - DNA, 781 bp, Homo sapiens
catctggtcctggcctttttttttttttttctttgcaatttctttttattatcatttcaatcttgtggtttgttatttgcctgttcacagtttctatttattcctggtttattccacaagggttgtatatttctagaaacttatccatctcctctaggtttgctagtctgtgggtataaagktgttcatagcagccttgaataatcttttatagttctgtggtatcatttgtactatctccagttttatttctaattgagcttatctggattttccatcttcttggttaatctcactaatggtttatcaattttgcttattttttcagagatccagatttttgtttcattgatcttttatttattttttctttttcagttttctttagttatgctcgatctgagttatttctttccctctgctgggtttgggtttggtttattcttgtttctctagttccttgaggtatgaccttagattgcctattggtgatccttcagactttttgatgtaagcatttaatgctatgaactttcctcttagcaacacttttgttgtatccaaaaggttttgacaggctgcgtcactattatcattcagtccaaaggtgttttaaatttccatcttgatttctattttttttttttttagatgaattcttgctctgtctcccaggctggagtgcaatggcaagatcttggctaactgcaacctctgcctcctggattcaagcaattctcctgtctcagcctcccaagagctggggttacaggcatgtgcc

SEQ ID NO: 936765 - DNA, 781 bp, Homo sapiens
catctggtcctggcctttttttttttttttctttgcaatttctttttattatcatttcaatcttgtggtttgttatttgcctgttcacagtttctatttattcctggtttattccacaagggttgtatatttctagaaacttatccatctcctctaggtttgctagtctgtgggtataaaggtgttcatagcagccttgaataatcttttatagttctgtggtatcatttgtactatctccagttttatttctaattgagcttatctggattttccatcttcttggttaatctcactaatggtttatcaattttgcttattttttcagagatccagatttttgtttcattgatcttttatttattttttctttttcagttttctttagttatgctcgatctgagttatttctttccctctgctgggtttgggtttggtttattcttgtttctctagttccttgaggtatgaccttagattgcctattggtgatccttcagactttttgatgtaagcatttaatgctatgaactttcctcttagcaacacttttgttgtatccaaaargttttgacaggctgcgtcactattatcattcagtccaaaggtgttttaaatttccatcttgatttctattttttttttttttagatgaattcttgctctgtctcccaggctggagtgcaatggcaagatcttggctaactgcaacctctgcctcctggattcaagcaattctcctgtctcagcctcccaagagctggggttacaggcatgtgcc

SEQ ID NO: 936766 - DNA, 620 bp, Homo sapiens
acctcagcccagaagttccggacaaacctagacaacatggagaacccatgcctctactaaatatattaaaattacgtggacgtagtgtgcctggtcccagctctagtacgggcggcggaggaacgaggatccctttaacctaggaggtcraggcctcaacgagctgagattgagatcgcaccactgcattccagtctgggtgacagattgagaccctgtctaaaacaacaacaacaaatgagaataaacacaaagggtatgcaagagctagatattctggaactttattttgaagtcacccatgagttcaaagttgctgaatctaatgatcagtttccagtcatgttacttgaatcatgataagtatatgatactttagatcatttccttctccttacacactttctccttttgactttcagggtgttacactctcttgtttgctttctctttgtctcactggctatttattttcaaactactttaattgttctctctttcacttcttaatattggagttctctcaagaccagtatgccctctctcaccactcctattcaacatagtattggaagttctggccatgtcaatcaggcaagagaaagaaataaagggtattc

SEQ ID NO: 936767 - DNA, 620 bp, Homo sapiens
acctcagcccagaagttccggacaaacctagacaacatggagaacccatgcctctactaaatatattaaaattacgtggacgtagtgtgcctggtcccagctctagtacgggcggcggaggaacgaggatccctttaacctaggaggtcaaggcctcaacgagctgasattgagatcgcaccactgcattccagtctgggtgacagattgagaccctgtctaaaacaacaacaacaaatgagaataaacacaaagggtatgcaagagctagatattctggaactttattttgaagtcacccatgagttcaaagttgctgaatctaatgatcagtttccagtcatgttacttgaatcatgataagtatatgatactttagatcatttccttctccttacacactttctccttttgactttcagggtgttacactctcttgtttgctttctctttgtctcactggctatttattttcaaactactttaattgttctctctttcacttcttaatattggagttctctcaagaccagtatgccctctctcaccactcctattcaacatagtattggaagttctggccatgtcaatcaggcaagagaaagaaataaagggtattc

SEQ ID NO: 936768 - DNA, 620 bp, Homo sapiens
acctcagcccagaagttccggacaaacctagacaacatggagaacccatgcctctactaaatatattaaaattacgtggacgtagtgtgcctggtcccagctctagtacgggcggcggaggaacgaggatccctttaacctaggaggtcaaggcctcaacgagctgagattgagatcgcaccactgcattccagtctgggtgacagattgagaccctgtctaaaacaacaacaacaaatgagaataaacacaaagggtatgcaagagctagatattctggaactttattttgaagtcacccatgagttcaaagttgctgaatctaatgatcagtttccagtcatgttacttgartcatgataagtatatgatactttagatcatttccttctccttacacactttctccttttgactttcagggtgttacactctcttgtttgctttctctttgtctcactggctatttattttcaaactactttaattgttctctctttcacttcttaatattggagttctctcaagaccagtatgccctctctcaccactcctattcaacatagtattggaagttctggccatgtcaatcaggcaagagaaagaaataaagggtattc

SEQ ID NO: 936769 - DNA, 573 bp, Homo sapiens
gacaggttggagtaaaaaacttcatcacaaacctgttaacaagccatccccccatgaggtcatggaggccacaagagtagtaaaaacaaggcactcctgctccttatagggtggggttttaggtagaggcctaaggggagtcaggactcccaccccaatgggcaataacaaaaaaccttcacttttcctcatatcaatggagcttaggtgggaatctgtattctacatctacatgacagtagaaggtgacattctttcccattcccccactggaatagtgtcagaggaaagcagctaaaatgaaatgtttaaagaatatttgcattcttacaactaatactcaaaatgtctagctttcagtaaaatccatcattataccaargactcagaaaattttgcctgaatgagaaaaaatgaacaaccaacaccaaaagcaagatgacataaatgttaggattatctgtcaaaactttaaaaatagctatgataaaaatacaattatgaagcaataatgaacatgcttgaaggaaatggaaaaaaaaattctcagcaaagtaatagaaaatttaggaa

SEQ ID NO: 936770 - DNA, 596 bp, Homo sapiens
tgaaccgaagacacacttctgttttttaattttttaaatttgttttgcgtactgctattctagttagacttcctcgttttcttttcaaatgcactttttggtaagcgtttgtatcaggatgccttgaatgttagtgtaatagaaaacaattaaatggcttcaacagtcagagtttactgtttcacatattttgcttggttatgtgaaaaataaatgaagataacctttttaggtatttgttacagcagcacccctaattcttggcaccagtttctgcctcagtctgttcaggctgctgtaacaaagtattatagactgggtgccttataaagaacagaaatttatttcttactattctggaggttggaagtccaaggtcagggtgcccacatgtttgggttctgatgagggccctcttttaggtcaaagactactrctgtcttttcattgtatctgcaggtggtggaaagagaatgagagaggtttgggaaatcccttttataagagcactaatcccattcatgagggctctacattcatgacctaattaccccccagaggccctacgtcctaaaaccattacactggggggttaa

SEQ ID NO: 936771 - DNA, 761 bp, Homo sapiens
aaatcaatatgaaaatgtcaagttgaatgtttaccatagcaagagtcaaaagcattcagaagcagagggcaccgactgtggggttcataatggagattggacttcaagcatagggactcagggagtcagacagcgtatgggtgggaaaggaaactttcagccagggagatcacttgagcaaagttgggagaatctaaattttgtgctttaatgagaccgagatcattctgcccagagcaagatattcaagtgtaaataaaaaaatgataagagcaggtacaaaaatgcatgttgaataccggttctttatggagtgtgccttatcctgttcaggctgccacagcaaagtgccatagactggctggcttgtcaacaacggtgttggggctggaagtccataacgaaggtgccggcagcttcactgtctggtgagggctgctgcctggttcacagacggcatcttctcattgcagcctcacatggtggaacgggcgagacagctctctggggyccctttagtaaatgtgctgatcccattcacggggccccaccctcatgaccacgccacagcccaaaggcctcatctcccaacaccattgctttggggattaggtttcaacatacgaatttggggaggacacagcattcagcccatagtggagcagatcaccacaaagtaggtttaagcagctaagtgacacaagcgtcctggtttggaaatataaatttactgaatttgccatgataggtgtgtatgttgt

SEQ ID NO: 936772 - DNA, 647 bp, Homo sapiens
aattcataggctgctcctaagatgtctaagtcttgcattttcacatttatcatagcctgtcctcgcgcgggagaatgtacacctgttttggaaggatctaccccaccaggtaacagtaagaaagactaagatgaacagatatggaagatagctcagaggctgcaatgggataaattctgggcagaactcaaacagtggtccaygcaaccttgatcccttccctgaactctttctctcttactcaatccaacctcaatttattggctcccataagttccctgtctacccctcttgttctaggaactctccatttcaaaagtacttccaagaatataattcagggacgtccacactctaccagatctcagccttttgcttccccagggcaaacccctgctaacccctcttccacacagaagtccaccatcttcatctccacaccatcttcacttcacttcccctccaccttcacatatgcaagctgttgtgcataaattacacaaattataattataacattatacaaactctgtatgtataattttaacacgggcttggtaaatagcggaattatgtcactgtaataatgttgaagcaccattaggtcatatctgattattactaccatatcaatagtgtgtgccccc

SEQ ID NO: 936773 - DNA, 731 bp, Homo sapiens
caactcaaaagtcccaagtcccaagtccaagtccaaagtctcatcagacaatgagttccttctacctacgatactgtaaaatcaaaacaagccatttacttccaagacccagtgggggtataggcattgggtaaacacttcctttccaaaagggaaaaattggcccaaaaaaaggaagccagaggctccatgcaagatcaaaacccagcagggcagcccttaaatcttatagctccaaaataatctcctttgactccatgtcccacatccagagcatgctggtgtaaggggtgggctcccaaggccttgggcagctctacctctttggctttgcagggttcagcccccatrgctgctttcacaggttgttgtgtgcctggggcttttccaggtgcagggagcaagctaccagtggacgtagcattctggagtctggaggatggtggcccccttctcacagctccactaggcagtgcctcactggggactgtgtggggattccaaccccacatttccccttggcactctcctagcagaggctctctgtgagggctctgcctctgtggcaggcttctgcttgggcacccaggctttcccatacatcctctgaaatctaggcaaaggctactaagactcctttactcttgcactgtgtgggcctgcaggcttaacaccacatgaatgcctccaaagctcatggcttttgtcgtctggagtggcagccagagatg

SEQ ID NO: 936774 - DNA, 556 bp, Homo sapiens
aatatttacaattgttatatcctcttgatgaattgatcgcttttctacagttttaaatttaaagtatattttatctaagaatagctatccttgttctcttttgaatcctttgtgtgaaatatctttttccctacttttggttttattacatattctatttttttaaatattctttttgatagatagacacaaaatctsactacatggcacaggcttgtcttgaactcctgaactcaagcgatccccccacctcagcctcccaaagtgctgggattacaagtgtgagccaccacacctgaccccagtctatattattaaaagtaaagttagtctcatgtcggcaacatatagttgggtcttgtcttttttttttttaaaccattcagtcattttatgtctctttattagataacttaatccatttacattcaaagtaattattgataagcaaaaacttactaacaccattacattaattgttttctggttgttttgtaggtattttgcttctttctttcttggttgctgtcttcctttgtggtttgatggttttttg

SEQ ID NO: 936775 - DNA, 556 bp, Homo sapiens
aatatttacaattgttatatcctcttgatgaattgatcgcttttctacagttttaaatttaaagtatattttatctaagaatagctatccttgttctcttttgaatcctttgtgtgaaatatctttttccctacttttggttttattacatattctatttttttaaatattctttttgatagatagacacaaaatctgactacatggcacaggcttgtcttgaactcctgaactcaagcgatccccccacctcagcctcccaaagtgctgggattacaagtgtgagccaccacacctgaccccagtctatattattaaaagtaaagttagtctcatgtcggcaacatatagttgggtcttgycttttttttttttaaaccattcagtcattttatgtctctttattagataacttaatccatttacattcaaagtaattattgataagcaaaaacttactaacaccattacattaattgttttctggttgttttgtaggtattttgcttctttctttcttggttgctgtcttcctttgtggtttgatggttttttg

SEQ ID NO: 936776 - DNA, 739 bp, Homo sapiens; identical to SEQ ID NO: 932114

SEQ ID NO: 936777 - DNA, 739 bp, Homo sapiens; identical to SEQ ID NO: 932115

SEQ ID NO: 936778 - DNA, 739 bp, Homo sapiens; identical to SEQ ID NO: 932116

SEQ ID NO: 936779 - DNA, 634 bp, Homo sapiens
ctaaataaaagatattacactttttacttttctgacaaaatattctatttgagctcttatattaaaccaattaattaaagctcttttatattacacacacaacatacataaatacatagacagaataagaaaggagtcattccctaagctgggaattgaaccctgaacctgggctgccattgtgatggtggagaccaagagaaagtactgccacatggttacaaggtgacattcccaaggacatacaagacaagatagaaacctcatccaggttttttttttttttttttttttcagggacttgcagcaaagtttktaactgaccagtttgctgggtcatcttgaacagtgggcttatgggagtactaagcccacattctatcctaaggtaccactcttttatgacagaacaacacaaaaaaacacacaaagcacaccatatttattatagtttaagactagcctcacaaatcctttttctcattaatcaaaactttaaagagaaaataaacactgatttttgccattcattcaacaggtttgcacagagagagaaagtaaggggaagggagaaaagcattgcttacagcagaatgggggaagtgaggtgctcagagaggccagagaaagaccc

SEQ ID NO: 936780 - DNA, 623 bp, Homo sapiens
tgggaattgaaccctgaacctgggctgccattgtgatggtggagaccaagagaaagtactgccacatggttacaaggtgacattcccaaggacatacaagacaagatagaaacctcatccaggttttttttttttttttttttttcagggacttgcagcaaagtttgtaactgaccagtttgctgggtcatyttgaacagtgggcttatgggagtactaagcccacattctatcctaaggtaccactcttttatgacagaacaacacaaaaaaacacacaaagcacaccatatttattatagtttaagactagcctcacaaatcctttttctcattaatcaaaactttaaagagaaaataaacactgatttttgccattcattcaacaggtttgcacagagagagaaagtaaggggaagggagaaaagcattgcttacagcagaatgggggaagtgaggtgctcagagaggccagagaaagacccacccattgcagctggcactgaatcaaaagttcaggcagctgcttgtcagtcgagaagggatcttttccagtactccctttggcaatcaagtttccccttttatggaggaaaaagttccccatgtcccatgatccttta

SEQ ID NO: 936781 - DNA, 623 bp, Homo sapiens
tgggaattgaaccctgaacctgggctgccattgtgatggtggagaccaagagaaagtactgccacatggttacaaggtgacattcccaaggacatacaagacaagatagaaacctcatccaggttttttttttttttttttttttcagggacttgcagcaaagtttgtaactgaccagtttgctgggtcatcttgaacagtgggcttatgggagtactaagcccacattctatcctaaggtaccactyttttatgacagaacaacacaaaaaaacacacaaagcacaccatatttattatagtttaagactagcctcacaaatcctttttctcattaatcaaaactttaaagagaaaataaacactgatttttgccattcattcaacaggtttgcacagagagagaaagtaaggggaagggagaaaagcattgcttacagcagaatgggggaagtgaggtgctcagagaggccagagaaagacccacccattgcagctggcactgaatcaaaagttcaggcagctgcttgtcagtcgagaagggatcttttccagtactccctttggcaatcaagtttccccttttatggaggaaaaagttccccatgtcccatgatccttta

SEQ ID NO: 936782 - DNA, 636 bp, Homo sapiens
ttgtaatagaaaagaaaaactcattttctgaggagaaattcaagctggctgcacaaatttgcataagtaatgaggagccaaatgctaattgccaagacaatggggaaaatgtctccaggatgtgtcagagaccttcttggcagcccctcccatcatagacctagaggcctatgagagaaaaatggtttcctgggccaggtccagcccccmctgctgtatgcagcttctggacttggtgccctgcatctcagcagcttcagcaatggctaaaaggggccaaggtacagctcaggctgttgcttcagagggtgcaagccccaagccttggcagcttccatgtggtattgagcttgagatgtgtagaagacaataattgaggtttggaaatctctgcctagatttcagaggaagtatggaaattcctggatgtccaggcagaagtctgctgcagaggtggagccctcatggagaacctctgctagggcagtgcggaagggaagtgtagggttggagcccccacacagagttcccactggggtactgcctagtggaactgtgagaagagagcaaacatccttcagaccccagaatggtagatccacgtacagcttgcaccatgtgtctggaaaagcctca

SEQ ID NO: 936783 - DNA, 563 bp, Homo sapiens
agcacttactaaatataataactcacaattccttaatttttgttcttgctttcaactaaggaccaatgagggaaagccatacatgtactcccaaccaatcacatatgatgcccctcttctagttagcctgcccacagcttccccatgccacagcttccagttaaggcatacctagaaccttctcttttttccactatagcgctttcccactcctctgcctgttgtgagtctctgccaaacacaagtgatgatggtggattctcttggtatagcaagtgctgaataaatagccttcacttgttatcatgttggtggtggtatgggttgaactgtgtcccatcttctccccaaaaaagatatattgaactccttatccccagtacctcaatctgtgatcatatttggaatcagrgtattcacagaggtaaccaacttaaaatcagatcaacaggctgggcctagcccaagataactggtatcctcataaaaggggaaatttggacacatggataggcacatgcagaaggaaggtgatgtgaaggcacacagggaaaatggccatg

SEQ ID NO: 936784 - DNA, 664 bp, Homo sapiens
tgttctccaaataactgcattgcgtggatagcatgtgtcttgaattctgtgtaccaaggctgtcataatagtagcttcccctttactgagaggaatagtagcttcccctttactgagcctgtataatatcaaggtctgtactcagggcctaataaagggaagatataaatggaagataatattactataggtgattatgggtctaayagcatacattaaaggtttaataaaattatctttgaaaatgtgcttttttatatatactctatgtatcttttttatatatactcacattgaaacaagccaaattaggctcattcaccaaattcttaatatgaaagttccttatagacactttgttgaaatattgtcactcatttaaatgctacatacattttaatttgctggctccgtagtatcactcaaatataaactttgaattaaattctaatcataaaatttgaacatattagtccaaggaaatagctggttttcatgtgtacaccataaaatgtcaacattattttaaatattatcttatctaatgaatggtgttttctcaagtatcaagtagcttgtttcctattacatcataatatccagagggcattttctcctccactgccccccacttccttcttactttagggaagacaaagacaaa

SEQ ID NO: 936785 - DNA, 611 bp, Homo sapiens
ttgccctttaggcctgtgatgggaagggccgccacaaaggtctctgaaatgccttagaggcattttccccattattatgtatattagctcttagttcacttttaattgtgcaaatacctctagcaagtggtctctccacagcctgcctgaattcttctcccaaaaaagcttctttctctgccacatggctaagctgcaaattttccaaacttttatgctctayttcccttttaaatataaatttcaaaattaagttatttctttgctcctgcacctaagcataggttgttagaagcagccaggccatatattgaatgctatgctgctttgaaatttcttccaccagataccctaaatcatcagcctcatgctcaaacttccacagatccatagggcataaagagaatgcagccaatctctttcctaaggcatatcacacctaaatgacatttgctccagttcccactaagtttctcatttccatctgagaccttggcaacccagacttcactgtccatatcactatcagcattttggtcacaaccatttactcagtctctaagaagtttcaaactttccctcatcaagaactatattcttctgagccctcc

SEQ ID NO: 936786 - DNA, 608 bp, Homo sapiens
attctgctctctgcttctatgtgttggattttttttttttttagcttccacatataagtcagaacatgcagtatttgcctccatgtctggtttatttcattagcataaagtccttcaggttcattcatgttgtcacaaatgacaagattycctgcttctttgaggctgaataggtttctaatgtgtatatataccatattttcttgtccattcatcaattgatgaacactcagattgattccataacttgactgttttgaatagtgctgcaataaacataggagttcaatatctctcagacttcctgatttcaaatcttttggatacataccctggagtagaattcctggatgttatttctaacattcttagtacagtgcctggcacatagaaagctttccaaacagatagctactcttactagtaatgactaggaatgacttatcacctcagtcattgttactattataaaaactactctataaactattatgaacaccactcatcttggtgtgcaagatgagccagagatgggaataagctggaggaagggagatcagttaggaggcctctggaataatctaggaaagaatattctgttttctgtc

SEQ ID NO: 936787 - DNA, 612 bp, Homo sapiens
aagcctttgctgagttttagctttaagcagaggtttctccagtcttacttccatcctacaaaggcccaaggctttatggtccattcctctgagtgcagcagcctgtgaaaacagtagctctaggccattggtgtttagttgaaattccgagggctgtcagcttaagcacttactagtttcctgatattgttttgtttctaatctcagagtatttcttagtttcttgcaagctcatcagtttttaataggtatcatgcgtgagtgaatataaatttttacatatatataagagaggatttattttgttgtttacaagagttttggggggatctctaagtctcttcttgccttttaatggaaacgttctcgtcattttttttaatcaaaaaatcacattttgtttytcctgtgacttcttcctgtaggtgagcagtaggtcatccagtcccagtgtcagaatgattactacctcaggaccaacctcagaaaagccaactcgaagtcatccatggacccctgatgattccacaggtgaccagtctgtttcttcatacttatgaagttgaatcagtcatgtttatattcatttggccatgtcattactctaatgtt

SEQ ID NO: 936788 - DNA, 639 bp, Homo sapiens
cctgttgtttccccttcctcagatgggatttcttgctgatgcaattaccagccactgttctgagtgtattacaagtatgaacttcgtgatcacaagatctttctgagttaggtaacattattatccccagtttacaaatgaggatactgacggagttcagaacacgctaccccagaatacgtcatcttgtcatactatatattttagacttgaaggaaattgagaaaaccgtaaaarcagaaggtcacgctctgatcttccctcaccctctttcccctgaaatgggccattaaacctcactgaccttcccctgaaaatcggtcgtaaaactctcatttcagaagggccctccctatacccggaagaaaggaaagaagacaagagaagactgaacaaacaggccttgctaaattccaccccccactcccgcagtctattaccattagaccgtagccttttgtcctccagacatacttccgtacaactatccataaaaatacagagccccctcttactcatggagatacattccaacatccctagtggatgcttgaaaccatggataatactgaactgtatatacactggggttttttctgtacatacatacctatgacaagttaaatgtataaattaggc

SEQ ID NO: 936789 - DNA, 796 bp, Homo sapiens
cactgctctcctcaaagctgtcagacagggacatttaagtctgcagaggttactgctgtctttttgtttgtctgtgtcctgcccccagaggtggagcctacagaggcaggcaggcctccttgagctgtggtgggctgcacccagtttgagcttcctggctgctttgtttacctaatcaagcctgggcaatggcgggtgcccctcccccagcctcgctgctgccttgcagtttgatctcagactgctgtgctagcaatcagcgagactgagccaagatggccaaataggaacagctccggtctacagctcccagcrtgagcgacgcagaagatgggtgatttctgcatttccatctgaggtactgggttcatctcactagggagtgccagacagtgggcacaggtcagtgggtgcagtgcaccttgcatgagccgaagcagggcgaggcattgcctcactggggaagctcaaggggtcagggagttccctttcctagtcaaagaaaggggtgacagacaacacctggaaaatcgggtcactcccaccccaatactgtgcttttccgacgggcttaaaaaacggtgcaccaggagattatatcccacacctggctcggagggtcctatgcccagggagtctcgctgattgctagcagttgtttttaagacaagatttgttagtacaatgttccttaggagtgattctaacgtagtttattagaactgattatattattgttgtaggaaaaaaccgggttcttatcagaggaccaggataatttagacacgtggacata

SEQ ID NO: 936790 - DNA, 796 bp, Homo sapiens
cactgctctcctcaaagctgtcagacagggacatttaagtctgcagaggttactgctgtctttttgtttgtctgtgtcctgcccccagaggtggagcctacagaggcaggcaggcctccttgagctgtggtgggctgcacccagtttgagcttcctggctgctttgtttacctaatcaagcctgggcaatggcgggtgcccctcccccagcctcgctgctgccttgcagtttgatctcagactgctgtgctagcaatcagcgagactgagccaagatggccaaataggaacagctccggtctacagctcccagcatgagcgacgcagaagatgggtgatttctgcatttccatctgaggtactgggttcatctcactagggagtgccagacagtgggcacaggtcagtgggtgcagtgcaccttgcatgagccgaagcagggcgaggcattgcctcactggggaagcwcaaggggtcagggagttccctttcctagtcaaagaaaggggtgacagacaacacctggaaaatcgggtcactcccaccccaatactgtgcttttccgacgggcttaaaaaacggtgcaccaggagattatatcccacacctggctcggagggtcctatgcccagggagtctcgctgattgctagcagttgtttttaagacaagatttgttagtacaatgttccttaggagtgattctaacgtagtttattagaactgattatattattgttgtaggaaaaaaccgggttcttatcagaggaccaggataatttagacacgtggacata

SEQ ID NO: 936791 - DNA, 659 bp, Homo sapiens
tccctaacaagggagtggggctttcaggcataattagaaaagcatgtgaaaagagtgaagttccccagtcacaacttagttgctgggagaagtatctagtgactgcctgtcctaggacccctcggatagtgacagatctggaggacagttgtccggaacaggagagtaagactgagaaggccgcgccagtgtccaggagacagttaacctcctggccctcaatggtcacacatacccggggctctgtgagggtgatggcatgggctggcacttgccccaggcaccctcagtcttrctgctggatcttctggttagtggcttctgactcagaggaccttcatcccctggggcagtaggccttccagtgattcccttgacataaggggcatggacaagggggtagcttatttctacttggacaatcttctttaaagtgcccttgtagatcacactggaagcaagccctattaggcatttgatttgccctttccagagcctccaaagtccgcttgcctgagggctatgactaaagaagtggccttttgtttatcccgtttgtccaatccgcctgctcctcctgatctctattataaacaactgaggttgccaagttcaatagtgtttctaaattttgctccaggcctaaggcggacttttga

SEQ ID NO: 936792 - DNA, 659 bp, Homo sapiens
tccctaacaagggagtggggctttcaggcataattagaaaagcatgtgaaaagagtgaagttccccagtcacaacttagttgctgggagaagtatctagtgactgcctgtcctaggacccctcggatagtgacagatctggaggacagttgtccggaacaggagagtaagactgagaaggccgcgccagtgtccaggagacagttaacctcctggccctcaatggtcacacatacccggggctctgtgagggtgatggcatgggctggcacttgccccaggcaccctcagtcttgctgctggatcttctggttagtggcttctgactcagaggaccttcatcccctggggcagtaggccttccagtgattcccttgacataaggggcatggacaagggggtagcttatttctacttggacaatcttctttaaagtgcccttgtagatcacactggaagcaagccctattaggcatttgatttgccctttccagagcctccaaagtcygcttgcctgagggctatgactaaagaagtggccttttgtttatcccgtttgtccaatccgcctgctcctcctgatctctattataaacaactgaggttgccaagttcaatagtgtttctaaattttgctccaggcctaaggcggacttttga

SEQ ID NO: 936793 - DNA, 560 bp, Homo sapiens
tatcctttaagattagttggccttcaagagagtcaggtgacagagaggtatgcttcctcaatgtctcccttagtctctccagaaaggccgtaggattttcttcctttccctgtgttatagtggacatcattgaataattcataggcttcttcctagttttccttagtccttctagcatgcaaggtagcaaatgtctgtggcaccaatctccatgttctgawtctgtgtcccagtgtgggtctacactggaaactgcctgctggcctgtggggaattgttctctttcctctgttgtcatcctgtcattgacctgacggagataccagagattgccacactcttgggctgcagttttggtggcacttctctcatttggggttagtgtttgatctagcagtaacattatatgtctccatgtcagatcaaaagattgtcctaacccttgtaaaacattaatatagccatcagggttatctgagaatttacctaggtctattttaatttgcttcaactgtgagagggaaaaaggtgcatacactctgactgggctgaattctcca

SEQ ID NO: 936794 - DNA, 628 bp, Homo sapiens
tttgtaaaagaaagctaaaactattgtaaatttgactcagtattgcaataaaaggtgtgttaaaagaaagatgtggagtggcttttgccttcattttgtgatttatgagcataattggagaattttcattgtttggtgctttgtggtagtgaatttggaatttcgtgtgacgcctttggkccagcatagttttccccacttcactcctgcctgccccctgcatgttctcaaggcacgtgggagatagaaggatgtaactttgaaggccagcacctcaaatgataagcagttaccacttcttgtaaaaatctcagcaaatgtttgcatgccccataaatagctggctctggccaagtagtcaccgtacctggtctctcagcctcggctccatgggattctaaattaggctctcagattgcttgaacccggaaggcagaggttgcagtgagccgagatcgcgccactgcactccagcctgggtgatggaggcagactctgtctcaaaataaataaataaaaataaataaactaggctttcaggaggcatgatgaatggactgaactagagggtgtccaaaaagcctcagcaggactccattccccaccccaagctcctcccaggaggagc

SEQ ID NO: 936795 - DNA, 626 bp, Homo sapiens
ggtctcgaactcccgacctcaggtgatccgccagcctcaacctcccaaagtgctaggattacaggcgtgagccaccatgcccagcccaaagtcaaaattatttatctcccttagtgtgtgtgtgtgtgtgtgtgtgtgtgtgtgtgtgtgtttaaacyttgcagttctagctcaaaggataactttcttatattttgattcagctcttcagatgagctttttagtttttcttttccaactggaatttcttcattcaaagcacatcagttatttctagttgcaggagtcttggctacatatcttattggggattacatatcttaggtttttcatagttgctttttgttgtggtaacaactgagggcccattcagtgtaatacgctactagttaaaacagaggcacttgaggaccataaacaagccataaacaagttcaacaccagggcttgtggtgaaaaatgaagcatgagaaaatttatctttcctacagattgggttcagtgattactgtgttttgttttttttaacaaggtagcattgtagattataacattataatattaagtactgattcagaatcagacaaattgggtgacattttatggtttttcttcatctataaaat

SEQ ID NO: 936796 - DNA, 576 bp, Homo sapiens
tggcgcgttagcacgcctgtaatcccaggctatttgggaggctgaggcaggagaattgcttgagcttgggagatcaaggctgtagtgagctgttccagcctgagcagcagagtgagaccatatctcaaaaaaaaaaaaaaaaaaaaaaaaagaactgggaatataatcgttatgacayatttacctgtgcttaggttcatatgttagtgagggagatataaatgcttatagtattgtacataaataatataaaaaaaaactgtatcttcaagcagacaggtatgtaccagcatggaggtgggagtaactatgcctaaggaaatctggtgcaactttgcagaggtaacctgttagttgcatagaaatttgccagtagaaacacagggtatagaaagacatttcagatgtgggaaatatgtgtaaagtcatagaagtgaaagaaagacatggtgcgctataggaagtgcagataggttggtataattggagggcaaagtattttaggggaagaaaattgaaactagaaagagtttaaaggcctgggataaaaaggaactttgatggacacaaagagcc

SEQ ID NO: 936797 - DNA, 576 bp, Homo sapiens
tggcgcgttagcacgcctgtaatcccaggctatttgggaggctgaggcaggagaattgcttgagcttgggagatcaaggctgtagtgagctgttccagcctgagcagcagagtgagaccatatctcaaaaaaaaaaaaaaaaaaaaaaaaagaactgggaatataatcgttatgacacatttacctgtgcttaggttcatatgttagtgagggaratataaatgcttatagtattgtacataaataatataaaaaaaaactgtatcttcaagcagacaggtatgtaccagcatggaggtgggagtaactatgcctaaggaaatctggtgcaactttgcagaggtaacctgttagttgcatagaaatttgccagtagaaacacagggtatagaaagacatttcagatgtgggaaatatgtgtaaagtcatagaagtgaaagaaagacatggtgcgctataggaagtgcagataggttggtataattggagggcaaagtattttaggggaagaaaattgaaactagaaagagtttaaaggcctgggataaaaaggaactttgatggacacaaagagcc

SEQ ID NO: 936798 - DNA, 617 bp, Homo sapiens
tagaggaaactgcattccaggcaggaaaagtcactaatgcaaaggcccccaaagggaggaatcttggcctttttttttagaatcaaaaaggccagtgtagctagagcatagtgagctacggtagagtgctaccatgtgaggctgcaatggctaggtgtagactctgtgagactttgaggtagagtcccagggtaaagagtttgatttttttttagcctaatgtagtkgaaagacattggatgattttgaataagtgagtgatatgatctgatttatgttttaaatagatgactgtggctgctgcttgaaagccattttggaggataaaaaaggaatggaagcgggaggactagtctggaagttttcacattaatctagatagtggcttgaaatggattggttgtggtgatatgactgacagaagtcagtggatttcagttagtttttaaagtaatattgacatggtggattggttgtgagagaaagagaagaatcagcataatgatgatgatgatgagagcttaagcatagtgaaaatttaatatttgccaagtgctattctaaatgctttatatgaattaatgcatttagtctttatggtaaccctataaggcagg

SEQ ID NO: 936799 - DNA, 617 bp, Homo sapiens
tagaggaaactgcattccaggcaggaaaagtcactaatgcaaaggcccccaaagggaggaatcttggcctttttttttagaatcaaaaaggccagtgtagctagagcatagtgagctacggtagagtgctaccatgtgaggctgcaatggctaggtgtagactctgtgagactttgaggtagagtcccagggtaaagagtttgatttttttttagcctaatgtagttgaaagacattggatgattttgaataagtgagtgatatgatctgatttrtgttttaaatagatgactgtggctgctgcttgaaagccattttggaggataaaaaaggaatggaagcgggaggactagtctggaagttttcacattaatctagatagtggcttgaaatggattggttgtggtgatatgactgacagaagtcagtggatttcagttagtttttaaagtaatattgacatggtggattggttgtgagagaaagagaagaatcagcataatgatgatgatgatgagagcttaagcatagtgaaaatttaatatttgccaagtgctattctaaatgctttatatgaattaatgcatttagtctttatggtaaccctataaggcagg

SEQ ID NO: 936800 - DNA, 617 bp, Homo sapiens
tagaggaaactgcattccaggcaggaaaagtcactaatgcaaaggcccccaaagggaggaatcttggcctttttttttagaatcaaaaaggccagtgtagctagagcatagtgagctacggtagagtgctaccatgtgaggctgcaatggctaggtgtagactctgtgagactttgaggtagagtcccagggtaaagagtttgatttttttttagcctaatgtagttgaaagacattggatgattttgaataagtgagtgatatgatctgatttatgttttaaatagatgactgtggctgctgcttgaaagccattttggaggayaaaaaaggaatggaagcgggaggactagtctggaagttttcacattaatctagatagtggcttgaaatggattggttgtggtgatatgactgacagaagtcagtggatttcagttagtttttaaagtaatattgacatggtggattggttgtgagagaaagagaagaatcagcataatgatgatgatgatgagagcttaagcatagtgaaaatttaatatttgccaagtgctattctaaatgctttatatgaattaatgcatttagtctttatggtaaccctataaggcagg

SEQ ID NO: 936801 - DNA, 609 bp, Homo sapiens
cattaatctagatagtggcttgaaatggattggttgtggtgatatgactgacagaagtcagtggatttcagttagtttttaaagtaatattgacatggtggattggttgtgagagaaagagaagaatcagcataatgatgatgatgatgagagcttaagcatagtgaaaatttaatatttgccaagtgctattctaaatkctttatatgaattaatgcatttagtctttatggtaaccctataaggcaggtaccattatcactctctgaggcttgtagtatctttatacaggtagtgaggagcagaagcaggatttgaatccatacagtctggcatcaaggtctatgttcttgaccattatattacactgcctagaattttggcttgaataatttattagggggtgatgcctttgccaagatgtagaagactccgagaaaaatatgtaaaataaaataaagagttctattctgaccacgttaagtagaaggtgcttattggttacacaaatggagatggcaagtttgaagttggatttgagtgtctaaatttttggggaggagaatgtgcagccatgagactccaggaagagtgtgggatgtcagtgga

SEQ ID NO: 936802 - DNA, 643 bp, Homo sapiens
gtgtttgccggaggtccactccagaccctgtttgcctgggtatcagcagcgaagcctgcagaacagcagatattggtgaacagcaaatgttgctgcctgatcgttcgtctggaagttttgtctcagaggagtacccggctgtgtgaggtgtcagtctgcccctactggggggtgcctcccagttaggctactcgggggtcaggttcccacttgaggaggcagtctgcccgctctcagatcttgagctgcgtgctgggagaaccactactctcttcaaagctgtcagacagggacatttaagtctgcagaagtttctgctgccttttgtttggctatrccctgtccccaaaggtggaatctacagaggcagaccagcatcctggagttgtggtgggcttcacccagttcgagcttcccagccgctttgtttacctactcaagcctcagcaatggtgggcacccctcccctagcctcgctgccaccttgcagtttgatctcagactgctgtgctagcaatgagcgaggctccgtgggtgtaggaccctctgagccatgcgtgggatataatctcctggtgtgccatttgctaagactgtcggaaaagcacattattagggtgggagtgacccgattttccaggtg

SEQ ID NO: 936803 - DNA, 617 bp, Homo sapiens
aagtctaggcttcccacgtgtctgcttttggaatcaagacagtactaaaacttcataaaatcagttgagaactgctgggtgccagtgggagttccagctccccgttagttctccattaatactggctagaagttggaatgcctcattactgctcctcatgtgacagtatgtagaagtagggttgtgcaccttgttactgctggatagtggggaaaatcccgtctcctgactatacctcttctaacattccctctacccccggccagtggagagggctgtctctttattgctggatgggaacaaatgtcccagctccttaattggccttctctgacccagcyccagttggggaagatggttgggacaccttgttacagcctcatgagagtggaattctaggctacctgctggtctttgctggtgtgtatatggttggtgacagagtttttttctgtggtgtttagctggaatagagcagttgtcatctaaaagttgtatcttgctaggctgcccctttctgttcctgtggcaacaaaagcctaaaagagcttctattggtgtctctcttttttggcacaaggtaggtctgtaccattggcgtttctgggttgctcatt

SEQ ID NO: 936804 - DNA, 569 bp, Homo sapiens
acataccatacaacttgaccaatagaagttaacagttgaatagattttagtcttttcacagatatgtgcaaccatctccacaatcagctttagaactgtttgatcactcccaaaagaaagcctgtatgtttctgctgtcacctcttttcataacacctttccccaccactccagcctaggcactactaacctatgttctgtctctatggatttccctattctggacatgtcatatgaatagaatcatttaatatgtggtcttttgtaataggcttttcttgcttggcataatcttttcaaggttcatccatgtygtagcatgtattagaacttcatttctttttatggcctaataatattccattgtctggatagatcacattttgtttgtccattcgttaactgaggagcatttgagttgtttccaccctttggttattatgaatgatgttgctataaacattcatgtacatgtttctgtgtggacatgtgttttcatttctcttagaaatatacctgagtataattgctgggccatgtagtaactctctgtttaattgtttaaggaa

SEQ ID NO: 936805 - DNA, 569 bp, Homo sapiens
acataccatacaacttgaccaatagaagttaacagttgaatagattttagtcttttcacagatatgtgcaaccatctccacaatcagctttagaactgtttgatcactcccaaaagaaagcctgtatgtttctgctgtcacctcttttcataacacctttccccaccactccagcctaggcactactaacctatgttctgtctctatggatttccctattctggacatgtcatatgaatagaatcatttaatatgtggtcttttgtaataggcttttcttgcttggcataatcttttcaaggttcatccatgtcgtagcatgtattagaacttcatttctttttatggcctaataatattccattgtctggatagatcacattttgtttgtccattcrttaactgaggagcatttgagttgtttccaccctttggttattatgaatgatgttgctataaacattcatgtacatgtttctgtgtggacatgtgttttcatttctcttagaaatatacctgagtataattgctgggccatgtagtaactctctgtttaattgtttaaggaa

SEQ ID NO: 936806 - DNA, 591 bp, Homo sapiens
caataaaaaggaattatgtgctcagtggctggggtgaatctcaaaataatgatgcagcgtgaaagaagccagaaaaaaaagagtatatatagtatgattctgcagatggtctccaacttacagggttcagcttaacaaattgttgactttatgatggtgtgaaagcaatatgcattcggtagaaactataatttaaatttttatcttttctggtctagtgatatgtggtaggatacttggcagtcagtcaaccatgagatcatgaggtaaacactgatattcttcagcatactgtgttactagatgattttgcccaattgtgcactaatgaaagtgttytgagtgcatttatagtaggctaggcttggtaggttcagcatattaaacgcacttttgacttaaaatattttcaacttatgatggatttattaggacataacttcattgtaagtcaggggcatctgtatttatataaaaatatagaaaatgcaaattaacctatagtgacacaaagcccattagtggtttttggtggaggatgggaaatggttctgtgaggaagaaggaattaccaaggagcatgattaaact

SEQ ID NO: 936807 - DNA, 579 bp, Homo sapiens
tgatttctcactggaaaccatggaggggaggagtgtcatgacacttttcaagtgttgaaagaaaaaaaactgtcaacctagaattttatacccaggaatgagggttaaatcaagacattctcaggtgaaggaaaactaagataatttgttatcagcaggcttatcataaaagaattcctaaagaatatcttgaaacagaaagaaatgattaaagaagaaaacttgaaggctgggtgtggtggctcatacctgtaatcccagcactttgggaggccaaagttggtggatcacctgaggtcaggagtttgagactagcctggccaacatggcgaaacctgatctctactaaaagtacaaaaagtaggtgggcatggtggcatgagcctgtagtcccagctactcaggaggctgaggcaggagaatcgcttgaacccaggargcggagattgcagtgagccaagatcatgccactacactccagcctgtatgacagagcaagacttcgtccaaaaaaaaataaaaagaaggaaacttgaaacattagaaataaagaaataacaatgaaaagagttaaaatat

SEQ ID NO: 936808 - DNA, 725 bp, Homo sapiens
tctaagtcctctttgctgaaggtagaattggcccctcggcatctgggtattccacagctcccactgcagccatctggccccttttgtttcaatgtcatcttttctggtgtgggacaagtgcccagggatctggaacccttggctactcttccattcgttatatgaataatcaactgtctgaatctcaaagtggctcagcgtagcatctttcataggcctttctcggtgctgtgtgtgcttgatacccaccccattgcttcctttgyagtttctcctgctaagattttttaaatttctttaaggaatttgataagagcatccctctgcatctgcataggcctttccaaagcactttcatatgttttcactctcacaaaaaggtattgttcccattttagtaatgaggaagctccaggccacaagaggaggttgtggaaaaactcagttctcagggcctgaaatcccattctctgaccactactgtcccaagaactctgcttcaggtggtctagggtaggtcctgaggcttgacatttttcaggagattctctctggcaactctaacttacatatctttaaaaacaaaaaacaaaacagtgcgcataaattagtcttgcaaattgcgaatgttactaaagctgtagaaatgactgagaggctgacactgcctcacccactgctgccatctctaagacacccactatagacttgcagatggtactccc

SEQ ID NO: 936809 - DNA, 721 bp, Homo sapiens
tttgaaatatttctacctcaacttgtatcccagttagatatattcacaagaatgctatataccagccactgcagtgccttcttaaaaaaaaaaaggcattatacaagagaattacaggccaatttcactcagaaacataagtggaaaaccaaactcttaacaaaatattagcaaataaaatccagtaatgcttaaaaaggactagactaaattggtctacaacaaaattaagaccttctctttatcagtaggtatctctgagaaattccaaaggcaagctacagatgggtgaaggtatttgctaacatatctgccaaagggcacatatccaaaatatatgaaaagcatatactagtccataaaagaaagactaaacctcaaagggaaatgggcaagagattaaatgggcactttaagaaagaattttaatatggccaataaacatatgaaaagttgttcaacttccttaataattacagagatgtggaataaaagcmtaataagacacatccaacagtaggactaaaattagactgttaataccaagttttcattagaatgcatagcaattgaggccaggagtggtggctcatgcctgtaatcccagcactttgggatgctgaggcgggcagatctcctgagatcaggagttcgagaccaccctggccaacatggtgaaatactgtctctactaaaaatacaacaatgagccaggtgtggt

SEQ ID NO: 936810 - DNA, 493 bp, Homo sapiens
atgagcctatgctaaacagaagaggatttgctgttgtggctgaagactgagggcaagtgtgagaaggctcatacaggactgaagaaaaggcatcagctctgtttgtgtggtgcttcccttcttctctcttaaaaaatttgctgcactcactctyccctgtcactctcactcttactggtctcagctcctaccttatcccttctactcacccactgctgtccgtagctgtcctccaggtcattcaagtatttatcttcccagtggaggcggatgcccagcagatcaacaggcctaaaaccattctcagccaggattacaaagtaggtaaagaatccagccagagcctggatcatccctgtgaatgacagagttgcaggacaggggagcctggttcagagaagggccccaaaaggtaggccaggggagggctgggggctgggacttgcttctggctgggctggtgtgtgtctgaagagtaatgcggaagaatctt

SEQ ID NO: 936811 - DNA, 599 bp, Homo sapiens
tccacagccatgagctcatcagtcctcagcacaaccccacaggctaggtattattaacccattttggagagaagcttaagttactttcccagagtcccggtggaacttggattcgacacaggcattctaagttcatgaacttcccactgcaacatggactaagctccattctctctgcagacaacccacaggmctaaacttgccatgggggataaaggctagatgggagcatgagcaagtagcacgtcccctggagtactgggggccccctttctggaagagaggatgcccctcacaggctggatcaagtgcagctcttcacgggggcagagagattgacaccatgaacgtgtgagggtcacgaaggccgcacaaccagagggcacctggaaccagcaaatgagttgacttttattaagttctgacagtgggccacacacgatgaaggtgcccgcatgtgtgttcttctatgaacgccctcctccctccaaccctgggcattggccctcactatttccattctagaaaaggaaaccgagctgcagagcagagggggaactggcccagtgccgtcgagctggggcaggtggctggagttg

SEQ ID NO: 936812 - DNA, 621 bp, Homo sapiens
gtcacgaaggccgcacaaccagagggcacctggaaccagcaaatgagttgacttttattaagttctgacagtgggccacacacgatgaaggtgcccgcatgtgtgttcttctatgaacgccctcctccctccaaccctgggcattggccctcactatttccattctagaaaaggaaaccgagctgcagagcagagggggaactggcccagtgccgtcgagctggggcaggtggctggagttgaggactaggaactggctcccagagygtctgaatcctctctcttgcctgcccctacctcatggcttagctcccccactctcaggttgcacctatgagagatgctagagcctccccatccaggcccaacctgccagaccagtccaggcagcccctcacaagatggttttcttcacatggtctcgggggcggtctggtaagagaggaggatgactgtctgagcccagaaagatgaggtcacccgaaaggaggtcgtcttgtttgcaggaagaggtggtaccgtgggggtgatgacctgtgcacatggcttgagctttccttgctgccaggcactcgtggcatctcttgctcaccaggtagatgagctccacgaggttgagca

SEQ ID NO: 936813 - DNA, 577 bp, Homo sapiens
tgcacagctcccttctgtcctctcattgttcacaggacagccattcatgggatctatggcgcactctgtgctagggcagaatgccagggaagagctgcctgtcttcagcgcccttgctgggaaccacacgccagaacccgaccctgccatgctttgtgcttcaggcagcaggaccccacccctaacagagtctyaagtcagacactaagcgatgatcacgacttgggaactcagccaggaaagaaaagacatacagcttgaaaacaatgtgggaaatggctgagaaagagaggaagataagaaataaagagggctctctgaagagtgagctgaactttggttgtgacaggttctcaatagtaccaaaatccatgaactttttttttgaggattcaaaaaagtttataattaaagagaaatgcttctaattaaggagacagttttctgtcttttgggagatggggtttgtttgtttgtttttgatttctctgttatgcctttatataatgagcccttaacaaaggtaatgatcatgaagtagattactacatgtacagcacactatgtttctgggcat

SEQ ID NO: 936814 - DNA, 584 bp, Homo sapiens
acggaagtatagatgtttcttaacagtagaaatatagaagagaaagcaagaccatgaggagactggcagttgactgcagggcacagccaactgccttggtggtggcattagctgggtttggggcagacaaggtaccctgggaggagttacttgaaaaygttacaatagtttgatttgaataaatctgcataagtaggagcagtgccagaagcagcagccccagcctgagcctgtccaccattgctttgtcccctccattggtgtctggcatatattgctggatgctgggtgagaactgctggctccaggtggacacaggcgagacctagccttaaaaatcacacaaagtggctgggtgcgatggctcacatctgtaatcccagtacttcgtgaggccaaggtgggaggatcacttgaggccaggatttggagattagcctggtcaacatagcaaggactcatccctattttttttaactaaaaataatgtaaaatcataataaaaaggaaatcaagcctgggcaacatagcaagatctcatctctactaaaaagaaattagctgcgtgtggtggtgcacacctg

SEQ ID NO: 936815 - DNA, 622 bp, Homo sapiens
gggctcaactgttttgccactagcaagtggaaagtttgctcggctttaattttttaatcagaattctgtaagctgaaccaattgggatgtctgtggtgttggctgttgtttctgctgctaatcgtcagtcctcttcagttagggcacaaacaagatgaattttttctcacagattgttgtgaatggtctgctgctgcaggcttctccttccacattgtgttgtccgttattttggttggttgttttgagacagcctcgctctgtcacccaggctggagtgcagcggtgcaatcayggctcactgaagcctcgacctcctaagctcaagtaatcctcccacttcagcctccccagtagctacaactacaggtatgcaccaccacagccgcataatttttttttgagatggagttttgctcctgttgcccagaccagagtgcaatggcatgatctcggctcaccgcaacctccccttcctgggttcaagcgattctcctgcctcagcctcctgagtagctggaattataggcatgtgccaccacacctggctaattttgtatttttagtagagacagggtttctccatgttgatcaggctggtctcgaactcctgacctcaggt

SEQ ID NO: 936816 - DNA, 551 bp, Homo sapiens
tcgatgtagaagtaaagattattaattttattaaatcagttcttgagaacccatctttttaaattaatggaagacaaaatggaagaacacataaagtacttctgcatattgaagtgtgaagttgccttgaagaaaagcactatttgattgagttgtgagctggactagttgctttttttcatgcaacaccatttttacttcaaagaatgactggcaaactgtagttattcaacatgaatatgtggcaggtgttttcccaaaaaygaataaagtgaccctgacatttcaagaaaaataatcaacagtatttgttgccaatgataaaacttgagctttaaatatatacatatttgaaacatttttattgtcatcagaagcttgacagttcctaatattaaatacttttctgatgagattggtgatactatacaatcgatactaacaaatataattttttgatactgtgtaatgaaatgtgtcaatacttggagctctgaataattcaatgaatcaatactttccaaaaagctaacgtatcatgttataaagtc

SEQ ID NO: 936817 - DNA, 551 bp, Homo sapiens
tcgatgtagaagtaaagattattaattttattaaatcagttcttgagaacccatctttttaaattaatggaagacaaaatggaagaacacataaagtacttctgcatattgaagtgtgaagttgccttgaagaaaagcactatttgattgagttgtgagctggactagttgctttttttcatgcaacaccatttttacttcaaagaatgactggcaaactgtagttattcaacatgaatatgtggcaggtgttttcccaaaaatgaataaagtgaccctgacatttcaagaaaaataatcaacagtatttgttgccaatgataaaacttgagctttaaatatatacatatttgaaacatttttattgtcatcagaagcttgacagttcctaatattaaatayttttctgatgagattggtgatactatacaatcgatactaacaaatataattttttgatactgtgtaatgaaatgtgtcaatacttggagctctgaataattcaatgaatcaatactttccaaaaagctaacgtatcatgttataaagtc

SEQ ID NO: 936818 - DNA, 577 bp, Homo sapiens
cttcacagacaatctcagacatgcctcgactttctgaattgttgtaaacatttctttctttaaacaaccagttaatttactttaggacaagaatttaccatataagattcatttttatataaattctcttttctttaatattaaagatgataacagtcctttccccaaacaaacttccttcatggctgtggacaagactgcctaaggccataaaattaraagttagggcattttactaaatagttcaagatgtggctgtcttcattaaaccaatattaatgtttcacttattaaaaaattacacaagcaaagattattctgtttgggctgagttatagttttgtaacatctatgtcaaattttgacaccttgtaatacttggcagaaataagtatgaaattgcttgatcaattaatgcaaacaaaaatgtatgctggcaactcttaagacatttctaatcttactgtaccagcaagttttaaagattaaagtcacatgaactgaaaggtcccacagcttttacttttcccttaaaaatatttaagtgcttatttttcttaggtcaattaattagagc

SEQ ID NO: 936819 - DNA, 774 bp, Homo sapiens
ggaggcccaggactgtcaggatgagcctgagagccttagcataacatagagggcctctgaagccctgggccctgcccaatagtccagactaattctcacaaatccctgccctatccccagattctcctactttgtgcctcaacaattttccaaacagcgcttcctacatgcagcatgcttttacatccacccaggccggtgcacagcattccttctgcttaaagggtccccagatctcttgccagcaccttattgccttcccagctccttattcaccatccaaacatctctttttacagcctctgtgccttgtgcatatttaattgcactgctactaatttttcttgtatatatcctgttccccacccctaagctgccatgtcacgaggacagtaattcatcatgtcatctctctgtccccagtgcctgattcaaaataggcacatgggtaggtgggtggatggatggatggatggatggatggatggatggatggatggatggataaaacacaagcaaactcaactgttagaatggagcgaagaagggctggggagtcagggaacagaatgytttgaatggcaaagtaagaacgaattcaaagatgactttttaatgtgtcaatgaagctgaagaagctggattatcgtgttgaaaactggaaaaaaagagaagacacatggggtgtatggggctgagaatgaactgatttgtgtgatatgaagagggagtggggttgtgagaggccaatgagcagggaaagggaaaggctaa

SEQ ID NO: 936820 - DNA, 699 bp, Homo sapiens
gcttgcattatggccacacaccagactctgataatagacaaatttactcaagccctgaaccccaggatatccatgacttggaaccaaagtttcttcagcagtaccgtcattacatctagaccttaagttcttgcattgctagaggagttagataccattttattgtcagattaatcttacaacctcattcaggtttaccattcttctgctcagcagttccaagttgcctgctgcccagtgaacaaagctmtgactccttaacctctatatctgtttttggtctggatatctatatctatacatatctttatatgtaattttacctaaatggtatcatgctctacctactgtttataaattgatttctatttctggtcattatagatatttttccatattaagaaacataaatattcttttatttttaatgattacaaaataatctattattttgatgtggataatcttctgtaacttttatagataaacaaaggtttttttgcttggtttttgctattataaataaggtagcaatatatacttttaaatgtatttttttacttgtctgcttattagtatgaaaaactttacacatcacccttaatgcatgaaggtagaagtagtcagcattaggatattatttagaatgctagacatatatttaaattgccatgcactcgcacatacacacagttaaat

SEQ ID NO: 936821 - DNA, 747 bp, Homo sapiens
ctgcaaagtcacataggcagagctgcccaagaccatgggaacccacctcttgcatcagtgtgacctggatgtgagacgtgcagtcaaaggagataattttggagctttaaaatttgactgacctgctggattttggacttgcatgggccctgtaaccactttgttttggccaatttctcccatttggaatggctgtatttactcaatacctgtacccccattgtatctaggaagtaattagattttgattttacagactcataggcrgaagggacttgacttgtctcagatgagactttggactgtggacttttgggttaatgctgaaatgagttaagactttgggggctgttgggaaggcatgactgattttgaaatgtgagaacatgagatttcaaggggccagaggtggaatgatatggtttggctccatgtccctactcagatcggatcttgaattgtactcccataattcccacgtgttgtgggaaggacccggtaggagataatttgaatcatgagggcggttccccccatactgttcttatggtagtgaataagtctcacaagatctgatggttttatcaggggtttctgcttttgcatcttcctcattttctcttgccactgccgtgtaagaagtgccttttgcctcctgccatgattctgaagtctccccagccatgtggaactataagtccaattaaacctctttttcttcccagtcttgggtatatttatcaactg

SEQ ID NO: 936822 - DNA, 747 bp, Homo sapiens
ctgcaaagtcacataggcagagctgcccaagaccatgggaacccacctcttgcatcagtgtgacctggatgtgagacgtgcagtcaaaggagataattttggagctttaaaatttgactgacctgctggattttggacttgcatgggccctgtaaccactttgttttggccaatttctcccatttggaatggctgtatttactcaatacctgtacccccattgtatctaggaagtaattagattttgattttacagactcataggcagaagggacttgacttgtctcagatgagactttggactgtggacttttgggttaatgctgaaatgagttaagactttgggggctgttgggaaggcatgaytgattttgaaatgtgagaacatgagatttcaaggggccagaggtggaatgatatggtttggctccatgtccctactcagatcggatcttgaattgtactcccataattcccacgtgttgtgggaaggacccggtaggagataatttgaatcatgagggcggttccccccatactgttcttatggtagtgaataagtctcacaagatctgatggttttatcaggggtttctgcttttgcatcttcctcattttctcttgccactgccgtgtaagaagtgccttttgcctcctgccatgattctgaagtctccccagccatgtggaactataagtccaattaaacctctttttcttcccagtcttgggtatatttatcaactg

SEQ ID NO: 936823 - DNA, 644 bp, Homo sapiens
ctctgtgcctctttggatatcagtttctgagtcactcctgagctgaaagtgcttggggaaagtgatgctctgagcaccggcactcagcactgagcaaagggcttcttctgccatttccattcaaacacttttaatttttaatgcattactaattgggggaagatttagcaaatttaattgttttgattaaaaaatgcttcaacagtgataaacaaaagtggatgaaaagaattcactggcagaagccagagtgattacttaggtggatggtggagtgctgmtgaattaaagccacaggacaggctgattaatgggggctggaggatgcctgttgtgtgattatgctcatgaaagatctggcaacagcctgccacgtgatgctgggagaagagaattccagtctgacttgagaagcatgacttgactgcagagatttgccatctaagaccccaaagagggtcccagccagcaaggggagtctgtgacttacaaagaatcatagaacctgagagcccaagcactcttagacacttagctcatacttttcatttatagctgagatgcctgaggttcatgaaggttaattatattgcctaaggccatacagttaaaaaatggtgaagctgagattcacgctcaagtct

SEQ ID NO: 936824 - DNA, 635 bp, Homo sapiens
ctgaattggcagaagctggaagcattccccctgaaaactggtacaaaacagggatgccctctctcaccacttctattcaacatagtattggaagttctggccaggaacttcaggcaaaacaaagaaagaaagggcatccaaataggaagaaaggaagtcaaactatccctgtttagagatgacatgatcccatgtttagaaaaccccatcatctcagcccaaaagcttcttaactgataagtaacttcagcaaaatctcaggatacaaaatggatgtgcaaaaatcattagcattcctatacaccagcaagttaaaatccaaattgcaagatccaaatcacgarctaactctcattcataattgccacagaaagaataaagtgcctaggaatacagctaactatggaggtgaaatatctctacaaggagaactacaaaccactgttcaaattaatcagaaatgacacaaacaaatggaaaagcatgccgtgctcacagacaggaagaatcgatatagtcaaaatggccatactccccgaaagaatttatatattgaatgttattctcattaaaataccattgacattcttcacagaactaggaaaaactattttaaaattcatatggaaccaaaa

SEQ ID NO: 936825 - DNA, 439 bp, Homo sapiens
tttaacttgacttgaattgctggatactttggttttggttttgacttgtcttggattttttggtactcggattttgaatttcgtgattttggtttggtataaacggtaaaagtgtatgtgtgccctttttacctgttctttgtcttgtggtgagtgtgtgtgatgtgagcatggtattttgtatcaaaaaaaaaaagcagcatgggtcaggcaaataagcccaccccactaggaactatgttaaaaagagaatttcaagagagaatttaagggagattacggtgttactgtgrcaccaggaaaacttaaaactttgtgtgaaatagactggacagcattagaggtgggttggcctggacaggtccgttgtttcaaaggtatgacagaaggccacctgtaagccaaggcacccagaccagtttctgtacatagacagtta

SEQ ID NO: 936826 - DNA, 569 bp, Homo sapiens
ggacagctgtagcaatacagcccctctctaggacatccttgaaagacagcaatgaagggaaatcttcccagtaggcagaacttccagcagtgcacctggctgtgcactttgcatgaaattagaaatggccagatgtgcaattatatactgattcatgggctgtagccaatggtttggctggatggtcagggacttggaagaagcatgattggaaaattggtgacaaagaaatttggggaagagrcatgtggatggagctctctgagtggtcaaaaactgtgaaggtatttgtatcccatgtgagtgctcaccaacgggtgacctctgcagaggaggattttaataatcaagtggacccggtgacccattctgtggacaccactcagcctctttccccagccacctctgtcatcgcccaatggatccatgaacaaagtggccatggtggcagggatggaggttactcatgggctcagcaacatggacttccattcaccaaggctgacctggctatggccactgctgagtgcccaatttgtcagcagaagagacccacactgagccctcca

SEQ ID NO: 936827 - DNA, 579 bp, Homo sapiens
tactgattgggagtagcagacagtcccccaaatccactctattagtcctgctgctcacctgcctgatttctcaagcactggatgtgtaatcttttgagacaaaacaatattcagttttcctacttggaggcaacttcattcttaggagcattgacatatattttgtatatgtattacataccgtgttcttataatgaagcaagccagaaagtgttattaagaaaatcacaaggaagagaagatatatttactwttgattaagtggaaatggatcattacaagttcttcaccctcgttgtcttcgcattgaataggctgaggaggaggaagaagataaagagttggtcttgctgtcttaggagtggcagaggaggaagaggtgaagcaggtggaaggggaggcaggagaggcaggcatacttgtaacttttatttttaaaaatccacatttaagggccgggcgcagtggctcacgcctgtaatcccagcactttgggaggccgaggcgggcggatcacgagctcaggagttcaagcccagcctggccaacatggtgaaaccccatctctactaaaaatac

SEQ ID NO: 936828 - DNA, 623 bp, Homo sapiens
acccagttgatcactccctcactttcttttgttggcttctgtgatagaagttttcctcccaccgtctggttttgccttagtctcctttgcttgtttctcctgtttctctaccagactgttaggtcaccctcttccttctcatctctgtatactttttccctaagtggtttcccatgtggatgtctaacagacatcttaaatttatggccagaattcttgagtttcttcccaaagcctgtccttgttttccctatctcaggcaggygcggtggctcacgcctttaatcccagcactttgggaggccaaggggggcggatcacgaggtcaggagatcgagaccatcctggctaacacggtgaaaccccatctctactaaaaatacaaaaaattagccgggcgtagtggcatgcgcctgtagtcccacctacacgggaggctgaggcaggagaatagcttgaacccaggaggtggaggttgcagtgagctgaaatcatgccattgcactccagcctggcaacagagtgagactccatctcagaaaaaaaaaaaaaaattatctgagcatggtggcgcgcacctgtagtcccagctactcagggaggctgaggcaggagaattgctt

SEQ ID NO: 936829 - DNA, 623 bp, Homo sapiens
acccagttgatcactccctcactttcttttgttggcttctgtgatagaagttttcctcccaccgtctggttttgccttagtctcctttgcttgtttctcctgtttctctaccagactgttaggtcaccctcttccttctcatctctgtatactttttccctaagtggtttcccatgtggatgtctaacagacatcttaaatttatggccagaattcttgagtttcttcccaaagcctgtccttgttttccctatctcaggcaggcgcggtggctcacgcctktaatcccagcactttgggaggccaaggggggcggatcacgaggtcaggagatcgagaccatcctggctaacacggtgaaaccccatctctactaaaaatacaaaaaattagccgggcgtagtggcatgcgcctgtagtcccacctacacgggaggctgaggcaggagaatagcttgaacccaggaggtggaggttgcagtgagctgaaatcatgccattgcactccagcctggcaacagagtgagactccatctcagaaaaaaaaaaaaaaattatctgagcatggtggcgcgcacctgtagtcccagctactcagggaggctgaggcaggagaattgctt

SEQ ID NO: 936830 - DNA, 763 bp, Homo sapiens
ctgtcagatcagcagcagcattacattctcagagtgtgaaccctgttgtgaactgcacatgcaaggaatctaggtgtgtgctccttatgagaatgagaatgtaactaatgcctgcctatctgaggtgaaacagtttcataccaaaatcatctcccttgatccaccactggatctgtggaaaaattgtctttcmggaaaccagtccctgctgtcaaaaaggttggcatcactgagttagactgtgtccagaattgatgggttcttcgtcttgctgacttgaagaatgaagcacggacctcgcagtgagtgttacagttcttaaagatggtatgtccagagtttgttccttcggatgttcagatgtgttcggagtttcttccttctggtgggttcttggtctcgctggcctcaggagtgaagctgcaaaccttcgtggtgaacgttacagttcagaaaggtggcgcatccggagttgtttgtccctcctggggggttcatggtctcaccggcttcaggagtgaagctgcagaccttctcagtgagtgttacagctcataaaggtggagcagacccaaagactgggcagcagcaagatttattgcggagaaggaaacaacacagcttccacagcgtggataggggaccccagtgggttgcggctgctggctccgtggcctgcttttattcccttatctggccccacccacatcctgctgattggtccattttacagatggctgattggtccattttcagagagctg

SEQ ID NO: 936831 - DNA, 784 bp, Homo sapiens
tacattagttggggagcagtggattgccagctccacatgtggcctctggtcatccactccccaactcccacaaagccaggcatcttggccagttccctaatcaaacaagaaaggtgccatatcttcgcctgtctgcaaatagtccttgagctgcagtgtctagacaggattaggttgaacaactgttttgccccttcttgggcattttccagaattgttgctctggggaaaattgcctccacagagccaacagcatttcactgggttgcccgtcaagtgtctcttgagcaaccctagctgaaagtaaatcaaaccacattggcttgtgggtcacccactgggccccttgttatmtccttggatagttacctgtggaccttctttacagcatggactttcccttctttatggcatggagtccctggtcctgccaatggccttctgcctccccaagggctgccatagcggtagtcacttcatgtatacggtgccccacatatagggtgagaacagaggccagagagccaaaagagtttggggatgctgagcccagcaccagatccctcatgtgggaggcaaagcatttatcatctggcccccaggtattcagatcaaacacagcctgctgcatacccatctcctagagtatctgcaccaaatcagtatatgattgccatttactcacagtttctggtatttctctggcatcattccaaacagtccatgtggctcccattagccactcaattaaagtgtggtcatcttgtccctgtgctgaccattg

SEQ ID NO: 936832 - DNA, 784 bp, Homo sapiens
tacattagttggggagcagtggattgccagctccacatgtggcctctggtcatccactccccaactcccacaaagccaggcatcttggccagttccctaatcaaacaagaaaggtgccatatcttcgcctgtctgcaaatagtccttgagctgcagtgtctagacaggattaggttgaacaactgttttgccccttcttgggcattttccagaattgttgctctggggaaaattgcctccacagagccaacagcatttcactgggttgcccgtcaagtgtctcttgagcaaccctagctgaaagtaaatcaaaccacattggcttgtgggtcacccactgggccccttgttatatccttggatagttacctgtggaccttctttacagcatggacttycccttctttatggcatggagtccctggtcctgccaatggccttctgcctccccaagggctgccatagcggtagtcacttcatgtatacggtgccccacatatagggtgagaacagaggccagagagccaaaagagtttggggatgctgagcccagcaccagatccctcatgtgggaggcaaagcatttatcatctggcccccaggtattcagatcaaacacagcctgctgcatacccatctcctagagtatctgcaccaaatcagtatatgattgccatttactcacagtttctggtatttctctggcatcattccaaacagtccatgtggctcccattagccactcaattaaagtgtggtcatcttgtccctgtgctgaccattg

SEQ ID NO: 936833 - DNA, 784 bp, Homo sapiens
tacattagttggggagcagtggattgccagctccacatgtggcctctggtcatccactccccaactcccacaaagccaggcatcttggccagttccctaatcaaacaagaaaggtgccatatcttcgcctgtctgcaaatagtccttgagctgcagtgtctagacaggattaggttgaacaactgttttgccccttcttgggcattttccagaattgttgctctggggaaaattgcctccacagagccaacagcatttcactgggttgcccgtcaagtgtctcttgagcaaccctagctgaaagtaaatcaaaccacattggcttgtgggtcacccactgggccccttgttatatccttggatagttacctgtggaccttctttacagcatggactttcccttctttatggcatggagtccctggtcctgccaatggccttctgcctccccaagggctgccatagcggtagtcacttcatgtatacggtgccccacatatagggtgagaacagaggccagaragccaaaagagtttggggatgctgagcccagcaccagatccctcatgtgggaggcaaagcatttatcatctggcccccaggtattcagatcaaacacagcctgctgcatacccatctcctagagtatctgcaccaaatcagtatatgattgccatttactcacagtttctggtatttctctggcatcattccaaacagtccatgtggctcccattagccactcaattaaagtgtggtcatcttgtccctgtgctgaccattg

SEQ ID NO: 936834 - DNA, 818 bp, Homo sapiens
gtagatgctggtgtgatgcttcttgtacagcctgcagaaatgtgagccaaataaacctcttttcttcataaattacccagcctcaggtattcctttatggccacataaaaatggatgaaggcagaaaattggtactgaggggtggggtgttgctataaagagacctgaaaatgtggaagcagctttggaactgggtaatgggcagaggctagaagagtctgcaaggatcagaagacaacagaaagacttagggaaagtttgaaacttcttagagattggttaagtggttgtgaccaaaatgctgatagaaatacagacagtaaaggccatgctgataaggtctcagatggaagtggggaacttaggaattagagcaaaggtcatccttgttacaccctagcaaagaacttagctgcactgtgtccatcccctagggttttatggaaggccaaacaatactggtaccctayggtatctgctggaggaaatttctaagcagtaaagcattcaagaagtggtgtggctgcttttaacagcttataaccagatatgagagcaaagaaatgacaaaaagttggaatttataattaaaaaggacacagaacataaaattttagaaactcagcctaggcatgtggtagagaaggaaagaacattttcaagagaggaatctaggggtgctgtggagcaaccacttgctagagagattagcaaggataaatctttgaggtagctcctcgcatcacagacccagaggactaggaagacagaatggtttgggagcgacaaggctttaacacttcaggatgctgctctct

SEQ ID NO: 936835 - DNA, 604 bp, Homo sapiens
tacaaatatatggtagtatgcaaatttatacagtcaaaaatatgggccaccaattctttctacattaatatcagctttatttaggtataatatacatgcaataattttttaacataagcatttaaactgtatatttccctataactactgctttaactacaccacataagctttgatatgttgtatttttgttttcattttcactcatttctaatttctcttgtgatttattctttgaactattgcttatttaggggtgtgtctgtgtgtgtttttaaatttgcacagaactgagaatttccaaattttccttttgttactgattatcgatttcatcccagggctgggcgtgttggctcacayctataataccagcactttgggaggccgaggtgagcagatcacttgaggccaggagttcaagaccaccctgaccaacatggcaaaaccctgtctctactaaacatacaaaaattagttgggtgtggtggtgcatgcctgtaatcccagctactcaggtggctgaggcacaagaattgcttgaacctgggaggcagaggttgcagtgagccaagatcgtgctactgcactccagcctgggtga

SEQ ID NO: 936836 - DNA, 608 bp, Homo sapiens
gaggtagctactaatgggaggtgtttatgtcatcaaggctctactctcatgaatggaatgaagccaattataaaaggttttgaggctgtgagtttgaccctttgctcccctgctctttacctctcttgccttgccaggggatgatgtagcaagaaggacctcaccagatgctggcaccttgatgttagacttcccagtctccacaatggtgagaaataaatttctattgttcataaattactcagtttttggtattctgttatagcaacacaaaacaaatgaagacagaaacaggtaycagaagtggggtgttctgtaaccaatttctaaaaatgtggaacagctttggaatggagtaatgggtagaggctggaagaatttggaggagcatgctagaaaaagcctagattgccatgaatggtgtattatggcaattctggtaagatctcagaagaaaaaagctgtagaaagagcctacgtcttctgaggcattatttaaatgactgtgatcagaatgttggtaaaaatatgggcagtaaaggcttttctgatgtctcagatggaaatgaggaataaggtattcaaaacttatataaaggatactcttg

SEQ ID NO: 936837 - DNA, 616 bp, Homo sapiens
caaaaataatacttatttgacaatttaaaaagttttattttgcttgtatttgacacataataattgtacatatttatggggtatggtgtgatgtttcggtatatgcatacaatgtgtaacgattgaattagggtaattagyatatccatcacctcaaacacatgtcatttatttgtggtgaaaacattcaaaatcctctcttccagatattttgaaatgtacaatacatcactgttaactatagccactctattgtaaaatggaatgccagaacttattcctcctaactgtaactttgtatttgttgaccaactcctcccaatcccctgttcctcctcccctctctaactctagtaaacactattctactctctaattctacgagaccaattttttaagatttcacatatgagtgagatcatgcaatatttgtctttctttgcctggcttatttcacttaacatcatgacctccaggctcattcatattgccacaaatgacaggatttcattaattttttagggctgaagcgtattttattgtgcaaatagcccatcttttaatacattcatccattgatggacatttaagttgattctatatcttgactgttgta

SEQ ID NO: 936838 - DNA, 616 bp, Homo sapiens
caaaaataatacttatttgacaatttaaaaagttttattttgcttgtatttgacacataataattgtacatatttatggggtatggtgtgatgtttcggtatatgcatacaatgtgtaacgattgaattagggtaattagtatatccatcacctcaaacacatgtcatttatttgtggtgaaaacattcaaaatcctctcttccagatattttgaaatgtacaatacatcactgttaactatagccactstattgtaaaatggaatgccagaacttattcctcctaactgtaactttgtatttgttgaccaactcctcccaatcccctgttcctcctcccctctctaactctagtaaacactattctactctctaattctacgagaccaattttttaagatttcacatatgagtgagatcatgcaatatttgtctttctttgcctggcttatttcacttaacatcatgacctccaggctcattcatattgccacaaatgacaggatttcattaattttttagggctgaagcgtattttattgtgcaaatagcccatcttttaatacattcatccattgatggacatttaagttgattctatatcttgactgttgta

SEQ ID NO: 936839 - DNA, 587 bp, Homo sapiens
tgttgctggcagtgtttcctggagttctcaccaaggacactgctattgaccccttcagacccagagatgtaccctacaagagtgtttgaaatgattagaaatcctatgagactttgaaaatgattggaggtcttgttttccagcaattttctgggctccttgtttttgtaaagattagaatagagagagactgccaaagtctccctagcttttgttactttataaatgaacagacaggaagtaactttttttcataaatcatattgtcatgtgttggtgcatatgatatgcatcagaattgcctttttaggaggcagggagattagagtgagaatcacagcaggagaggtggagagagtgatgggaataacatttgwcctggcctcaaccagaatggattataagccatggtttaagatatctgggaattcaggaagatacatgtctgtcttgccagaattatgttctatcagaaggttgctatgagaagagaatttgttgttgttattcagaatttacgatatgatctttaaaggaatgatcatccaggctcctttaaaaacctccattatttccactgtctgcct

SEQ ID NO: 936840 - DNA, 580 bp, Homo sapiens
agaaaagtcacggattatttcttttctttttttttttttttgagatggagtccctctctgttgcccaggctggggtgcaggggtgcgatctcagctcactgcaagctccgcctcccgggttcacgccattctcctgcctcagcctcctgagtagctggaactacaggcgcccgccaccatgcccggctaattttttgtatttttagtagagacagggtttcaccatgttagccaggatggtctcgatcacctgacctcgtgatctgcctgcctcggcctcccaaagtgctgggattacaggcgtgagtcaccacgcctggctggattatttcttaattgacatttgttttttccaccttcctctgtattttgggtttgaatttttactttttatttrtgaatgccttctggtgatggttctccaggtctggtgtggacacgctgtatctttttttctgctagctcttcctccttctgcctccccctggcataatttgcgtcttctgtctctctgttctggctgactgatggttgtggtagctggttctcctctgaatctccctggcaaattagcaacaga

SEQ ID NO: 936841 - DNA, 561 bp, Homo sapiens
ggcatcccttcctagcctctgctccaccgcactcacaaccgtgctgagcctcctttccgcctggaatcacacctgggaaactcctgccacacttggagaagtccctcaggcccggcccagatctcatttgctctggacactcctctcagcgtcctgggggcctctccacaccaccaggccaggactcagtgccacttgtccrcccacagacctgcagcctcgaggcttcagctctttcttttcttttcttttctttttttttttttgagacggagtctcgctgtgtcacccaggctggagtgcagtggtgatcttggctcactgcaagctccgcctcccgggttcacgccattctcctgcctcagcctcccgagtagctgggactacaggcgcccccaccacgcccggctaattttttgtatttttagtagagacggggtttcaccgtgttagccaggatggtctcgatctcctgacctcgtgatctgcctgcttcggccttccaaagtgctgggattacaggcgtgagccacaacgcccggccacagctctttcttttgg

SEQ ID NO: 936842 - DNA, 561 bp, Homo sapiens
ggcatcccttcctagcctctgctccaccgcactcacaaccgtgctgagcctcctttccgcctggaatcacacctgggaaactcctgccacacttggagaagtccctcaggcccggcccagatctcatttgctctggacactcctctcagcgtcctgggggcctctccacaccaccaggccaggactcagtgccacttgtccacccacagacctgcagcctcgaggcttcagctctttcttttcttttcttttctttttttttttttgagacggagtctcgctgtgtcacccaggctggagtgcagtggtgatcttggctcactgcaagctccgcctcccgggttcacgccattctcctgcctcagcctcccgagtagctgggactacaggcrcccccaccacgcccggctaattttttgtatttttagtagagacggggtttcaccgtgttagccaggatggtctcgatctcctgacctcgtgatctgcctgcttcggccttccaaagtgctgggattacaggcgtgagccacaacgcccggccacagctctttcttttgg

SEQ ID NO: 936843 - DNA, 685 bp, Homo sapiens
caggcatcccagatccctgaggcacaatggtattgaaatttggccaattaataaccctgcagtggcttctcagtgttcaagtgaaaggaagagtcagttgcatgtctctcattttaaatgtaaatctagaaataattaagattggtgaggaaggcattttgaactctgaaacaggccaacagctaagtctcttctgccaaacagttagcaaagttgtgagtgcaaaggaaattttgtgttttattttttttgagacaggatctctctgtgtcacccacgcaggagtgcagyggtgtgatcatggttcactgcagccttgattcctgggctcaagggatcctcccacctcagccccctaagtagctcagactactagtgtgcatcaccattcctggctaattttttaaacatttttttctagagatggggtttcactatgttacccaggctggtcttgaacttctgggcccaagtgatccacccaccttggcctcccaaagtgctggaattacaggcatgagccactgttcctggccaggaaaaattcctgaaagaaattaaaagtgatactccagtgagtgagcacatgaatgataagaaagtgaaccagccttattgctgatatggagaaaattgtagtggtctggatagaagatcaaaccagccacaacattcccttaagcca

SEQ ID NO: 936844 - DNA, 627 bp, Homo sapiens
agctaggggagtgcttgtgccacccctcccacaaccccagcctgcacagctcatggcttcaaaagaggtcccttccttccacgtgaggagagaggagagagaagagtaaagaggactttgtcttgcatattggataccagctcagccacagtagaataggacaatggtcaaagtaatgaggccccctttctaggctcctggattatatttctagcacaccttgggccagaagggaacctgctkccttgaagggaaagacccagtcctggcagtacccattgtctgctaactaaagagcctttgatccttgaataaccaacagtgatgcccaggaaatacactgtgggccgtaggtgaaactgagattttctgacttcaggtgagactcagcacattcttagctgtggtggctatggggagagactccttctgcttgaggaaagtggaggaaaaagaaaagcagactttggcttgctccatatgtaccagctcagccacaggggaatagagcaccaagcaggctcttggggtccccagttcaaggtcttgactcctggatggcatttttgggtctaccctgagtcagaggggagcgcattgccccgaagggtgagtcccaggctaggc

SEQ ID NO: 936845 - DNA, 610 bp, Homo sapiens
cccattgccaagtttcaaccaacatttaccaattggcaggtgtttttttttccccctttagaaatggggtcttgctctgttgcagaggctggggtgccgtggcacaaacatagctcactgcaacctcaaactcctggactcaagtgatcctcctgcctcagcttcccaaagtgctgcaattacaggtttaagtatcaactatatcccagtccactatctacccaatcccagtagaatattctcaagcaaatctcagatagcatattatttcaacctgtaaatatttccatatttacctytaaaaggatgtaaagcaactacagactatcatatctaaaataaacaataattccttaatatgaaactcctgggcagtgttaacatttctcaaattgttttttctttgtttgaattaggatccaaataaggtctacacactgtgactggatgactatgtctcttcaatctctgcatatgggttcctccccctttacaatttttttttgttgaagaaatcaggttacctggttgtttcctatagtttggattttgccaaatgtattaccatgatgtagtttaataatgtgcttctgactcttgtatttacagt

SEQ ID NO: 936846 - DNA, 644 bp, Homo sapiens
ttaatatataattcttatataattctaaaagttgtgttcttgagaaaaaataattttgtataatttagaagttattcaaaagttaaaaaaggtaaaaagaaaataggaagtaaaagagatgtgagaaaagttatgaatgtgaatatatttttggtaagtaagattgtttaaaaataataattttatctaaagatcttgtgtggtaaatttttgtcttaaagtaaaataactggttatttttaaaaagaactgtaatgtaagacaagtaagaaagtaaaaaatgttataaatgggctgtgtaagtggttataaggtataagaaacagaatttataaaaggaacgttgtaagtaattaagttggttataattaaaaaggaaaccattataatagtctttstaaaggttagccccttacattaaaacaggggttacttaaggtattgctttgcttttagggaaattacaagaggttttgatttttaattatataaccaatttcttttaaaaacttcttagattcgtatctcagaggttcaacatttgttgtgtcttgttgctttcagcttttcctccccttgagaaggcttgagatgacaactctcttcctcagttttttcatcacacctgaaattttttgcctcta

SEQ ID NO: 936847 - DNA, 760 bp, Homo sapiens
ccctagttcaaacaacaaccatctccagcttgaataggaataaaagcttcccactggtctccttgcttccagccttgcctccctctttccccaccctctattcttcacatggtagccacagggatccttttcaaacaagcctaatcgcagcactcccctgcttgaaaccctccatcaacactgtatcactctgagaacaaaatccacaatcctcaccacagcttacaacaccccccacgattgggcacyctgctactctctgagctatctcctgccactctctcaggtgttccagctacactggcccctgtgctgtttcctgccaggcacactctggtctaaggcctctggctgctgttctcttcagagtgcccttggcctggatggtctcatggatcaccacttcatttcattcagaactatggtcaaatgctctcagagaggtttccctaatcacactctccaaaccagcacttccctcaccctctagcctagtggttctcaacggggagtgattttgacccctggcgacagtgggcaatgtctggagacaatttgggttgtcacactgagtggttctatcagtatcaagcagttagaagccatcacgaagctaaccatccttcaatgcacaggacagcaccccctccaacaaagaatcatccagctctaaatgtcaatagtgcctaggttgagaaatcctgttccatcccagcagtacattcttttttccatatcatctgccatccctgagagtata

SEQ ID NO: 936848 - DNA, 566 bp, Homo sapiens
caaattttttttttttttctttctgagatgaagttttgctcttgttgcccaggctggagtgcaatggcgccatcttggctcactggctcactgcaacctcctcctcccaggttcaagccattctcctgtctcagcctctggagtagctgggattacaggcatgggccaccatgcccagctaattttgtatttttagtagagatggggtttcaccatgttagtcaggctggtctccaactcctgatctcaggtgatcctcctgcctsggcctcccaaagtcctaggattacaggcatgagccaccacgccctgcccagacaaatctttttaagcacaaaagggcctacatgtatttaatctacaggacaaagtaaaagtcttatccatgttaacttagtaaccaagaagacctgcccttcactatggtaagcaaattattttcacaaaaacagttcttctagccctgtagctaaatgtacagccaaggttccaaacttttatctttgatcactaggataaattctaattttaagtctcaagattataagccagctcccaaaggtaca

SEQ ID NO: 936849 - DNA, 621 bp, Homo sapiens
ttgaagaatactgggaccaggcatggtggctcacacctgtaatcccaggactttgggaggtcagggcacaaggattgcttgagcccaggagttcaagaccagcctgggaaacacagagaaaacccatctctataaataaataaatgaataaataaataaataaataaataaataaataaataggtgcacacctgtagtcctaactacttgggaggctggggcgggaagatcacttgagcccaggaattcaaggytgtggcgagctatgatcgcaccactgcactccagcttaggcaacagaataagatcctgcctctaaaaaataataataaagtaaaaaattttaaaaatgttactgtgtaacacaaaactccccagaatagctagagaaccagactcatgtgctatacagcaagaagcaaaaaccaaactcataccacagatttggtagtcgagacaccatcactacaaccaagcactgaggactgcagctcacatcactatcatgagcactaccacaactgccctacaaactctatcttactttaactgtcacctattaacagataggattctttctagggcacacttgctggtgtcactcattccaattcaaaatct

SEQ ID NO: 936850 - DNA, 611 bp, Homo sapiens
tagtgattccactcattaatatgaccaagcaaattgaaaaattctgaatagaattcatcatcctagatgccatgaagaacacttgtgattcacgaaaggtcaaaatagcaacgttaacaggagtttagaagaagttgtctctaaccctcatggatgactttgaggggtttaagacttcagtkgaggaagtaatcccatcagcaaagttacttcctccactgaggtctttgaacccctcaaagtgaggttggagaatctcaagagaaatagaattagaagtggagcctgaagatatggtgaattgctgcaatctcatgatacagtttgaacagaggaggaggtgctttttctggatgagcaaagaaagtgatttcttgagatgaaatctactccgagtgaaggtgctgtgaacatttttgaaatgacaacaaagatttagaatattacataaatttggttgattaagcagcagcagggtttgagatgactgactacaattttgaaaaaagttttagtatgggtaaaatgctatcaaacagcattaccagaaaaatcctttgtgaaaggaagagtaaaccaatgtggaaaacttcatcgtcttattttaagaa

SEQ ID NO: 936851 - DNA, 611 bp, Homo sapiens
tagtgattccactcattaatatgaccaagcaaattgaaaaattctgaatagaattcatcatcctagatgccatgaagaacacttgtgattcacgaaaggtcaaaatagcaacgttaacaggagtttagaagaagttgtctctaaccctcatggatgactttgaggggtttaagacttcagttgaggaagtaatcccatcagcaaagttacttcctccactgaggtctttgaacccctcaaagtgaggttggagaatctcaagagaaatagaattagaagtggagcctgaagatatggtgaattgctgcaatctcatgatacagtttgaacagaggaggaggtgctttttctggatgagcaaagaaagtgrtttcttgagatgaaatctactccgagtgaaggtgctgtgaacatttttgaaatgacaacaaagatttagaatattacataaatttggttgattaagcagcagcagggtttgagatgactgactacaattttgaaaaaagttttagtatgggtaaaatgctatcaaacagcattaccagaaaaatcctttgtgaaaggaagagtaaaccaatgtggaaaacttcatcgtcttattttaagaa

SEQ ID NO: 936852 - DNA, 611 bp, Homo sapiens
tagtgattccactcattaatatgaccaagcaaattgaaaaattctgaatagaattcatcatcctagatgccatgaagaacacttgtgattcacgaaaggtcaaaatagcaacgttaacaggagtttagaagaagttgtctctaaccctcatggatgactttgaggggtttaagacttcagttgaggaagtaatcccatcagcaaagttacttcctccactgaggtctttgaacccctcaaagtgaggttggagaatctcaagagaaatagaattagaagtggagcctgaagatatggtgaattgctgcaatctcatgatacagtttgaacagaggaggaggtgctttttctggatgagcaaagaaagtgatttcttgagatgaaatctactccgagtgaaggtgctgtgaacatttttgaaatgacaacaaagatttagaatattacayaaatttggttgattaagcagcagcagggtttgagatgactgactacaattttgaaaaaagttttagtatgggtaaaatgctatcaaacagcattaccagaaaaatcctttgtgaaaggaagagtaaaccaatgtggaaaacttcatcgtcttattttaagaa

SEQ ID NO: 936853 - DNA, 584 bp, Homo sapiens
gcaacaacggatggatctggaggacagtgtgttaactaaaataagccaggcatagaaagcaaatactgtatgatctcattcatctgtggaatcttaaaaagctgaactcatacgtagagtatagagtggtagttaccagggccaggggccggggtgggggatgctggtgaaaggatgcacagcctgagctggcaggagggtgaggtcgggagcttggctatgcatgacggtgaccacagttgacaacaatgtattgcattcttaaaaaatactaagagagtggattttaagcattctcgccacaaaagatgacaagtatgtgaagtaatgcgtgttaaattagctcracgttgctgttccacgatgtatacatattttaaagcatcatgttgtacacaataaatatatacggcttcatttgtcaattaaaacatgaattaaaaaagaaaaaacgtctacattttgctttttcgcaaccatggggaaggcagggggacctgtttggtgagggaggaagggtcagatgtgcatgaacgtgcgtgtcacccgtgcccggggttgttgtggctccatccactgcctca

SEQ ID NO: 936854 - DNA, 806 bp, Homo sapiens
ctgtgctgcatggaatcaaggtttaaggggtttagggctgcgcaggacgtgcctggttcacgatacgtttgcaggcagtgtgcttggtagaagtcatcgccattctccattctctgttaactaggcacagaatacgctgcggaaagctgaagggacctctgccggagaaagcctaggtattgtcccagtttctcctcactgagacagcctgagatatggcctcatggcaagggaaagacctgactgtcccccagcctgacacctgtaaagggtctgtgctgaggaggattggtaaaagaggaaggcctctttacggttgagataagaagaaggcctctgtttcctgcacgtccctgggaatggaatgtctgggctttacacccaccattcattctattctgaggtaggagaaaaccgccctaaggctggagacaagatatgctagcggtgatacggctctgttactcttcactacactgagatgtttgggtaaagagaaacataaatctagtctatgtgtacatcccagcacggtaccttccctgggagttatttatgatgcagattcctttactcacatgttttcctgctgaccttctccccatcatcaccctgttcacgctgttctcctgccrcactccccgtatggagatagtgaaaatagtcatcaataaatactgagggaacccagagaccggtgccggtgcaggtcctcgcgtgctgagtgtgccggtcccctgggctcactgttctttctctgcactttgtctctgtgtcttatttcttttctcagtctcgtgtttcca

SEQ ID NO: 936855 - DNA, 551 bp, Homo sapiens
gacacacttacagcctcctcccttttttttgtgtattatacatatctttattatagccattttcaaaattacatcataatcatttcaatgcctgtttttccctgtactgtaagctaatcaaatggatgaatgactagtttgaagaacaagtgttctataaatacttcaggatacttcttttgcttttgtcagaggttcagatggttacagtacttttaatgttagccattcaaattattattgccattgatggttgtgctctgaagttggcaaaagtggccaaatktagtttcactatagccccttaatgtattctcacaccaattcctttgacctaaaaaaaacctttttattttgaaatatggcatcataggaagttctaaaactagtacagaggtcccatgtacccctctctcattttaccccagtggcagttcttcagacttttatgtcatttttctgttctcttccccagcccctgcataattaacaaatttattatggaggaaaaagtgtgattaaaaatttttttcgtgacaacattaatatgt

SEQ ID NO: 936856 - DNA, 726 bp, Homo sapiens
acgatctcagctcactgcaacctctgcctcctgggttcaagtgattctcctgtctcagactcccaagtagctgggattacaggtgtctgccaccacgcccagctaatttttgtatatttagtagagacggggtttcactatgttgaccaggctggtcttgaactcctgaccccaggtgatccacccgcctcggtctcccaaagtgctaggattgcwggcgtaagccactgcgcctggcctagactctctttttaaagattaactggagatcatcatggcggatgggaggcagaactagactgcagctctgactctgatggacagagcagtgtgtggaggctcacgtcatgaattttagcttcagatcaactgcaataacagaccaccaatcctgagaggacccacagaccctctgagggaagcagactgctcctgcaggaccttggagacaccccaaatattgtgagagccccaattgcggaagtgggaaagcgagatcctcctctcccgaacacacaccccctctggagaaactgaaggactgtttgcaggagaagtttttgatcttacctggagctgattcaatttagacagcccaacaaaatacaggtgtagaggaagcagtaggaaaggccctgggaacttgctgggtccccagcaggccattcctgcctggcaccacagggatctatcaggagagtgggcagaagagtgagggaaaacacc

SEQ ID NO: 936857 - DNA, 565 bp, Homo sapiens
agggtagcctggggcaagttctcaagcccagcccacccactgtccagaaacagacttgacgctgtcagggggtgcatggtgggtgtgggaccagctctttagtttgtgtgggaggtggatgaggcctgtgactgccagctttcccccacttccctgacaacctgcatgactcagcagaggcatctataatcctcctaggtacacaactccattgacctgggaaccttaccccatcccccacagcagccacagcaagacccgcccaaggatagtctgagctcagacatgcctagcyctgcccccacctgatgggccttccttatccactctggtagctgaagacaaagggcatataatcttgggacttcaagggccccacccaccactggttcctctccatactaccatagttgatgctctctggaaagcatcacctcccagcaggaggccaactagcacaaaaatagagcatttaaaccaccaaagctaagaaccctcacagagcccattgcgctcccctgccacctccaccagaacaggtgctggtatccatgtctgagagatc

SEQ ID NO: 936858 - DNA, 565 bp, Homo sapiens
agggtagcctggggcaagttctcaagcccagcccacccactgtccagaaacagacttgacgctgtcagggggtgcatggtgggtgtgggaccagctctttagtttgtgtgggaggtggatgaggcctgtgactgccagctttcccccacttccctgacaacctgcatgactcagcagaggcatctataatcctcctaggtacacaactccattgacctgggaaccttaccccatcccccacagcagccacagcaagacccgcccaaggatagtctgagctcagacatgcctagccctgcccccacctgatgggccttccttatccactctggtagctgaagacaaagggcatataatcttgggacttcaagggccccacccaccactggttcctctccatactaccatagttgatgytctctggaaagcatcacctcccagcaggaggccaactagcacaaaaatagagcatttaaaccaccaaagctaagaaccctcacagagcccattgcgctcccctgccacctccaccagaacaggtgctggtatccatgtctgagagatc

SEQ ID NO: 936859 - DNA, 602 bp, Homo sapiens
tacccacagccaacataatactgaatggggaaaagtttaaagtattccctctaagaacgggaacaagacaaggatactcactctcaccactgctcttcaatatagtgctggaagtcctagcaatcagatatgggtgcaaaaaggtgtstcagaagactttcctccttataataaaaactctatctaccacatctcctagccacccaaataaacacacattggctctccccaatctccagcttgctgatttgagaatattgggacttcttagcctccataattacatgaaccaattccttataacaaatctcttctcatacctagaggcacaattgacacaaacacattttttaaaaataagtctcttcatatagatatatgtagacacacacatacatacacacatcccattggttgctgtttctctgtaggacctgactaatacagattaacttctttgttaggtatccctttattagctgggcagcttaagggaacatcattgtatctatcacaaatctttatgatttcaggttgtttcattttccttgtttccgtaggtttgaatgttgaatgtttttaaacccctgacccatacactc

SEQ ID NO: 936860 - DNA, 574 bp, Homo sapiens
ggagggacccagtgggaggtgattggatcatggggacggatttcccccatgctggtctcgtgatgctgagtgagttctctcacgagatctgacggtttaaaaatgtggcacttccccactcccctcctgctgccatgtaagacatgcctggcttcccctttgccttccaccattattrtaagtttcctgaggccttgccagccatgtggaactgtgagtcaataaacctcttttctttataaattaccgagtctcaggtagttctttatagcagtgtgaaaacggactaataaaaggagtgtattaattgtcagattcggggcacagaaataaaactagaaaaataaagaagtgcttgaagaaatcctttaggaaaaaagaaagggaaataaaattctgaatgaagatgaagaaacggaacctttcatcagagagacttaaagctggtgagacctttatgccatggatctttttttttttttaaatgaatatagacacagtcttgctctgttgcccaggctggtcttgaactcctaagttcaagtgattctcctgcctcagccacccgaacagc

SEQ ID NO: 936861 - DNA, 654 bp, Homo sapiens
ggcttcagggtattttggcaaataatgatggctcaggggtcccagagcaaacagtgaaagatgcatggccttctctgagccagcctccaaaattacatgatgtcacttctgccctactggatgggattaaagccatggcaagtccacccagattccaggtgagagaacatgcaccctgtattagtctgttctcatgctgctatgaagaaatacctgagactgggtaatttataaagaaaagaggtttaattaactcacagtcctgcatggcaggggaggcttcagggaacttacaatcgtggcagaaggggaagcaatcatgtccttcttcacatggtggcaggagagagaagtgcagagtgaaagagtgaagcagggaaaagtcccttataaaaccatcagatctcctaagagctaactcactatcattagaacagcatgggggaactgcccccatgatctaatcacctcacataaggtcccccccacaacatgtggggattamaatttggattacaattcaagatgagattttgggtgcagacacagccaaaccatatcaggcccatctcttgaagggaagaatgtcaaggaatttgcagccatgtttcaaaacctctgcaattacctgcatcatttgcacactttcttcag

SEQ ID NO: 936862 - DNA, 620 bp, Homo sapiens
atttattgaacagggagtcttttcctcattgcttgtttttgccagctttgttgaagatcagattattgtaggtgtgtggccttatttctgggctctctattctgttctattggtctatgtgcttggttttgtaccattaccatgctgttttggttactgtagccctgtagtatagtttgaagtcaggtaacatgatgcctccagctttgttatttttgcttaggattgccttgactatttgagctctttttggttctatataaattttaaaatagatttttctagttccatgaaaaaggttgttggcactttagtaggaatagcattgaatctgtaagttctttgggcagtatgrcaattttaataatactgatttttcctatccatgagcatggaatgtttttccatttgtttgtgtcttctctgatatttttgagcagtgctttgtaattctcattgtagaggtctttcacctccctagttagctatattcctagatatttgattctttctgtgaatgggattgcctttctgatttaactcttgtcttggctgttgttggtgtacaggaatactagtgttttttgtacgttgattttgtatcttgaaactttgctgaa

SEQ ID NO: 936863 - DNA, 555 bp, Homo sapiens
aacctgcgttttctttctggctgcctttaacattctttctttcatttttaccttggaaaatctgacaattatgtgtcttggggatgatcttcctgtgtagaatcttgcaggagttgtctgtatttcctgtatttgactgttgtcctctctagcaaggttgtggaagttttcatggacaatatattgaaataygttttccaaactgtttgctttctcccccttcctttcagggatgacagtgatttgtagatttggcttctttacataatcccctacttcttggaggttttgttcattcctttttattcttttttctttatttttgtctgactgtcttatttcagaaagccagttttcgagttctgagattctttcctcagcttggtttattctactattaatacttgtgattgcattgtgaaattcttgtactgtgttattcagctatgtcggacccattaggttctttattatactggctattttgtctttcagctcctgtatcactttattgtgatttgtagtttctttggattgggttttgctgtcctcctg

SEQ ID NO: 936864 - DNA, 555 bp, Homo sapiens
aacctgcgttttctttctggctgcctttaacattctttctttcatttttaccttggaaaatctgacaattatgtgtcttggggatgatcttcctgtgtagaatcttgcaggagttgtctgtatttcctgtatttgactgttgtcctctctagcaaggttgtggaagttttcatggacaatatattgaaatacgttttccaaactgtttgctttctcccccttcctttcagggatgmcagtgatttgtagatttggcttctttacataatcccctacttcttggaggttttgttcattcctttttattcttttttctttatttttgtctgactgtcttatttcagaaagccagttttcgagttctgagattctttcctcagcttggtttattctactattaatacttgtgattgcattgtgaaattcttgtactgtgttattcagctatgtcggacccattaggttctttattatactggctattttgtctttcagctcctgtatcactttattgtgatttgtagtttctttggattgggttttgctgtcctcctg

SEQ ID NO: 936865 - DNA, 663 bp, Homo sapiens
cctgatgggatttcctttgcaggtaacctgcgttttctttctggctgcctttaacattctttctttcatttttaccttggaaaatctgacaattatgtgtcttggggatgatcttcctgtgtagaatcttgcaggagttgtctgtatttcctgtatttgactgttgtcctctctagcaaggttgtggaagttttcatggacaatatattgaaatacgttttccaaactgtttgctttctcccccttcctttcagggatgacagtgatttgtagatttggcttctttacataatcccctacttcttggaggttttgttcattcctttttattcttttttctttatttttgkctgactgtcttatttcagaaagccagttttcgagttctgagattctttcctcagcttggtttattctactattaatacttgtgattgcattgtgaaattcttgtactgtgttattcagctatgtcggacccattaggttctttattatactggctattttgtctttcagctcctgtatcactttattgtgatttgtagtttctttggattgggttttgctgtcctcctgaatctcaatgatcttcattcctatacgtatcctaaattctatttctgtcatttcagccagctcagcctggataaacactcttgt

SEQ ID NO: 936866 - DNA, 692 bp, Homo sapiens
cttggaggttttgttcattcctttttattcttttttctttatttttgtctgactgtcttatttcagaaagccagttttcgagttctgagattctttcctcagcttggtttattctactattaatacttgtgattgcattgtgaaattcttgtactgtgttattcagctatgtcggacccattaggttctttattatactggctattttgtctttcagctcctgtatcactttattgtgatttgtagtttctttggattgggttttgctgtcctcctgaatctcaatgatcttcattcctatacrtatcctaaattctatttctgtcatttcagccagctcagcctggataaacactcttgttagagaatttgtatggtcatttggagcacatatgacactctggccgttttaatttttggagttcttgcgttagttctttctcatctccatgtgtgggtgttcctttaactgccatatagattgagtacagtcaatagatttctggctgttttcactaggctgaggccttgtgcagggtctttttttgaagctgacttcttgtctctagtttcagaggtgagtatgttagtgaggtattcttggtgttgaagctttggggtgtgatccagtaggtggcacttaggcttattggtcaactggtagactcttgctcagttgtgtggctcctctg

SEQ ID NO: 936867 - DNA, 628 bp, Homo sapiens
tttcagaaagccagttttcgagttctgagattctttcctcagcttggtttattctactattaatacttgtgattgcattgtgaaattcttgtactgtgttattcagctatgtcggacccattaggttctttattatactggctattttgtctttcagctcctgtatcactttattgtgatttgtagtttctttggattgggttttgctgtcctcctgaatctcaatgatcttcattcctatacgtatcctaaattctrtttctgtcatttcagccagctcagcctggataaacactcttgttagagaatttgtatggtcatttggagcacatatgacactctggccgttttaatttttggagttcttgcgttagttctttctcatctccatgtgtgggtgttcctttaactgccatatagattgagtacagtcaatagatttctggctgttttcactaggctgaggccttgtgcagggtctttttttgaagctgacttcttgtctctagtttcagaggtgagtatgttagtgaggtattcttggtgttgaagctttggggtgtgatccagtaggtggcacttaggcttattggtcaactggtagactcttgctcagttgtgtggctcc

SEQ ID NO: 936868 - DNA, 628 bp, Homo sapiens
tttcagaaagccagttttcgagttctgagattctttcctcagcttggtttattctactattaatacttgtgattgcattgtgaaattcttgtactgtgttattcagctatgtcggacccattaggttctttattatactggctattttgtctttcagctcctgtatcactttattgtgatttgtagtttctttggattgggttttgctgtcctcctgaatctcaatgatcttcattcctatacgtatcctaaattctatttctgtcatttcagccagctcagcctggataarcactcttgttagagaatttgtatggtcatttggagcacatatgacactctggccgttttaatttttggagttcttgcgttagttctttctcatctccatgtgtgggtgttcctttaactgccatatagattgagtacagtcaatagatttctggctgttttcactaggctgaggccttgtgcagggtctttttttgaagctgacttcttgtctctagtttcagaggtgagtatgttagtgaggtattcttggtgttgaagctttggggtgtgatccagtaggtggcacttaggcttattggtcaactggtagactcttgctcagttgtgtggctcc

SEQ ID NO: 936869 - DNA, 628 bp, Homo sapiens
tttcagaaagccagttttcgagttctgagattctttcctcagcttggtttattctactattaatacttgtgattgcattgtgaaattcttgtactgtgttattcagctatgtcggacccattaggttctttattatactggctattttgtctttcagctcctgtatcactttattgtgatttgtagtttctttggattgggttttgctgtcctcctgaatctcaatgatcttcattcctatacgtatcctaaattctatttctgtcatttcagccagctcagcctggataaacactcttgttagagaatttgtatggycatttggagcacatatgacactctggccgttttaatttttggagttcttgcgttagttctttctcatctccatgtgtgggtgttcctttaactgccatatagattgagtacagtcaatagatttctggctgttttcactaggctgaggccttgtgcagggtctttttttgaagctgacttcttgtctctagtttcagaggtgagtatgttagtgaggtattcttggtgttgaagctttggggtgtgatccagtaggtggcacttaggcttattggtcaactggtagactcttgctcagttgtgtggctcc

SEQ ID NO: 936870 - DNA, 628 bp, Homo sapiens
tttcagaaagccagttttcgagttctgagattctttcctcagcttggtttattctactattaatacttgtgattgcattgtgaaattcttgtactgtgttattcagctatgtcggacccattaggttctttattatactggctattttgtctttcagctcctgtatcactttattgtgatttgtagtttctttggattgggttttgctgtcctcctgaatctcaatgatcttcattcctatacgtatcctaaattctatttctgtcatttcagccagctcagcctggataaacactcttgttagagaatttgtatggtcatttggagcacatatgacactctggccrttttaatttttggagttcttgcgttagttctttctcatctccatgtgtgggtgttcctttaactgccatatagattgagtacagtcaatagatttctggctgttttcactaggctgaggccttgtgcagggtctttttttgaagctgacttcttgtctctagtttcagaggtgagtatgttagtgaggtattcttggtgttgaagctttggggtgtgatccagtaggtggcacttaggcttattggtcaactggtagactcttgctcagttgtgtggctcc

SEQ ID NO: 936871 - DNA, 581 bp, Homo sapiens
aggttcctcagcctttggactcttagatttgcaccagtggtttgccaggggttctctggccttcagccacagactgaaggctgcactgttgtcttccctgcttttgaggcttttggacttgaactgggccactactggcttcctacctcctcagcttgcagacagcttatcatgatgcttcgccttgtgatcgcatgagccaattctccctaataaactccctttcatgtatatatatatccatatatatggatatatatatataaggatacatatatatggatacatatatatggatatatatatatggatacatatatggatatatatatatggatatatatatggatatatatatatggatatatatatatggatatatatatawggatatatatattaggatatatatgtatatatataatggttttgtccctctggagaaccctgactaatacgtaaacaaactcatatttaacatagtgcattgattttgaacaaagagggcaagataattcaacaagtaacagaaaatcttttcaatacatgattctagattaaataaatacctgtataaaaaa

SEQ ID NO: 936872 - DNA, 495 bp, Homo sapiens
tggtaggctattaatcattgcttcaatttcagcgcctgttattagtctattcagggattcaacttcttcctggtttagtcttgggagggtgtatgtgtccaggaatttatccatttcttctagattttttagtttatttgtgtagaggtgtttatagtattccctgatggtagtttgtatttctgtgggattggtggtgatatcccctttatcattttttgttgcgtctatttgattcttctctcttttcttctttattagtcttgctagcggcctatcaattttgttgatcttttcagaaaaaccagctcctggattcattgattytttgaagggtttttttatgtctctatttccttcagttctgctctgattttagttatttcttgccttctgctagctttggaatgtgtttgctcttgattctctagttcttttcattgtgaggttaggatgtcaattttatatctttgctgctttctcttgtgggcattt

SEQ ID NO: 936873 - DNA, 674 bp, Homo sapiens
tgggtcccctggaatcaatgtcagctcagagccagtgtccagtagtcccccaaatatctgcatttcccttttccccagtgcacagttaccctggtaaaaggttggaggtctccttgggaaaggacaggagaaagatgaacagtataaattgtcagaagtatagtggggtccttcctcaagggaacccagccttccccttcattcaaggtgttctgagtctgtaaaccggctcaagtctggaaattgattgagggtccatgattctctgtttgtataattcaaatttgtcttttgtccattcaacctagaagttttctgcttatataaattaaggaggaatgcagtaggcttcctatcattttcacttctaggaacaccgtgattaattagccaatgccagagctctacagaagtcagactattctgattgccgctttgcctctgctgtccattatgrtagctatgcctaccttgcctttgacggttgagtgccactacttggcccctggcaccatgggatccaattactcccattgcagttaaattttgtagttgagtgactgcagctcccactgttggatctaacatacagagaagagcaattacagggctcttcaaagatgcaggtactgcctcacaaatctattttgcaaggcattggtcaagggtgtatc

SEQ ID NO: 936874 - DNA, 632 bp, Homo sapiens
ctgggatgagtaggtctaaagtgactaatccactccaccattctaatctccctaagccttttgatccttttcctgtacattaaaccaagggaaataagtcatttccggctaactcacagtgggccatctcttaatccatatttcagctaaccaaataaatgattagaagctttttytaactccctgagctgcaacattaaatgcagagtccctacttaatgggaccaaatcaataaatttggcctgatccaactctgtgttccttccaccattattccacacccttaatatccattcccatccctgctctccagattgctgcatatataaattagaaaactcaagcagttctttttgagtgtagtgtacctcctcatgggtcacactctcaacctcacctctggaggcccacaaggactttagttatagatctggaagaaaacaggagtgttgggggtggccatcacaggcaagataatgagaatcaacattatcttgcctggcaactgcctcagggggggccatcactgttgcctcaggagacacagggtttatctcctcagataaaggtggaaaggctgatggcagcatgggttggggaggcaatgttgccactactggggatggggaag

SEQ ID NO: 936875 - DNA, 588 bp, Homo sapiens
ccatctggtccggggctttttttggttggtaggctattaattactgcctcaatttcagaacttgttattgatctattgagggattggacttcttcctggtttagtcttgggagggtgtatgtgtccaggaatttatccrtttcttctagattttctagtttatttgcatagaagtgtttatggtattctctgatgatagtttgtatttctgtgagatcagtggtgatctcccctttatcattttttattgcatctatttgattctcctctcttttcttctttattaggctggctagtggtctatttcattaatcttttcaaaaaaccagctcctggattcattgattttttgaagggttttgtgtgtctctatctccttcagttctgctctgatcttagttacttcttttctgctagcttttgaatttctttgctctagttcttttaattgtgatgttaggttgtcgattttagatctgtcccactttctcatgtaggcatttagtgctacaagtttccctctaaacactgctttagctgtgtcccagagattctggtacactttatctttgttctcattgggttcaa

SEQ ID NO: 936876 - DNA, 623 bp, Homo sapiens
tttgctttctgctgtaacaggtagtgttgagttcagtgcctcacaattactgcactctccctcttgccagtgcacagaaatgctctctgcaccatgcctctgctgccaggggatgggaagaggtggggtccacaagtcaagactgtttttcctacctcttcagtgcctctttgagtgacatgaagttaaaagcaggtacggtgagtgctcacctgatctttggttcttactaagtgcttttttttctgtagatagttgttaaattggtgtccttgtggaaggtacaattggcagagctttctattctgccatcttgctctacctcctgattccatatcttgactattgtgaatagtgttgcaataaacacaggrgtgcagatatctcttctctatactgattccctttctttctttgaggtataaccagtagagggattgctggatcataggtagtttcattttgaggtttttgaggaacctccatactgttttggcatagtggctgtactaatttacattcccactaataatgggatatgagtgttcttctttctctttatctttgccagcgtttgttatattttatctttttgataaaagccattctaactggagtgaaat

SEQ ID NO: 936877 - DNA, 588 bp, Homo sapiens
tgaactgtaatagtaacacaacttatcaaaacctctgggatacagcaaaggcagtgctaagaggaaagttcatgaccctaaatgcctacatcaaaaactctgaaagagcacaaataatctaaggtcacacctcaaggractagggaaacaaggacaaaccaaacaaaaacccagtagaaaaaaaaggaaataaccaagatcagagcagaactgaatgaaattgaaacaacaacaacaaaatagcaaaagataaatgaaacaaaaagctggttcttggaaaaaataaaaaaagaagaccacgagcaagattaaccaagaagagagaaaatccaaataagctcaattagaaatgaaatgaaagattttaaaaccgacaccacagaaatacaaaagatcattcaaggctactattaacacctttatgtgcataaactagaaaagctagaggagatggataatttcctggaaagatccaatcctcctagtttaaatcaggaaggattagataccctgaacagaccaataacaagcagtgagattgaaatggtaatttaaaaaattaccaaaaaaaaaaaaaagtccaggacc

SEQ ID NO: 936878 - DNA, 588 bp, Homo sapiens
tgaactgtaatagtaacacaacttatcaaaacctctgggatacagcaaaggcagtgctaagaggaaagttcatgaccctaaatgcctacatcaaaaactctgaaagagcacaaataatctaaggtcacacctcaaggaactagggaaacaaggacaaaccaaacaaaaacccagtagaaaaaaaaggaaataaccaagatcagagcagaactgaatgaaattgaaacaacaacaacaaaatagcaaaagataaatgaaacaaaaagctggttcttggaaaaaataaaaaaagaagaccacgagcaagattaaccaagaagagagaaaatccaaataagctcaattagaaatgaaatgaaagattttaaaaccgacaccacagaaatacaaaagatcattcaaggctactattaacacctttatgtgcataaaytagaaaagctagaggagatggataatttcctggaaagatccaatcctcctagtttaaatcaggaaggattagataccctgaacagaccaataacaagcagtgagattgaaatggtaatttaaaaaattaccaaaaaaaaaaaaaagtccaggacc

SEQ ID NO: 936879 - DNA, 512 bp, Homo sapiens
ccctcctggtcccagtgatagtgggcccatcctctggaatcaggcttcctaggtttaaatcctaactccatccttagtatctgtgtgacctgtagcaagttacttaacctctctgtgcctcaatttactcatctctaaactactgataatgtaayatacctcagtagggttgtgggaaggaattaaatccattaaactatataaaataatttaggaccatgtattactctgttttcgtgctgctgataaagacatacctgagactgggcaattttacaaaagaaggaggtttaattgggcttacagttccacgtggctggagaagcctcacaatcatggtggaaggcaaggaggagcaagtcctgtcttacatggatggcagcaggcaaggagagaatgaggaagacgcaaaagcagaaacccttgataaaaccatcagatcttatgagacttattcactaacacaagaacagtatggggaaaccacccccatgattcaattatctcccact

SEQ ID NO: 936880 - DNA, 620 bp, Homo sapiens
aacaggtggccccgctctgaaatggccctgaaggcctgtggtgaggggacatcctaccaattcgcagaatctgggttgttcattttgttggaaaagagagctggccagagatacgggtctgtattgatttgtgggctctggytaatggtttggctaagcggttagagaactggaattggaatacaattgagaaaccagtgagaagaaggtctgaggaagtgggtaagtggatagacctctccaaatcagcatagagtgtgaagatatttgtgtctcatgcgaaagttcagtgaaagtcatcaaagggtgatctcagcagaggaagattttattaaccaggtggatgggatgacctgttttggggatggcagtctcctctctggcctatgcttgggtttgtcatataggctcctgagcaaagcaggaaggagtggaggttgcacactctcagccacgtctgcttccattgcacaaagccaatcatctacagccactgctgagagcccgatgggccaccagcagagaccggcactgaatcctgccatggtccgcttcccagggaccggccagccacctagaggcagacgactgcactgggccacttcatcatggaaaggggt

SEQ ID NO: 936881 - DNA, 595 bp, Homo sapiens
tcagtggcatgattttggctcactgcaacctctgcctcccaggctcaagcaatcctcccacctcagcctcctgagcagatggcaccacaggtgggcgccaccacacctggctaatttttttgtatttttagtagagacagggtttcactatgttgtccaggctggtctcaaactcctgagctcaggaaatccaaccccttcagcctcccaaagtgctgggattacaggcttgagccactgtgcccggcctatcctttttgagacagggttttgctctgttgtccaggctggagtgcratggcacgatcacagctcattgggacctagaacacctggcctcaagcaatcctctggcctcagcctcctgaataacggggactacaggtgtgtatcaccatgcccagctaatttttgtattttttgtagagacgggatttctttatgttacccaggctggtcttgaactcctgtcttgaagagatcctcctgcctcagtctctagcctgtcctttataagcaagtcatggtgccacccacacttgaggggtgggcatgacacaataacatgaataccaaaagccacaggatgatgtat

SEQ ID NO: 936882 - DNA, 539 bp, Homo sapiens
gatcacctgaggtcgggagttcaagaccagcctggccaacatggtgaaaccccatctctactaaaaatacaaaaattagccaggcattctggtgggcacctgtaatcccagctactcgggaggctgaggcaagagaatcacttgaacctgggaggcagaggtcgcagtgagctgagattgcgccactgcactccagcctgggtgacagagcaagagcaagagtccatctcaaaaaaaaaaaaaaaaaaaagaaaaaaaagaaaagaaaagaaraggagaggccacaggggcacacctggggaggagaagccatatgaagacagaggcagaaatggggatgacctgtccatagtcaaaggttgccagcagttaccagacttcagagagtacagttaccagacttggatgccagacagcatcctcccctagtgcctccagagaagtgtgaccctggtaacacctcaatctcagacttctagcctccagaaccccgagagaatagatttctgttgcttgagcccctcagtctgtggcacttt

SEQ ID NO: 936883 - DNA, 539 bp, Homo sapiens
gatcacctgaggtcgggagttcaagaccagcctggccaacatggtgaaaccccatctctactaaaaatacaaaaattagccaggcattctggtgggcacctgtaatcccagctactcgggaggctgaggcaagagaatcacttgaacctgggaggcagaggtcgcagtgagctgagattgcgccactgcactccagcctgggtgacagagcaagagcaagagtccatctcaaaaaaaaaaaaaaaaaaaagaaaaaaaagaaaagaaaagaagaggagaggccacaggggcacacctggggaggagaagccatatgaagacagaggcagaaatggggatgrcctgtccatagtcaaaggttgccagcagttaccagacttcagagagtacagttaccagacttggatgccagacagcatcctcccctagtgcctccagagaagtgtgaccctggtaacacctcaatctcagacttctagcctccagaaccccgagagaatagatttctgttgcttgagcccctcagtctgtggcacttt

SEQ ID NO: 936884 - DNA, 769 bp, Homo sapiens
atgatttttgcacattgattttgtatcctgagactttgctgaagttgcttattagattaaggagatttggggctgagaagatggggttttctaaatatacaatcatgtcagttgcaaacagagacaatttgacttcctctcttcctatttaaatacccttatttctctctcttrtctgattgccctgggcagaacttccaatactatgttgaataggaggggtgaaagagggcatccttatcttgtgccgattttcaaaggcaatgcttccagcttttgtccattcagtatgatactggctgtgggtttgtcatagatagctcttattattttgagatatgttacatcagtacctagttcattgagagtttttagcatgaaggggtgttgaattttatcgaaggccttttctgcatctcttgagataatcatgtagtttttgtcgttggttctgtttatgtgatggattatgtttattgatttgcatatgttgaaccagccttgcatcccagggatgtaaccgacttggtcatggtggataagctttttgatgtgctgctggattcggtttgccagaattttattgaggatttttgcatcaatattcatcagggatattggcctgaaattttcttttatgttgtgtctctgccaggttttggtatcaggatgatgctggcctcataaaatgagttagggaggattccctctttttctattgtttggaatagtttcagaaggattggtaccatctcctctttgttgtacc

SEQ ID NO: 936885 - DNA, 769 bp, Homo sapiens
atgatttttgcacattgattttgtatcctgagactttgctgaagttgcttattagattaaggagatttggggctgagaagatggggttttctaaatatacaatcatgtcagttgcaaacagagacaatttgacttcctctcttcctatttaaatacccttatttctctctcttgtctgattgccctgggcagaacttccaatactatgttgaataggaggggtgaaagagggcatccttatcttgtgccgattttcaaaggcaatgcttccagcttttgtccattcagtatgatactggctgtgggtttgtcatagatagctcttattattttgagatatgttacatcartacctagttcattgagagtttttagcatgaaggggtgttgaattttatcgaaggccttttctgcatctcttgagataatcatgtagtttttgtcgttggttctgtttatgtgatggattatgtttattgatttgcatatgttgaaccagccttgcatcccagggatgtaaccgacttggtcatggtggataagctttttgatgtgctgctggattcggtttgccagaattttattgaggatttttgcatcaatattcatcagggatattggcctgaaattttcttttatgttgtgtctctgccaggttttggtatcaggatgatgctggcctcataaaatgagttagggaggattccctctttttctattgtttggaatagtttcagaaggattggtaccatctcctctttgttgtacc

SEQ ID NO: 936886 - DNA, 631 bp, Homo sapiens
ggttttggctttttgtttttttgccacagtagcctctcattagacgaaactctaaatagaaaaattactggagttttcttctctctgtcctcctttcttagcttttatagctcagtggttaaaactactgacctggaataaatatacgtgtgcatgtgtctttatagcagcatgatttataatcctttgggtatatacccaataatgggatggctgggtcaaatggtatttctagttctagatccttgaggaatcaccacactgacttccacaatggttgaaccagtttgcagtcccaccaacagtgtaaacgtgtttctatttctccacwtcctctccagcaggtattgtttcctgactttttaatgatctgggccattctaactggtgtgagatggtatctcattgtggttttgatttgcatttctctgatggccatgtatacaccatggaatactacacagccataaaaatgatgagttcctgtcctttgtaggaacatggatgaagctggaaaccatcattctcagcaaactatcgcaaggacaaaaaaccaaacactgcatgttctcacttataggtgggaattgaacaatgagaacatgtggacacaagaaggggaacatcacgc

SEQ ID NO: 936887 - DNA, 631 bp, Homo sapiens
ggttttggctttttgtttttttgccacagtagcctctcattagacgaaactctaaatagaaaaattactggagttttcttctctctgtcctcctttcttagcttttatagctcagtggttaaaactactgacctggaataaatatacgtgtgcatgtgtctttatagcagcatgatttataatcctttgggtatatacccaataatgggatggctgggtcaaatggtatttctagttctagatccttgaggaatcaccacactgacttccacaatggttgaaccagtttgcagtcccaccaacagtgtaaacgtgtttctatttctccacatcctctccagcaggtattgtttcctgactttttaatgatctgggccattctaactggtgtgagatggtatctcattgtggttttgatttgcayttctctgatggccatgtatacaccatggaatactacacagccataaaaatgatgagttcctgtcctttgtaggaacatggatgaagctggaaaccatcattctcagcaaactatcgcaaggacaaaaaaccaaacactgcatgttctcacttataggtgggaattgaacaatgagaacatgtggacacaagaaggggaacatcacgc

SEQ ID NO: 936888 - DNA, 541 bp, Homo sapiens
gttcaattcagtggtttttcagtatattcacagttgtgtatgcatcactcctgtcaacttccagaacattttcattacttcagaaaggaacccatactcattagcagtcactccccattccccttttttctcaacctctggaaaccactaatctacctwctgtctgttgattttacccaatttgaacattgcatataaatagaatcatgcaataggtgcccttttctgtctggcttctttcacttagcacagtgtttgtcaaggttcatccttgtagcatgtatcagtacctcatttttttaatggccaagaaatattccattgtgtggatatactacatcttaaaaatctattcatcactaaatggactttaggattgttttcacttttggtctattttgaataatgttactatgaacatttgtgtacaggtgttggtatggacacattttcatttctcttgagtatatatacctaagagtggaattcctaggtcaggtgttaactttatgtttaactttttgaggaactgccaaactgt

SEQ ID NO: 936889 - DNA, 541 bp, Homo sapiens
gttcaattcagtggtttttcagtatattcacagttgtgtatgcatcactcctgtcaacttccagaacattttcattacttcagaaaggaacccatactcattagcagtcactccccattccccttttttctcaacctctggaaaccactaatctacctactgtctgttkattttacccaatttgaacattgcatataaatagaatcatgcaataggtgcccttttctgtctggcttctttcacttagcacagtgtttgtcaaggttcatccttgtagcatgtatcagtacctcatttttttaatggccaagaaatattccattgtgtggatatactacatcttaaaaatctattcatcactaaatggactttaggattgttttcacttttggtctattttgaataatgttactatgaacatttgtgtacaggtgttggtatggacacattttcatttctcttgagtatatatacctaagagtggaattcctaggtcaggtgttaactttatgtttaactttttgaggaactgccaaactgt

SEQ ID NO: 936890 - DNA, 618 bp, Homo sapiens
aatacacgaggctttgcaggatatacagtccctgctgcaactacttaagtctgctcttacagcgtaaaacagccataagcaatatgtaagtgaatgggtgtggctgagttcaatgaactttatttacaaaagtaggcagtaggctggatttggcctatgaatgtagtttgcttactccagctctaactaattgtcttgtttgattgtcttcctctatccttccctctctagactgttaactccataagagcagagactctagtctcattcaatgctgctgtggtagccagcctccaagatgtcccccagtgatccccatttcctggtattcccaccatwatttactcccctcccaaactgagtagcgttgtctgtgtaatcactaggatattgtgaaaaagatggagtgtgacttttgaggctagatgataagaggcattgtggatttcatcttgccaccttgaatcccttgctctggggatgccagcagccatgctgtaaggacactcaagcaatcctatggcaaggtccacatgggaggaattgaggcctcctgccaactgccagccatgcaagtgagccaaattgaaagtggattctcaagccccagtcaagctt

SEQ ID NO: 936891 - DNA, 618 bp, Homo sapiens
aatacacgaggctttgcaggatatacagtccctgctgcaactacttaagtctgctcttacagcgtaaaacagccataagcaatatgtaagtgaatgggtgtggctgagttcaatgaactttatttacaaaagtaggcagtaggctggatttggcctatgaatgtagtttgcttactccagctctaactaattgtcttgtttgattgtcttcctctatccttccctctctagactgttaactccataagagcagagactctagtctcattcaatgctgctgtggtagccagcctccaagatgtcccccagtgatccccatttcctggtattcccaccattatttactcccctcccaaactgagtagcgttgtctgtgtaatcacyaggatattgtgaaaaagatggagtgtgacttttgaggctagatgataagaggcattgtggatttcatcttgccaccttgaatcccttgctctggggatgccagcagccatgctgtaaggacactcaagcaatcctatggcaaggtccacatgggaggaattgaggcctcctgccaactgccagccatgcaagtgagccaaattgaaagtggattctcaagccccagtcaagctt

SEQ ID NO: 936892 - DNA, 648 bp, Homo sapiens
gtgggggcagggacagatctgagcagtgaggtatggacagccgtctcactgctccactaaccacaccactgtctccagtggtgctgttatccctccactttgcgctctcctcacaggctcctgaatgtcctctaggttgtctccaaactgctaaatctcaggtgtgctgacaggtctcagccgtggccagtgttttcctcggccttgaagttttgaggaagttactcccattggcaaggccttgtttgggggcctcctgtgtgtcctgcccccttttatttggctcctgccctcagaatgggtcagagtcatgtatttcagtgcagagtgcagattcccagtgctagcagttccttccagaaggatgaggtcattgaaagaaggaggaaacacaagacggtcactcctrtaggggaagatggcagggtactagggccagggcctgaggtgagggcaggagcctggaggaggcctgcctaccagagctcaggtctggcttagggagggaaatggctggactagtggctgcaaacaagttgagaaggaccttgaaactcttccagggagggttatgagagccaccaacagtaacaggatagaaaccctgtgatttggtggtactgtggcagagacaatgctgtgtttacc

SEQ ID NO: 936893 - DNA, 569 bp, Homo sapiens
cagccttctcacaacttaccctacctgatggagtctaagaagctatccattaaaagatgcaccattggctcggcaccatggctccttctgtaattccagcactttgggaggctgaggtgagaagatcgcttgagcccagaagttcgagaccagcctgggcaacatagcgaaaccctgtctctacaaaaaataaacaaaattgccaagtgtggtggtgcatgccagtagtcccagmtaattggaaggctgaagtgggaggattgcttgagcctgggaggctgaggctgccataagttgggatcacaacactgcactccagcttgggtgacccagcaagacccagagaaaaaaaaaaagcctgtaatcccagcactttttggaggccaagatgggtggatcacctgaggtcaggagttcaagaccagcctggccaacatggtgaaaacccatatctactaaaaataaaaaaaatagctgggtgtagtggcacacacctgtaatcccagctatgcaggaggctgaggcttgagaatcacttgaacctgggaggaagaggttgcagtgagcct

SEQ ID NO: 936894 - DNA, 699 bp, Homo sapiens
gcttttggctatcttggctttccacaagccttccttaggaagcttaatcgtttctagcttttgatttaaagtcagacatatgtgactgttctcttcacttgaacacttagaggacactgtagggttgttaattggcctattttaaatattgttgtgtctaaaggaatagggaggcctgaggagaaggagagagawgagagatggggcaattggtggagtagaacacacgcaacatttatcgattaagtttcctatcttatatgggtgtggttcctggcagcctaaaacaattacaatggtaacatcaaagatcattgatcatatttcagcacaacagatatgataataataaaaaagttggggggaggggccaagatggctgaacaggaacagctacagtctgcatctctcagtgagaccaacgcagaaggaaggtaatttctgcatttccaactgaggtacccagttcatctcactgggactggttaggcagtgggtccaacccatggagggtgaacagaagcaagggtggggcatcgctccacccaggaagtgcaaggagctgggggacctccctcccgcagccaagggaagctgtgagagactgtgctatccagcccagatactacacttttcccacggtttttgcaatgtgcaaatcaggagattccttcatgtgcctacaccaccagggccctg

SEQ ID NO: 936895 - DNA, 699 bp, Homo sapiens
gcttttggctatcttggctttccacaagccttccttaggaagcttaatcgtttctagcttttgatttaaagtcagacatatgtgactgttctcttcacttgaacacttagaggacactgtagggttgttaattggcctattttaaatattgttgtgtctaaaggaatagggaggcctgaggagaaggagagagatgagagatggggcaattggtggagtagaacacacgcaacatttatcgattaagtttcctatcttatatgggtgtggttcctgrcagcctaaaacaattacaatggtaacatcaaagatcattgatcatatttcagcacaacagatatgataataataaaaaagttggggggaggggccaagatggctgaacaggaacagctacagtctgcatctctcagtgagaccaacgcagaaggaaggtaatttctgcatttccaactgaggtacccagttcatctcactgggactggttaggcagtgggtccaacccatggagggtgaacagaagcaagggtggggcatcgctccacccaggaagtgcaaggagctgggggacctccctcccgcagccaagggaagctgtgagagactgtgctatccagcccagatactacacttttcccacggtttttgcaatgtgcaaatcaggagattccttcatgtgcctacaccaccagggccctg

SEQ ID NO: 936896 - DNA, 616 bp, Homo sapiens
attattgttcattgtcatgtcacatttgttgacaatgcctgtcaggtaaacacgtttccatcttacatagctatatatgaatatatgtggattcactgagtatactcaacttcccattaacttgggataagtaaactatagtgagaatagaaaaagatattttggaaaaaaattagtaggagtaaaaaaaaaatacttacatattggaacgtatctatcgtttggcactgcatagtagtagacagaccacatgctcctctccaagcaactagagatacaacttctccaaaaagaccttgatttctcagccaacagcccatctagaaaacaaaacaggggattacagtctagacattgtgggccaggcacagtggctcatgcctgtaatcccagcactctgggagaccaaggtgggaggatcacttgaggccaagagtttgaggccagcctaggcaacatagkgatccccatctctacaaaaatgataatttaaaaaattagccaggcatggtgatgcacacctgtagccacagctattcaggaggctaaggcaggaggatcacttgagcccaggaagtcaaggttatagtgagctatgattgtgccaccgcactcc

SEQ ID NO: 936897 - DNA, 773 bp, Homo sapiens
ttgtttatttaattactcaacagatattttctgagcatctgttttgtgcttaacacagcaccactacctaaggaaacctggagaaagtcgaagatatggtccctggcattcagatgcttagtttctgttggggagaaaagactacacaggcaaggtatgatctctgttgcagtgtgtaggatgaacggtcaaagatgccagtccacaggtgctcagcagcagacttgaaaatactttctagagaaagcaggctaggcccagaaatcgtctctgggacttcagtttcccakcagtcaaacgagctgttcagttatagaatgatttctctccactgcagacttccaaggatggagaaaaggatctggcttggcagagggctccgtgcagaggggaccatgtgagcatgattcctgtggggaggtggctgctgagaatgcagggtgtgttccaggaaccagggttgaacaggaaagcagggagagtagcagagcccctgatgcctcctagtcaccttctatcatgggaagaatacagaactgaactgcttgctattccccaaaatcccccactaagatatatacacctggctctgggacttgcctttcctgggtgtgttcttccctccctccactccccaattccaggcccatgagtgagggctagggcctgtctttggggagcagatcccaacgggcctgccccacctctccccctcggcacgctgccacactccctgcctgttggggcccatcccagtctttgcccaggggctt

SEQ ID NO: 936898 - DNA, 563 bp, Homo sapiens
agatggtgcctacccagattgagggtgggtctgcctttcccagtccactgactcaaatgttaatcttctttggcaacaccatcacagacacacccaggaacaatattttgcatcttttaatccaattaagttgacattcagtgttaatcatcacaccaggcatggtgtttactgcctgtaattctagccactccagaggctggtgcaggaggatcccttgaacttaaaagttggagaccatcctaggcaataaagtgagaccccatttcaaaataactaaaaaaaaaatcagtaatctcactggtcataccactgcttgggcaattaatcattgctctgaaaactgatttaaaaggatggaggagtaccaattatttatccmagattttctgaatatattttatcttactgaacaaatgtgccaattcaggaaatttccactttgtaaaacagctatagctaaaagatgtggaaaaattatgcaacacaaacttcactagtttatatttcctaaataaataatcagtctagaaaacattcatcaatatctacaaaaattagta

SEQ ID NO: 936899 - DNA, 634 bp, Homo sapiens
gacccgcctcacaagtgtttgcatcagatgcttttgtacagacgagggaacccacccagggccttgtttgggcatacccacaacgaactgggggacccacctgaacactgggagacccacctgcacactgggagagtggggtggagacactgggaagatggtgccttgtgcaccaggaaggagcctggtctcttcggcamgtgtgtgtggtgacctggtattcaatctgggaggtgagaccctgttggcaggactcctttttttcactgagagctttcttttaataaattttgctctcctcaccttttttttttttttttttttttgagatggagtctcgctctgtcgcccaggctggagtgcagtggtgcgatctcggctcactgcaagctccgcctcccaggttcacaccattctcctgcctcagcctcctgagtagctgggactacaggcgcccgctcacgcccgactaatttttttgtatttttagtagagacagggtttcaccatgttagccaggatggtctcgatctcctgacctcgtgatccacccgcctgggcctcccaaagtgctgggattacaggcgtgagccaccgtgcccggcctcctcatcttttaatgtttctgcgtgcc

SEQ ID NO: 936900 - DNA, 569 bp, Homo sapiens
atggctcctcaaaacaaaagtgcacttttattacagtactcaatattagatcccagaaaaaaaataaaatccccctaaattttaagtctatctgagacacagtattttagaaactggcaaaataagagaaacagaaaaatatacagagcaggagtgtttccagaataaaagagtaatacaaaaaaaagaaaaaaatgtaaaaaaaaagtgttttaaaaaatatatagttactggcattacattcgataaagagattgaataaartatacattcaaaagaaacaattgaactttgaattcagaaattattaaagatttaaaggaccagataaagtataatacatagttgattgtcagaaatgagaattcaatcagttaagaactgaatattttcagaggaagcagagcagtaagcgtagaagatatccaaggatgaaaattgatgggcattagcgtgctggagaaacgagattaagtgaagcattttgcttttgtttttattttgttggggatcaactctaaaagactgaagataaaaacagagaaagtcagggagaccagaagaatgca

SEQ ID NO: 936901 - DNA, 482 bp, Homo sapiens
acaaaaaaagggcttctgagattttttcattggcattttgttgaatttatagatcagttttggaagaactgacattaactatattatgaacatagtatatttgtgtatgtatttaggcctgacaatctctttctgtgccatagctatttaaaccatttaaatttaatgtgrctttcttatgaatgaatttatttacatcatgccttttggtattggttttatacttgtttcttccatttttgtccttttcttcctcttttactacctacttctaaattaatttatttttgtatcattattattattattattattattttgtgagacagggtctcactttgttgcccaggctggagtgcattggtgtgatcacagctcactgtagcttctacctcccaggatcaattgatcctccctcttcagcctaccaagtagctgggactataggcatgccactacgcttggctaatttttgtattttt

SEQ ID NO: 936902 - DNA, 590 bp, Homo sapiens
aaaaaagggcttctgagattttttcattggcattttgttgaatttatagatcagttttggaagaactgacattaactatattatgaacatagtatatttgtgtatgtatttaggcctgacaatctctttctgtgccatagctatttaaaccatttaaatttaatgtgactttcttatgaatgratttatttacatcatgccttttggtattggttttatacttgtttcttccatttttgtccttttcttcctcttttactacctacttctaaattaatttatttttgtatcattattattattattattattattttgtgagacagggtctcactttgttgcccaggctggagtgcattggtgtgatcacagctcactgtagcttctacctcccaggatcaattgatcctccctcttcagcctaccaagtagctgggactataggcatgccactacgcttggctaatttttgtatttttggtagagctgggattttgccatgttgcccagactggtctgtaagtcctaggctcaagtaagccacctgcctcggcctctcaaaatattgagattacaggtgtgagccacca

SEQ ID NO: 936903 - DNA, 482 bp, Homo sapiens
acaaaaaaagggcttctgagattttttcattggcattttgttgaatttatagatcagttttggaagaactgacattaactatattatgaacatagtatatttgtgtatgtatttaggcctgacaatctctttctgtgccatagctatttaaaccatttaaatttaatgtgactttcttatgaatgaatttatttacatcatgccttttggtattggttttatacttgtttcttccatttttgtccttttcttcctcttttactacctacttctaaattaatttatttttgtatcattattattattattattattattttgwgagacagggtctcactttgttgcccaggctggagtgcattggtgtgatcacagctcactgtagcttctacctcccaggatcaattgatcctccctcttcagcctaccaagtagctgggactataggcatgccactacgcttggctaatttttgtattttt

SEQ ID NO: 936904 - DNA, 604 bp, Homo sapiens
aatgtgggaatatttggaacttcccagaggcttggaaggctgagaagacagcaaggtgtgggaaagtttggaacttcctagagattgttgaatggttttgaccaaaatgctgatagtgatatagacaatgaattccaggctgagatggtctcagatggagagggacttcttggaaactggagcaaaggtgattctgttatgcttttgcaaagagactagtggcagtttgccccatcctagagatctgtagaactttgaacttgagagagatgatttagggtacctggcagaagaaattcctaaacagcaaagcrttcaagaggaagcagagcataaaagtttggaaaatttgcagcctgatgatgcaatagaaaataaaaacctgtctttggggagaaattcaagctggctgcagaaatttgcataagtaatgaggagatgcatgttaatcaccaagacaatggggataatgtctccagagtatgtcagagatcttcccagcagcacctaccatcacaggcctggaggcctatgagggaaaagtggtttcctgggccagggccagggcctctctgctttgtacagcctcaagtcatggtggcct

SEQ ID NO: 936905 - DNA, 792 bp, Homo sapiens
caaagccacaggagcagagcttcccaaggacatgggagcccacttcttgcatcagagtgatatgtggatgtgagacacggaatcaaaggaaatcattttgaagctttaaggtttaatgactgccctattggattgtgagttgcatggcgcctgtagcctcttygttttggccaatttctcccacttgaaatgggtgtatttacccaatgcctgtacccccattgcatctaagaagtaaccagcttgatttggttttacaggctcatatgtcaaagggacttgcccttgtctcagatgacattttagacttggacttttgggttaatgctggaatgagttaagacttgggggaactgttgggaaggcatggttgtgttttgaaatgtgaggacatgagatttggaagggaccagggacagaatgatatagtttggctttgtgtccccaccgaaatttcattttgaattgtaatcccataattcccatgtgttgtagtatggacctggtggtacgtaattgaatcatggggtggttcccccatacttctctcgtgatagtgagtgaattactacgagatctgatggttttataacggcctttttcctctttgcttggcactttttcctgctgccatgtgaagaaggacatgtttgcttccccttctgccatgattgtatgtttcataaggctcctcatccctgcaaactgtgagtcaattaaacctctttcctttataaattacccagtcttgggtatgtctttattagcagtgtgagaacaggctaacatagt

SEQ ID NO: 936906 - DNA, 792 bp, Homo sapiens
caaagccacaggagcagagcttcccaaggacatgggagcccacttcttgcatcagagtgatatgtggatgtgagacacggaatcaaaggaaatcattttgaagctttaaggtttaatgactgccctattggattgtgagttgcatggcgcctgtagcctctttgttttggccaatttctcccacttgaaatgggtgtatttacccaatgcctgtacccccattgcatctaagaagtaaccagcttgatttggttttacaggctcatatgtcaaagggacttgcccttgtctcagatgacattttagacttggacttttgggttaatgctggaatgagttaagacttgggggaactgttgggaaggcatggttgtgttttgaaatgtgaggacatgagatttggaagggaccagggacagaatgatatagtttggctttgtgtccccaccgaaatttcrttttgaattgtaatcccataattcccatgtgttgtagtatggacctggtggtacgtaattgaatcatggggtggttcccccatacttctctcgtgatagtgagtgaattactacgagatctgatggttttataacggcctttttcctctttgcttggcactttttcctgctgccatgtgaagaaggacatgtttgcttccccttctgccatgattgtatgtttcataaggctcctcatccctgcaaactgtgagtcaattaaacctctttcctttataaattacccagtcttgggtatgtctttattagcagtgtgagaacaggctaacatagt

SEQ ID NO: 936907 - DNA, 583 bp, Homo sapiens
caatgatcttgaagataggtcaatagaagttatataatttagcatcataaggaaaatagatgaaaaaatgatcagaaactcagggatctgtggaaaggcaacaaaagatctaacatttatgtcactggggcaaaaaacaaaagaatgagtgtggaatagaaacacattttttaaaaaaatagtggctgaaacattttaaaatttggtgaaaaacatatacagatttaagaagctgtgtgaatgccacagaaaataaatccaaaatcagaaatttaactttaatataacatcatacaaagtatattctctgacaatgatrgaattacgtataaattaatcacaaaaaaaaaagaaaatctccaaactctggaaaattaaataacacacttaaaaataattcacagctcgatgagcaagtctaagggaaattttaaatagtgtatattggactgaattaaaaggaaatgacatatcaaaatctgttggatacagctgaaagaatgtttaaagggcagacacttctcaaaagaagacattaatgcggccaacaaatatatgaaaaaaagcttaacatcaccgatcc

SEQ ID NO: 936908 - DNA, 837 bp, Homo sapiens
tctgcttgcccagcacagcacagccaaacactgacactgggatagcagcaagagaaagttgaggcatttattgtagggcaccaaggaaggagaattgagtagctcatgcttaagacctgaactcccacattgcttacaggtaagagtttttaaaggtgaggaggcagaggttacaggcgacgtcataaatcaatacacggaagctatacgttggtttgattttaaaaggctggacatcttgaagtggttcggggcacaggttacaggtggattcaaagattttctgacgtttgatttgctaaggaggcaaagctttgtctaaaaatttgggatcagcagaaaagaatattagctctcgctcaggggtgtgatctcctccaggcccctcaggaagaaattyagaacaaagaacagcgatcaggatttagtcttcagtttcccattatcaggggtcaaatcatgttggacagtagatctgtttggtgggggatctgggtttctggaaaacaacccagggacatatgttaaaatgttatcttaagtttctatagggaataaaacatctcctgacttttttgggccaatgttttaagctactattacctttttgtttatcaaattgctcatttatttctcagcgctagctaggttcctggaattttccttgaaggaactcaatattttcctttatttccatgcttgggggttgcccacgggcccctaagtagggtccctactccatcttaatacactcctccttcccagaaatctgaaaattccagaaattaaacacaagatacttctaaaaatgatggtgacatttggaactaaataaag

SEQ ID NO: 936909 - DNA, 609 bp, Homo sapiens
caggtgaggttgacttaccccattcccacatacctggggatgagtgtgactctcactcgggtccaatggagaaagcactggaatttggaggggggaaggaagctttctttctgatgatattgctgagttagttccagcaactagatgaaactaggggktggcttagggggcaccagaaggagagagagtccctaaatagaaagccaacgtggaggagagatagaaagaaaccaagcctgaataatgctacgcagctccctggaagcaccgttggactttacagctctggactgctgcaagtctccttgtatctagtttaagcccatctccattgagtttaattcactgccaaaggaatagtcctaaataataaggttgaatagagctcattcctaaaggaattaggtagtggtcagttccataagaactctcagaaacttcagctaaaactaaaaatgagtgtgcgtcccagaacaaagaagaaacatggttacccaaactaggacatgaaacaagtcatcacgggggttgattctgagtcccagagggtcaggttcttcaaatggctaccactcaggccacagtaagatgggtttccttggtggggct

SEQ ID NO: 936910 - DNA, 602 bp, Homo sapiens
accggtagggacaaaaataaaacttgtcttatatcagtgctatgtcaagtcacctacatgttgtcacaatatcatcgagaaatcattatcctgatatcccacagaacacacctctggttcattatatggatgacattattctacttgaaaatggtaaataggaaaattcaagcatgctagatgtcttagtaagactcacacatatcaggggatagagaagagccctgtgaacattctgaggcagacaatatcagtgaagtttctaatattctggtaatgtggagcrtgtaaagtatctcctctaaacttacagacaagttggtgcaccttacaacatctaccacaaaaagaaggacaaagtggacttcttggggttttgaaataacatataccatatttgggcatgctgctattacccatttactcagtaatcggcaaggctaccagttttgagtggggtccagagtaaaaacagctttacaaccatccaggctgtagggaaactgtcctcccaccacagcctcatgaccggaagatacaatagcattagaagtacctgagacaggcagagttgtttttacagagaagctggcaagctatag

SEQ ID NO: 936911 - DNA, 468 bp, Homo sapiens
cagcattttcaataacaaaaatctggaatcccagacatggagaaaagcttctatgataaacttgtatgactgaatattctgaattcatgaaaatttgtgttaaaaacatttagtatggaaaaattcaagaaaattcaatatattcaatataatgtaatgcttttacaaagcaatatgaaaatcttcctatagtagaatctcacttttgtagctatatattttatatatgcacaggaaaaaattggaagtaattacatcaaaataattatgggggttatstctacaggatgggattaatagctattctgattttgtctttatgctggctccaagccccatccatgtattctaactattgaggacgcagcactactcatggctccaccagtggataagcacatataaccatcttcagaattccattgctcagggttttctgcatgggaacaaagcatccttccatttcca

SEQ ID NO: 936912 - DNA, 642 bp, Homo sapiens
gtaacatacagatggggttttggtgtggatgtcctttctgtttgttagttttccttctaacagtcaggaccctcagttgcaggtctgttggagtttgctggaggtccactccagaccctgttttcctgtgtatcaccagcagaggctgcagaattgcaaatattgcggaacggcaaatgttgctgcctgatccttcctctggaagctccatctcagagaggcacccagccatatcaggtgtcagtcggccccaactgggaggtgcctcccagttaggctactcggggtcagggacccacttgaggaggcagtctgtccattctcagrtctcaaactccgtgctgggagaaggactactctcttcaaagctgtcagacaaggacgtttaagtctgcagaagtgtctgctgccttttgttcagctatgcgcttcccccagaggtggagtctacagaggcaggcaggcctcctcgagctgccatgggctccacccagttcgagcttcccagccactttgtttacctactgaagcctcagcaatggcgggcacccctcccccagcctcgctgccgacttgcagttcgatctcagactgctgtgctagcagtgagcaagtctctgtgggtgtgggaccctccaagcc

SEQ ID NO: 936913 - DNA, 514 bp, Homo sapiens
ttgcagtgagccaagattgcaccactgcactccagcctgggtgacagagcgagattctgtctcaaaaaaaaaaaagaaaaaaaaagggaaataaatggaatagagtccaaaaacagaaccacacatacaggatcaaatgattttccataaaggcacgaaggcaaaatcaagccaaaaataataatcttttcaacaaatgatgcaggaacaaatgaatattcacatgcaaaaacaaaacaaacatttttttwaaaaaatttggatccatacctcaaaattatctcaaaacagatgacagaactaagtgtaaaactgaaaaattatagaatttctaaagaaaaacacatggaaatctttttgaccttggattgggaaaggagatcttagatacagtaccaaaatcacaatccaccaaacattttttaatggtatactaaaaataaaatttaaaaacttttgctctgcaaaaggcactgttgagatacactacggactgtaagaaaatatttgcata

SEQ ID NO: 936914 - DNA, 537 bp, Homo sapiens
caaagcaatgcacactgggcagtgtaacaatagatggttattgtcctgtagttctggaggctggggctctgagattgagggttcggcagggctggctgtctcctgctctgtcctaggccagtctcctggcttctggtgatctgtgacattgctcggcttgtagaggcatcactctggtttctgcctttatcatcgtgtggtgctctcctaggaggctgtctgtgtccagactccccctttcrtaaggacacagcagtgtccgatcaggacccacctcataacctcattttttttttccaagacagagtcttgctctgttgcccaggctggagtgggcactaaccactaacctttggagttaatggtgtgatcttggctcactgcaacctccgcctcctgggttcaagcaattctcctgcctcagcctcccgagtagctgggattacaggcaccctccaccacacccggctaatttttgtatttttagtagagacagggttccaccatgttggccaggctggtcttgaactcctgacc

SEQ ID NO: 936915 - DNA, 553 bp, Homo sapiens
acttttcagaattgaagaaagaacaatcctcagaggcccgatacgttccaagttaagttaaaagaaaaaacatagtctaggcgcagtggctcacacctgtaatcccagcacttagggaggccaaggcgggcaggtcacaaggtcaggacttccagagcagcctggccaatatggtgaaactcggtcgctactaaaaatacaaaaaaaattagccaggcatggtggtgcatgcctgtaagcctgtaatcccagctactcaggagggtgaggcaggagaattgcttgaacccgggaggcagaggttgcaatgagccgagattgcaccactgcactccagcctgggcaacagagcgagactccatctcaaaaaaagaaaaaacrtaagtgaaactgcagggaaccaaaaataaaggaaagatgtcctaagtacgagagaaaagatagattatacattgaagagggacaggctgacagttgacttttgtgcaaaaccaaaaggagtcagccagaagaccatggaatgatattttcaatgcgctgagaaaaaaatcac

SEQ ID NO: 936916 - DNA, 594 bp, Homo sapiens
agaattgaagaaagaacaatcctcagaggcccgatacgttccaagttaagttaaaagaaaaaacatagtctaggcgcagtggctcacacctgtaatcccagcacttagggaggccaaggcgggcaggtcacaaggtcaggacttccagagcagcctggccaatatggtgaaactcggtcgctactaaaaatacaaaaaaaattagccaggcatggtggtgcatgcctgtaagcctgtaatcccagctactcaggagggtgaggcaggagaattgcttgaacccgggaggcagaggttgcaatgagccgagattgcaccactgcactccagcctgggcaacagagcgagactccatctcaaaaaaagaaaaaacataagtgaaactgcagggaaccaaaaataaaggaaagatgtcctaagtacgagagaaaagatagatyatacattgaagagggacaggctgacagttgacttttgtgcaaaaccaaaaggagtcagccagaagaccatggaatgatattttcaatgcgctgagaaaaaaatcactggcaacctgcaattctgtactcagcaaaaatatattgcaaaatgaag

SEQ ID NO: 936917 - DNA, 582 bp, Homo sapiens
gagtgggcatcttcctaggaaaccctggaaaagcagcagataggactggctctcagcagtgacgaaaagcaataagaggacaaaatgtggtactttacacaatggagtactattcagccataaaaaagaataagaacctgtcatttgcaacaacagggatggaattggaggtcatcatcttaagtgaaataaaccaggcacagaaagacaaacatcacatgttctcacttatttgtgggatccaaaaatccaaacaattgaactcatggagatagagggtagaaggatggatactagaggctgggaagtgttgygggggtgaggaggacggacatggggatgaataagacctagtgtttgatagtacaatagggtgagtagagtcaacgataatttaattgtacatttaaaaatagctaagaatataattggattgtttgtaacacaaaggacaaatgcttgaggagatggatactccattttccatagtgtgattatggtgcattgcatgcctgtatcaaaacatctcatgttccccataaatatatacacctactgtgtacccataaaaatgtaaaaaaa

SEQ ID NO: 936918 - DNA, 566 bp, Homo sapiens
agctgaattctaccagaggtacaaagaagagctggtaccattccttctgaaactattccaagcaatagaaaaagagggaatcctccataactcattttatgaggccagcatcatcctgataccaaaacctggcaaagacacaacaaaaaaagaaaattttaggccaatatccctgatgaacatagatgcgaaaatcctcaataaaatactggcaaagagaatccagcagcacattaaaaagcttatccamaacaatcaagttggcttcatccctgggatgcaaggctgattcaacatatgcaaatcaataaatgtaatccattacataaaaagaatcaatggcaaaaaccacatgattatctcaatagatgcagaaaaggccttcgataaaattcaacaccctcttgctaaaaactctcaataaactaggtattgacggaatgtatgtcaaaataagagctatttatgacaaacctacagccaatatcattctgagtgggcaaaagctggaagcattcccttttaaaaccagaacaagacaaggatgtcctctctcaccactcata

SEQ ID NO: 936919 - DNA, 650 bp, Homo sapiens
cctgccaggcttcttaactgggctgagatggctgaaatgacagaaatagaattcagaatatggatagaaacaaaggtcattgagattcaggagaacattgaaactcaatccaataggaacaaagatcataaagattcaggagaaaattgaatcctaattcttaggaagctaagaatcaccataaaatgatacaggagctgacagacaaatagccaggatagaaaagaaggtaactgacctgataaaactgaaaaacataagaattttataatgcaattgcaggtattaacagcagaataaccaaggtgaggaaagaatcacaaagcttcaagactggttttctgaaataagacaatcagacaataattttaaaaaagaataaaaaggaacaaataaaacctcyaagaaatatgggattatgtaaaagactaaatctatgactcattggtgtccctgaaagaggtgaggagaatggaagcaacttggaaaatatatttaaggatataatccatgaaaacttccccaacctagctagaaaggccaaaattcaaattcagaaaatgcagagaacccccacatgacacttaactaaaaggtcaccttcaaggcacataattgtcagattctccaaagtcaaaatgaaagaagaa

SEQ ID NO: 936920 - DNA, 644 bp, Homo sapiens
ttaatatataattcttatataattctaaaagttgtgttcttgagaaaaaataattttgtataatttagaagttattcaaaagttaaaaaaggtaaaaagaaaataggaagtaaaagagatgtgagaaaagttatgaatgtgaatatatttttggtaagtaagattgtttaaaaataataattttatctaaagatcttgtgtggtaaatttttgtcttaaagtaaaataactggttatttttaaaaagaactgtaatgtaagacaagtaagaaagtaaaaaatgttataaatgggctgtgtaagtggttataaggtataagaaacagaatttataaaaggaacgttgtaagtaattaagttggttataattaaaaaaggaaaccattataatagtctttstaaaggttagccccttacattaaaacaggggttacttaaggtattgctttgcttttagggaaattacaaaaggttttgatttttaattatataaccaatttcttttaaaaacttcttagattcgtatctcagaggttcaacatttgttgtgtcttgttgctttcagcttttcctccccttgagaaggcttaagatgacaactctcttcctcagttttttcatcacacctgaaattttttgcctct

SEQ ID NO: 936921 - DNA, 581 bp, Homo sapiens
catgttcattgcattattattcataatagctaggaggcggcaacaacctatgaatggataaaggaaatgtaatattttaatggaatattatttcaccacaaaagaaggaaattctgccatgtgggacaacatggatgaaactggataacattatgctaagtaaaatactccaggcagagaaagacaaatgctgtatgacctcacttatatgtggaatctaaaaatgtctcaaacacacagaaacagagtagaagagcaaaggtggggactatggagaaatgttagtaaaaggccacaaactttcagttataagatgaacaagttctaagatacagcatgggtggtgatgggtatgtaaattaatttgactrtggtaatcattacacagtgtacccatatcaaatcatcacattgtacaccttggatgtatacaatctatatttgtcatttaaatgaaaaaagtagttcatcatttcatttttttttaaaaaagccaaaatgtctaccaaaaaaattcaaattaactctcttaatcattctgttgacccttaactttatgaacatagctatctatggctgct

SEQ ID NO: 936922 - DNA, 603 bp, Homo sapiens
atctctacagtcttcttgctgctggttttacttttcctcttcacactgtaatcatggtaatgtttataatgtatgcctgatcatattgctcatccacttacactctgcagtggctacccattattcatagaatcaagttgaaacttcctaacatgggattcagctaatatttagtctcatttcttgccataagtcactccccctcagtgccctacatgcaccaaatcctgtcccccaccmaacacacaatgtaatcagctatactgaatttccccagttctttaaaaacatcgatctcctttttctttcttcatacttgttcccttttgttctaacttcgaagaatccttcagaaattgactcaagcatattgtcctcagagaggtttttcttgaccgtcctccaatccaggccggctcaagggacccactgaatcttcacacagcactctgcttccccatcatggctctaaccacacttctctaattgcctatttacttctgtcagttgctgtgaggacagcgcccatataagtcgtgttcacctctgtatttgcagcacctagtacagtgcacggcccatggcggtctttcaggaaacata

SEQ ID NO: 936923 - DNA, 603 bp, Homo sapiens
atctctacagtcttcttgctgctggttttacttttcctcttcacactgtaatcatggtaatgtttataatgtatgcctgatcatattgctcatccacttacactctgcagtggctacccattattcatagaatcaagttgaaacttcctaacatgggattcagctaatatttagtctcatttcttgccataagtcactccccctcagtgccctacatgcaccaaatcctgtcccccaccaaacacacaatgtaatcagctatactgaatttccccagttctttaaaaacatcgatctcctttttctttcttcatacttgttcccttttgttctaacttcgaagaatccttcagaaattgactcaagcatattgtcctcagagaggtttttcttgaccgtcctccaatccaggccggctmaagggacccactgaatcttcacacagcactctgcttccccatcatggctctaaccacacttctctaattgcctatttacttctgtcagttgctgtgaggacagcgcccatataagtcgtgttcacctctgtatttgcagcacctagtacagtgcacggcccatggcggtctttcaggaaacata

SEQ ID NO: 936924 - DNA, 603 bp, Homo sapiens
atctctacagtcttcttgctgctggttttacttttcctcttcacactgtaatcatggtaatgtttataatgtatgcctgatcatattgctcatccacttacactctgcagtggctacccattattcatagaatcaagttgaaacttcctaacatgggattcagctaatatttagtctcatttcttgccataagtcactccccctcagtgccctacatgcaccaaatcctgtcccccaccaaacacacaatgtaatcagctatactgaatttccccagttctttaaaaacatcgatctcctttttctttcttcatacttgttcccttttgttctaacttcgaagaatccttcagaaattgactcaagcatattgtcctcagagaggtttttcttgaccgtcctccaatccaggccggctcaagggacccactgaatcttcacacagcactctgcttccccatcmtggctctaaccacacttctctaattgcctatttacttctgtcagttgctgtgaggacagcgcccatataagtcgtgttcacctctgtatttgcagcacctagtacagtgcacggcccatggcggtctttcaggaaacata

SEQ ID NO: 936925 - DNA, 600 bp, Homo sapiens
acactgctttctcaagctcatgtggaacattcaccaagatagaccacattctggactataaacataccttaacaaatctaaaagaatagaaatcatacaaagaatgtcctcagaccacaatacaattaaattagaaatcaacaatggaaagataattgggaaaaccagaaacgtttggagattaaacaacatatttctaaacaacatatgggtcaaagagaagtctcaagagaaattttaaaatattttgaactaaaaaatgcaacttatcaaagtttgtgggatgcagcaaaagcagtgaggtttccatagtattaaaaktaacatgttagaaaagaaaaaaaaggtggaaaattattaagcttcaccttaggaaactggagaaagaagagcagtgtaaacccaaaggaagcagaagaaaagaaataataaaaatcagagcagaaatcagtgaaactgaaaactggaaaacaacagagaaagtcaatataaccaaaagctgcttctttgaaaacatcaataaaattgaaatctctatctaggctaagaaaaaaagaaagaagatgcaaattactaacatcagaaatgaaagaatggcca

SEQ ID NO: 936926 - DNA, 609 bp, Homo sapiens
agaacagagtactggggaggcaaaagctgcagagagtgagagaacattgaatatctgcagagggcttctgtcaagctttcagctaacagggattactacatgtgcttgtgaagaggacttagagttaggagtgtcctgtgctcacacagtgttgggaataatgcctgctccaaccagtaagactggaaaacctcatgattcayggggcattaggtaaagtacccaaaagggtcttgcctcagtagtggggaataattagccctataatgactactgctttgattctacctaacacttcttagaagcaagacccaaacggaccaaattgtttccaagtaacttaactgtatctcagaacaaaactaaagaatatttatacccaacaaggtaaaagtgacaacgctatacattaaatcagagattaccacaaatgcaaagtgcaaaataagatccatgattaggagaaaatcaatcaactgaaactgtaccagaactgatacatgttaaaataagcgtaaacattaaaacagttatgataattgtattccatatgttttcaaagataagtagaggcatggaagattttaaaaaagtgaaccaaattggagt

SEQ ID NO: 936927 - DNA, 639 bp, Homo sapiens
tatatttataataaaaattttttaaattatatcttccaaaacaaaaaagtgagaaaatcagtattatttttaaaataatttttaatttttgtgggtacatagttcatgtatatatttatgaggaacatgagatgttttgtttggtaagacgtgcaatgcataataatcatatcatatagaatggggcatccatcccctcaagcatttatcctttgtcttacaaagaatctarttctactcttttaattatttttcaatatacaattaaattattattgactatagtcaccctgtggtgctgtcaaatactaggtcttacccattctttctattttttttttgtactcactgaccatccccaccttctccccaccctcttactacccttcccatcctctgggaaccatcccaaatcagtattttttttttttttggtgcgaccatacctggctaaattttgtatttttaatagagacggggtttcaccatgttggccaggctagtctggaactcctgacctcaggtgatccacccgtctcggcttcccaaagtgctgggattacaggcgtgagccacagcacctggccccaaatcagtctttttaatacatttttttcaagtctttttaatgtctggctt

SEQ ID NO: 936928 - DNA, 703 bp, Homo sapiens
tgaaaatactggtacttgatagcctcttaaggaaaatttgcttcccgattttaagctggaaagtcactggaataactttaaaaaagaattacactacatggctttttagaatttcattacgtatgttaagaattgtgtacaaattgaaacgtctgtactgatcttyaaccaataaaatctcaattattaaaatacaaaaaaaaaaatccatcctgaacatggagacatccacactagggcaagctgagggcccagcaactcacagtagggcagtgaagggttaggggagtggacgtgcagcctttctgcagacgtctacatgagaagactatggagccagggcagaaattccaataatgtgccgccaatttttttttttttttgaaacggagtctcgctctgtcaccaggctggagtgcagtggcatgatcttggctcactgcaacctctgactccctggttcaagcgattctcctgcctcagcctcccaagtagctgggattacaggcatgcgccaccacgcccagctaatttttgtatttttagtagacatggggtttcaccatgttggccaggatggtctcgatctcctgatgacctcgtgatctgcccgcctcggcctcccaaagtgctgggattacaggcgtgagccaccgtgcccggcccatgtgctgctaaatattttaaaagcaggaaacataat

SEQ ID NO: 936929 - DNA, 703 bp, Homo sapiens
tgaaaatactggtacttgatagcctcttaaggaaaatttgcttcccgattttaagctggaaagtcactggaataactttaaaaaagaattacactacatggctttttagaatttcattacgtatgttaagaattgtgtacaaattgaaacgtctgtactgatcttcaaccaataaaatctcaattattaaaatacaaaaaaaaaaatccatcctgaacatggagacatccacactagggcaagctgagggcccagcaactcacagtagggcagtgaagggttaggggagtggacgtgcagcctttctgcagacgtctacatgagaagactatggagccagggcagaaattccaataatgtgccgccaatttttttttttttttgaaacrgagtctcgctctgtcaccaggctggagtgcagtggcatgatcttggctcactgcaacctctgactccctggttcaagcgattctcctgcctcagcctcccaagtagctgggattacaggcatgcgccaccacgcccagctaatttttgtatttttagtagacatggggtttcaccatgttggccaggatggtctcgatctcctgatgacctcgtgatctgcccgcctcggcctcccaaagtgctgggattacaggcgtgagccaccgtgcccggcccatgtgctgctaaatattttaaaagcaggaaacataat

SEQ ID NO: 936930 - DNA, 540 bp, Homo sapiens
ccaggcccggccatggccttagggactgtgcaaggtatcaggggcagatcctgaagaggggaggtgattgcaacccaggggcaggatggacacctcccactcaaatttgatctggatgttgagaccaacaacaacacacrtgcacccgaggatatagcaagatctaatgctcacactatgaggcttctcaggatagcagggcaggttgcctaaggtgctctgaacatggcttgagaaatcaaggaaagaagactgactgtcttggtgttttatggtggttagtgggtggggctggggtgagaattcccaagcacagtttgagaggcactgggctatcccatcagtgggcccagatgtggggtagaaaggggagagggaggaaccaagcctaaaagctgtcagcagccaagcatcaagaaacggagtcagactgcattccaaggacctgctgccaagtccttcatagccacacagcagtttagagaacctgctcctccctttaccctacaatccacaacagctccaaagcactgagaccta

SEQ ID NO: 936931 - DNA, 617 bp, Homo sapiens
tgtattgttttttggatttccttgcattgggcttcacctttctctggtgcctccctgattagcttaataactaacctcctgaattctttttcagataaatcagggatttcttcttggtttggatccattattggtgagctagtgtgattttggtggtggggggtggggggcgggggggtggtgttaaagagccttgttttgtcatattaccagcgttggttttccggttccttctcatttgggtaggctctctctgagggaaggtctagggctaaaggctgttgttcagattcttttgtcccacactgtgttcccttgatgtagtactctcccccttttcctatggatgtggcttcctgtgagccacgttgcagtgattgttatttttcttctgagtctagccacccagcaagtctgcccggctccaggctggtacgggggtttgtctgcacagagtcrggtgatgtgaaccctctgtgggtctctcagccatggataccagcacccgttttggtggaggcggcaggggactgaaatgaactctgtgagggtttttagctttggtggtttaacgttctatttttgtattggttggcctcctgccgggaggtggcgct

SEQ ID NO: 936932 - DNA, 650 bp, Homo sapiens
aaaaacatccaacggggctgatggtctcacttgatatttgtgaatgcaaattttcattgatatctctacactgtccagcaatcctacctacatatctccactctccaaaacaactataataacagattcgtccttctcaaatgtcctccccactcatgactttcacttaacaatcttgtctcacttttcattragaaaacagaatcagttaaacaggaaatctctcatcttctcacctccaaatctactcacctccaaatcttctcacctccaaatctactcgcctccctgcatttgaacccacaagctcagatgccctcctctcatcatggcagtagtgacccacctcttatggaaggctgacccctctgctcacactctgccatctcctctctccttctcaaggatgctcacctaacaatgaaactctctttccagcaccccttgtttcttctctatcaatcctactcacatattagaaaacgaacatcctctgctatctctcattttaaaatttaaatgaggcctaaaggatccattccccaggcatgtcaggttttgaatggtcaaaatgggacatcttgatgggctcatagggcaggatctggagcgactgtttctgtagctcagaacaccagatggcattccct

SEQ ID NO: 936933 - DNA, 555 bp, Homo sapiens
cactgcactccagcatgggtcacagagcgagactccatctcaaaaagaagaaaaaaagaaaaaaaagaaaaaaagaaataaaataaaataaaaagaagttggaaacaatcacttgtagcgttttgttcagaagttcccataggaaggtcagagaagggtcattgaagacttcccaatgggaaaaaccattcatttccaggatccatactaacttctttctaaaatttaaatcaaaatattggaatgaaagtgcaaacagagaagttcacccagatatcaggtagcattcacagccagccacatttttcaccctcttcacttggagatttggtcttgagtaaaacgttagagaatcagagaacatcagggrtccagggcctctgaagatgtgaaaaccaacctccttgttttgcaaatgtggaaggaaaagtcccacgaaaagtccaagaatgtgcccaatgttataaagagacttgccttcatattcaagaggttcaacagtcactgctctggggctgccataaagatggtctccgctggctatctttactgtct

SEQ ID NO: 936934 - DNA, 586 bp, Homo sapiens
ggtcctggacttttttttttttttggtaattttttaaattaccatttcaatctcactgcttgttattggtctgttcagggtatctaatccttcctgatttaaactaggaggattggatctttccaggaaattatccatctcctctagcttttctartttatgcacataaaggtgttaatagtagccttgaatgatcttttgtatttctgtggtgtcggttttaaaatctttcatttcatttctaattgagcttatttggattttctctcttcttggttaatcttgctcgtggtcttctttttttattttttccaagaaccagctttttgtttcatttatcttttgctattttgttgttgttgtttcaatttcattcagttctgctctgatcttggttatttccttttttttctactgggtttttgtttggtttgtccttgtttccctagttccttgaggtgtgaccttagattatttgtgctctttcagagtttttgatgtaggcatttagggtcatgaactttcctcttagcactgcctttgctgtatcccagaggttttgataagttgtgttactattacagtt

SEQ ID NO: 936935 - DNA, 586 bp, Homo sapiens
ggtcctggacttttttttttttttggtaattttttaaattaccatttcaatctcactgcttgttattggtctgttcagggtatctaatccttcctgatttaaactaggaggattggatctttccaggaaattatccatctcctctagcttttctagtttatgcacataaaggtgttaatagtagccttgaatgatcttttgtatttctgtggtgtcggttttaaaatctttcatttcatttctaattgagcttatttggattttctctcttcttggttaatcttgctcgtggtcttctttttttattttttccaagaaccagctttttgtttcatttatcttttgctattttgttgttgttgtttcaatttcattcagttctgctctgatcttggttatttccttttttttctactgggtttttgtttggtttgtccttgtttccctagtyccttgaggtgtgaccttagattatttgtgctctttcagagtttttgatgtaggcatttagggtcatgaactttcctcttagcactgcctttgctgtatcccagaggttttgataagttgtgttactattacagtt

SEQ ID NO: 936936 - DNA, 595 bp, Homo sapiens
aaagggaagcccatcagactaacagcggatttctctgcagaaaccctacaagccagaagagagtgaggtccaatattcaacattcttaaagaaaagaattttcaacccagaatttcatatgcagccaaactaagcttcataagtgaaggagaaataaaatcctttatagacaagcaaatgctgatggattctgtcaccaccaggcctgccttacaagagctcctgaaggaagcactaaatatggaaaggaaaaaccagtagcagccactgcaaaaacaacccaaaatgtaaagaacattggcactatgaagaaactgcattaactaatgggcaaaataaccagctagcatcataatgacaagatcaaattcacacataaaatattaaccttaaatgtaaatgggctaaatcccccaattaaaagacacaaactggcaaattggataaagagtcaagrcccatcagtgtgctgtattcaggggacccatctcacatgcaaagacacacataggctcaaaataaagggatggaggaagatttaccaaacaaatggaaagaagaaaaaaaaaaaagcaggggttgcaatcctagtccc

SEQ ID NO: 936937 - DNA, 493 bp, Homo sapiens
acaaataaacttctaatgcaatccggaaaatgaaggaaaagataaacattttaaaaatcaatcaatcagagcttctagaactgaaaatctcacttaagaaatttcaaaatatgattgaaacctttatcaagagactggaccaagcagaagaaaggatttcagagcttcaagaccagtctttcaaactaacccagcaagacagaaataaaaaaaaattcaaaaaatgaacaaactctttgacaaatatgggtttgggtgaagcaaccaaacctacaaattataggcattcctgagagagagagaagaagaaaaagtaaataacctggaaaacatatttgtggraataaggaaaaaaaaaaaacttctacaatcttgctagagaggtagacagatacaagaaatccagaaaacaccggcaggatactatacaaaatgaacatcaccagggcacttaagtcaccaaacagtccaaagtcaattttaatgaaaaaat

SEQ ID NO: 936938 - DNA, 685 bp, Homo sapiens
agaaatttgcataagtaatgaggagccaaatgttaatccccaagacaatgggaaaaatgtctccaaggcatatcagaggtcttcatggcggcccctcccattacaggcccagaggcctaggagaaaatgctctcgtgggccagccccatggtccctgtgctgtgtgcagtctagggacttggtgccctgtgtcccagccactccagccctgactaaaaggggccatggtacagcttgggctgttgcttcaaagggtggaagcaccaagccttggtagcttccatgtggtcttgagcctgtgggtgcccagaagtcaagaactgaggtttgagaccccctgcctagacttcagaagatgtatggaaatggtaccagctcttctttttctttcttcttcttcttcttctttttttttttttttgagacagtgtctcactttgtcaaccagkctggtcacaaactcctgcctggcccccccaagtagttgagactataggcatacacaaccatgctctactaattttttgtattatttgtagagatggggttttgccatgttgcccaggatggtcacaaactcctgagctcaagtgatctgtccaccttggtttcccaaaatgctgggattacaggtgtgggccactgtgtctagcctttgtatcagctcttctttgtacatctgcta

SEQ ID NO: 936939 - DNA, 591 bp, Homo sapiens
tgaaaggaaatagggagagagccaggatggctgggagaggcatcacttggtgatgcaagtgtgagcctgagtgaaggaaagagagagagaaggctgagcacagtcatcctagagagcattgcaaggaagatttggcaaagttttttttttttttttgagatggagtctcgctctgtcacctatcaggcatgatcttggctcactgcaacctccgccttctgggttcaagcaattctcctgcctcagcctctcaggtagctgggattacaggcgcaagacatcatgcctggctaatttttgtatttttagtagagacggggtttagccatgttgcccaggctagtcttgaactcctggcctcaagtgatgtgcccacctcggcctcccaagtgctgggattacaggtgtgagccactgmgctcggcctcggcaaagttgataagggagtccctgagccaaagtcagcctgcaaaggaggccatgcctcccgggagtgtgtctgccttggtgtcctgctgcatccagtccctagcgggagcagcctatgagcagaagcaccatgcccaagcatactgatgaatttcagagcac

SEQ ID NO: 936940 - DNA, 591 bp, Homo sapiens
tgaaaggaaatagggagagagccaggatggctgggagaggcatcacttggtgatgcaagtgtgagcctgagtgaaggaaagagagagagaaggctgagcacagtcatcctagagagcattgcaaggaagatttggcaaagttttttttttttttttgagatggagtctcgctctgtcacctatcaggcatgatcttggctcactgcaacctccgccttctgggttcaagcaattctcctgcctcagcctctcaggtagctgggattacaggcgcaagacatcatgcctggctaatttttgtatttttagtagagacggggtttagccatgttgcccaggctagtcttgaactcctggcctcaagtgatgtgcccacctcggcctcccaagtgctgggattacaggtgtgagccactgarctcggcctcggcaaagttgataagggagtccctgagccaaagtcagcctgcaaaggaggccatgcctcccgggagtgtgtctgccttggtgtcctgctgcatccagtccctagcgggagcagcctatgagcagaagcaccatgcccaagcatactgatgaatttcagagcac

SEQ ID NO: 936941 - DNA, 654 bp, Homo sapiens
tggatagagttcacgaccagagtgaaaacttccttgatggctgttagccaatcaaatggtgcttttactaggcccacccttggactaatcagcatgcagtcccccattctgagctcacaaaaacttcagactcggtcacagaggcaactacctgctttcaggctccctgtcacacagagggctaccctcccaggtcctttctcattgttgagagcttttctgttgctcaataacatttttctctgccttcctcatactccagtgtctgagtacttcattcttcttggttgtgggacaagaacccagacctgagggaacagcgggtgtgaaaagagctttaacactgtaaccctccctcctgctcaccaagcagtgggggagaaaaaaaaaccagtgggyaccacaagccctcattcactgacctgtgggtagcaggaccaaacaatctgtgacacaaccctgttcatggaagctgcgggaacaaacaagatctgtaacacttgctgggagctcaggcctcaggactcttctagcaaaggctgtgacagcccttgggctctgcagttggtggcgtctctaaatttttgggcatcgctacgcaccccctcatccagacactggtgcccaaggtggaagccatctgtggcacgcctg

SEQ ID NO: 936942 - DNA, 529 bp, Homo sapiens
gacttgtgtggtaatggattaaaattgaagaagaatatgaacaagaactcatgtttaacttaatatagatagatggttacataaagaaatagttacaggtgtgtctatatacatgggttactacacacacatatatttatttgctctgttaccggagaggccctaaaagaaacatctsagtagcaaaaagcaaacctagcatccagatcatgggtttagtaccattcttcaattaaaaacattcaggagggtttggagaaataactgattctaacactggacagatattataacaacataagcctatacaaataatatatttgataaaggattaacatgcaaaatatataaggaactccaataattcaatagcaatagaaacaagtaaccttattttaaaatagccaaaagacctgaataaacatttctccaaagaagatgtacgaatgttcaacagatacaggaaaatgtgctcaacatcacaaatcatcaacaaaatgcacatcaaaaccacaatgacatatcacct

SEQ ID NO: 936943 - DNA, 548 bp, Homo sapiens
ggctaaggcaggagaatggtgtgaacctgtgaggcggaggttgcagtgagccgagattgtgccactgcactccagcctgggcaacagtgcgacactccgtctcaaaaaaaaaaaaaaaaaaaaaaaaaaaaacggagggctgtgtaaagctcaggacccttgtccactagaggcaagatgccccctgaccccttcttccaaacatactcttttgtctgttgtctttattctcatattctcaaccttttttccgtcccccaaggtccatgcaggtaacacatatccaaraatatactcatgtattactgcttcctttgcagtaatacctttgtcctatccaccatcatttcttattgaaaacttgcttccatgcttccagactttcttgcctttcatctgttttcaacacaacagcaaacatggtcttgttagaatgcaagcctgaccaggctgctcctgtctgaaaaccctcctttggctctccgtctcagaatcagtcagcatctttacaatggcaagcatgaacagacttctgtttctagttgacc

SEQ ID NO: 936944 - DNA, 546 bp, Homo sapiens
gcaaagcttagcttgtccttgagccttacctgcttactgtgtaatgcccaacctcatttttaccaatcctgtttttagactctccctttcctttaatcacccagccttgtttccacctgaattgactctcccttagctaagagagccagacagactccatcttggctttttcactggcagccccttcctcgaggacttaacttgtgcaagctgactcccagcacatccaagaatgcaattaactgataagatactgtggcgagcaatatccgcaattctcaggaattcgtctgattgataatgcccaaagccccaagtctatcaccttgtaatggtcttaamgcccctgcacctggaactgtttactttcctgtaaccatttatccttttaacttcttgcctactttatttctgtaaaattgttttaactagaccccccctcccttttctaaaccaaagtataaaagaaaatctagccccttcttcaggccgagagaattttgagtgttagctgtctcttggccaccaactaaataaacggactct

SEQ ID NO: 936945 - DNA, 605 bp, Homo sapiens
cataaaaaagaatgagtttagatcctttgcggggacatggatgaagctggaaaccatcattctcagcaagctgatacaggaacagaaaaccaaacaccacacgttctcactcctaagtgggagttgaacaatgagaacacatggacacagggagggaaacatcacacaccgaggcctgtcagggggtgggggctaggggaggggtagcattaggagaaatacagatgacagattgatgggtgcaacaaaccaccatggcgcatgcatacctatgtaacaagcctgcacgttctgcacatgtatcccagaacttaaagtataatatacaaaaaaaagaaaaagaaaaagaaaaattaaatgcatggagagttgaaggagataataaatctaaaacccaaaacctccaaaaaattwaaaaaaaaataaaaaaaaagatacattagagatgatctacactgcagggacaaaacttttcagtaataaaaataaaatgaaaggactaataataatggccagaaaagacacacaggcagtaaatattttatttcgatgatgttatacatatatataaaatcaggccagtagaaaaatagtgaaaataaata

SEQ ID NO: 936946 - DNA, 822 bp, Homo sapiens
caccaggagatatcagctgtgatgtcttggagaaacagtgtaaactggcagcgtaaacaagagcagggcatgtatgagtagttgagaatggtgaataggagtatgactagacagaagatagtagggttgacaagttttttggggcacagtccaagttggtctggtgtctggaatgagactggggcctaataaaaaggagcatctatacaggagctcatatgggctgtaccttgtagcactccaaggacaggcctgaattctgagaagggaaagaggtaaaygtattgcctagtcctttttcagttgttggctgagcttgatgaggtgtgtttttaaaagaccattagtctgttctacctttcctgaacactgaggactgtaagcgatataaagttttcaccgaatactaagagcctgaaaaaatgcttgggtgatttgactaataaaggctggtctgttatcggactgtatagaggtgggaaggccaaaccaaggaattatgtctgacagaagggaagaaatgaccatggtggccttcttagaacctgtgggaaaggcctctacctatccagtgaaagtgtctacctagaccaagaggtattttagtttcctgactcagggcatgttgagtaaagctaatttgccagtcctgggtgggggcaaatccctgagcttgatgtgtagggaagggagggagcctgaataatccctgaggagtagtagaatagcagatggaacactgagaagttatttccttgaggatagatttccataatggaaaggaaatgagaggttctaagaggcgggctggtggcttgtact

SEQ ID NO: 936947 - DNA, 649 bp, Homo sapiens
gaatactaagagcctgaaaaaatgcttgggtgatttgactaataaaggctggtctgttatcggactgtatagaggtgggaaggccaaaccaaggaattatgtctgacagaagggaagaaatgaccatggtggccttcttagaacctgtrggaaaggcctctacctatccagtgaaagtgtctacctagaccaagaggtattttagtttcctgactcagggcatgttgagtaaagctaatttgccagtcctgggtgggggcaaatccctgagcttgatgtgtagggaagggagggagcctgaataatccctgaggagtagtagaatagcagatggaacactgagaagttatttccttgaggatagatttccataatggaaaggaaatgagaggttctaagaggcgggctggtggcttgtactatagcatagcctgcctttgctggtgtgtggtgattaggcctggtggaactgccatcaataaaccaagtgtgagcagggtgagaaacaggaaagaaggaaatgtggggaaatggggtgaacgtcaggtggatcagagagatgcagttatgagggtcaggtgtggtatcaggaataatgtgggaggccggattgaaatctgggccaggaacaatggtaattgtggtagac

SEQ ID NO: 936948 - DNA, 744 bp, Homo sapiens
tgcactgcagttaaactaaagtctgtgccctccatcctggtggtgggaatttcacatactctcacatattgggttacacgcaagaaacatgctgtcctgagtatccacaaagtgtgtatggggcatcacagtcctaccatgctaaagctctgactgcggtatgggtaggggtggctggaagccagggaaggtgattcattgagaccaggcaggatggtaaagggtctatgcacggtgtggatgaktaacgccatgagaaattctcataatccctggtagaaacagatattgctacaatcattccagaaagtttccaggcattagctagaaaagtgaacagacatattctaccactgggcacctgctctgccaggttataccctagagaaggcctcacttctgtgcacctggaggcatggacacaggactgctcccatgggcttcatctgccatagcagagaactggaagttacccagatatgcaccgagaggagagcagatgaacatgtggtggtcagtctctacaatggaatattatatgatggtgaaatgaatgaattagaactacaggcaacaggaagaacaaagcccagacacttagcggagggaaagagcacatggcagacaaatttgtgcagtacaatttgatttataaaggctcgaaacaggcaaaaccaagtcatctattgttttagacatgtgctatttgattttcataaaaagtaatggaatgattagcaccaa

SEQ ID NO: 936949 - DNA, 690 bp, Homo sapiens
ccatagacagacaaagatctacgcaaagtttgaatcaggttttgagtaggatccactcacaggtttaaatctatagcaggctacgattttattttgcacataacaaaaatgaaaaactgaggcacagaattcaagctttgcagaaaaatgtgttggctccctaaccaacacacacacacacacacacacacctactttcccaaattctttcctcctgtatgaaaaaaacttaaggctgggcacagtggttcatgcttgtaatccagcwctttgggaggctgaggcagcaggattgcttgatccaaggagtccaagaccagcctgggcaacatgatgagaccctgtctctacaaaaagaaaaggaggaaaaaattagctgagcatgccaatagtcccatctactagggaggctgaagggagaggattgcttgagcccaggaggtcaaggcagcagtgagccgtaatccagccactacactctagcctgaatgacagagcaagactctgtctcaaaaatgaacaaagaaagaaaagaaagaaagagagagagagagggagggaaggagggaggaaggaaggaaggaaggaaggaatgaaggaaggaaagaaggaaggaaaaaaggaaggaaggaagtttacagagttttttgaggtgttagtgttccctaaattgtatggtcttcagaggtt

SEQ ID NO: 936950 - DNA, 690 bp, Homo sapiens
ccatagacagacaaagatctacgcaaagtttgaatcaggttttgagtaggatccactcacaggtttaaatctatagcaggctacgattttattttgcacataacaaaaatgaaaaactgaggcacagaattcaagctttgcagaaaaatgtgttggctccctaaccaacacacacacacacacacacacacctactttcccaaattctttcctcctgtatgaaaaaaacttaaggctgggcacagtggttcatgcttgtaatccagctctttgggaggctgaggcagcaggattgcttgatccaaggagtccaagaccagcctgggcaasatgatgagaccctgtctctacaaaaagaaaaggaggaaaaaattagctgagcatgccaatagtcccatctactagggaggctgaagggagaggattgcttgagcccaggaggtcaaggcagcagtgagccgtaatccagccactacactctagcctgaatgacagagcaagactctgtctcaaaaatgaacaaagaaagaaaagaaagaaagagagagagagagggagggaaggagggaggaaggaaggaaggaaggaaggaatgaaggaaggaaagaaggaaggaaaaaaggaaggaaggaagtttacagagttttttgaggtgttagtgttccctaaattgtatggtcttcagaggtt

SEQ ID NO: 936951 - DNA, 602 bp, Homo sapiens
caagggaatattatacagcactaaaaagaaatcagatattaagctaagaaaagacatggagaagacttaaatgtatattgctaagtaaaagaagccagcatgagaaggctatatattgtatggttctaagtgtatgacaatctggaaaaggcaatactatcatgtagaaacatcagtggttttcagcaatttgcagaaagtaagagagggatacataggtggaacacagaggatttttatggtgatgaaactattctatatgatactggtggatatctgtcattatacagttgtcaaaattcacagaactttacaacacaaagwgtgaacgctaatgtaaactatggacttcagttatagtaatgtatcaatatgtatcaattgtaaccaatataccacattaatacatggtgttaataataggggaaattgtgtacagaggtagggattgggtggagagtgggataggaaggtagtgttacatgggaattctgtgtactttctgctcattggtttctgtaaacctaaaattgctctaaaaaacaaagtctactaattttgagaaatttgatgaagaataaatattcatgtagtaccaaggt

SEQ ID NO: 936952 - DNA, 592 bp, Homo sapiens
agctgagttctaccagaggtacaaagaggagctggtatcattctttctgaaacttttccaatcaatagaaaaagatagaatcctccctaattcattttatgagaccaacatcatcctgataccaaagcctgacagacacaacaacaaaaaaagagaattttagaccaatatcccggatgaacattgatgcaaatatcctcaataagatactaacaaactgaatccagcagcacatcaaaaagcttatscaccacgatcaacttggcatccctaggatgcaagactggttcaacatacgcaaatcaataagcgtaatacatcatataaacagaaccaaagacaaaaaccacatgattatcttaatagatgcagaaaagacctttgacaaaattcaacagcccttcatgctaagaactctcaataaactaggtattgatgggatgtatctcaaaataataagagctatttatgacaaaaacacagccaatatcatattgaatggacaataactggaagcattccctttgaaacctggcacaagacaacgattccctctctcaccactcctattcaacatagtcttggaagttct

SEQ ID NO: 936953 - DNA, 592 bp, Homo sapiens
agctgagttctaccagaggtacaaagaggagctggtatcattctttctgaaacttttccaatcaatagaaaaagatagaatcctccctaattcattttatgagaccaacatcatcctgataccaaagcctgacagacacaacaacaaaaaaagagaattttagaccaatatcccggatgaacattgatgcaaatatcctcaataagatactaacaaactgaatccagcagcacatcaaaaagcttatccaccacgatcaacttggcatccctaggatgcaagactggttcaacatacgcaaatcaataarcgtaatacatcatataaacagaaccaaagacaaaaaccacatgattatcttaatagatgcagaaaagacctttgacaaaattcaacagcccttcatgctaagaactctcaataaactaggtattgatgggatgtatctcaaaataataagagctatttatgacaaaaacacagccaatatcatattgaatggacaataactggaagcattccctttgaaacctggcacaagacaacgattccctctctcaccactcctattcaacatagtcttggaagttct

SEQ ID NO: 936954 - DNA, 630 bp, Homo sapiens
gtcttggtgcctgctctgggcaaagttgccagcctgtgcgacaagagcgaaactccgtctccaaaacaaaaacaaaaaaccttgtatcatttccaggggctcacatctccctaagggcctggtaattggctggctctggcctccatctggccctgagggtgtaggtaacaccccaccttacctggtttcttcctgccagggccaatcttcagacttcaggactttrcagcctatcccacctcccctctggccagccttgagcccttgtgggtccagcactttttccaggctgtctcctggttgtccttctgcctcgaggcctggctcatgctgctccccctcccactctccaagacccacaaggaccactccacacccagctcagcccctcccctcagatagtcctttctctttcctcaggtggccaggtgcatatcttgtgtgaggaccttcactgtatctgggaatgcctactggttacctcggtaacagagaacaaggcatttacctgatatgagtgtcttggttcactgtctacatggctagggagggagtcaataataggcttttcacttgctgcaagggccagttctcctggccccatggctctagggatggaggacgctgcag

SEQ ID NO: 936955 - DNA, 418 bp, Homo sapiens
ccatatatgattttcctagtttctcctccccctttgctttttgctctcttagtatattaattgttttcactctctgaatcttttttccccatttctttggcagacatttttacttgtcttggaagagtaggtgaagagctgtttttaggactctttgaaagggtacagtatgggtgacagtcttggctaatggtaacatccagggagctggggtcagcgtgagcaaattagcaaagcactggcactcagtrgcaggaatacaagtgactgcaaagtgttaaacacatctggaaagggatactgacatcatcctcagaatctgtggggagttcacatagccagttaagacccattcctctttgaccctataaagattctttaaagaataatacccttagtggttttctagccagcttgc

SEQ ID NO: 936956 - DNA, 771 bp, Homo sapiens
ctgggctgggattggtacagattgtgtaagccctgggacgctattgctggggctttggcttttactctgactaaaatgggaaccaccgagggcttctgagcagagaggcgatgtgatctgtctcctgatttaaaagcacgaactggctgccaagttgagaaagactatgggaagatttgggtagaagcatgggggccaagctgtggcaacatcccggtgggagattatagtgatcctgactgggttcacggtggtggtgagagatggtcagagcctggatacatgttgaagtcagtcagtaggatttcctgacagactggatgtgagctgtgagagaaggcagtggtcaaggttgastttgattctgattgaattattaagtaattttaaaaaacactactgcctttcccaatcctaccaagtaaaggatgctagataaaagaaatctcaagtcaggccaggtgcagtggctcacacctgtagttccaacagtttgagaggcagagatgggagtatgttttaaggccatgagtttgagagcagcctgggcaacacagcaagacctcgtctctacaaaaataaaaaaaaataaatttaataaaataaatatagccaggcatgatggtatgtacctatggccccagttactcatgtggctgagatgggcagatctcttgattctaggagtttgaggccagcttgggcaacatagcaagacttctctctctacaaaaatgaaaaaaatgcctgacatggtggtacttgcctgta

SEQ ID NO: 936957 - DNA, 709 bp, Homo sapiens
tagtgggctacttggattttggaggcaacacatttctcatttgggtgtgttactctggcccatttatcatgtgacccataaggctgccagttttgagtggggtccagaacaggagaaggctccgcaacaggtccagactgctatgcaagctgctctgccacttgggccatatgacccagcagatccaatggtgtttgaggtgtgagtcgcagatagggatgctgtctggagcctctggcaggcccccataggttaatcacagtaaaggtctccaggatttttgagcaagttcctgccatcttctgcagataactactcttcttttgagaaagagctcttggactgttactaggctttggtagaaactgaatgtttgactatgggtcaaatcaccatgccacctgaactgcctgtcatgaactgggtgctttctgacccaactggccataaagtgaggcatgcacagcagcattccatcaycaaatggaagtggcatatatgtgattgggctcaagcagggcctgaggccacagatgagttacatgagcaagtggctcaaatgtccatgatccccactcctcccaccctgctttctctcccccagcctgcactgatggccccttgtggagttccttataatcagttgatagaggaagagaagactggagcctggtttacagatgcttctgcacgatatgcaagcaccacc

SEQ ID NO: 936958 - DNA, 715 bp, Homo sapiens
aataccagagatgctttaggaagtctcttagtattaccatgccctatgattaaggtcaatgggaaactacagcaacccaatccagataggactgaaaatggcccagacccttcaggaatgaaggtttgggtcacttcaatagataaaaaaaaaaatcaagacctgctgaggtgcttgctgaaggcaaagggaatacagaatggatagtagaagaaggtagtcatcaataccagctatgaccacgtgacctgttgcagaaacaaggactataattgccttgagtatttcctccttattttgttaagaacatgtttatgcatgtatacacttatactcagaaaataccttcattttatttcctttawcatgtgacataagatttattgacttcataccagcactgaaatgttgttaactttatgtaatagtattcgggttgtggattggtgcatttctggttgtatgagggatagctgtattatgttaggcataattaagaccttattattgtctttatttgaagttatatatttttcaggagatgtgtatggattcaagttgacaagaggcggacttgtgatggttaacactgagtgtcaacttgattggattgaaggatgcaaagtatttctcctgggtatgtctgtgagggtgttgccaaaagagattaacatttgagtcagtggacttaggagaggcagactcacccacaatt

SEQ ID NO: 936959 - DNA, 748 bp, Homo sapiens
accctatccaaatctgcctggttcctctctcagacacagatctacagaccagaactttcagagaacttatcctcttatcttagcagatataagactgtcagggccttctgtagggaacatacagcaaaggaatgggacaagcacagttacttttaggaccatttgaactggctttagagtggagttgaaaagcagttttgaggaagaaatctgtacccctaagcctcaaaggatggtcattggatctcatttagctttgtttcactagagcagaaactaagtttccccctaggagccccaagaacatattactcctcaggtagatattctgccaatcaaagggtggaagcagatatccctgggaactcacctgggaagcccgcatcatatagaagtcagggtagttckttactgactcctaataacgtgttttaagcagagaaattgtattattagatttgaaatctagaaaatattactttgaaacacaaaaggaaagaaaatcataacaaagcagaggtgactgtggaagctggtgtgaagaatgggttgaagagagatgagaatgaatagaaggagacccggaagttgtttgcagcaattcaaatgtgtggagagggtggatggggtgatccaaggaaaggcaatgcaagtgagaatggagaaaaatgggtgagtgaattcaagaaatggtactttattttctttctaaaaagtgaccctaatgctataactctttattttacag

SEQ ID NO: 936960 - DNA, 442 bp, Homo sapiens
gccttttgttcagctatgccctgcccccagaggtggagtctacagaggcaggcgggcctccttgagctgtggtgggctccacccagtttgagctaccccgcagctttgtttacctactcaagcctcagcaatggtgggtgcccctcccccagcctctctgccaccttgcagctcaatctcagactgctgtgctagcaatgagggaggctccgtcggcatgggaccctccgagccakgcgtgggatataatctcctggtgtgccgtttgctaaggccattggaaaagtgcagtagggtgggagtgacctgattttccaggtgccttccatcacagctttgcttggctaggaaagggaattccctaccccttgtgcttcccaggtgaggcaatgccccgccctgcttcggctcacgcttggcgggctgcacccactgtcctgca

SEQ ID NO: 936961 - DNA, 468 bp, Homo sapiens
ttctgccctatttaaatgaagagaagacagatcctcgaccacaaagagaaagtggttcgcttctgttgcttactgtggggttggcgctgtggaacgtcccagcctcctctgaattcatctggaaaacgggtttaaaaattcttacttccctgcctcctgcctcctccctagaacggacgtcagttgggatgaatcagagcctcggtattttggctcagccgttgttttgrcaataagaatgattaaacagatagtttatttattttactctcatcttctgtacccacatctctggaagagctgtgttcataggtgtggagacaagtaaagagctttctgacgagtcagaagctggtcatgggaaggaaatgagggcatctcctaggtaaaggaatttttattttctcactggatttcttctcactttaaactggttcttttgtgttcttacttggctgggaatgtctg

SEQ ID NO: 936962 - DNA, 468 bp, Homo sapiens
ttctgccctatttaaatgaagagaagacagatcctcgaccacaaagagaaagtggttcgcttctgttgcttactgtggggttggcgctgtggaacgtcccagcctcctctgaattcatctggaaaacgggtttaaaaattcttacttccctgcctcctgcctcctccctagaacggacgtcagttgggatgaatcagagcctcggtattttggctcagccgttgttttggcaataagaatgattaaacagatagtttatttattttactctcatcttctgtacccacatctctggragagctgtgttcataggtgtggagacaagtaaagagctttctgacgagtcagaagctggtcatgggaaggaaatgagggcatctcctaggtaaaggaatttttattttctcactggatttcttctcactttaaactggttcttttgtgttcttacttggctgggaatgtctg

SEQ ID NO: 936963 - DNA, 640 bp, Homo sapiens
caagctcccttcttcctcctgctctccctcctgctagggattagaaaggaaaatgagacacagccccagcccacacgaacctctaacactgtagaggagagtttcacctactgagtggcatttataatttagttaccatgggtattatggaagaagtgagaaaaactggaagcaaaaacaactttaaactagtagaagcccttatccctatttctgactagctttttaaaaagtatttaatatattttttaaactgacaatataaacctcaccaaattttcattatgatcatctgcaattaatgttttccatggtttactgtgaacacatacagtaccatccatggtactcttcttttttttgagacggagtcttgctctgtcgcccaggctggagtgcagtggcgggatctcggctcactgcaaccwccgcctcccgggttcacgccattctcctgcctcagcctcccaagtagctgggactacaggtgcccgccaccacgcccggctaattttttgtatttttattagagatggggtttcaccgtgttagccaggatggtctcgatctcctgacctcgtgatccgcccgcctcggcctcccaaagtgctgggattacaggagtgagccaccgcgcccg

SEQ ID NO: 936964 - DNA, 586 bp, Homo sapiens
tttctgttagtgtaaattcaggtattatcagttagaaatgcgctcatccacaagtaacagaataatatctggctagcagtagtttaaataagcatgtttcttattcccacataataatatatctagaggtaagcagtcaccagcattaagttggtgactcaatgacatgaagggccaatgaactgtgattcgactggccttttccagtagatgaaatgctgcagcttcagccattgtgtctgcatttgaggaggaagaagatcaaagggccttctgtagcgcctctgtttctttctttcttttggtatgtttttagaaacaaggtcttgctccatcacccargctggagtgcagtggcatgatcatagctcactgcagcctctaaagtcctgggctcaagcaatgctcctgcctcagcctcctgagtagctgggacaacaggtgcacaccaccatgcccagctaattaaaaactttttatagagacaggttctcactatgttgcccaggctggttttaaactcctgggctcaggcaatcctctccctctggcctctgaaagcactgggattacaggcatgagccac

SEQ ID NO: 936965 - DNA, 607 bp, Homo sapiens
tctgcacataactttcttcatggataattgggaataataatagtgactttggaggataggttgggaaaagatttatgaattaaaatggataatatataagggctattggagattacaaatccattatatccctaaggacaccgacaccgaggtcttgcatctatcaaggactcaatgaatggatggatccagaaatgtgccttagccagcaagtgactgacagaacagtaaagtcagtgaaattggccttcaggcccaccaccaacttgggtatcttcctgccctcctgagtcctccatgcttgcattcttcccttcccaraaagctggatgatatggtttggccgtgtccccacccaaatctcatcttgaattgtagctcccataatccctgcatgtcatgggagggacccattgaaaggtcattgaattatggtggcaagtcttccctgtgctgttctcatgatagtgaataattctcacaagatccgatggtttataaagggcagctcccttgcacacaagctctcttgtctgccaccatgtaagacgtccctttgctcttcctttgtcttccaccatgattgtgaggcctccccagccatgtg

SEQ ID NO: 936966 - DNA, 654 bp, Homo sapiens
ataaccacaaaaattaaaaataaaaaaaataaataaacccagtttggacaatggaaaggaaattaaattaatagactggtgacctgaaggtgaagtcaggaaagggtctagtattagcttcctggttatcacttgtttctttctatgcaaaactgacttgggcttttgtcatgcaatggagtcaaggaggagtatgtttggcacccaggtgatccacttgggtccctcttggtacatgcaccattttgacaataagagcacgagtgcagaaagcccaacctcagaagggcatggtgaccagggcacagacccctcagggatataagtctgggtcactccaccagcttaaccatcaagatctgcagaggttctggctgagggtgagaggaattgaggatggatggtagaggagagagattataaatatcaattctgattttaagaccagttgcagcatcaggggctcaaacttrtcttactgatacactgcttctaggttccccccaagaggcagaagaagctgcttccagaatgtatatgaagacgagattcaagtgcacaaaggtgaactgtgggggccactgtgatactccattgagatcctctttcagaaagggcttgtttccccaggtgcctggagtgctgttggtgact

SEQ ID NO: 936967 - DNA, 477 bp, Homo sapiens
caagttaatgacctaacatcccaatttaaaaaaatggagaaccaagaacaaaaatatcccaaagctagcagaagacaagaaataaccaaaatcagagttgaactaaaggagattagaacacacacacaaaactgaaaaggtcaactaatccaggggctggyttttttgaagaaaataaaataaatagatcactagtaaaactaataaaaagaaaatagagaataatcaaataaacacaatcagaaattaccagggggatattaccactgacttcacagatatacaaacaaccatcagagaatattatgaacacctctatacatacaaactagaaaatgtagaagaaatggataaattcctggacacatacaccctcccaagactgaaccagggtgaaatggaatctctgaacagaccactaatgagctctaaaatcgagacagtaataaatagcctactaagcaaaaaaagcccagg

SEQ ID NO: 936968 - DNA, 669 bp, Homo sapiens
caagaggctaagcgggaggggccagccacccatatgcccagaactgaggggtttcccaggacatgggactttcagggccaacactggggagagtcccgggcaaaccagggtgagttggttgctgcactggatgggctgatgaaggaaaccaggacccacttttgggccctgtaagccttcctccgagatatccactagtaggtcaggagtggaggtaaaagctggacttccttccatctctcaggaggactgggctagatggctgttaaatggaaggctaacccagaagggtggacttttggggaacataaagcctatctaggaatctgaaggtatttagaaaattcatatcatggctaatagttttatatatcagtcttcgttgtagaagaacaactagcaaatgtgatacagtgggccaagctgtgaacaaggawtcctaagacctaaactgtagtcccaaacctttcataactagctgtgtgaccacagacaattaagttgccctctctggaccccattctcctccattgttaaaaaaaaaaaagagttgaaactaggtctagcattcttttgtgtgctgttggatccctttgacagtttgatgaggcttacgaatttcttctccgaacagtgttttgaaatgcatgagatgaaataggatttaca

SEQ ID NO: 936969 - DNA, 753 bp, Homo sapiens
actgagggacattctacagaatatctgagcagtcctcctccaagccgtcaaagtcatgcaaagcaaggaaagactgagaaaccatcacagaccggaagagactaaggaggcatactgattaaatacaatgtggtatgcgggataggattctggaagcagaaaaagacgtccatagacaaagctgataaaacctgaataacatctggagtttaattcatagttaacataagagaaggttaatctctcagttttgacagatataccaaggtaatgtaagaagtcaacattagaagaaactgggagaggggygtactagaactctgttatctttgcaacttttctataaatctgaaattattccaaattgagtttatttttttcaatggtttgttaggctggactcccccagaggctgacactgagacgaggatatgagtggaagtcgttcctttgagaggtgactctaggattcacctggcagggagtggggatgtgagacaggaaagggaggaatcgccagagggtggactggcaagcagatgaccgctgtgggtaaccggggctcaggcctgcatggaaatataggaaataacatctccgagttatcccaaggagagacaaaggtgttggaatattatctgccattcccatgagatattggttgaaggctgctccgggactagtacacgtcccacctacctcacatgggccaagcaagctccagtggccagcgacagccgcaggtggagctgc

SEQ ID NO: 936970 - DNA, 601 bp, Homo sapiens
tagcaaaatggcataccaggagattatatcccgcgcccagctcggagggtcccacacccacagagcctcgctcactgctaacacagcagtctgagatcaaactgcaaggcagcagtgaggctggaggaggtgtgcccaccattgctgaggcttgagtaggtaaacaaagcagccaggaagctcgaactgggtgcagcccaccacagctcaaggaggcctgcctgcctctgtagactycacctctgggggcagggcatagctgaacaaaaggcagcagaaacttctgcagacttaaacgtccctatatgacagctttgaagagagtagtgtttctcccagtgcagagtttgagatctgagaatggacagactgcttcctcaagtgggtccctgacccccaagtagcctaactgggagacacctcccagtaggggccgactgacacctcatacagccaggtgcccctctgagacgaagcttccagaggaaggatcaggaaacaacatttgccgttctgcaatatttgctgttctgcaacctccactggtgatactcaggcaaacagggactggagtggacctccagcaaactccaacagacct

SEQ ID NO: 936971 - DNA, 612 bp, Homo sapiens
atttgcatttctctgatgaccagttatgagtattttttcatgtgtctgtgggttgcataaatgtcttcttctgagaagtgtctgttcatatcctttgcccgcttgttgatggggttggttttttctgtaaatttgtttaagttctttgtagattctggatgttagccctttgtcagatgggtagattgcaaaaattttctcccattctggagatattagccctttgtcagatggataaattgcaaaaattttctcctgttctgtaggttgcctgttcactctgatggtagtttcttttgccttgcagaagctctttagtttaattagatcccatttgtcyattttggcttttgttgccaatcaaatggtagttctacttttagttctttaaggaatctccacactgttttccatagtggttctactagtttacattcctaccagcagtgtagaagtgtcctctgatcactgcatccacaccaacatctaatggtttttggttttttgattatggccattcttgcaggagtgaggtggtatcacactgtggttttgatttacatttctctgatcattggtgatgttgagcattttttcatgtgtttgttgccc

SEQ ID NO: 936972 - DNA, 617 bp, Homo sapiens
tagaatgtgtattctgcagttgtagaatggaatgttctatatatctatatatatatagatatatctgttaagtctgtttgttccaaggtatagtttaaattgattgtttctttgttgactttctgtcttgatgacctgtctagtgctgtcagtggagtattaaagttccccactattattgtgttgctgtgtatttcatttcttaggtctattagtaattgttttataaatttgggacctccagtgttaggtgcatatatgtttaggactgtgatgttttcctgttggacaaggccttttaccattatataatgtccctctttgtcttttttaattgctgttgctttgaagtttgttttgtctgatayaagaatagctactcctgctggcttttggtgtgcatttgcatgaaatgcccttttccaaccttttacttcatgtgagtccttaagtgttagatgagtctctggaaggcagcagatggttggtgaattcttatccattctgcagttctttctgtctttcagatggagcatttaagctatttacattcagtgttagtagtgagatgtgaggtaccatttgattcatcatgctatttgttgcctgtgtacctt

SEQ ID NO: 936973 - DNA, 464 bp, Homo sapiens
tccttctccctgtggcattttcccagtgcctctggccgccctccagaaagatccctgtaatgccagacaggaatggcttgcttgtggacccagaaagctcacaggactttttcctctgatgcctctatccgtgtatttcgcttggctgtctaaattgactcagctccaggtaaggtcagaatcttttcccataaactagacattaagtttccccagtgaggatgtgtgttcgggggctgagaatctccctttcccactttctcagtttgggcagtcacattatctcaggtgtctcctgggtcctgcaggagcrgtcctctttcttcagagggtctgtgggtcctctcgggtttcctgatttattcctgcagtcgttctgtagccaaaattcaccgtgtgaacctccacacgctgctctgttcatcccagtcagagctgccatgtagtcctgcctcccatccacc

SEQ ID NO: 936974 - DNA, 791 bp, Homo sapiens
ttgctattctttctttctctgtgttccaaatgtagactaaaaaactttaactatgactagcagcaatgaaaagaatgtaaatgatattactgtgttaagaaggcagagaccacttttttgttttgttttgttttgtttttttgagacagagtccccctctgtcacccaggctggagtgcagtggtatgatctcggctcactgcaacctctgcctcccgagttcaagtgattctgctgcctcagcctcttgagtagctgggcttacrggtgtgtgccaccatgcctggctaatttttctatgtttagttgagatgggggtttcaccatgttggccaggctggtctcaaactcctgacctcaagtgatctgcctgccttggcttcccaaagtgctgagattacgggcatgagccaccacgcccatcccagaccacatgttttaaactagaaccaatgtccccatttgtttaagcccttgaaaaggccctggagtcctgcttaaatcttctatgtctttatctgtttgtctgttgtctacttaagtctaatgttcttctttttataatatctgtgttcaagataaagagaatctaatatttctatttgtcaaatctttaaaaaagtatgcattcatattattgtatattatattgtattttatagatagcactgtctctgtgaaagactgttctatttcaaataactgacatagcaatctttgaaagcagtttttttctttactgatttgttcatgtatttaatttttcccatttattccctgaatagttactg

SEQ ID NO: 936975 - DNA, 484 bp, Homo sapiens
aggagagtcagcccatcctttgaaacattgaggccaggaattgacttctcctcagttttcttcaagaactttttctttgcattcacaacttggctagctggtgtaagaggtctagctcttggcctatcttggctttctacatgccttcctcacttagctttttatttaaagtgagagatctgtgagtcttcckttcacttgagcccttagaggccattgtagggttattaattagcctgatttcaatattgttgtgtctcaggtaatagggaagcccagggaaagggagagagatgagggaacggctggtcggtggagcagtcagaacacacacaacatttctcagttaagttttctgtcttatattgggtatgatttgtggtgccccaaaacaattacaatggtaacatgaaagatcaccgatcacatatcactgtaacagacacattaataatgaaaaagtgtgaaatattacgagaatttc

SEQ ID NO: 936976 - DNA, 484 bp, Homo sapiens
aggagagtcagcccatcctttgaaacattgaggccaggaattgacttctcctcagttttcttcaagaactttttctttgcattcacaacttggctagctggtgtaagaggtctagctcttggcctatcttggctttctacatgccttcctcacttagctttttatttaaagtgagagatctgtgagtcttccgttcacttgagcccttagaggccattgtagggttattaattagcctgatttcaatattgttgtgtctcaggkaatagggaagcccagggaaagggagagagatgagggaacggctggtcggtggagcagtcagaacacacacaacatttctcagttaagttttctgtcttatattgggtatgatttgtggtgccccaaaacaattacaatggtaacatgaaagatcaccgatcacatatcactgtaacagacacattaataatgaaaaagtgtgaaatattacgagaatttc

SEQ ID NO: 936977 - DNA, 615 bp, Homo sapiens
agatgtgcactaccatgcctggctttgaaataatttcttatattaaaattattttaaggactttctgccaaagaaggaaccttttaaacaagttgtttacaaaaagcaaaagaaagcatttatttggtatactttaagttgtgagatacacatgactactctcctctttctgaggctatgagaatacctactgtagctcctaatggcacatggtggrgtggggattctggccccttgtctacatggttctcctgtattataggtgtagttccctattttgtaaaattttagcactgaaaataacttaagacacctgacccagtttcttaatgttacagaggagaaattgaggctcggtgcaattagttttctggtgttgatcacccaatctacatgaactaggtttctagtttcctcacttttaatctatctcttttccttagcttttcattgggttgaaattataccagctaataacaaccaacttttactgcatacttaatatgatgcatatattttattctgcattccacacatattctcttattttattgcaacaatttttaaaaatatctgttttacacgtgaggaagctaagtcacagagaggttaagt

SEQ ID NO: 936978 - DNA, 598 bp, Homo sapiens
ctagaataaagcaggcaggagaagatggaagaacagactagctgagtcttctggctctcatctttctcacatgctggatgcttcctgccctcaaacattggactccaagttcttcagcttttggactcttggacttacaccagtggtttgccaggggctctcgggccttcagccacagaatgaagactgtactgctggcttccctacttttgagattttgggatttgtactggcttccttgctcctcagcttgcagatggcctattgtggaacttcaccttgtgattgcgtgagtcagtactccttgataaacttccctttacatatacrtctatcctattaattctgtccctctagaaaaccctgactgatacaattagctacctaaaatagaaaaatcacatgatcatcttcgacagaaaaagctattgacaaaaaccaaatttcatttctgataaaaactctccgcaacataggataagaagaaagtgtcctcaattgataaagggtactaccaaaaaacttagttaatgtcatactcaatggtgaaagattgagtgctttccctctaagatcaggaacaagataaggacatctg

SEQ ID NO: 936979 - DNA, 612 bp, Homo sapiens
ctactggcacatgtgaactaggaaggatcctgatgccactgccctatgaagtacattggctggcaacacccaccaaagtgttgtgaccagcagtctggaagcacccttggcccttctagaacagcaagttccaaacctcraggagtcagcgaacaaagtgagagctccatatcagtcccccagagttagagcatgtgggccaggagtcctatcctgagccttgactccataaaatcttctaaaaatgaagtcagataactgaatccaccttataccacaatcaaacccccaaggtcatcaaataggataaaagaaaaaaaaaagacttagaagaaactattttaaaattcatatagaaccaaaaaagagctcatatagccaagacaatcctaagcaaaaggaacaaaggtggagggatcacactactggacttcaaactatactacaaggctacagtaaccaaaacatgatagtactggtacaaaaacagacacatagaccaatggaacggaatagagaactcagaaatataactgtacatctacaaccatctgatcttcaacaaacctgacaaaaacaagcaatggggaaaggaaatatggaattatgtaa

SEQ ID NO: 936980 - DNA, 720 bp, Homo sapiens
tgatgcagtttcttcatagcatcgatggtctttacaatttggcatgtttttgcagtggctggtactggttgctcttttccatgttagtgcttcattcaggagcttttgtaaagcatgcctggtggtgacagaatctctcagcatttgcttgtctgtagaggattttatttctccttcacttatgaagcttggtttagctggatatgagattctgggttgaaaatttttttctttaagaatgttgaatattggcccccactctcttctggcctgtagggtttctgctgagagatctgctgttagtctgatgggcttccctttgtgggcaatccgacctttctctctgtctgcccttaacattttttccttcatttcaaccttggtgattctgacaattatgtgtcttggggttgctcttctcaaagagtatctttgtggtgttctatgtatttcctgaatttgaatgttggcctgccttgctaggttagggaagttctggaaaatatcctgaagagtgttttttaacttggttccattctccccgtcactttccagtacaccaatcaaaygtatatttggtcttttcacatagtcccatattttttggaggctttgttcatttattttcactcttttttctctaatcttgtcttcttgctttttttcattaatgtaatcttcaatcactgatatcctttcttccaccaaatcagctattga

SEQ ID NO: 936981 - DNA, 623 bp, Homo sapiens
aatacacattcttctccttggcacatggaacattctcaatgctagatcacaaaacaagtctcaaaaaatttcttcaaaaattgtaatcatttcaagtatcttctctgaccacaatggaataaaattagaactcaataatgcgaggaattttggaaataatacaaatacaggaaaattaaacaatatgcttctaaatgatcattgggtcaatggagaaattaagaagaaaatttaaaaatttcttgaaacaaaatgaaaatggaaacacaatataccaaaacctatrggatacagcaaaagcaatactaaaagggaagatatagcaattaaagccaatatcaaaaaaagtaaagatttaaacaacccaacaatccatcttaaagatctaaaaaaccaaaagcaaaccaaaccaaaaattagtagaagaaaggaaataataaagatcagaaccgaaataaatgcaattaagacttaaaaaaatacaaagaatcaatgaatcataacactggctttttgaaacacaaacaaaattgaaaaacaactagccagactaagaaagaagactcaaataaataaaatcagagacaaaaaaggagaaattacaactgataccacagaaattt

SEQ ID NO: 936982 - DNA, 623 bp, Homo sapiens
aatacacattcttctccttggcacatggaacattctcaatgctagatcacaaaacaagtctcaaaaaatttcttcaaaaattgtaatcatttcaagtatcttctctgaccacaatggaataaaattagaactcaataatgcgaggaattttggaaataatacaaatacaggaaaattaaacaatatgcttctaaatgatcattgggtcaatggagaaattaagaagaaaatttaaaaatttcttgaaacaaaatgaaaatggaaacacaatataccaaaacctataggatacagcaaaagcaatactaaaagggaagatatagcaattaaagccaatatcaaaaaaagtaaagayttaaacaacccaacaatccatcttaaagatctaaaaaaccaaaagcaaaccaaaccaaaaattagtagaagaaaggaaataataaagatcagaaccgaaataaatgcaattaagacttaaaaaaatacaaagaatcaatgaatcataacactggctttttgaaacacaaacaaaattgaaaaacaactagccagactaagaaagaagactcaaataaataaaatcagagacaaaaaaggagaaattacaactgataccacagaaattt

SEQ ID NO: 936983 - DNA, 632 bp, Homo sapiens
aatttctgcatttccaacagaggttcccagttcatctcactgggtccggttaggcagtgggtgcagcccatggagggtgagcagaaacagggtggggtgttgcctcactcaggaagtacaaggagccgagggacctccttcccccagccaaaggaagccatgagggactgtgctacccggccttaatactacgcttttcccacagtttttgcaatcggcagatcaggaaattcccttgtgtgcctacaccaccagggcaccaagtttcaagcacaaaactaggcrgctgtttgggatgacactgggctagcggcaggagccctttttcataccccagtggtgcctggaactccagcaagacagaactgttcactcccctggaaaggggctcaagccaggaagccaagttgtctcactcagtgggtaccacacctatggaacatagcaagctaagaaccactagcttgaaattctcactgccagcacggctgtctgaagttgacctgggactatcgagcttggttgggcgaagggcatccaccattactgaggctttagtaggcagttctcccctgacagtgctaaggaggccaggagggttggactgggcggaattcaccacaatgcagcaa

SEQ ID NO: 936984 - DNA, 454 bp, Homo sapiens
ccagctacttggaaggctgaggcaagagggttgcttaggcccaggaattcaaggctgcagtgagctgtgatcacaccactgcactccagccagagcaacagagtaagaccttgccttcacaaaaaaaaaaaaaaaaaaaaaaaaaaaaaaaaaaaaaaaactcaggttccaaccctggagttactaaatcrggatctcagaatgcagagatctggcatttcaataaaacttctggagattctgatcagccaggtttgggccagatgaactctaagctcacttaaacctttgacattttatgagtctattaagtcgagtacaaaaaatgctgagtccaaactgagcaaacaaatcccatctccctatgcccagcctccttggattcagaaagccacactgcctggagagtaagcagagagagaattgtcattaacccaaagaccatctttgaaaa

SEQ ID NO: 936985 - DNA, 740 bp, Homo sapiens
cccaggagcaggtagtcacccctttggggtccacaacacccagctgtccccagacttgtttccagggaagatagtgtcgagggccctcaaggagagcggggcagggatgcctgggcaggacaaggaccctagagtccaaaagaatcctgatgatcagagaagagtccccgaggtcaccggggatgcacggtctgcattttggcccctgcgggacactggagtcctctttccctttgtgcccagtcccgggcctctgcagacatacctccatgyccagaggtcagaaatcagatccaaccagacatcccagaccacctggacgagctcgtgcaccaaccaaaatgccatctccagctcctacagctccgcgggaggcttgctggggctaaagtggaggagggggccagcggagcaaaacagcggggcagggatgcctgagcaggacaaggaccccagagtccaagaaaatcctgatgatcagagaacggtccccgaggtcaccggggatgcacggtctacagttcggcccctgcggtacaatggaggcctctctccctttgcgcccaggcccgggcctctgcagacagacctccatgcccagagctcagaaatcagatataatcagacatcccagacctcctggacgagctcgagcaccaaacgaaatgccatctccagctcctacagctccacgggaggcttgccggggctaaagcagaggagggggccagcctcatccc

SEQ ID NO: 936986 - DNA, 592 bp, Homo sapiens
ttggactatgagggagctggtgataggtcctaccgttcaccaacactgggctccctaaattataaggggacgcagtgcggcatagcagttaagagttccgttactccagagtcagacagaccagattgcaatctcaactgcaccacttactaaatgtgtgaccttggccaatatttatattatccaatttacagctactccaactgttgtcaaaacaaaactagttatgataatgctccctatctgctaaaaccactgtgaaggttaaatcaaataatccctgaccgatgacagactgataataatccctgaccgctgacagacagactaagagagagggagcgaaagagagagagaaagaatgctatgtgaaacaaaatctgcaatactagcaaaagaaraaaaaaccttttatattgggaaaaaaagaaagaataagaatttcagaaaaatactgcttatttttcttaataagagtctcatagtttggattttctagaagtagaatttaagacagtgattcatatgcatacattttattgggcatacttctgtcagacaaggccaattctttggagtgagctgacatcac

SEQ ID NO: 936987 - DNA, 732 bp, Homo sapiens
tcaagtgttcaatatctacatgtcactagtaatgactgtagtggacagaattgatccagatttccaagtgtattggtataaaactaaccatatttttatcttattaaaacaaaacaaaacaaaactcctccataactatgtctatgttccttctgcttttattaacattgaacatattcttgtttttaatctaattttgtctgtatttaggtctattttttggtggtgttatctcttgtatgcttggcatcaacttttttttcaatttcttagactatctaaactattatgctctaagtttagctcaatttcaatcagctactcacttgaaagactcatttaactctcttaagccattctccacaaacatgaaaaatcttcctctcactgttccctgctgaaacactgcaaaagtatgtcaaaatggtgtactttcttggcacagggtttcgataaacttagttttgctttaataacaaattatctgaatatatttcagggaggtccactggyaaaagcataaaataatgttagttcaggtcatcttttgtaaagttatgattgtgccatagtatcaattcttgtcaaaatttatgacttcaaaatcaacttaatatgcatcaacatagatattttttagtaattctagactccaggtgctcatttaaataatatgggtacataagactgaacaaaaccagttgctattgaatgtacattttagagaaatac

SEQ ID NO: 936988 - DNA, 611 bp, Homo sapiens
accgtgggctgatgctttcagaacctctgtgattgttgcctctgacactgcatccaatagactagcatgttgattagggaaagctaaattcaataaaatacgactgtaagtggggtcaccaccttgaggggttatgttagaaragtagatgataaggtggtatcgatagggtattgacgtctgggctcacatggttgcccggggcctttcaagaccaatgactgataagaagaggtaatgttcaggacatagagtttaggattgggggacactgtgagttaagggccatgacagaagtcttcataagtaaactgttattgacacaagctgctacctgcccaggtgagcaatctgttggcccagaggagagttgcttactgacataaattgatttgcagaaatttcctgaagcaaacaataagttatttattggtttgcagccttactttcctgaaaaataattttctggaatgaattgtgaaatcatgttgacacagatggcctcaggtttcagttcggataattaagctgtgtaaatatagaaagtctaaggtttctgtgtgctgttgattcacagtatgcaacagtgatcatattacttttatttacta

SEQ ID NO: 936989 - DNA, 652 bp, Homo sapiens
ggaaactttctgtttcgtgttaagggtcttgaaccatgatgtttagaaaaccgtgggctgatgctttcagaacctctgtgattgttgcctctgacactgcatccaatagactagcatgttgattagggaaagctaaattcaataaaatacgactgtaagtggggtcaccaccttgaggggttatgttagaagagtagatgataaggtggtatcgatagrgtattgacgtctgggctcacatggttgcccggggcctttcaagaccaatgactgataagaagaggtaatgttcaggacatagagtttaggattgggggacactgtgagttaagggccatgacagaagtcttcataagtaaactgttattgacacaagctgctacctgcccaggtgagcaatctgttggcccagaggagagttgcttactgacataaattgatttgcagaaatttcctgaagcaaacaataagttatttattggtttgcagccttactttcctgaaaaataattttctggaatgaattgtgaaatcatgttgacacagatggcctcaggtttcagttcggataattaagctgtgtaaatatagaaagtctaaggtttctgtgtgctgttgattcacagtatgcaacagtgatcatattactttt

SEQ ID NO: 936990 - DNA, 611 bp, Homo sapiens
accgtgggctgatgctttcagaacctctgtgattgttgcctctgacactgcatccaatagactagcatgttgattagggaaagctaaattcaataaaatacgactgtaagtggggtcaccaccttgaggggttatgttagaagagtagatgataaggtggtatcgatagggtattgacgtctgggctcacatggttgcccggggcctttcaagaccaatgactgataagaakaggtaatgttcaggacatagagtttaggattgggggacactgtgagttaagggccatgacagaagtcttcataagtaaactgttattgacacaagctgctacctgcccaggtgagcaatctgttggcccagaggagagttgcttactgacataaattgatttgcagaaatttcctgaagcaaacaataagttatttattggtttgcagccttactttcctgaaaaataattttctggaatgaattgtgaaatcatgttgacacagatggcctcaggtttcagttcggataattaagctgtgtaaatatagaaagtctaaggtttctgtgtgctgttgattcacagtatgcaacagtgatcatattacttttatttacta

SEQ ID NO: 936991 - DNA, 592 bp, Homo sapiens
aattgatatacaaagaagagctggtaccattccttctaaaattgtgtattagttccttttcatactgctataaagaactgcctgagactgtgtaatttataaaggaaagaggtttaattgactcacagttcagcatagctggggaggcctcaggaaagttacaatcatggtggaaggtgaaaggaaagtaaggcaccttcttttcagggtagcaagaaggagaagtgctgagtgagggagggggcagagccccttataaaactatcaggtcttgtgagaactcactcgtcacaagaacagcctgggggaaactgcccccrtgattcaattaattccacctggtctctctcttgacatgtggggattatagggattacaatttaagatgagatttgggtagggacattgagcctaaccacatcagaggcactcctctccaactcattatatgaggccagcatcatcctcataccaaaacttggcagaggcacaacaacaaaaaaagaaaatggcatgccaatgttattgataaacattgatgcaaaaatcctcaacaaaatcttgcaaaccaaatccgtcagcacatcaaaaa

SEQ ID NO: 936992 - DNA, 675 bp, Homo sapiens
cctgtaactaaacacagataagattgtctaattctagcatcataaggaaggatgaaagaacataatttaataagaaatgagtttgttagaaagaaagacctgttaacacaagaagcacagtctcgtgttaaaatgaaggtaggccgggcgcggtggctcacgccagcactttgggagaccaagatgggcagatcgcaaggtcaggagatcgagaccatcctggctaacatggtgaaaccctgtctctactaaaaatacaaaaagattagctgggcgtggtggcgggcacctgtagtcccagctactcaggaggctgaggcaggagaatggcatgaacctgggaggtggagcttacagtgagccgagatcgcgccactgcactccagcctgggcgacagagtgagactctgtctcaaaaaaaaaaaacacaaaaaaamaaaaaaacaaacaaacaaaaaaatggagatggtggagaatttgagaaggctttctggaaccacagaatttgctgtagtttcttaacatctgaaagaatagttttaaagaaagataaaaattgccacattaggggagaaattctatatatatagcagttttaaaatatgcatttgtttgcacacacaagtatgaaacctcttgggttcttcttcctacaattgctttctatttcactct

SEQ ID NO: 936993 - DNA, 675 bp, Homo sapiens
cctgtaactaaacacagataagattgtctaattctagcatcataaggaaggatgaaagaacataatttaataagaaatgagtttgttagaaagaaagacctgttaacacaagaagcacagtctcgtgttaaaatgaaggtaggccgggcgcggtggctcacgccagcactttgggagaccaagatgggcagatcgcaaggtcaggagatcgagaccatcctggctaacatggtgaaaccctgtctctactaaaaatacaaaaagattagctgggcgtggtggcgggcacctgtagtcccagctactcaggaggctgaggcaggagaatggcatgaacctgggaggtggagcttacagtgagccgagatcgcgccactgcactccagcctgggcgacagagtgagactctgtctcaaaaaaaaaaaacacaaaaaaacamaaaaacaaacaaacaaaaaaatggagatggtggagaatttgagaaggctttctggaaccacagaatttgctgtagtttcttaacatctgaaagaatagttttaaagaaagataaaaattgccacattaggggagaaattctatatatatagcagttttaaaatatgcatttgtttgcacacacaagtatgaaacctcttgggttcttcttcctacaattgctttctatttcactct

SEQ ID NO: 936994 - DNA, 566 bp, Homo sapiens
tacattcccaccagcagtatagaagtgttccctgatcactgcatccatgccaacatctaccatttttttatttttttgattatggccattcttgcaggagtaaggtggtatcgcattgtagttttgatttgcatttctctgatcattagtgatgttgagcattttgtcatatgtttgttggccatttgtatatcttctcttgagaattgtctattcacgtccttagcccactttttgatgggattgtttgttttttttcttactgatttgagttcgttgtagattctgattattagtcctttgtcagatgtatagattgcgaagattttctcccactctgtggattctctgtttactctgctgtttcttttgccttgcaaaastctttagtttcattaagtcccaactatttatctttgtttttattgcatttgcttttgggttcttgatcatgaaatccttgcctaagccaatgtcttcaaggtttttccaatgttatcttctagaatttttagtttcaggtcttagatttaaatccttaatccatcttgagttgatttttgtat

SEQ ID NO: 936995 - DNA, 472 bp, Homo sapiens
ccagaagagagacaacaacaatcgttgcagtttggctcataggaaaccacatcaataggaaaagcggggagactgcaagaacaaaccagcaatcccaagaggacccaagattatatgacctttgtcttcagctaccagggtggatagggaaggaccatcaagtgggggcagggctaggtgtttctgagctcaggctctccttgggtgggtcttgatgcagttgctgtggggatgggagtgagattcccaggtcactggagttgtgtacctaggaggattatggcygcctctgctgagtcatgcaggttgtcagagaagtaggggaaagctggcagtcactggcctcactgagctcccacacaatccaaagggctggtctcactcccactgtgcccccaccaacagccctgagtttgtttccaggcagtgggctagctgggcttgagaacttgccccaggctacccgcctccc

SEQ ID NO: 936996 - DNA, 604 bp, Homo sapiens
agagaatgaagagaggttggttaatgggtgcaaaaatacagtttgatagaaggaataagttttagtgtttgatagcacagtagggtgacagtagttaacaataatttattatatatttcaaaatagctagaagagtggatttggaatgttcccaacacaaagcaatgattgattaatatttgaggtgatggatatcaaattatgctcayttgatcattacacattgtatgcatgtatcaaaatatcacttgtaccccacaaacatgaacaattatgtatcagtaaaaaagtaaagtcatgataagcagtatttttttaatgtttaacttacacgaagaaaaccaccaccacaaaaacattgtttttaacaaaacaaaatcaaaacagcattcagttgccaaccttggaatatgtttatactttaaaattattttagttaatatttacttttactcaacaaaaatactacagcattaacactttttgggacaaaaaaatagcttcaaaggtgatgttttgtccactaaaatattccattaaaagtttgatttttgcagggcgtggtggctcacgcttgtaatcccaacactttgggaggccgatc

SEQ ID NO: 936997 - DNA, 730 bp, Homo sapiens
atacaggaaacagaggcttcaagatgagaggggtaatggggggtcctggatgttgaagggaacccctaaaatactgtatttgttagctaagggcaggcccagattggagcaagaggatggtggagccggagctgacagttactcagtgcatgattgtgttgagagatgttagacatatagaggaaagtgtgggaataaagtagtgataggtattcagaaaactaagtaaaaaaacaaactccagccgggcgtggtggctcaygcctgtaatcccagcactttgggaggcggaggtaggtggatcacgaggtcaggagtttgagatcagcctggccaatatgatgaaaccccatctctattaaaaatatgaaaaaattagccaggcgtggtggcacgtgcctgtagtcccagcagcttgggaggctgagatgggagaatcacttgaacctgggaggcggaggttgcagtgagccgaaatcgtgtcactgcactccagcctgggcgacagagcgagactcccatctcaaaaacaaaacaaaacaaaaactacagagaaaacagagctgtggaaagaaggaagtgtaatcataatatcctgtatgacttagccttgaaaaatattgaattaatcttatttggttttaatgtatttatttataacagagatgggtcttgctatgttacccagggtagtctcaaactcttcgcctcaagcagtcctcccacctca

SEQ ID NO: 936998 - DNA, 562 bp, Homo sapiens
atttggaggtaagaagactctctggctttttgagttgccagagttcttgcacaggttgtttctcatttgtgtgggctgatgttactttaatctttgaagctgctctccttggataaatttatttgcttttacattccttgatctcattgacagtttgactgtggtataaggtaggttcaatcacctagctttgtttctgtaagatttcaggtggccaacactcaacttagagcttctggactcatgctctagccctagggggctggaaccaggcacacagcttggttctctgaccccttgagattaggaacccactgcattggagaagccaaagtgttccaggtccattggcarcaagactccagtgaagcagtgccaaccaaagcacttcattagtgccatggcagcagggtagacacttgcacacacaggccagcagcaacagcagcatggcaggatatatgtgcattggtgagggcagggcacaggtgaaggtggggcagtggtgtccatgtgtgcttgtgctctcagcagcaacatggtggggtgagcgcacatgcct

SEQ ID NO: 936999 - DNA, 656 bp, Homo sapiens
tgctaggtgattgtttgtgttacattgtgtcccccaaaaattcctatgttgaagccttaaccaccagtactcaaaatgtgtctatactttgagacagggcctttaaagaggtgatttacttaaaatgaggcagttaaggcaggccttaatccaatctcactgatgtcctttttttattttttatttttcagacggagtctcactctgtcacctaggctggagtgcagtggcatgatctcggctcactgcaacctccgccacccgggttcaagcaattctcctgcctcagcctcctgagtagctgggatcacagatgcccaccaccaagcctggctaatttttgtatttttagtagacacgaggtttcaccatgttggccaggctggtcacraactcctgacttcaggtgatcctcctgcctcggcctcctaaagtgctgggattacagccgtgagccaccgcaccatgcctgctgtccttataagagaaaatgtggacacacagagacaccaaggttgggtgcacaaagaaaaagaccatgtgtggacacagcaagaaggtgtctatgcaagccgaggagggaggtctcagcagaaaccaaatcagtggagactctgatcttagacttgctagcttccagacaaggaggaaataaa

SEQ ID NO: 937000 - DNA, 683 bp, Homo sapiens
gcttaagggaatgttgtggctggtttgatcttctatccagaccactacaattttctccatatcagcaataaggctggttcactttcttatcattcatgtgctcactcactggagtatcacttttaatttctttcaggaatttttcctggccaggaacagtggctcatgcctgtaattccagcactttgggaggccaaggtgggtggatcacttgggcccagaagttcaagaccagcctgggtaacatagtgaaaccccatctctagaaaaaaatgtttaaaaaattagccaggaatggtgatgcacactagtagtctgagctacttagggggctgaggtgggaggatcccttgagcccaggaatcaaggctgcagtgaaccatgatcacaccrctgcactcctgcgtgggtgacacagagagatcctgtctcaaaaaaaataaaacacaaaatttcctttgcactcacaactttgctaactgtttggcagaagagacttagctgttggcctgtttcagagttcaaaatgccttcctcaccaatcttaattatttctagatttacatttaaaatgagagacatgcaactgactcttcctttcacttgaacactgagaagccactgcagggttattaattggccaaatttcaataccattgtgcctcagggatctgggatgcctg

SEQ ID NO: 937001 - DNA, 612 bp, Homo sapiens
ccagtgacacttctcagtgaaacccaagtgattctccaagcccatgtgtgatccaattcttccggtacacaaaggcaagaaccccaggatacagaaagccctctgtccatgtgataaggcaggggtctaactgagctgactaacacagccacctatggaccctaacagagtctactgtaacacatgcccactggggtttcagttgtgaacactcaagccctagacgttgtcgtggagtcagagccccacagcctgcccgtctgtatgctcccctagaggctggagcagcaaggcactgaagaagcgagtcatatcccatcayatgccctgcgaggaggacaaggaaacttcccattacaactggggatcgtctgggatcgcagaaggtaagtgtgagcaaacatgaaactgtcaggtctgcctttctttcaaaaccctgccacctctctctctttcctgcaggtaagaggctctgtttttctttcgtctctttcctctctcacacacaatttgaaatggctcttatctctttctttacaatgttaagagttttgctacaggctgcagcaatgttactaagtaaaataagtgtttggctcagccacaaaggtg

SEQ ID NO: 937002 - DNA, 598 bp, Homo sapiens
cctggactttttttattggcaatttcaaaattaccatttcattctcactgtttgttattggtctggttcagagtttatatttcttcctggtttaatctaggagggttgtatatttccaggaatttatccatctcctctaggttttctagtttatgcatgtagaggtattcctagtagccttgaataatcttttgtctttctgtggtatccgttgtaatagctcctgttttgtttctaattgagcttatttgggtcttctctcttctttgttaatcttgctaatggtctatcaattttatttatcttttcaaataatcaggttttagtttcatttatcttttgtattttctttgtttcaattttatttagttctgctctgatttctgttatttcttttcttgtgcggggtctgsgtttggcttgctcttgtttctctagttcctttaggtgtgaacttacattgtctatttgtgctttcagactttttgatgtaggcatttaaggctgtgaattttccttttagcactgtctttgctgtatcccagaggttttgataggttgtgtcactattatcattcagttcaaagaattttttaat

SEQ ID NO: 937003 - DNA, 586 bp, Homo sapiens
cttgtatctttttcaaaatttcattgagttggacttcatctttctctgctgcctctttgattaacttaatgattgaccttctgaattctttttctggcaatttagggatttcttcttggtttgcatccactgctggtgagctagtgtgatcttttgggagtgttaaagaaccttgttttgtcatattaccaggattgtttttctggttccttctatytgagtacactatgtcagagggaagatctggggctcaagggctgctcttcagattcttttgtcccacagggtgctcccttgaggtagtgctctctcccttcccctagggatgggacttcctgagagctgaactgcagtgattattatttctcttctggatctagccacccagtggagctactgggctctgggctggtactgggggtgtctgcaaagagtcctgtgatgtgaactgtcttcaggtctcagctttagataccagcacctgctccagtggaggtggcaggggagtgaaatggactctgtgagggtccttagttgtagttttgtttattgcactagttttgtattggttggcctcctgccagga

SEQ ID NO: 937004 - DNA, 684 bp, Homo sapiens; identical to SEQ ID NO: 931265

SEQ ID NO: 937005 - DNA, 697 bp, Homo sapiens
tcattttttaagttgtaaaatgaaaaatttggaccagattatctcatagacacttcataaatatgaaaaggtttctgcttgtgaagtgtaggtgtgggagatgtctgtactcaaaaagtgatctttctctttcttggaaagatcccagcctacctaaggagtgctgtttgttccctaattccctaaggaacaacagttaaaggagtaaacctgaaggctactgagataagcagaacagagcataatccattattccccgttccctctgctcagtgcagcttcgtgaatgagcatttcmgcccgagaaatggaatgctagaatcttactgacagcaaaatgaatttgatgtcttttatctcaaacatatgcacttgctaaacaaatttgttaagacacaaaatgcgagcccacagttaaagtataatgcattcctctggacttggtgctgcccatatctagtctgggtgatgtttttattcttcctcttacagtagcactgttctttgaccttcacatccaaacacttgcctgcaaaattagtgatctgtgcacgcacttgacattagataatgacactgtgacttgaaacatttggcaaactccagtaccatggggttaagcaaagtcttggctgggtctatttatgtttattgtaggtggtgagtgttaagtgattcacaaaagaaagggtcaggt

SEQ ID NO: 937006 - DNA, 697 bp, Homo sapiens
tcattttttaagttgtaaaatgaaaaatttggaccagattatctcatagacacttcataaatatgaaaaggtttctgcttgtgaagtgtaggtgtgggagatgtctgtactcaaaaagtgatctttctctttcttggaaagatcccagcctacctaaggagtgctgtttgttccctaattccctaaggaacaacagttaaaggagtaaacctgaaggctactgagataagcagaacagagcataatccattattccccgttccctctgctcagtgcagcttcgtgaatgagcatttcagcccgagaaatggaatgmtagaatcttactgacagcaaaatgaatttgatgtcttttatctcaaacatatgcacttgctaaacaaatttgttaagacacaaaatgcgagcccacagttaaagtataatgcattcctctggacttggtgctgcccatatctagtctgggtgatgtttttattcttcctcttacagtagcactgttctttgaccttcacatccaaacacttgcctgcaaaattagtgatctgtgcacgcacttgacattagataatgacactgtgacttgaaacatttggcaaactccagtaccatggggttaagcaaagtcttggctgggtctatttatgtttattgtaggtggtgagtgttaagtgattcacaaaagaaagggtcaggt

SEQ ID NO: 937007 - DNA, 697 bp, Homo sapiens
tcattttttaagttgtaaaatgaaaaatttggaccagattatctcatagacacttcataaatatgaaaaggtttctgcttgtgaagtgtaggtgtgggagatgtctgtactcaaaaagtgatctttctctttcttggaaagatcccagcctacctaaggagtgctgtttgttccctaattccctaaggaacaacagttaaaggagtaaacctgaaggctactgagataagcagaacagagcataatccattattccccgttccctctgctcagtgcagcttcgtgaatgagcatttcagcccgagaaatggaatgctagaatcttactgacagmaaaatgaatttgatgtcttttatctcaaacatatgcacttgctaaacaaatttgttaagacacaaaatgcgagcccacagttaaagtataatgcattcctctggacttggtgctgcccatatctagtctgggtgatgtttttattcttcctcttacagtagcactgttctttgaccttcacatccaaacacttgcctgcaaaattagtgatctgtgcacgcacttgacattagataatgacactgtgacttgaaacatttggcaaactccagtaccatggggttaagcaaagtcttggctgggtctatttatgtttattgtaggtggtgagtgttaagtgattcacaaaagaaagggtcaggt

SEQ ID NO: 937008 - DNA, 599 bp, Homo sapiens
aaagacatgattttgttcttttttatggctgtgtactattccatagtgtatatgtaacacattttctttatcccatccaccactgacgggggcacctaggttcattccatgtctttgctattgtgaatagtgctgcagtgaacacacgagtgcatatatctttttggttgaaaaatttgttttcttttggatatatacccagatccagtaatgggattgtggggtgaaatagtattaataattctgtttttttccttttctttttaaatattgattcatttacatttttaattttaatttaattttaagttccaggctacatgtgcaggacgtgcagtcatgttacgtaggtaaatgtgkgttctaagttccttgagaaatctcggaactgctttctacagttgctaaacgaaattgcattcccactgacagcatataagcattcccttttctccacagcctcactagcatctgttgatttttttttcactttttaataacagccattctgactggtgtgagatgctacctcattatgatttggagttgcatttatctgatgactactgctgcagagcatttcttcatgtctgttggcc

SEQ ID NO: 937009 - DNA, 621 bp, Homo sapiens
caatgctgaagatacaaaatattccatgacttttgatctattttttttttttttttttttttttggagataagagtttcactcttgtcgccaggctggagtgcagtggtgcgatcttggctcgcttcaatctccacctcccaggttcaagggattcccctgcttcagcctcccaagtagygggccaccatgcccggctaattttttgtatttagtagagacgggctttcaccatgttgttcaggatggtcttgatctcctgacctcatgattagcccacctcggcctcccaaagtgctgggattataggcgtgaaccaccatgcctggccttgatctattaatacgtcccaggagctacagaattatattcatgaactttgaatgacttcagtcaagtcacttttcttctctaagtcttatttctcatctgtataatgtgagtgagaggtgaggggtgggtaggggatattgggtaggtggctacctgtgatctctacattgggtagagggctgtgttcactagagttccagattttctgtgattctaagaagcctttggaatcttggagtgagtattcccagggaactctgatgtgctgaaaagctctcctacatcgttg

SEQ ID NO: 937010 - DNA, 621 bp, Homo sapiens
caatgctgaagatacaaaatattccatgacttttgatctattttttttttttttttttttttttggagataagagtttcactcttgtcgccaggctggagtgcagtggtgcgatcttggctcgcttcaatctccacctcccaggttcaagggattcccctgcttcagcctcccaagtagcgggccaccatgcccggctaattttttrtatttagtagagacgggctttcaccatgttgttcaggatggtcttgatctcctgacctcatgattagcccacctcggcctcccaaagtgctgggattataggcgtgaaccaccatgcctggccttgatctattaatacgtcccaggagctacagaattatattcatgaactttgaatgacttcagtcaagtcacttttcttctctaagtcttatttctcatctgtataatgtgagtgagaggtgaggggtgggtaggggatattgggtaggtggctacctgtgatctctacattgggtagagggctgtgttcactagagttccagattttctgtgattctaagaagcctttggaatcttggagtgagtattcccagggaactctgatgtgctgaaaagctctcctacatcgttg

SEQ ID NO: 937011 - DNA, 629 bp, Homo sapiens
ggataccaggatctaacagacgaattcattcagggagacatgcagggaagtgtaccctacacgcagtggccctttactgagtcttcttaaagttcgtctgctttttttctttcttttttttttttttttttttttaagtttcctgacatggtgctagctgtcattgcttgctatggctggaaaactagtaagcaagcttcacttcagtccagaggcgtctttaagtacctgctatgtgctgaactcatcagaactttcacacagcagaatttcccaaataacttcttygaagaattctataaagtaatatttgtctataaaaaggaaaagataactaaagaaagtggtgtaccttccaatctttcttttctcggttttacttattttttttttagagacagggtctcactgtgtcacccaggctggagtgcagtggtgcagtcatggctcactgcagcctcacactcctgggctcaagccatcctcccacctcagcctcctcagtagctgggactacaggcacacaccaccacatccagcttggaatgtctttttaaaaaacagctttccagtctgggcgcagtggctcacgcctgtaatcatagcactttgggagcttgaggcaggca

SEQ ID NO: 937012 - DNA, 844 bp, Homo sapiens
tgacacagctgggcacttattccttcccggaacagttcctgcacttggcgcctggggcatgacacccttgattctcatctttcctcaatggcttctccttctcagccccttttgagaattattccttctcctgagggttgagagagctctctaggcccacccttgggcctctccacyctggggcctcttcttcatctgctccagttccctaggtgaccccatctggctctgagagtcacttcgcaagtactaccagccaggacgctgccctcagccaggacgctgccctcagccccaactctcctccagcctcctcgtgtcccatcaggtgtcccctgcccagaactgcagtcctagtctcacctcccctgcttctctccctgggccccccctcgacatcagtaaatggcatgatttatagttactctgctgaaaacctagcagctatcctcgattcttctttctcacacaccatacccagtctgtgagccagcctgtcaactctgccctcaaaaaacactgtttccactgctgttgctctagtctgaggcacagccctcactcttccactgcatccatgacctcctaacctgtctccttgaccccactcttgctcctcaaaaccagagccaggttttaaaagttcaactcttaccatgccactggtttgttaaacttagaataaaatccaaggcccttccacagtggaccaagtcatttgtgatttggcccctaccttcctcagtgactcctttattaccaccctctgggggtttgtacctgctgttaccttcacccagtggccccatcacaggctccctgacttagtgcaagtctctgcttc

SEQ ID NO: 937013 - DNA, 612 bp, Homo sapiens
aattcaaaccagagttgtttgatctgccctgccaggcctcgttcagacttggtggtgctgactagcaaaagcccaggccagacacatgagcttatgacctcactgtggaggacaggcagagagcagagggcggactagggtggagagacatacctgggctattagaccaaaatgctaacaagcctgaccccaagaacaattgcaacagtaacagtaacaacagcaagaattaacaatagcagcaaacatacattgaacacttagacttcaccaagcaaataaatgttcaatcctcacacatagcataatgtgagcagaacagcaggtgaaaaacaaccaggtatataaatataaagtgatatgccccaccactaccacacgcatatgtactacacttccctaacaagagcaggcacttctggctgggcacagtggctcacgcctttaatcccagcactttgggakgccgaggcaggtagatcacctgaggtcaggagtttgagaccagcctggccaacatggtgaaaccccgtctctactaaaaatacaaaaattagctgggcatggtggcaggtgccttactcaggaggctgaggcaggagaactgcttga

SEQ ID NO: 937014 - DNA, 594 bp, Homo sapiens
actccagaagacaccttcatgcacccttccagtcactgtgccccctcccccaacaaggataatcactgccttgaattttaatagcagattcatttttcttgtttttgtattatatatagaaaattatacagtatcattttttgtgtgtctgatttcctttgttcaacatagtgtcttaagatttatctayatagttgtagtttgtttttattgctgcatgtagttgtgaatatataactattatttatccattctactgttagtggacatttgcgtagtttctatataatgctattatgaacattctaatatgtatttcttgagttatgtatctacacatttcttttggtgatatatctgggagcaaaattactggtcagcaacatatatatgttcagctttaagcaacaatggcaaacagttttctaaaatgtttgtatcaggctatatttatagtatgcgagagagttctagttgctccacatgtttccaacactcgtttttttccccccatctttttcatttttccaattctggtgggtacaaagtagtgtaccgtaatgattttactttatatttccccaattaatgaag

SEQ ID NO: 937015 - DNA, 338 bp, Homo sapiens
gtgatcctagcatggagagaaaggttgtgtctttccaagtcctagtcaatcaggtgtattcattgtatgcagttttgttttatcacaccttttgcttccgatattccagatttaaccttatagtaatatgtgcttcatgctcttaraccagacaggtacatctgatgagctccaccttgattttcagattggagctaaattaggcattaaaatgtggtcacatacataagagcacctgcatttagtcatcttcccgttttcaaatgtgagcctaaagtcttggctcttatctgtatttaaaactgacattgttaaatgcataaacacatctgaattat

SEQ ID NO: 937016 - DNA, 347 bp, Homo sapiens
atcctagcatggagagaaaggttgtgtctttccaagtcctagtcaatcaggtgtattcattgtatgcagttttgttttatcacaccttttgcttccgatattccagatttaaccttatagtaatatgtgcttcatgctcttagaccaracaggtacatctgatgagctccaccttgattttcagattggagctaaattaggcattaaaatgtggtcacatacataagagcacctgcatttagtcatcttcccgttttcaaatgtgagcctaaagtcttggctcttatctgtatttaaaactgacattgttaaatgcataaacacatctgaattatttatatttaggc

SEQ ID NO: 937017 - DNA, 747 bp, Homo sapiens
aggaaatgtagtagcctcattactcacattcttctaacaggattccagtctgaatgcagagtacaagggatacataaaagactgaaacatcatcacatagctttggacttttgttctttctgatgacctgggggaaaggtaaaagagctaattttagaggccgggtgcagtgactcaacgcctgtaattccagcactttgggaggccgaggtgggtggatcacttgaggtcaggagttcaagaccagcctgaccaacatgttgaaaccccgtctctactaaaaatacaaaatattagctgggcatggtggcagtcacctgtaatcccggctactcgggaggctgaggcaggagaatcacttgaacccaggaggcggaggttgcagtgagccgagatcgcgccattgtactcaagcctgggcaacaagaccaaaactctgtctcaaaaaaaaaaaaamaaaaaactaactttatgttcttttggaagataaattggacaggatgacgacttttggtaaagaccaaaaccttgggcaattacctggtgatatacaggaacaaagactgtatgtatctgtattcttccctgcttgagttattaacaaataaagtccttgcgtgggtcacatgctaaactgctctcagttttctgtgtttcttcaacaggagctggtgtgccaaggatcctctttcatttctattgccttccatagccaagatgcttattgggggtcttcaaaggagtggg

SEQ ID NO: 937018 - DNA, 788 bp, Homo sapiens
gaagatgtagacaagcagcaaactcacagccaaggagcctcaaatcccaatccacacagtaaagtaactctctcagcaagtcaatggcactcgttgaacctccactgctttgactgtaatgagatcatctctgcaccccccacagctttccagtaaaagggggaaaaaagacaacatatgtacacttgctttaaaaagtaaaaggctaggccgggcgcagtggctcgcgcctgtaatcccagcactttgggaggccgaggcgggcacatcgcgaggtcaggagatcgagaccatcctggctaacacrgtgaaaccccgtctctactaaaaatacaaaaaattagctgggcgtggtggcagacgcctgtagtcccagctactcgggagactgaggcaggggaatggcatgaacccaggaggcggagcttgaagtgagccgagattgggccactgtactccagcctgggcgacagagcgagactccatctcaaaaaaataaaattaaattaaaataaaagactaaagtcaccgagataacaagcggcagaggggttaggattactaataatgtgccagtagcagccattcccctatcccttgcagtcgctgccctgtccctgtgagttcagccatccttgtgtggattctcccttccctgcaggctgccctccaaatgctgtcctccatcctcatcaggcaggactgattcccaagcttcagtgctttctgcccatccctccttcaggtatcaaccccggacggcactgactttttacactaacaggcaa

SEQ ID NO: 937019 - DNA, 788 bp, Homo sapiens
gaagatgtagacaagcagcaaactcacagccaaggagcctcaaatcccaatccacacagtaaagtaactctctcagcaagtcaatggcactcgttgaacctccactgctttgactgtaatgagatcatctctgcaccccccacagctttccagtaaaagggggaaaaaagacaacatatgtacacttgctttaaaaagtaaaaggctaggccgggcgcagtggctcgcgcctgtaatcccagcactttgggaggccgaggcgggcacatcgcgaggtcaggagatcgagaccatcctggctaacacagtgaaaccccgtctctactaaaaatacaaaaaattagctgggcrtggtggcagacgcctgtagtcccagctactcgggagactgaggcaggggaatggcatgaacccaggaggcggagcttgaagtgagccgagattgggccactgtactccagcctgggcgacagagcgagactccatctcaaaaaaataaaattaaattaaaataaaagactaaagtcaccgagataacaagcggcagaggggttaggattactaataatgtgccagtagcagccattcccctatcccttgcagtcgctgccctgtccctgtgagttcagccatccttgtgtggattctcccttccctgcaggctgccctccaaatgctgtcctccatcctcatcaggcaggactgattcccaagcttcagtgctttctgcccatccctccttcaggtatcaaccccggacggcactgactttttacactaacaggcaa

SEQ ID NO: 937020 - DNA, 573 bp, Homo sapiens
aattccacatggctggggaggcctcagagtcatggcggaaggtgaaaggcacttcttacgtggtggcggcaaaagaaaatgaggaagatgcaaaagcagaaacccctgataaacccatcagatctcgtatgacttattcactaccatgagaacagtatggggaaatggcccccatgattcaactatctcccactgggtccctcccacaacccatgagaattatgggagyacaattcaagatgagatttgggtggggacatagggccaaaccatatcattcactaaaagtttggtattattaggctttctaattttaaccattctagtgggagtatagtggtatctcattgtggtttttagttttccctaatatctaatgatgttgagcatctttttatgtattactagccatttatgtatattcttttgtctattttaaaattgggttgtcttattattgagttgtaatagttctttatttattcatcgtatatatgtgtctttaatcatatatatgtgttccaatattttctcttttatttcatacatgtgttttatcatatacatgtattc

SEQ ID NO: 937021 - DNA, 665 bp, Homo sapiens
attccagcaagattttttatagataatgacaagattattctaaaatgtatatgaaaagacaaagaaaatagaatgatcaaaaaattataaataagaagaaaaaacttgtagaacccacactacccaatttcgtgagtcactataaagctacagtaattaagactgtggtactagcataaggatattcatatagataastggggtggaatagagaacccagaaataaatacacaaatatggttgcctaatttttgacaaaggcacacaatttcaatggaaaaagaatagtcatttacataaatagtgatggaatagttggatgttcatatgccagaaaggaacctcagcatatacttcacagcttatataaaaattaactaaaaatagatcataggtctcaatgtaaaacctaaaaccataaaacttctagaagaaaacaggagaaaatctctatgaatttgatgatgaattttgtgttttttcattaaaaaacatgctgatatgatttggctgtgtccccacccaaatctcctcttgaactatggttcccagaagccctacatgttgtgggagagacccagtgggaagtaatggaatcatgggggtggctacttccatgctgctcccatgatagtgagtgagttctcacaagatctgatgtataa

SEQ ID NO: 937022 - DNA, 665 bp, Homo sapiens
attccagcaagattttttatagataatgacaagattattctaaaatgtatatgaaaagacaaagaaaatagaatgatcaaaaaattataaataagaagaaaaaacttgtagaacccacactacccaatttcgtgagtcactataaagctacagtaattaagactgtggtactagcataaggatattcatatagataagtggggtrgaatagagaacccagaaataaatacacaaatatggttgcctaatttttgacaaaggcacacaatttcaatggaaaaagaatagtcatttacataaatagtgatggaatagttggatgttcatatgccagaaaggaacctcagcatatacttcacagcttatataaaaattaactaaaaatagatcataggtctcaatgtaaaacctaaaaccataaaacttctagaagaaaacaggagaaaatctctatgaatttgatgatgaattttgtgttttttcattaaaaaacatgctgatatgatttggctgtgtccccacccaaatctcctcttgaactatggttcccagaagccctacatgttgtgggagagacccagtgggaagtaatggaatcatgggggtggctacttccatgctgctcccatgatagtgagtgagttctcacaagatctgatgtataa

SEQ ID NO: 937023 - DNA, 665 bp, Homo sapiens
attccagcaagattttttatagataatgacaagattattctaaaatgtatatgaaaagacaaagaaaatagaatgatcaaaaaattataaataagaagaaaaaacttgtagaacccacactacccaatttcgtgagtcactataaagctacagtaattaagactgtggtactagcataaggatattcatatagataagtggggtggaatagagaacccagaaataaatacacaaatatggttgcctaatttttgacaaaggcacacaatttcaatggaaaaagaatagtcatttacataaatagtgatggaatagttggatgttcatatgccaraaaggaacctcagcatatacttcacagcttatataaaaattaactaaaaatagatcataggtctcaatgtaaaacctaaaaccataaaacttctagaagaaaacaggagaaaatctctatgaatttgatgatgaattttgtgttttttcattaaaaaacatgctgatatgatttggctgtgtccccacccaaatctcctcttgaactatggttcccagaagccctacatgttgtgggagagacccagtgggaagtaatggaatcatgggggtggctacttccatgctgctcccatgatagtgagtgagttctcacaagatctgatgtataa

SEQ ID NO: 937024 - DNA, 591 bp, Homo sapiens
gtgccattgcactctagtacgggcaacaggagcaaaactctatcccccctccccccgcaaaaaagtaattactgacatggaagaacttattattgccattttgttaattgtattctgtctgtcctataacttttttgtccctcttttcctctcttgttgtcttcctttgtgtttcartgattttttagtgacatattgtgactcttttctcattttcttttgtgtattttctataggtattttctttgtggctaccatggagcttacataaaaaatcttataacaatgtatcttaagttgctaacagttaaacttcaattgcatacaaaatctctactcttttaatcccctcacacactttatgttattaatgtcacaaattacgtatttttataatatgtaacattagcatattttatagtcacagttatttttatacttttgtcttgtaacttctataccaaaattaaaagtatgttatgcactaccatttcagtattacagtattctatatttgtaagtgagttttctactttcatatattttcatattgctgtttagcattcttcttttcaacttaaagaattccct

SEQ ID NO: 937025 - DNA, 591 bp, Homo sapiens
gtgccattgcactctagtacgggcaacaggagcaaaactctatcccccctccccccgcaaaaaagtaattactgacatggaagaacttattattgccattttgttaattgtattctgtctgtcctataacttttttgtccctcttttcctctcttgttgtcttcctttgtgtttcagtgattttttagtgacatattgtgactcttttctcattttcttttgtgtattttctataggtattttctttgtggctaccatggagcttacataaaaaatcttataacaatgtatcttaagttgytaacagttaaacttcaattgcatacaaaatctctactcttttaatcccctcacacactttatgttattaatgtcacaaattacgtatttttataatatgtaacattagcatattttatagtcacagttatttttatacttttgtcttgtaacttctataccaaaattaaaagtatgttatgcactaccatttcagtattacagtattctatatttgtaagtgagttttctactttcatatattttcatattgctgtttagcattcttcttttcaacttaaagaattccct

SEQ ID NO: 937026 - DNA, 629 bp, Homo sapiens
ttctttgtggctaccatggagcttacataaaaaatcttataacaatgtatcttaagttgctaacagttaaacttcaattgcatacaaaatctctactcttttaatcccctcacacactttatgttattaatgtcacaaattacrtatttttataatatgtaacattagcatattttatagtcacagttatttttatacttttgtcttgtaacttctataccaaaattaaaagtatgttatgcactaccatttcagtattacagtattctatatttgtaagtgagttttctactttcatatattttcatattgctgtttagcattcttcttttcaacttaaagaattccctttagcactttttgtaaagcgattaattccttcagcttctgtttacccaggaaagtttctatttcttcttttttttgtagtttgttttaattagaaatgggtttcactatgtcaccgaggctgaaatgcagtggctctgcggtggctattcataggtgatatcatagtgcagtatgcagcctcaaactcttgggctcaaatgattctcccaactcagcctcctgaatgtctgaggctacaggtgcacaacactgtccccagctctgttaatttctgaagg

SEQ ID NO: 937027 - DNA, 629 bp, Homo sapiens
ttctttgtggctaccatggagcttacataaaaaatcttataacaatgtatcttaagttgctaacagttaaacttcaattgcatacaaaatctctactcttttaatcccctcacacactttatgttattaatgtcacaaattacgtatttttataatatgtaacattagcatattttatagtcacagttatttttatacttttgtcttgtaacttctataccaaaattaaaagtatgttatgcactaccatttcagtattacagtattctatatttgtaagtgagttttctactttcatatattttcatattgctgtttagcattcttcttttcaacttaaagaattccctttagcactttttgtaaagcgattaattccttcagcttctgtttacccaggaaagtttctatttcttcttttttttgtagtttgttttaattagaaatgggtttcactatgtcaccgaggctgamatgcagtggctctgcggtggctattcataggtgatatcatagtgcagtatgcagcctcaaactcttgggctcaaatgattctcccaactcagcctcctgaatgtctgaggctacaggtgcacaacactgtccccagctctgttaatttctgaagg

SEQ ID NO: 937028 - DNA, 610 bp, Homo sapiens
catgctcttcaggagtgcaggggcatcttaaagggtttctcgatttctcataaaggaaattggtccatgcattgttgctgcaagttggtgtctttgtcaggccaaggaagctctctgccttcctattgtgccatattgctgataccagcctcttgtgatgagttttaagatacaacacaaaaatcacattccgtaaaattaaaaaacagataagttggactttatcaaaattaaaaacttttgttttgccaaagacaatgctaagagaatgataagacatgccacagacaaagggaaaatacttgtaaattacatattgtataagagttctatccagaatgtaggagctcttacaactcactaataagaaacaaataagcaattaaatatgggaaacatctgaacagacactttgccaaagaagatatatagttagcaaatagatatgtgwaaagatgcttgacatcatttttctttaggaaaatgtaaattaaaaccacaatgaaataccactacacacctattacaatatgtgttcacaaatacttgatatttcttccttcaggaggtagagcttatttctcctacccttgaatgtatgctgactttt

SEQ ID NO: 937029 - DNA, 642 bp, Homo sapiens
cctgcaggcaccccatttgagtattggaggctaaactgcaagtaggcgtggccagggtggggacccaggagaggttagcagacaggaggcgctcagggtggactgactggtctcctgggcaagattgttctgctgtgttctggtttgacagtttccctaagtctagagtgtcctgaggagcatggcgagccttggggaatgggcgtccctggcagtacttggctgcagatgttcccacaccaaaccttctgggctccacataggctggaattctgcccagccttaaaaatctttaagcagttctcgctgctasctcaagtgcccatggggatcatggggtctcctgctaccaggattccagatgtccgtggcgaaagtgaatcactcctcacatgttcaatgcatccctttcctaggagtctgggttcacttttttgttttttgttttgttttgttttgttttgttttgttttgttttgagaatctgtgtgtttacattccagatattattctgcagcttccttttcttgtgttgtctttgcctggttctggtgtcaggaaatcatggcctcgtacaatgaattagaaagtattccctgactcttctattttttaaggggagaatttgtgaagaattggtgt

SEQ ID NO: 937030 - DNA, 642 bp, Homo sapiens
cctgcaggcaccccatttgagtattggaggctaaactgcaagtaggcgtggccagggtggggacccaggagaggttagcagacaggaggcgctcagggtggactgactggtctcctgggcaagattgttctgctgtgttctggtttgacagtttccctaagtctagagtgtcctgaggagcatggcgagccttggggaatgggcgtccctggcagtacttggctgcagatgttcccacaccaaaccttctgggctccacataggctggaattctgcccagccttaaaaatctttaagcagttctcgctgctacctcaagtgcccatggggatcatggggtctcctgctaccaggattccagatgtccgtggcgaaagtgaatcactcctcacatgttcaatgcatccctttcctaggagtctgggttcacttttttgttttttgttttgttttgttttgttttgttttgttttkttttgagaatctgtgtgtttacattccagatattattctgcagcttccttttcttgtgttgtctttgcctggttctggtgtcaggaaatcatggcctcgtacaatgaattagaaagtattccctgactcttctattttttaaggggagaatttgtgaagaattggtgt

SEQ ID NO: 937031 - DNA, 658 bp, Homo sapiens
aacaagagcagggcatgtatgagtagctgagaatggtgaataggagtatgactagacagaagatagtagggatgacaagtttttttggggcacagtctaagttggtctggtgtcgaatgagactggggcctaataaaaaggagcgtctatacaggagcttaaattggctgtaccttgtagcattctgaggacaggcctgaattctgagaagcgaaagtggtaaaagtattgtccagtcctctttaagttggtggctgagcttggtgaggtgcgtttttaaaagacctttagtccgttctacttttcttgtagacggaggacggtaagggatataawggtttcactgaatactaagagcctgaaaaactgcttggctgatttgactaataaaggctggtctgttatcagactgtattgaggtgggaaggctaaacggaggaattatgtctgacagaacggaagaaatgactgcggtggccttctcagaccctgtaggaaaggactctacctgtccagtgaaagtgtctacctagactaagaggtattttagttatctgactccggacatgttgagtaaagctaatttgccagtcctgggtgggagcaaatcctcgagcttgatgtgtagggaagggagggggcctgaataatccctgag

SEQ ID NO: 937032 - DNA, 539 bp, Homo sapiens
ataggctgaaaaagttaggcctcttgtaccaagcagccaagttgtgaatttaaagaaaaatttggtgaaagaaattaaaagtgttacttcagtgatacaaggaatgataagatagtgaaacacccttattactgatatggagaaagtttttaacagtctgtataaaatattaaaacagtcacaacattcccttattaaaaagcctaacccagggcaaggccctaagtgtcttcaattcagggaaggcgggagagaggtgaggaagctacagaagaaaagttcgaaggtagcagaagttggatcttaaggtttaaggaaagaacccrtccccattaatagaaaagtgcaaggtgaagttgcaagtgctgagtagaagttgtgacaagctatccaggaaaactacctgagatcactgctgagggtaactacactaaacaacaaatgttcaacgtagacaaaaaagccttatattggaaaaagacatcatctaagattttcacagctatggaggagacatcatagactaaattcaaagcttc

SEQ ID NO: 937033 - DNA, 758 bp, Homo sapiens
ccaccccaggacctttgcatttgctgttcctcatgcctggaatattcttatcacagacatattcatggactgcctgccctctcatctccttcaggacttcactgacaaggtaaaaattgttacctaacctgattgatttatttattttattttatttttgagacaagagtcttgctgtgttacrcaggctggagtgcagtggtacaatcttggcttactgcaacctccacctcccgggttcaagtgtttctcatatctcagcctcccaggtagctggaactacaggtgtgtgccaccaccctgggctaatttttatttttatttttatttttatttttagtagagacggggtttcaccatgttagccaggctggtctcaaactcctggcctcaagcgatctgtctgcctcagcctcccaaagtgctgggattacagacatgagccattgtgcccggccacctaacctggtttaaagttgctactctcctcgtctctgaccctttctacctgctgccttgctttatttttcttcatcacactcatttccatttagcatactgtgtagtattatccatcttgtttgtggtcatttcctctcagtaaaacctcagttccaggaaagcagacatttctgcttgttttgtagacttctataaatctagaacttaaaactgtgtgtggcacaaagttggccttcattaaatctttgttgaatgaatgaatgaatgttctaaatcccaagcttcaactccgggtg

SEQ ID NO: 937034 - DNA, 656 bp, Homo sapiens
atctccgcctcctgggtttaagtgattctcctgcctcagcctcccaagtagctgggattacaggtacctgccaccaggcctggctaatttttgtatttttagtagagatgggtttttaccacgttggccaggctagtcttgaactcctgacctcaggagatcctcctgcctcagcctcccaaagtgctgggattacaggcgtgagccaccacacctggcctagacttcataaaaatttgaaaattctgtacattgaaaagacaatcatcagagtgaaagtgcaacatgcagaataggagaaaatacttgcaaatcatatcattgataagggtatgatgttcagaatatacaaagatatagaactcaacaacaaaaaaattaacaactcaatttaaaaatgggcaaaggacttgaataaacatttctccaaagaagataaacaaatggccaagaaacagatgaaaaatgctcaayatcactaatcattagagaaatgcagattgaaaccacagtgagataccacctcacacccataaagatggctgttattaaaacaaaataaaacaaaacaaaaacccagaaaataaccagcactggtgaggatgtggagaaattggaacccttgtgctctgttggtgggagtgtaaaatggctca

SEQ ID NO: 937035 - DNA, 599 bp, Homo sapiens
cagacccaggtatccctgcactctcgggggcccaggaagcctccctgccctgtcaggctcagaaagcctgctccctctctcttgtctctccctgcttccgatgcccactctgatcttgaagcaaagttgaagccgagcctgggcgctgtcgtgacctagccaggtgtgcacacactcagggccgcagtgacacatcatccccccctggccttctcagccccctctgaaacttcaggcactgacgaactctgagagggaggcccgggggctaggggaagctcagcatgaacagcctgggtgtcgtggatggcatgtttatggtggcaggaggcagacagtttcctaggtgggaaggagagggggctggratgctggttccagatggagtccaagaccaggagtgagaactcaaggtgctttttccaggcccaaccatggccacccatggaccaatcagcatgcagttcctcccttctgagctcctataaacctcagactgagccagactcatacagtcgttggtgggacctgcttgtggaaaggggctacccactgtaggtctcctgagagctgttctgttgccagtaaagctcctcttc

SEQ ID NO: 937036 - DNA, 580 bp, Homo sapiens
agaaagaaaacgagagagctgacctctgtctggcctaggctctttcaaacaatgtaactcttggaattagttgcaggcttcaatcaatcaataaacaacaagtaactattgattcctttgtaaatcatgttcaaggctatcrtatatatgataagaaaaaactcctactctcaaagaatctataagctaatagaggatatttgaaaatatttgagagcagtcagtgagctgacccaaatcaatggtgtttgaatctttgctttaggaactcaagtgaaggaaacagggatttcaactgaggagactagcgtgaccatttatggacagcattgaactaggttgggtggcatgcggctaagaggcagaaataaaggatagtcgtgagaaggaaatccacaatagaagggaaattatgtgagtttgttttgagggactggagagaaggttcctacctaaaataaaaatctggaaatattagggtgaacccatttgtggagggactgaaatgacaggctgaaaaacctggggttcatgacaaaatgccgccagcaattttttttttcaccagcaatttttgagg

SEQ ID NO: 937037 - DNA, 499 bp, Homo sapiens
caaacaccgatagtcccagctacttgggaggctgaggctggaaaatcacttgagcccaagagtttgaggctgcaacgagctatgatttcattagcttactccagtctgtgcaacagagcaaaacctcatctctttaaaaaaaaaatgacttttgttcactccttgctggtccccatacgatatcyctgacctcctgatagcagtaattcctctagactcactccctgttgtagaagtagaaaatagtgatgggaataatggaaaacagaatgatctcaattgaacaaaagaaagatacagagctccgtacatctctaaaaccttccattcctcagttcctggctgtataatgaggatagggatgatagccaccatcctgagttattaggaaggttatatgttacaaagcctaaaacagtgcctggcacttagaaagtgctagtgaagtgctagtgaaggccgggcgtggggctcatgcactttgggatgccgaggtggg

SEQ ID NO: 937038 - DNA, 797 bp, Homo sapiens
gtaaagggggggcagctgaacactgtgtgtttcataatgtgatatactccctctgaagtactgccaaacaaacttgaatctgatcaacactcagtagcagtgtagaggaaatccaagggacagaggaacaaaccaaacaataccatgaggaagcaatcaaccaaatcaaaaatgtagaacctccttcaggtcacataacccgatatctctaccaaatcaaaggtattaaaaagaggtggtagatattaaaaagaggtggtagataagggagtttttaaagaataaaaaagacttaggagataaaacgaccaaatacaatgtgtggaccttgcttggatcctgatttgaacaaaccaactgcaagaaggctataacaaatcaggaaactgacgatggactggctattactatttatttttaaatttttaaggtatgataatggcatggagatmtaccttaacagttggagatccacactgaattatttagggtgaattacataatgtctagtgtagtgggctgaataatgactcctaaagatgcctgtgttctaatccctggaacctgtgaatgtgttactttgcatggcaaaaggaacctggtggacatgattaaattaaggatcttcagatagatcggcctgggttatccaggtgcacccaatctaatcacataagtgatagagaagagaggccataacacaaaggatgcaggatgcgggctgtgggctgcgggatgcgggatgtgggctgcctcctgcagatggaaaaagcaaggaaacagattttcccccggag

SEQ ID NO: 937039 - DNA, 609 bp, Homo sapiens
gggtaatgtaaaaatctagatcaatattctagttctgaataattatcctgcaaatccttccaggtcatggaaataaataggatgtctattacttgcaggtttcctttttgggaaagtaagaccaagggagctaaccagagccgagcaccatgcacccaaatcttagcaagcataactatagcgacaagttatctgggcatatcacaagacatccttttccttcccttgttggaggagtactccattccacagctataccctagcatttggcagctcatgataaggagtccatgcaactccccctgagacacattttgtcccaaactcaattccaagctttggttcaaagccctagaaagaaaaaatggatctgaggkatccagaggcaaatgataacagaagttaaagggcggccgggcatggtggctcacgcctgtaatcccagcactttgggaggccgaggagggcggaccacgaggtcaggagatcaagaccatcctggctaacatggtgaaatcctgtctctactaaaaatacaaaaaattagccaggtgtggtggtgggcacctgtagtcccagctactcgggaggctgaggcaggagaatggc

SEQ ID NO: 937040 - DNA, 633 bp, Homo sapiens
ccctgggcacttaggatgtgtgcccggcatcatgcaaaccccaaagcctcaccacacagtggtcctgtgaggtgggagcttttgttccctctctttccctccctcatgtcacagacgaggaaaccaaggaccagggaagctgcagaacttacctacgaggcgtaaaagggagtacagcctctcagatggcaaaagcagccagctatccatgtactgagcctctcgggcagggctaaaacaakgccccaagcaccatggtacatactgaacacgggcctttataatgagaccaatgcctttaacatacatgacacatgacctaaccactctggatgcaaatatctaattttttttttttgtagtgacaggatctcactatgttgcccaggctggtcttgaactcttaacctcaagcaatcctcccgccatggcctcccaaagtgcagggattacaggtgtgggccaccgcactcagcctgtggatgcaaataattatgggatttctaaagatatgttagcttaaaatctgccacttactagctgggtaacctttggagagttcctgcctatcaccaggataaaatggggataataagaatccttccctcacaggctgcagtgagtatcccacaa

SEQ ID NO: 937041 - DNA, 662 bp, Homo sapiens
tgtaatcccagctacttaagaggctgaggcaggagaatggcttgaacatgggaggtggaggttgcagtgagctgagattgcaccactgcactccagcctgggcaacagagtgtgactctgtctcaaaaaacaaaaaaaagaaaagaaaagaaaccaaggtcttgaacagatatttgtgcaacrgtgttcatagcagcattattcacaatagccaaaagctggaagcaatgcaagtgtccaaccacagatgaatagattaaccaagtgtggcatctacatgcagtgaaatagattccaaccttaaaaatgaaggacattctgatacatgctacaacatgggtgaaccttgaggatattatgctaatgaaacaagccagtcaccaaaagacaaatactatacaattacactgagatgaggtccctagagtagtcaaaatcatagagacagaaggtagaatggcagttgccaggggcagaagggcagaatggggagttgtttaatgggcatggagttcggctttgcaagatgaaaagaattctggagctggacggtggcgaaggttgcacaacaatgtggatgtacttaacgcgtctgaactgtacatttagaaatagttaagatgttacattttatgttatgcgtattttaccacaactaaaaa

SEQ ID NO: 937042 - DNA, 628 bp, Homo sapiens
ctcaggcggctcatacaaaatgaatgttgactgttcatgtagcggtctggaggctggtgggcgtgggctggttgcatggctcctgctgatcagggttccaggattcctccgcctttctctttcaccatctttagcctcagagttcctcacagtgyatgatggctgctggagctcaataatcacaccatgaccaggcaggaggaaaagagagggtgggaagggcaaaggactcatcttccagatgagctagacccccttaaagatctttcctggaagctccctcttcacctaacaacttgactttctgttatgcttcatcagcaacaactacatgtgaggcggggaaatgagtccttgatctgggcattttgctgccccaaataaaaccgggattctgttggtgaggaagaaagggagactggacactgggtagagggctggcagtctctgccttggtgtggaaagggtgcacctccatgcatatgggagaagcaccagtgccttcattccctgacatcgtgtccctgaaggcacctgctgtcacaaacaccacaccatcattcccactcagcctccgcaggtttctctgcaagctcctttgtaggttggcgcagctttgacaacatcc

SEQ ID NO: 937043 - DNA, 628 bp, Homo sapiens
ctcaggcggctcatacaaaatgaatgttgactgttcatgtagcggtctggaggctggtgggcgtgggctggttgcatggctcctgctgatcagggttccaggattcctccgcctttctctttcaccatctttagcctcagagttcctcacagtgtatgatggctgctggagctcaataatcacaccatgaccaggcaggaggaaaagagagggtgggaagggcaaaggactcatcttccagatgagctagwcccccttaaagatctttcctggaagctccctcttcacctaacaacttgactttctgttatgcttcatcagcaacaactacatgtgaggcggggaaatgagtccttgatctgggcattttgctgccccaaataaaaccgggattctgttggtgaggaagaaagggagactggacactgggtagagggctggcagtctctgccttggtgtggaaagggtgcacctccatgcatatgggagaagcaccagtgccttcattccctgacatcgtgtccctgaaggcacctgctgtcacaaacaccacaccatcattcccactcagcctccgcaggtttctctgcaagctcctttgtaggttggcgcagctttgacaacatcc

SEQ ID NO: 937044 - DNA, 598 bp, Homo sapiens
atgcactactcaagtttgaggcacttttctgagtgctttatatatacgtagctcctttaattatcacaacaatcagaaattaatttttttttttggtccaaggacagtggcttatgcttataatctcagcactttgggaagcagagacaggaagatagcttgagcccaggaattcaagaccagcctaggcaacacggcaaaaccctgtctttaccaaaaatacaaaatttagctgggcattgtggcacatgcctgtagacccagctacttgggaggatgaggtaggaggatcacttgagcctaggaggtagaggatgtaatgagctgtgatcatgtcactgcattccagcctggatgacagaggagaaccttgtctcaaaaaaataaaataaaataaataaatggataaataaatttgccttctmattgacattgatttgtaagaaaaactttcaaatagacatttctgtaagtattatatgtttcatcaggtacatttaaagactatgtcatataatttattacaaagcacttgaattatataagacataatgcaaatgtttacaagtataagaaattttatagcacatattccatt

SEQ ID NO: 937045 - DNA, 623 bp, Homo sapiens
tattagacacagctagtcatcatttaaagttagtaatttccttgcaaataattgttttaatagccagtgaacatcaggtgctcacacaagtaagaaccttaaagttaaatatttggatatttttgccaataactcagaagatttagctaacaacattaaattagtcttatttatcaaaaaaggcacacaaaccaagatcatttcattttggctgggtttatggttttataaccctctatatcaaactgttacacctcaaaacatctagcagagacaaacataaaacccaggcagaaatgtatgctgacaattctgaagacattttaaagccagcttgtttagtaaagattttttttaagtcacatmaacttgaaaaaatactttggatttacttatgagagctctttcatttataagccaatttggtagatacaacatataacataataaatgtgcatacataaacacatctagacatatatatatatacacacatataaacaaaaatccaatagcttttacctcagaactctagtcatgagatagcaaaataaactcactggtttccatggctaaactttttttcctggataggtgttgtgggaagtcagggaccccaaacg

SEQ ID NO: 937046 - DNA, 742 bp, Homo sapiens
tctgtttgcggagaagtttccgactttacctggagcagagtcaagttggagagcccagcgaaaaacagggggagaggaagcagcagtaaggccctgggagcttgctgggtcccctagcagcccattcctgtctggcaccacagggatcctttgggagggtggcctgaggagcagggggtaaaactccacagggagaaggaattctgtagctgaactttgtaacaatttgaaccccgcgagaagcctcctggccagaactcaggagggggctcgaatccagcgtgcagactccacaggcgkgggaagaactaaagctcttttctttctcagctaggaggtggaaagcctgcgacaagttttcaaaaccatcttgctcttcacctggaaacagatgcagggctattgtggagggcacagtgggagtgagaccagcccttcagtttgcatgggagctgggtgaggcctgtgagtgccagctttcccgcacttccctgacccctgcatgactcagcagagggaaccataatcctactatttacgcaattccagtgacctgggaatctcacccccattccccacagcagccacagcaagacctgccccaggagagtctgagctcagacacgactaaccccgcccccacctgctggtccttccctacccaccctgttagtggaagacacaggacatataatcttgggagttctagggccctgcccaccactggtccctttccacacta

SEQ ID NO: 937047 - DNA, 600 bp, Homo sapiens
ccatggagaacatttgtgtctggcccagcgattgtaaatacaccaatcggcactctgtatctagctcaaggtttgtaaacacaccaatcagcatcctgcatctagctcaaggtttagtgaatgcaccaattgacactctatatctagctactctggtggggccttggagaacctttatgtctagctcagggattgtaaacgcaccaatcagcgccctgtcaaaacagaccacttggttctaccaatcagcaggatgtgggtggggccagataaaagaataaaagcaggctgccggagcttgtagtggtaacccgttggggttttytgtgctgtgataaggtttgttcgtttgcatttggcgtctgcgttgcctttatgagctgtagcgctcactgcgaaaattgtcactttatttctgaagtgggtgagatgacgagcccggcaggaggaacgaaacactcatctgtgaaagttgcaacttcatttctgaagtaggtgagacgactctgtgaaagttgcaacttcatttctgaagtgggtgagacgacgagcccattaggaggaacggaacactcactgcgaaagttgcaatttcatttc

SEQ ID NO: 937048 - DNA, 600 bp, Homo sapiens
ccatggagaacatttgtgtctggcccagcgattgtaaatacaccaatcggcactctgtatctagctcaaggtttgtaaacacaccaatcagcatcctgcatctagctcaaggtttagtgaatgcaccaattgacactctatatctagctactctggtggggccttggagaacctttatgtctagctcagggattgtaaacgcaccaatcagcgccctgtcaaaacagaccacttggttctaccaatcagcaggatgtgggtggggccagataaaagaataaaagcaggctgccggagcttgtagtggtaacccgttggggttttcygtgctgtgataaggtttgttcgtttgcatttggcgtctgcgttgcctttatgagctgtagcgctcactgcgaaaattgtcactttatttctgaagtgggtgagatgacgagcccggcaggaggaacgaaacactcatctgtgaaagttgcaacttcatttctgaagtaggtgagacgactctgtgaaagttgcaacttcatttctgaagtgggtgagacgacgagcccattaggaggaacggaacactcactgcgaaagttgcaatttcatttc

SEQ ID NO: 937049 - DNA, 618 bp, Homo sapiens
tgagctagacacagtgctgattggtgcatttacaatcctttagctagacataaaagttctccaagtcctcactcgattaactagatacagagcactgattggtgtgtttacaaaccttgagctagacacggagtgttgattggtctgtttacaaaccttgagctagacacagagtgctgattggtgtatttacaatcctttagctagacataarggttctgcaagtccccactagattagctagacacagagcacagattggtgcgtttacaaagcttgagctagacacaggctgctgattggtgtgtttacaaactttgagctagacacagagtgctgactggtatatttataatcctttagctagacataaaagttctccaagtacccactggactcaggagcctaggtggttttgtttagtggattccgctgctttggctgagctgcctgccagtccggcaccaggcacctgcacttctcagcccttgggcagtggatgctaccaggcgccgcggagcagtgggcggcgcccagcagggaggcttgggcgcatgcgggagcccaccaccggggtcggggggctggggcatagcgggctgcaggtcctgagccctg

SEQ ID NO: 937050 - DNA, 618 bp, Homo sapiens
tgagctagacacagtgctgattggtgcatttacaatcctttagctagacataaaagttctccaagtcctcactcgattaactagatacagagcactgattggtgtgtttacaaaccttgagctagacacggagtgttgattggtctgtttacaaaccttgagctagacacagagtgctgattggtgtatttacaatcctttagctagacataaaggttctgcaagtccccactagattagctagacacagagcacagattggtgcgtttacaaagcttgagctagacacaggctgctgattggtgtgtttacaaactttgagctagacacagagtgctgactggtatatttataatcctttagctasacataaaagttctccaagtacccactggactcaggagcctaggtggttttgtttagtggattccgctgctttggctgagctgcctgccagtccggcaccaggcacctgcacttctcagcccttgggcagtggatgctaccaggcgccgcggagcagtgggcggcgcccagcagggaggcttgggcgcatgcgggagcccaccaccggggtcggggggctggggcatagcgggctgcaggtcctgagccctg

SEQ ID NO: 937051 - DNA, 647 bp, Homo sapiens
tttactaataggtgggatgcccctttatacagtgcaccccaagtccctcagcagacatatgtggaacttggcaaacatctcggcattcatcttggcaggatgccccaagcagaagtgtggttcgtgaccctgactggcactgcccccgaggggtgtgctttccagttccgccatggaacaaaccccgtctattccttcagactcactgataggctgcatcctaaagcaataagacaaatttaaccctcagactctcaaaaaaagaaatatctaattttcttttgtaacacagcatggcccctatgaaggaaatcctcakattaacctcctcagtctttataatcgaaagcaaattaaggaaaacagggctaaggaaaagaaaaaaacaaaatgcagggacaagaggcaggtccaatggttggctgctttacaagcccccagcttctccaggtttccctaaggacactcctccaaataactgccatctgtgcaaaagcccaggccactaaaaggcaacttacccaataaaataaatggggaaaagctgtacacagcttatccactctgccacaagcttagccactggaaacaggattgccctgaaagctgaaggagccccagaacaaaaattcaacccccagtggcct

SEQ ID NO: 937052 - DNA, 620 bp, Homo sapiens
aaatccaatttgtcagtattgtatggtttattgagggaatttacagacagaagcatggtcttgggtggctgcaagacaggtagagaactctgccccataaccccccagacccagggattatatcttaggaaaaagtataggtggtctggtaagaatgtataggtggctacaggaattgcagcgtatgatttctgcaccaacagggattgttttggaggaaacttgtaacgaataggtgtttctacataaagagtaatacatcaactaaacattttggaggcattcctggactcagggttagccaggtggattagcatttaaaataaagtcacttctgtctccacactgtwcaagaagcatggcaccagcatctgcttctgatgagggcctcaggaagcttccattcatggcagaaagcaaaggggagccagaatgtacagattacatggcatgaacaaaaacaagagaagggggaggaggtgccaggctctttttagcaatcagtctggggaaactaatagggtgagaactaataggacaataggacagcaccaagacatgcatgaagaacatgctgccttgacccaagcatctcccattaggctcccacctctaacatt

SEQ ID NO: 937053 - DNA, 804 bp, Homo sapiens
ctgcctcagcctcccgagtagctgggactacaggcatccgccaccgtgcccagctaatttttttttttaatttttagtagagacggggtttcaccatgttagccaggatggtctcgatctcctgacctcgtgatcctcctgcctcggctttccaaagtgctgggattacaggcgtgagtcactgcgcccagcccattttccctttttaacttcagccaccatggaggggaaaaacaggcatggtcctattttrcagatgagtagactgaggctcagagaagttatgtgggaatgatgactcctggcatttggcagcacttgcttgcatcttctccttggatcctcacaacacgtgtggagacaggcaggtccagcatttcacagataaggctgtggttacccagagaggccaagccatttgccccagttgcccagcaacttcttgcaggctagaactggaatcctcctctgttgactccaacctagtgctctttctctcctgcacaaaggccatgggtcagcaggtgggggtctgtggaatgaggccactggggtaggtttggggacaggcatcggtacttgggcaccttttgggcatcagagagaggctttctgtggcttgaggatttcccctgggattgcatcctccagcacatctttgcttaattcaccctgtgtatatctcactgcaggtgtcgggctatccgcccaggcctagcatgttaaatgtcacgtcctggccagcccccacccacggaatgagctgctgggaaagccagaggcctcctccccaaccctggccca

SEQ ID NO: 937054 - DNA, 743 bp, Homo sapiens
caccagatatttagaatattctatacccttgagtgccatagttagcaattttgttcaagagagtttgtgattctctgttagaaagtacaggatgaaaagcctaataatgctaagtgttggtgagaatatggggaagtgggaacacttacgtagaattttaagtggtgtaaccactttggaaaacaatgtggcaatatctagtaatttgaaggtgtgcttatcatgtgacctggtggttctacttctatttttttttctttttattatacttgaagttctagggtacatgtgcacaatgtgcaggtttgttacacatgtatacatgtaccatgttggtgtgctgcacccattaactcgtcatttacattaggtatatctcctaatgctttccctcccccaccctgccccagtgtgtgtgtgatgttccccttcctgtgtccaagtgttctcattgttcaattcccacctatgagtaagaacatgcgatgtttggttttttgtccttgcgatagtttgctgagaatgatggtttctagcttcatccatgtccctacaaaggacatgaactcatccttttttatggctgcatagtattccatggtgtataygtgccacatcttcttaatccagtctatcattgatggacatttgggttggttccaagtctttgctattgtgaatagtgtgtagtattttagatattatttagagagtagatagaaatttattatttcctccagatc

SEQ ID NO: 937055 - DNA, 623 bp, Homo sapiens
aaagtctgttttgttgctaaggtgtcaccatgcctaaattcataagatggtcaccaccaaataatattaagagcttaacagaccaggtgtggtggctcacgcctgtaatcccagcactttgggaggctgaggcaggtggatcgcctgaggtcaggagttcgagaccagcctgaccaacatggtgaaaccctgtctctacaaaatacaaaaaattagcygggcgtggtagtgcatgcctgtaatcccagctacttgggaggctgaggcaggaaatcgcttgaacccgggaggtggaggttgcagtgagccaagattgcactactgcactccagcctgggcaacaagagcaaaactctgtctcaaaaaaaaaaaaaaaaaaaaaaaagagcttaatattcttgggcaaaacaggcatcaattatgtacaaataagatttagaattgttataattggtttaaaatcctctcaactgtgttcctaggttatttacgctaatttttctcttccttaatagaagaaaacatcatagagcaatcagtagatttatcagtaagaaaaggtgctggccttggacctagtagaaacactaggcaggcgttaggtgaaccaagttctagttcag

SEQ ID NO: 937056 - DNA, 626 bp, Homo sapiens
atgaataaatggtgtcagagaaaagtgaaacgattgtttaaggctatcaaaaattttgtcctcttcttttcatggcactttgacatatttgttttataacctatatcactctccacctgatatggtttggctgtgtccccacccaaatctcatcttgaattgcagctcccataatccccacgtgtcatgggagggacccagtgggaggtaattgaatcacggggacaggttttttcccatgctgttctcatgatagtgaataagtctcccgaratctgatggttttataaagggcagttcttctgtacgcgccctcttctctgcggccatgtaagacatgactttgctcctccttcgccttccaccatgattatgaagcctcccagccatgtggaactgtgaatccattaaacctctttcctttataaattacccagtcttaggtatgtctttattagcaacatgagaacagactaatacaccatcgtatgttgtaatgactataatatacctctgcctccccctattataatattcatatctcctgagtagtcacctttgtatccccatcatagtaggtgttaaataaatgtcatgcttttaataagtgaatgaaagaatgattt

SEQ ID NO: 937057 - DNA, 623 bp, Homo sapiens
aggactacagcgtcagcaaaggttattgttaatgaggactaaactctgattttttttatcttgcccaaattcctatctaaggggtctggggagtcatgccctacaaatcatcaattctcatcagatgagttttatttaaccctgtatatcatgttttactttccaacctgactctggcataacattaccagacaaacaagaaaaagtattttgccccaaaacatgtttctttgccacattttgaaattgccctgcaaagctgttctttgtgggggaaaatttgcatctgtaaagaatctctattaacatagctaaatatttttcttccagaccttccaatcctaaagatattaattaagatctgaaagggaaacatttgtcatctattgtctctaagggcagccactataagacttcgaaagarttggtctctaccatctttattttaacctgaatattccctttctatcaatctcaggtctttagacaaaactagttgtcaaccagaaaatgtttaaatacacctatggcctggaggccctccactccccatcagctttgagttgtcccgccttgctggaccaaaccaatgtatttcttaaatgtatttgattgatgtttca

SEQ ID NO: 937058 - DNA, 623 bp, Homo sapiens
aggactacagcgtcagcaaaggttattgttaatgaggactaaactctgattttttttatcttgcccaaattcctatctaaggggtctggggagtcatgccctacaaatcatcaattctcatcagatgagttttatttaaccctgtatatcatgttttactttccaacctgactctggcataacattaccagacaaacaagaaaaagtattttgccccaaaacatgtttctttgccacattttgaaattgccctgcaaagctgttctttgtgggggaaaatttgcatctgtaaagaatctctattaacatagctaaatatttttcttccagaccttccaatcctaaagatattaattaagatctgaaagggaaacatttgtcatctattgtctctaagggcagccactataagacttcgaaagaattggtctctaccatctttattttaacctgaatattccctttctatcaatctcaggtctttagacaaaactagytgtcaaccagaaaatgtttaaatacacctatggcctggaggccctccactccccatcagctttgagttgtcccgccttgctggaccaaaccaatgtatttcttaaatgtatttgattgatgtttca

SEQ ID NO: 937059 - DNA, 754 bp, Homo sapiens
ttatgaggcagcctagagggctattttttggaatggacgactgggagttttttataaaggagggttggctcgggaaaacagggaaaaggacactgtcctggatggccagagggagacgataaaaagaacgatcgtcaccgctgcctttttcattcctggaatgggatcgaatggcttagaggtgtccccctaagaccagatgatcagcaagtgcttggcacactccagagcctttttggaccaatgttggattttcggaccagagaaaccaagagaaaccatgcggatttttccctgttaaccagggtcctggggaaactcaccagtaggcgagatcagtgaccggtgtgcacgcacagagagctgactggaggctgaggagcttcctttgtccggctgctgtggcctgctctccggggtggaggggtaggtccacgggggatgcagacctgagcctctcccgggttttggcaccaaaatgtaaggttcttgtatccgtttgaaccccgagagggagccaacagacaacacgacgcggtgtggagcaacatgctgttttaatgagcrcctgggtgcaggcaggctgaggcctaaaatggcgtcagcaccaaaatgagaacagagcaggggttttatggtctcctgtaaacaggaagtgtcccagtttgacgtgactgctatgtactacatactacagtacccagacggcctctttttcaatcttcaggggtacgtgtcttcccaccagggtagg

SEQ ID NO: 937060 - DNA, 560 bp, Homo sapiens
cagctacttggctgcctcaccaccttctccacagctagttggctgcctcaccatcaccacatgatgctccaaatttggaggaaggggctactgccccatctcaatatgatgagggagttggaatggtctgtccctccaagacccaacagggcactctgtttggacagggcaatactgtgactggagcagggcaattcccacttaggcagatgcctatgggtggttcacacatagaagtgccatctgtcagacattactggacttacagcctattttcaacatccaacttgctaaattggaaaagctccaaacmaccttatagagaagacccccagaaaatgactaatctctttgaatccatctttgctacccaccagcccccctgggcagatgtttggtcttttttattatgcttctgaccacagatgaaagaaggctagtaatagagaaggcaaatgaagaggcccatcacctccatgagacaaacaatatctccgatcctgcaggggcaattccaggtacaaaccctaattgagaccccaattgagatggggacatga

SEQ ID NO: 937061 - DNA, 479 bp, Homo sapiens
tggaactggattgctgcaatctcaaaataacacttgaatgaatgaggagttgcttcttgtggatgagcaaaggaagtagcttcttaagatggaatctactcttgggaaagatgttatgcacaatgttgaaatgacatcaaagaatttagaatattccattagcttagttgataaagcagcatcagggtttgagaggatttactccaattttgaaagaagttctactgtgggtaaaatgctatcaaacagcatctcatacaacagaaaaatcttttttyttcttcttcttttagagacagagtctccctctgtcacccaggctggaatgtagttacatgatctgggctcactgcaacctccggctcctgggttcaagcaattctcctgcctcagcctcctgagtagctggggttacaggggcataccgccatgcctggctaattttttttgtattttagtagatggagtttcactgtttg

SEQ ID NO: 937062 - DNA, 666 bp, Homo sapiens
atttttgtcaaagccattcaacaagtctctaggaggttccaaacttggtcacattttcctgtcttcttctgagccttccaaactgttccaactgttcaaactgggtaactgccttccaaagttttgggtatgttttcagcaacaccccactctactggtaccaatttactgaattagtctgttttcacactgctgataragatgtacctgagactgggaagaaaaagaggtttaattggacttacagttccacatggctggggagggctcagaatcatggtgagaggtgaaaggcacttcttacatcatggcagcaagagaaactggggaagaagcaaatgcagaaacccctgataaacccatcatatctcatgagacttactcactatcacaagaatagcacggaaaagacagaacccaggatccaattacctccccctgggtccctcccacaacacgtagcaattctgggagatacaattcaagttcagatctgaatggggacacatccctattttggtcctccagttaaagtagggacttatggaggttaggtaattaacagagttttagctcaggtccaacttacagtggatccagtgggtccttggactcatcctgtggtcatttccctagtgccagaatgcataactggcatagacacac

SEQ ID NO: 937063 - DNA, 620 bp, Homo sapiens
gtcacattttcctgtcttcttctgagccttccaaactgttccaactgttcaaactgggtaactgccttccaaagttttgggtatgttttcagcaacaccccactctactggtaccaatttactgaattagtctgttttcacactgctgataaagatgtacctgagactgggaagaaaaagaggtttaattggacttacagttccacatggctggggagggctcagaatcatggtgagaggtgaaaggcacttcttacatcatggcagcaagagaaactggggaagaagcaaawgcagaaacccctgataaacccatcatatctcatgagacttactcactatcacaagaatagcacggaaaagacagaacccaggatccaattacctccccctgggtccctcccacaacacgtagcaattctgggagatacaattcaagttcagatctgaatggggacacatccctattttggtcctccagttaaagtagggacttatggaggttaggtaattaacagagttttagctcaggtccaacttacagtggatccagtgggtccttggactcatcctgtggtcatttccctagtgccagaatgcataactggcatagacacact

SEQ ID NO: 937064 - DNA, 580 bp, Homo sapiens
tgggactagccttgtctcagatgagactttggactttggacttttgagctaatgctgaaatgagttaagactgggggactgttgagaagggatgattgtattttgcaatgtgagaaggacatgagatttgggaagggctgagggcagaatggtatggtttagatctgtgtccccacccaaatcccatgtccagttgtaatccccaatgttggaagtggggcctggtaggaggcaatttgatcatgggagctggttcttcatgatggtttagcgccatcctcttggtgctgttctctcaatagtgagttctcccaagatctggttttatggcacctcctctctcgctctgtcttgctactgctctgccakgtaagatgtgcctgctcctcctttacttctgccatgattgtaaatttctcaaggcctgcccagaagccaagcagatgccagcatcatgcttcctgtatagcctgtggaactctgagccaattaaacctcttttctttataaattacccagtcccaggtattcttttatagcaatgtgagaacagataaatacaactagggaaccctgtaga

SEQ ID NO: 937065 - DNA, 592 bp, Homo sapiens
gtgctctgaaattcatcagtatgcttgggcatggtgcttctgctcataggctgctcccgctagggactggatgcagcaggacaccaaggcagacacactcccgggaggcatggcctcctttgcaggctgactttggctcagggactcccttatcaactttgccgaggccgagytcagtggctcacacctgtaatcccagcacttgggaggccgaggtgggcacatcacttgaggccaggagttcaagactagcctgggcaacatggctaaaccccgtctctactaaaaatacaaaaattagccaggcatgatgtcttgcgcctgtaatcccagctacctgagaggctgaggcaggagaattgcttgaacccagaaggcggaggttgcagtgagccaagatcatgcctgataggtgacagagcgagactccatctcaaaaaaaaaaaaaaaactttgccaaatcttccttgcaatgctctctaggatgactgtgctcagccttctctctctctttccttcactcaggctcacacttgcatcaccaagtgatgcctctcccagccatcctggctctctccctatttcctttcac

SEQ ID NO: 937066 - DNA, 592 bp, Homo sapiens
gtgctctgaaattcatcagtatgcttgggcatggtgcttctgctcataggctgctcccgctagggactggatgcagcaggacaccaaggcagacacactcccgggaggcatggcctcctttgcaggctgactttggctcagggactcccttatcaactttgccgaggccgagckcagtggctcacacctgtaatcccagcacttgggaggccgaggtgggcacatcacttgaggccaggagttcaagactagcctgggcaacatggctaaaccccgtctctactaaaaatacaaaaattagccaggcatgatgtcttgcgcctgtaatcccagctacctgagaggctgaggcaggagaattgcttgaacccagaaggcggaggttgcagtgagccaagatcatgcctgataggtgacagagcgagactccatctcaaaaaaaaaaaaaaaactttgccaaatcttccttgcaatgctctctaggatgactgtgctcagccttctctctctctttccttcactcaggctcacacttgcatcaccaagtgatgcctctcccagccatcctggctctctccctatttcctttcac

SEQ ID NO: 937067 - DNA, 623 bp, Homo sapiens
aggtccacttacatgcggatttttttcaagaaatatattggacttcttttggaattttgtgacaattgaaaaaattcacagacaaacctcatagcttagaaatgcagaaaaaatcagccaggcgtggtggctcacgcctgtaatcccagcactttgggaggtcaaggcgggcagatcacttgaggtcagggtatcgagaccaacctgaccaacatggagaaaccccatctctacaaaaaatacaaaaattagcccggcacggtggcacgcgcctgtaatcccagctactcgggaggctgagcctgggaggcaggggttgcagtgagcggagatggtgccactgcactccagcctgagcaacagagcacagagcatgactctgtctcaaaaataaatacataaattttaaaaagaaatatctaaamaattaataaaaagttggatatgtcatgaatgcataaaatatatatagatactagtctattttatcatttgctatcataaactatacacaaatccattataaaaagttaaaatttatcaaaacttacacacacaaacacagatagtacatcaagccagagaaatgtaagcaaatgtaaagatacagtattaaatcataa

SEQ ID NO: 937068 - DNA, 632 bp, Homo sapiens
tactcaatgatagatttcagggacagaaatacttcagcctccagcagatgcaagaactttccaacatcctgaacctcagctacaaacaggttaagacgtggttccagaaccagagaatgaaatctaagaggtggcaggaaaacaactggccaaagaatagcaatggtgtgactcagaaggcctcagcacctacctaccccagcctctactcttcctaccactggggatgcctggtgaacmtgactgggaactttccaatgtggagcaaccagacctggaacaattcaacctggagcaaccagacccagaacatccagtcctggagcaaccactcctggaacactcagacctggtgcacccagtcctggaacaatcaggcctggaacagtcccttctataactatggagaggaatctctgcagtcctccatgcagttccagccaaattctcctgccagtgacttggaggctgccttggaagctgctggggaaggccataatgtaatacagcagaccactaggtattttagtactccacaagctgtggatttattcctaaactactccacgaacatgcaacctgaagatgtgtgaagaagagtgcaattgacattaatcaatttcagtctgggc

SEQ ID NO: 937069 - DNA, 632 bp, Homo sapiens
tactcaatgatagatttcagggacagaaatacttcagcctccagcagatgcaagaactttccaacatcctgaacctcagctacaaacaggttaagacgtggttccagaaccagagaatgaaatctaagaggtggcaggaaaacaactggccaaagaatagcaatggtgtgactcagaaggcctcagcacctacctaccccagcctctactcttcctaccactggggatgcctggtgaacaygactgggaactttccaatgtggagcaaccagacctggaacaattcaacctggagcaaccagacccagaacatccagtcctggagcaaccactcctggaacactcagacctggtgcacccagtcctggaacaatcaggcctggaacagtcccttctataactatggagaggaatctctgcagtcctccatgcagttccagccaaattctcctgccagtgacttggaggctgccttggaagctgctggggaaggccataatgtaatacagcagaccactaggtattttagtactccacaagctgtggatttattcctaaactactccacgaacatgcaacctgaagatgtgtgaagaagagtgcaattgacattaatcaatttcagtctgggc

SEQ ID NO: 937070 - DNA, 563 bp, Homo sapiens
gtggccaggcatggtggctcactcttgtaatcccagccctttgggaggccaaggcgggtagatcacaaggtcgggagtttgagaccagcctggccaagagacaagcctgaccaatattgtgaaaccccacctctactaaaaacacaaaagttagctgggcatggtggcaggcgcctgtaatcccagctacttgagagrgtgaggcaggagaattgcctgaactcaggaggcaggggttgcagtgagccgaagatcgtgccactgcagtctagcctgggcgacagagcgagactccaactcaaaaaaaaaaaaaaaaactaggagtggagagaaagatattctattctgtgttccccggaaagcgaaacctgaagctaatacttgtgtcatattatgttattaaagagcataatcccaagggtgcaggactgaggaaaagagagcagagcatgtgctactgggctggccacgtgtcatcaccaagtgcagctgatcacttgagctcatggaacagacctctgagcagagccaggaagcatgagttctctaagtgggtcgtgcac

SEQ ID NO: 937071 - DNA, 563 bp, Homo sapiens
gtggccaggcatggtggctcactcttgtaatcccagccctttgggaggccaaggcgggtagatcacaaggtcgggagtttgagaccagcctggccaagagacaagcctgaccaatattgtgaaaccccacctctactaaaaacacaaaagttagctgggcatggtggcaggcgcctgtaatcccagctacttgagagggtgaggcaggagaattgcctgaactcaggaggcaggggttgcagtgagccgaagatcgtgccactgcagtctagcctgggcgacagagcgagactccaactcaaaaaaaaaaaaaaaaaytaggagtggagagaaagatattctattctgtgttccccggaaagcgaaacctgaagctaatacttgtgtcatattatgttattaaagagcataatcccaagggtgcaggactgaggaaaagagagcagagcatgtgctactgggctggccacgtgtcatcaccaagtgcagctgatcacttgagctcatggaacagacctctgagcagagccaggaagcatgagttctctaagtgggtcgtgcac

SEQ ID NO: 937072 - DNA, 805 bp, Homo sapiens
gccatgactaaaaggagccaaggtacagctcaggctgttgcttcagaggatggaagcctcaagccttggcagcttccatgtggtagtgagcctgtgggtacacagaagtcaagaattgaggtttgggaacctccgcctagatttcaaaggatgtgtggaaacacctggatgcccaggcagacgtttgctgcaggaatggggccctcacggagaacctctgctagggcagtgcagaagggaaatgtgacgtcggatcccctacacagagttcctactggggcactgcctagtggagctgtgagaagagggccactgtcctttaaacctcagaatggtagatccaccaacagctcgcaccgtgcacctggaaaagccacagacactcaacrccagtctgtgaaagcagccaggagggggactgtaccctgcaaagccacaggggcggagctgcccaaggctatgggagcctacctcttgcatcagcgtgacctggatgtgagacatggagtcaaaggagatcattttggagctttaagatttgactgccccgctggattttggacttgcatgggacctgtagtccctttgttttggccagtttctcccatttggagtggctgtatttaaccaatgcctgtactcctgttgtgtctaagaagtaactaacttgcttttgattttagaggctcataggtggaagagacttgccttgtctcagatgagactttggaatatggacttttgagttaatgctgaaatgagttaagactttgtgggactgatgggaaggcatgattggctttga

SEQ ID NO: 937073 - DNA, 690 bp, Homo sapiens
agggcacctggccccttccgcgaggttggagcattatgccaggaacaggtgttccctgtacacttttttaagtgagtaaagagaacagtgattttcaaacaatggtgtgtcgggtggggcggctcttccatgcacctgtcccctgcctctgcatgagcccagcagaaaatcctagctggaaggccgtggggcttggggccagcactgtgcaaaggatgggtgagcacgctgtccctcggagcgtcctcagtggtgcagccaagagccaggaagggcacagcctctttcctcctccctgatggaagccagagacctaccacaaacaaagacctgctgcctccgcccctcctccctccgcctcgcctttgcaaccggtctttcctccaagcaaaccttttccgcgcccttcaccattcactctgcaaatgaccagggcctccaaatcccrtccagccccaggtatgactggatccgtgtcagcgagagagatgggggcattccagttgtcctgcatgccatttaaaccttgcccttccctctcttctggaaactctgagcaaacaccaggcactaggacaacttctaatttaatattataataataaaagccacggtggcacagaaccatgaactgcactttaaattcctaactgaactcctgccggggctgttgtcaggaaaaatatgcag

SEQ ID NO: 937074 - DNA, 551 bp, Homo sapiens
tttttgtatttttagtagagatggcgtttcaccatgttggctaggctggtctcaaactcctgacctcgtgatctgcccacctcggcctcccaaagtgctgcaatttcaggtgtgagctaccctggccaggcagtctttagaagggaaacaagagctaagaagtcagaaagccatggaagcatgcaccagtggactagacctgcatctctcctgggagccagggaaggtttctctaataagtgatgtttaacctgagctcccaaggatgagtgggaattatctaggcaaaaggagaggaagggagagtcttccagcaggggagaaaacaagtgycatggccttggagcaggaagaagcaggatgtgttcaatgaactaaaagaaagccaatttcacggaggtgcaaaagcaaagtagagagacatgggaggtgaggctggagaacaaggtggtgattctgtcatgctggcccttgtgtgccatggtcagggcttttgaatgtcattcatttgttcattcgtgaattcatccactcattcaattgatgtttgt

SEQ ID NO: 937075 - DNA, 599 bp, Homo sapiens
aggctataaaaatggttaacaggataataacttgaaatgatgactacctttgtctaatatcttagttctcataagtaaactaggtaaattgttaaaatcaaataagtaaatgtaaatgggataaacttctataaatgaattttttgtgttatttgaaatctcaaaagtatgttaaattcaataatagataatcatcaaacgtctgggtcgtttccacttaaggtaaaaaattgtgttataagaaagcatgtttctagaaattataaaatgcttcttatctatacaaaattgatatgtgacagataattctagatttcttacttcttaggttctcactaaaatttaagattastaagatttaaaattcaaattaatatatacaactctttatataaaaaggaccaaaaaagtaagatgtgtttttgatgagaacatattatcagaaggtataaaaatgtgttctttattgagaaaagaataattttgtacaatttcgatgttacctaaaaattacttcaaaatatggatttaggaaggaaacaaatgagattaaaaggaatcagtaagtaggagagagaaaaaaatataaagaaagttgt

SEQ ID NO: 937076 - DNA, 589 bp, Homo sapiens
aaaacagtctgtcggtttcccaaatgatgaaacatagattaccacatgacccaacaatttcgctcttaggtgtgtgtgtatgtatatgcatgtgtgtgtatctcacacccaagaaaaatgaaagcatatgtccattcaaaaacttgtacatgaatggttacagcagcgtagcagcattattcataatagctaaaaagtggaaacaacccgaatttccatcagtggtggaatggataaacaagagttgttatagccatacaacagaatattattaagccatgaaragcaatgaaatactgatacaggcttcaacttggattgaaccttgaaaacattatgccaagtcaaagaagtctgtcacaagagtctacatagcatatgattccattcaaaagaaagttcagaatagggaaatctgtaggaacagaaagtagattagtagttgttttagggatgaggatgaggagaggaggatgtaaagatgaaggggtgatcaataaaaggtaccaggttttttattgagatgatgaaaatgttctgaaattaactgtgatgatggtggcccatgtccgtgaatataccaaaagcc

SEQ ID NO: 937077 - DNA, 589 bp, Homo sapiens
aaaacagtctgtcggtttcccaaatgatgaaacatagattaccacatgacccaacaatttcgctcttaggtgtgtgtgtatgtatatgcatgtgtgtgtatctcacacccaagaaaaatgaaagcatatgtccattcaaaaacttgtacatgaatggttacagcagcgtagcagcattattcataatagctaaaaagtggaaacaacccgaatttccatcagtggtggaatggataaacaagagttgttatagccatacaacagaatattattaagccatgaaaagcaatgaaatactratacaggcttcaacttggattgaaccttgaaaacattatgccaagtcaaagaagtctgtcacaagagtctacatagcatatgattccattcaaaagaaagttcagaatagggaaatctgtaggaacagaaagtagattagtagttgttttagggatgaggatgaggagaggaggatgtaaagatgaaggggtgatcaataaaaggtaccaggttttttattgagatgatgaaaatgttctgaaattaactgtgatgatggtggcccatgtccgtgaatataccaaaagcc

SEQ ID NO: 937078 - DNA, 555 bp, Homo sapiens
ctgaaaaaccaaaaacaacaaaaagaagaggagaaaggaaaactaggtttaccacattgggtccaaccaacttggaaatctgaccctttctctttgccctggaaagttgggggagacataaccagggagggaaatggaagcagagcttggtggaagtggggattgccaacacgtagcccgcaggctgacagaggctctccccgtctcttcctaaaccctcagtccatcttctcttcttctcagtcttcccctcccacctccaacctcgtcacaggaagaatgaagcaggccccgccttccggtcctgcccctagcgcttctcccttggccccagtgcccttgtccatccaatgacgatggacgcaacaacatggtctgccctaaaaggacyggaccctctcaaaccccatgatccagtgacaactgcagagggttttacatatatgtcaagaggaggagacatcccataaggaagcttccagaaggcagtgcgtgagaggcaccatcattcactctgattattcaggacctttcttggcagccacgaatcccatc

SEQ ID NO: 937079 - DNA, 644 bp, Homo sapiens
aatatcctgcagggtgttttccaacttggttccattctccccgtcactttcaggtacaccaatcagacatagatttggtcttttcactagtcccttatttcttggaggctttgttcatttctttttattctttttttctctaaacttctcttcctgcttcatttcattcatttcatcttccatcactgataccctttcttccrgttgatcgcatcggctactgatgcttgtgcattcatcacgtagttctcatgctgtggttttcagctccatcaggtcctttagggacttctctgcattggttattctagttagccattcgtctaatttttttcaaggtttttaacttctttgccattggttcaaacttactactttagcttggagtagtttgatcttctgaagccttcttctctcaactcatcaaagtcattctccatccatctttgttctgttgctggtgaggagctgcattcctttggaggaggagaggcgctctgatttttagagtttcctgtttttctgctctgttttttccccatctttgtggttttatctacctttggtctttgatgatggtgatgtacagatgggtttttggtgtgtatgtcctttctgtttgttagttttccttctaacagtca

SEQ ID NO: 937080 - DNA, 770 bp, Homo sapiens
gcagaaaccaggcttcaagcccaggcaggccactaccaaatgtgtgctacaccacctctcttgcagagggccaagtgacatgcacaccgttcgtgctttttagcagtgtagccttccaacggcccagctctcttctccttttctcttctcttctccttttctcttctcttctcttctctccttccttccttcctttcttccctccctcccttctttccttccctccctccctccctcccttccttccttccttccttccttccttgcttccttccttccttccttccttcctctcagtctaggtccctaaggcagcttttttcacctccctggccttctcctggtgactgggctaagtggagctggttctcctcccttactcttggagggacaacaaagtccacccttaggwgatggccacagtgagcctgcattcatcagcctgagcgagcaagcaccctttgaagtctccagagtctaggagggtggggggttgggagaggggtgcagagggaaaaggatctgatcctcctgggaagttaagtctcctgagaagtgatgcaggaagattttgaggaggaaagagactggaatctacattcacagtagaggtgatgtaagtgcggcctccaggccccagagcagtggttctcaaccagcctgactgttagaattaaggagaggggagtgttaaaaatataccaaaagtgccacctccagaataattggatcagaatctctgggaatggagctcaggcactgatggtttt

SEQ ID NO: 937081 - DNA, 699 bp, Homo sapiens
gagcagctgagtggaaaatcttgctagtaacaaaccagtactttgaacttaattattaactcacctaaaagaaccccagttattcttcttgccattacagaatagaggctcacaggtatttagtccacgtgttctctaaatgtgactttaaagctggaatatgactggataaacagaaaggagtatagctgttatcccaaatgatgcactataaccatttagcattagaggctttagatccatctgtgaattaagagacaataacttaccaaacactttattctgtttcctttgggagtagttagagcccttacaccaaggccccaccaagaaggatggaggtggtgggacccactttcccagcacccacactgccccatgcttctgtattgtaaccacctcctcctcaccctcagcttcataagggaaaagccaaatgtgctatgatgagcacgatgcatgttttccattggcattgtctccaccacctacccctgtctgtttttggacactgagattgcartttgtagtgtgccagatggtctgactgtagcaaataagcacagagaagtggggcctgagtgaaaccttcctagagattaaataatggaccatgtattgagacatagcaagtgacactccaaggttaaaataatcttcccttttaaattggcattgatttatgtgatgtctgcactg

SEQ ID NO: 937082 - DNA, 464 bp, Homo sapiens
tgttttgctgtgttcattaggaaacatatgttacttagacattcttaagacctcactgatgagaaatttgattctgtaaaacaggtgtgtttcaaactctaaggaccttttctattgctcaaaatcttttctaattgcttcagaatcttaagtagaattaggaaaagccagtggcataactgttccctcctctcactcaaataaataacayagaaaagtctacagggaacttgatgcagtacatgatataaagagacacataaaaaaacttttaaaaagcgtgattaacaggaaattgccaataaacaatgcataaaataaacaaaaattacaggtggtagctcgcacctgtaatcacagcactttgggaggccaaggcaggaagaacctttgagcccagaatttagaccggcctggacaatatagtgataccccatccctacaaaaattaaaaatattagctg

SEQ ID NO: 937083 - DNA, 464 bp, Homo sapiens
tgttttgctgtgttcattaggaaacatatgttacttagacattcttaagacctcactgatgagaaatttgattctgtaaaacaggtgtgtttcaaactctaaggaccttttctattgctcaaaatcttttctaattgcttcagaatcttaagtagaattaggaaaagccagtggcataactgttccctcctctcactcaaataaataacacagaaaagtctacagggaacttgatgcagtacatgatataaagagacacataaaaaaacttttaaaaagcgtgattaacaggaaattrccaataaacaatgcataaaataaacaaaaattacaggtggtagctcgcacctgtaatcacagcactttgggaggccaaggcaggaagaacctttgagcccagaatttagaccggcctggacaatatagtgataccccatccctacaaaaattaaaaatattagctg

SEQ ID NO: 937084 - DNA, 586 bp, Homo sapiens
actttgctgacccagctctggcaaaggccaatgatggccttgaaattgactaatccaatgagtacttttcagtccttccacgatttgacctctccatagcatgcagcactgtcggccacttcaagtcacctgctcactcttgactcccytccttacttctcagcaccctgcaccccgcaccccgtgaatcacctccctctgcccatcttcagatactagagcttcccaggatgcttctcttagcccagttcttttctctagcttcatgctgtgtgcgggtgagctcccttacatctgtaatacaaatagcactccataaaggccccggcctgtcatgactctaactgcccagtgaacatctctactgatattccactcgccacaaatgctaagccagtatgctgaaccaaattcactgtcttcttcaaatttaatttctctcctgaattcctttttctgcacttacctcgcccccatttgcttaatctagaaggctgagagatggctttaagcccttccacctgctcacacctacttgcacttggtcaccaagtccttctaaatatccttggaatctggtaaccta

SEQ ID NO: 937085 - DNA, 654 bp, Homo sapiens
ggagcagaaagtgtatgcatcaggtataagggagaaaatagatttcggaagttataagaaatgtagagagtgagttgagcatagtttgtgatttttagggcctctaaaagtattaaagcagcggcagccgctgcaygcagacatgagggctaggctaaaacagtaaggtcaaattgtttggacagaaaggctacagggtgtggtcctggctgttgtgtaagaattctgaccatgctaaccatgcctaggaaggaaaggagttgttgttttgtaagggattgaggtttgagagattaatcggacacgatcagcagggagagcacgtgtgtttttatgagaattatgccaagataggtaacagatgaggatgaaatttgggcttgactgaagtaatgggggctgtctgtgaagccttgcggcagtacagcccaggtaatttgctgagcctaatgggtgtcagggtcagtctaagtgaaggcaaagagaggctgggatcaaggttgcaaaggaatagtaaagaaagcatgtttgagatccagaacagaataatgggtagtagagggaggtactgaagataggagagtatatgggtttggcaccacggggtggataggcaaaacaatttggtagataaggcgcagattctgaactaac

SEQ ID NO: 937086 - DNA, 654 bp, Homo sapiens
ggagcagaaagtgtatgcatcaggtataagggagaaaatagatttcggaagttataagaaatgtagagagtgagttgagcatagtttgtgatttttagggcctctaaaagtattaaagcagcggcagccgctgcacgcagacatgagggctaggctaaaacagtaaggtcaaattgtttggacagaaaggctacagggtgtggtcctggctgttgtgtaagaattctgaccatgctaaccatgcctaggaaggaaaggagttgttgttttgtaagggattgaggtttgagagattaatcggacacratcagcagggagagcacgtgtgtttttatgagaattatgccaagataggtaacagatgaggatgaaatttgggcttgactgaagtaatgggggctgtctgtgaagccttgcggcagtacagcccaggtaatttgctgagcctaatgggtgtcagggtcagtctaagtgaaggcaaagagaggctgggatcaaggttgcaaaggaatagtaaagaaagcatgtttgagatccagaacagaataatgggtagtagagggaggtactgaagataggagagtatatgggtttggcaccacggggtggataggcaaaacaatttggtagataaggcgcagattctgaactaac

SEQ ID NO: 937087 - DNA, 602 bp, Homo sapiens
ttaagttcctgcaagaatttttcttttgtattcataacttgactattttcccaagaggccaagttttcaggctatctaggctttcagtgaagcttaatcatttctagcttttgatttaaagtaagagatgtgtgcaactcttccttttacttgaaagcttagaggccattgtagggttattaactggcctaatttatttattgttgggtctctgggatgagggaggctagattaggtgtctagttagggcctgcttcctcatagatgaaggcttctcactgtagggtgagagataagagaacggcccgtmggtggagcagtcagagcacacagaacatttgttgattaagtttactgtcttctatgacagatcatggcatcccaaaacaattgcagtaataacatcacagatctcagaccaccatgacagagacaataatcatgaaaaagtttgaaatattgcaagaattaccaaaaggtgacacagagatgaaactgcccctataaactttatgaaatgaatcagggaagaaggaagggggagaaataaaagtcacccacgcttgcagcacatttggcctccatcatgaggtcggcctgct

SEQ ID NO: 937088 - DNA, 583 bp, Homo sapiens
gaggtacagaaacagctggattggttacagattggcgattgccttatttgaacacagtttgaacgctcagcagcgtatgagttgttgaagtttatctgctgggattggccaaaactcagtgattgttacagacgcatactcctaagttaggttttcaatcctgtctacctattaagttaggttgtagttcatccacaaggactcaaatatggaagtacagagtccttctcaggccatatttagtttgctttgacatccccattgagatgactcaactattcggctaagggctgtagacagtgaagaaatgtgactaattgctggatactgtagtatattgagtgtgcaagagcattatatctaaaaaacaatgtrcatactgcaatttaaaatgctttgctgcttaaaaaaaataatgctaacagtcatgtgagccttcaagttgtcatctttttgctgctgggggttcttgccatgatgttgatagctgctgactgagcggagtggtggttgttgaaggctggggttgtgttgaaggctgtggcaattttgtgattggccaccaatggagtttgctgcatca

SEQ ID NO: 937089 - DNA, 582 bp, Homo sapiens
agggtgccaaccccctgcacagttgaaaaaataagttttgattctccccaaacttaactactaatagcctactcctgaacagaagctttcagataacatcaacagttgcttaacacatattttgtataggtattatagagtgtattcttacaataaagtaagccagaaaaaaaaggaaaatgttcttaagaaaatgataaggaggagagattgggtgaggtagctcatgcctgtaatcccagcactttgggaggccaaggcgagtggatcacctgagatcaggagtttgagaccagcctgaccaacaaggtgaaaccgtgtctgtactaaaaatacaaaaattagctgggcgtggtggtgtgcacctgtaatcccarctacttggaggctggggcaggagaatcgcttgaacccagaaggtggaggttgcagtgagccaagatggagccattgcactccagcctgggcaacagagtgggattccatccccccctgcaaaaaaagagaattataaggaggagagactgtatttcctattcattaagcataagtggaccatcataaaagtctttatccttgtca

SEQ ID NO: 937090 - DNA, 660 bp, Homo sapiens
cctcacttccgttttctgtaattcactttcctctttctggccataaatcctctccaaccacgcggcagtgccagagcttctctgaagcgattctggttctatgggctgctcaattcatgaattgttctttgctcagctaaactctgttaaatgtaatctgtctaggttttcttttaacaaagtcaggtaccctagtgtgtttatccactctccacttgagagagatgtaggttgtttccaatttgggcaattatgaataaagccactaaaacattttgtgtgttagtttttgggtgactttaagtttttaatttcagttggacaattgtataaaatgtcaaatttcttcctaagtacttgataacttttgaygaagtaaatggtatctaacttttttttttcatatttgaactatttgttgccgggatagagaaataaaattgagttttgtatagtgacaatctacctagaaaacttgctaaatttgggctgggtgtggtggctcatgcctgtcatcccagcgctttgggaggccaaagctggcagactgcttgagctcaggagttctacaccagcttgggcaacacaaggagacattataatcttatgagaccgctgtagaaaatgcagtccattgttggctaaaatatggctatgtgg

SEQ ID NO: 937091 - DNA, 630 bp, Homo sapiens
aattgtataaaatgtcaaatttcttcctaagtacttgataacttttgacgaagtaaatgrtatctaacttttttttttcatatttgaactatttgttgccgggatagagaaataaaattgagttttgtatagtgacaatctacctagaaaacttgctaaatttgggctgggtgtggtggctcatgcctgtcatcccagcgctttgggaggccaaagctggcagactgcttgagctcaggagttctacaccagcttgggcaacacaaggagacattataatcttatgagaccgctgtagaaaatgcagtccattgttggctaaaatatggctatgtggcacatgaccatatttaattccaatagtttaacaaggatttacttggaatttttatgtacacaaataattgctgcaaattccattattctattaaggaagttccgttccatttttaatttgctaaaagtaattttaattgacttgaagagtattgctttccccacgcaagcactgctcagaagtctcagtgtagacatggagaaagagaacagttggattggtttagattggggtgttttgggtggttgttacggaagcacaacagagcgaggtagtttaggatactagtgaag

SEQ ID NO: 937092 - DNA, 789 bp, Homo sapiens
ctcctttgtatggagggagaaaacagttgaggcatctacgtcagaactaagctggcttagaaactgatacctgcctcacgaggtcaggagatcgagaccatcctggccaacatggtgaaactccgtctctactaaatatacaaaaattacctgggtgtggtggcacgtgcctgttaccccagctactcgggaggctgagggaggagaattgcttgaacccaggaggtggaggtcgcagtgagccaagatcacgccaatgcactccagcctggcaacagggtgtgtctcaaaaaaaaaacaagaaagaaaaagaaackgatgcctgcctcaacataacactgtttattaaccctttgtgccaccactaaaggctccaaatagccttttctccagatgaaaaagcaggtcaaattgtgtcatgaattcagacaagtgagtatcttgaagaaatttttatcaacagccatcttctctaccatctgatggctgacagcatcctgcaatacttatgaagtgttattacactgtgggtactttagtgctcccataagtctttcaatgtatgtgaaattacggatcattgaaacctgtctaatgaggacacagtcctcatgttttggagttaaatctcacaaaagtgataatcatgaattttccttattaagtttcagtctttgtatgtaaattgaagtattaagacaatgagatacagatcaaagttttaattttcgtccctagcctcagatttaatttaaaagtcttaaattatgcagagaattgcatctcttt

SEQ ID NO: 937093 - DNA, 628 bp, Homo sapiens
ttttcccaaatgcctatttattaaatttgtctaatgtttttctcttgacttgactggggttatgagtttttgagaggaagtccacagaagtaaagtgctgctttcctcacatcacatcagaagtacatatgatcaacatgattgatcaccactgatgttgaccttcatcacctggctgaggtcgtatgtgtcagggtcctccactctaaggttactcttctcccccattccatactgtcctcttaggaaggaagtcactatgcttactccacatttaatgagtcaggagttatgcctcacccccttgaggcagagtatctgcataaattatttgaaatttatcagtccaagggacttgtcyctcctcccccatttattaatttattcaatcatttatttgcaatagtgaggactcaggggtatttattttatactttgaatgataatccagcactgctttattttgttgctcaaattgttccagctttggccgttgggagcactctcagttggctcctgtgtttctttgatgtagctccattaatatgcatttgttttttgattgtttttgagtgcctccttattttctggcactacaaaatactccaggctcctcttgcatatttct

SEQ ID NO: 937094 - DNA, 628 bp, Homo sapiens
ttttcccaaatgcctatttattaaatttgtctaatgtttttctcttgacttgactggggttatgagtttttgagaggaagtccacagaagtaaagtgctgctttcctcacatcacatcagaagtacatatgatcaacatgattgatcaccactgatgttgaccttcatcacctggctgaggtcgtatgtgtcagggtcctccactctaaggttactcttctcccccattccatactgtcctcttaggaaggaagtcactatgcttactccacatttaatgagtcaggagttatgcctcacccccttgaggcagagtatctgcataaattatttgaaatttatcagtccaagggacttgtctctcctcccccatttattaatttattcaatcatttatttgcaatagtgaggactcaggggtatttattttatactttgaatgataatccakcactgctttattttgttgctcaaattgttccagctttggccgttgggagcactctcagttggctcctgtgtttctttgatgtagctccattaatatgcatttgttttttgattgtttttgagtgcctccttattttctggcactacaaaatactccaggctcctcttgcatatttct

SEQ ID NO: 937095 - DNA, 628 bp, Homo sapiens
ttttcccaaatgcctatttattaaatttgtctaatgtttttctcttgacttgactggggttatgagtttttgagaggaagtccacagaagtaaagtgctgctttcctcacatcacatcagaagtacatatgatcaacatgattgatcaccactgatgttgaccttcatcacctggctgaggtcgtatgtgtcagggtcctccactctaaggttactcttctcccccattccatactgtcctcttaggaaggaagtcactatgcttactccacatttaatgagtcaggagttatgcctcacccccttgaggcagagtatctgcataaattatttgaaatttatcagtccaagggacttgtctctcctcccccatttattaatttattcaatcatttatttgcaatagtgaggactcaggggtatttattttatactttgaatgataatccagcacygctttattttgttgctcaaattgttccagctttggccgttgggagcactctcagttggctcctgtgtttctttgatgtagctccattaatatgcatttgttttttgattgtttttgagtgcctccttattttctggcactacaaaatactccaggctcctcttgcatatttct

SEQ ID NO: 937096 - DNA, 597 bp, Homo sapiens
aacctggcttctaccatccgccatttgtttaattaattttcgatttcagtatgcacgtatcagaattgttaatgcatatccccatgagaacaaactttattaaatagagtaaggtacaaaactcatatgagagaagaggccttggtgactgaccatagatggggttatcttagcctgcttgtgttgttataaaagaatacttaaggcttggtaatgtataaagaaaataggtttacttggttcatggttctgcagactgtacaaaaagcataggaccaatacctgcttctgatgagggcctccggctgcttctactcatggtggaagggaaaggtgaaccactgtgggcagatcacatggggagagaggaggcaagaggagggaggaggaggttctacactcttcaacaactagctcttgagggaactaagagtgagaactcactcccrtgaggatggcagcaagccattcatgagagatatactcccatgacccaaacctcccagtgggccctacctctgacattggggatgaaatttcaacatgatattgtctttggaggggaggccaaatatccaaaccatagcaatgaatctt

SEQ ID NO: 937097 - DNA, 681 bp, Homo sapiens
cagaatacacattcttctcaacagcacatggagcatgctccaagacagatcatatgttaggccataaaacaagtcttaacaaacttaattagactgaaatcgtatcaagttttttttctaagcatgatggtataaaactagaaattaataacaggagaaaccagcattatcctgatgtcaaagtcccacaaaaacacacaagaaaatggcagtataggccaatatccctgatgaacataggtgcaaaaattcttaacaaaattctagcraagcaaattcaacagctcattaaaaagatcatttactatgatacagtgggattcatcccagggctgcaaggatggttcaacatacacaaatcaataagtgtgatacatcacagtaacagagtgagacaataaccatacgatcatttcaatagatgcagaaaaagcgtttgacaaaattcaacattctttcatgataaaaactctcaatgaattaggtgtagaagcattgtacctcaacacaataaaggccacatatgacaaggtcacagctaacatcatacttaatggtgaaaaattgagagcttttcctcttagatctgaaacgagacaaagatgccaccttcacccaattttaggattgttttttctatttctgtgaagaatgtcattggtattttgatagggattctat

SEQ ID NO: 937098 - DNA, 681 bp, Homo sapiens
cagaatacacattcttctcaacagcacatggagcatgctccaagacagatcatatgttaggccataaaacaagtcttaacaaacttaattagactgaaatcgtatcaagttttttttctaagcatgatggtataaaactagaaattaataacaggagaaaccagcattatcctgatgtcaaagtcccacaaaaacacacaagaaaatggcagtataggccaatatccctgatgaacataggtgcaaaaattcttaacaaaattctagcgaagcaaattcaacagctcattaaaaagatcayttactatgatacagtgggattcatcccagggctgcaaggatggttcaacatacacaaatcaataagtgtgatacatcacagtaacagagtgagacaataaccatacgatcatttcaatagatgcagaaaaagcgtttgacaaaattcaacattctttcatgataaaaactctcaatgaattaggtgtagaagcattgtacctcaacacaataaaggccacatatgacaaggtcacagctaacatcatacttaatggtgaaaaattgagagcttttcctcttagatctgaaacgagacaaagatgccaccttcacccaattttaggattgttttttctatttctgtgaagaatgtcattggtattttgatagggattctat

SEQ ID NO: 937099 - DNA, 643 bp, Homo sapiens
ctatctctgccttgctagggtcttgggtttttataggcacaggacaggaacatggcaggtcacagtggtcttgggaaatgcaacaataatgcctgtcctcacctaggtccgtgtgggtggagccccagccagggaccacaccctcctctacccagcacttcccttcccccttccstatcatttaaagggaccaggctcttcccttcccagcacttccatatcatttcccctctctgaagaagtgcatttaactgccattagaatagggatgatgaccagtcttagctgcttcctgctgacagggggcgttgttttggggaaaatggcagtcagactcctcccagaggtctacctaagggttcctagcaaagcagagccactgttggaggctctggttgcctgaccttttggagtttgatggcttctaggcgtgagagaaaaaaacaagttttataaggttaagtatgcatgggttcaatatatgtattatacaaggaaagaatttagttccaaagattaaacagaaaagaagataaatatactaacaacaacattgtacccgaagctgttccaccctggtgaaagacattcaaccttgtatgggagcagttaaactttagaagaggtaactgttcttgacata

SEQ ID NO: 937100 - DNA, 617 bp, Homo sapiens
tcccggacaagcccccagttgaaataggaaaggttcccttgttcccctcacaggggatgcgatgggggtgtggctcacttcttcagtgccctgctgctcaaacctctaggggagcatttggacaggcaagctgtggggctccaatcccatggcagtgtctaggggtgaatgtttacagctcctgaagctccagtgggcatgtgttacarggtgctcttttagtttgccatctacaggcagcttgtgttaaccagctcagttagaccctctaccttgtcacaaggacagagggctttctgtatcctgtggtttcttgccttgatgtaccagaagaatcagatcacatgtgggcctggagaatgactgcaaggttttattgagtagaaatagctctcagtggatgggggagccagaagggagatggttttcccctggagtccggcagctcagtgacctggctcttctctgaccactccagccaaattcggcatcattttgccagtcgatggcctgctggcatgccggtacctgcctgcgtgccagtgcctatcggcgtgctcttccactggtgagctcttgatgactagccgcttgtgtggtcttccactgatgtgttc

SEQ ID NO: 937101 - DNA, 617 bp, Homo sapiens
tcccggacaagcccccagttgaaataggaaaggttcccttgttcccctcacaggggatgcgatgggggtgtggctcacttcttcagtgccctgctgctcaaacctctaggggagcatttggacaggcaagctgtggggctccaatcccatggcagtgtctaggggtgaatgtttacagctcctgaagctccagtgggcatgtgttacagggtgctcttttagtttgccatctacaggcagcttgtgttaaccagctcagttagaccctctaccttgtcacaaggacagagggctttctgtatcctgkggtttcttgccttgatgtaccagaagaatcagatcacatgtgggcctggagaatgactgcaaggttttattgagtagaaatagctctcagtggatgggggagccagaagggagatggttttcccctggagtccggcagctcagtgacctggctcttctctgaccactccagccaaattcggcatcattttgccagtcgatggcctgctggcatgccggtacctgcctgcgtgccagtgcctatcggcgtgctcttccactggtgagctcttgatgactagccgcttgtgtggtcttccactgatgtgttc

SEQ ID NO: 937102 - DNA, 596 bp, Homo sapiens
tgtacctccctcacaatttgcccacaagacaattctttgtgggccttgagatctttaccctaaaacagttctgttgattttcaccctggcaatgtaaactgctagctggtcttcacaggtgcaggaaagaaagttatccctctgcttgcctaggacaaatgcgtatctgattgcttctctgccctattgtttatgtaaaaatgcagattcactgagccagactaaattgtgtgttcagtgaaagactgatagaggacttaaaagaatgcaaccttttgtctcttatctatctacgasttggaagccgcctttcccactgccccgtccacacaaaccctggaccaaatgcacattggtccagaccgagtcgatatacatcttacatataattattgatgcctcacgtctccctaacatgtataaaaacaagctgtgccccaaccaccttgggcacatgtcttcagggctcctgagactattataggcatgtccttaaccttggcaaagtagactttctgaattgattgaggcctctctctgatattttggattcacatgccccatcctgcttcctgctcttctcttccccagatgtt

SEQ ID NO: 937103 - DNA, 596 bp, Homo sapiens
tgtacctccctcacaatttgcccacaagacaattctttgtgggccttgagatctttaccctaaaacagttctgttgattttcaccctggcaatgtaaactgctagctggtcttcacaggtgcaggaaagaaagttatccctctgcttgcctaggacaaatgcgtatctgattgcttctctgccctattgtttatgtaaaaatgcagattcactgagccagactaaattgtgtgttcagtgaaagactgatagaggacttaaaagaatgcaaccttttgtctcttatctatctacgacttggaagccgcctttcccactgcccygtccacacaaaccctggaccaaatgcacattggtccagaccgagtcgatatacatcttacatataattattgatgcctcacgtctccctaacatgtataaaaacaagctgtgccccaaccaccttgggcacatgtcttcagggctcctgagactattataggcatgtccttaaccttggcaaagtagactttctgaattgattgaggcctctctctgatattttggattcacatgccccatcctgcttcctgctcttctcttccccagatgtt

SEQ ID NO: 937104 - DNA, 588 bp, Homo sapiens
tttttatttctttcaagaacttttcctttgcattcacaagttggctgtttggtgcaagaggcacctatagcttttggcttattttggcttttgacataccttcctcactaagcataataatttctagcttttgatttaaagtgagagatgtgcatgttttccttgcatttgaacatttggaggccactgtagggttattatttggcctaattttaacagtgttatgtctcagggaatagggcggtctgacgagagggagagagatgagggtatagctgacggatggagcagtcagaacacacacagcatttttcarttaagttcaccaccttctatgagcgcatttgtgatgccccagaacaatgacgatcgtcacatcaaagctcactgtgatgtaataatgaaaaagcttgaaacattgtgagaattatcaaaatgtgacagacacgaactgagcacatgctgttgggaaaatggtggtaacagacttgttcaacacaaggttgcttcaaaccttcagtttttaaaaaacgaggaatctgcaaagtacaatacaataaagcaaaataaaacgagttatgcctgtat

SEQ ID NO: 937105 - DNA, 584 bp, Homo sapiens
gtgcggtggctcatgcctgtaatcccagtactttgggaggccaaggcgggtggatcacaaggtcaggagtctgagaccagagtggccaagatagtgaaaccctgtctctactaaaaatacaaaaattagccaggcacggtggcgggcgcctgtaatcccagctactcaggaagctgaggcaggagaatcacttgaacccatgaggcggaggttgcagtgagctgagatggcgccactgcactctagcttgggcaacagagtgagactctgtcttaaaaaaaaaaaaaaaaaaaawtaaccatggtgaagctgaaatatactgtaagcatgattatataccataaacactcaggtaccacagatgagctccgtgctgtagagacaagcaaaggatctaaatctgcagaatgacttaatagaggaatgtggattataaatcacactacactattactgctaagacaaaagtgaaaattccagtaaagcactgacagacaaaatagaaagcagaactgattcagtcatttgggtggagagacttgaatttacaatgagtacaagctaagttggaaagagaagtattt

SEQ ID NO: 937106 - DNA, 578 bp, Homo sapiens
atctccttccatatttgatctgttgctatatgttggttactgagacatatgaagaaaatcctgtctcacaacagatatgcagttggaaagatttatttattattttatttatttattttgaaacagtcttgctctgttgcccaggctggagtgcggtggtgcgatcttggctcactgcaacctccgcttcccaggttcaagcaattctcctgtctcagcctcctgagtagctgggactacaggcatgcaccaccatgcctgactaatttttgtattttcagtagagacagggtttcaccatgttggccaggctggtctcgaactcctgacctcaagtgatccgcctgccttggcctcccaaagtgctgggcttacaggcgtgaaccaccaygcctggcctatttattattattattatttgtttatttttttgagacagagtctcgcgctgtcacccaggctggagtgcagtggggcgatctcagctaactgcaacctccgcctcccaggttcaagtgattctcccgcctcagcctcccgagtagctgggactacaggcataagccatcacacccagc

SEQ ID NO: 937107 - DNA, 650 bp, Homo sapiens
tcctttcctggcctctcctctgcttgatctccaggttgtagtggcccaatgcttggtcctcgaacaattcctttttcacttttctattctcttgcttggtgttccagcacaataatttaaaataccatctatatgttaatgcttccacgagtattcagccagtcctaatttctttgaatctcagactatatcccactgcttacttgacatctccaactggatgtctaagaaatgtctcatacagtatttagtaaaatcaaatcaaagtgaagctaaaagtataaaactctttaatttccatttcactgctcccagtccatgcttctttctctagtcattgtgatcttcctcaggaaattgtactgtcatccacccattgctcaagccccaaattaaatgccccaaatccttgatttttcttgtctccttattcctcacaascaatcgtaaagaaaaagtcttgttgacgctacttctgaggcatgccctgaaggcttctccagctcttcatttccacttctagcacagcttctctgctttctccagggctaccacagtagcctcataagtggtcttcctgctttcacccttgccccctgaaatctgtccagcactcgtttgcttctacactgattggtgctttctgcctc

SEQ ID NO: 937108 - DNA, 610 bp, Homo sapiens
tatttctgcatttccaactgaggtccccagctcatttcactgggactggttagacagtgggtgcagcacatggagggcaagccaaagcagggtggggtgtcgtctcacctaggaagtgcaaggggtcagggaactcccctagccaagggaagccatgaaggactgtgtcgtgaagaatggtgcactccagcccagatactacgcttttcccatggccttcacaactggcagaccaggagattcccttgggtgccttcaccatgagggccctgggtttcaagcacaaaactgggcagccgtttgggcagacaccgagctagctccagtagttttttttcataccccagtggcacctggaataccagtgagaccaaaccattcactcccctggaaagggggctgaagccagggagccaagtggtctagctcagtggatcccacccccatggagtccagcaagctaagatccsctggcttgaaattctcactgccagcacagcagtctgaggttgacctggggcactggagcttggtggggggagggttgtccgccattactgaggcttgagtaggcagttttcccctcacagtataaacaaagcagctgaga

SEQ ID NO: 937109 - DNA, 761 bp, Homo sapiens
aattgctcactagaataaccagtttagaaaagaatataaatgacctgatggagctgaaaaacacagcacgagaacttcatgaagcatacacaagtatcgatagccaaatcaatcaaatggaagaagggatatgagagactgaagatcaacttaatgaaataaagtgtgaagacaagattagagaaaaaagaatgaaaagaaatgaacaaagcctccaagaaatatgggactatgtgaaaagactaaacctacgtttgattggtgtacctgatagtgaaggggagaatggaaccaggttggaaaacactcttcaggatagtatccagaagaacttccccaacctaacaagagagggcaacattcaaattccggaaatacagagaacaccacaaagatactcctcaagaggagcaaccctaagacatataagcgttagattcaacaaggttgaaatgaaggaaaaaatattaagggcagccagagagaaasgtcatgttacctacaaagggaagcccatcagacttaacagtggatctcacagcagaaaccctacaagccagaagagagtaggggccaatattcaacattcttaaaggaaagaattttcaaaccagaatttcctattcagccaaactaagcttcaaaagcgaaggagaaataaaatcctttacagacaagcaaatgctgagagattttgtcaccactgggcctgccttacaaaagctcctgaaggaagcactaaacatggaaaggaacaatca

SEQ ID NO: 937110 - DNA, 610 bp, Homo sapiens
ccagacttgaagtaaaataaaattaaaaaaaaaagcaggttgtgtacagcattcactacactgaaggtaagctaaaccatcaacatctctggtgttttaagatgtcattttattggaacaactgacaaatgaggaatgttagttttgtggcagaattcctagcatgcgtgataattgatcttgtttttcttttytggcattgcaactgtggcatagttacaatttctgttctattcgtcacatttaaaattggaagagaacacacttgatggatagagtgccttcagtgtactgtttcttattaactttacttttaaaaaatcaacttgctatagactgtatatacattttgttaaatacagttcctagtgacatagaaacactgcatacttttcatttactaattacaaatgttgaggcctaattctgaaagtcctcatatttaaaggttagacagacagggtaatgaaatttttaagtatgtgtatgtcattttgaaagtgtactgctttatggtaaaagtgttttaatttgctcattgttttcatcatctgtgatcatgttgtctttcaatacaggcataaaccttctgctcttgaacaaagcagct

SEQ ID NO: 937111 - DNA, 587 bp, Homo sapiens
ctttcataggctagcattgagtatctgtggcttttctaggtatgtgttgcaagctatcagtggatctaccattctggggtcttgaggatggtggccttcttcttataactccaccaagcagtgccccagtggggactctgtgtaggggctctgaccccatgtttcccttttacactgccctaacagaggttcgccatgagggctctgcccctgcatcaaaattctgtctggacatccaagtacttccatacatcctctgaaatctaggtggaggttccaaaaatctcaattcttgacttctgtgctcctgcaggatcaacaccacatagaagcagccaaggcttggggcttrcaccctctgaagccatggtctgagctgtactgtggctccttttgactatggctgcagcgtctaggacacagggcatcacgtccctaggctgcacacaggagtggggccctgggcctggcccacagaaccattttttcctcctaaacctctgggtctgtgaatggtaggggttgccgtgaaggcctctgacatggccaggagacattttccccattgtcttggggattaacattcg

SEQ ID NO: 937112 - DNA, 743 bp, Homo sapiens
cagtcttcatcttagggcatcgctcttcctcacaccacgaatctgaacatgcctctctcttgcttacaaatgtctaaggtccccactgcctgctggagagaaaacacactcctttgcttagcccacaattctccatttcacttgacccctgcccacctctccaacctaactrgcttacttcctagtctacctgaggctgcaatcacactgaggaactcacaattccaaacatacaagaggctgcctcttaacacagcacttagacacgtgctgttccacctcccttcagactatctttcagccttctgccagcagtaaaacttataaattttttaaataatttcaatgtagttttcccgccttcaaataaacatgtctgccctcatggtttcggtaacgagactcttttcttgcctaaggcttccggtgttatcattaccatgtccacataaccccatctgttctccattgggttctcagccctggactctgagcttctggaagcagaatggagcctgatttgtctctgagactccaatttccatccaaagatacagcacataggaggctccaaggatcgtgaatcacatgaacaagtgatattcttactctctgcagacctggaaagctggcagagtcattccacgatgaaacatttgtagagtcataggccttgttagcctcatctccacggggacacatatcaacatatcatctttcataatataaatatacagtcggtc

SEQ ID NO: 937113 - DNA, 468 bp, Homo sapiens
tcaagataacttgaggtcaggagttcaagacctgcctggccaacatggtgaaaccccatctctactaaaaatacaaaaattagccgggtgtggtggtacacacctgtaatcccagctacttgggaggctgaggcaggagaattgcttgaaactgggatgtggtggttgcagtgagccaagatcgcaccactgcattccagcctgggtatcagagtaacyctgtctccaaaaaaataaataaaataaaatgggcatgttatgtataacatacaggtaataattaagtagatttactaagtctccttaattactagctgggcaataatagtacccactttcttggaatgttatgaagataaggtatgtaaagcatctgacacagagcctagcataggaaactttattttcccttcccagtcacatggcttttatttctgaagattcttgtagagagcaggccaatgagag

SEQ ID NO: 937114 - DNA, 605 bp, Homo sapiens
aaggtgggtaataacaaactcctccgagctaaaggaatgtgttctaacccaatgcaaggaagctaagaaccttgaaaaaaggttagaggaattgctaactagaataaccagtttatagaagaacataaatgacctgatggagctgaaaaacacagcatgagaactttgtgaagcatacagaagtatcaatagccgaatcaatcaagcagaagaaaggatatcagagactgaagatcaacttaatgaaataaagcatgaagacaaggttagagaaaaaagaatgaaaagaaatgaacaaagcctccaagaaatatgggactatgtgaaaagaccaaacctatgttacattggtgtatctgaaagtgataggcagaatggaaccaagctggaaaacactcttcacgatattatccaggagaacttccccaacctagcaagacaggccaacattcataytcaggaaatacacagaacaccacaaagatactccttaagaagagcaaccccaagacacataatcatcagattcaccaaggttaaaatgaaggaaaaaatattaagggcaaccagagagaaaggtcaggttacccacaaagggaagccta

SEQ ID NO: 937115 - DNA, 693 bp, Homo sapiens
atcttcaacatacaaaaaattattctctaactaaatttgcaactctttgattacagaaagccaagttggaaatgagcgagaaaattcaatcagtattgatacactattacaaaatattgatgtattttaaattccatgccaattagtctagatagtttcactcagttgttactaaacaaagaaatccaacacactcractagtttacggcatgttaatttcaatgtgtacccttactttcaaaaatcaatcccatatttacgacacgacttagaaacttgagagtgaaagggatcaattagataattatgctaagattctctataaaatattaacatcactaagaaaagttaaatagagagcctactattaaaaactacttaagcagaactaaattttttttaaatgtagggagacattttaaaagactaaaagagaacacactataatattagtaattttattattattttttttctatttttttgagatggagtttcgctcttgttgcccaggctggagtgcaatggcgcaatctcggctcaccgcaacctccgtctcccaggttcgagcgattctcctgcctcaccctacctagtagctgggattataggcatgtgcctccatgcctggctaattttgtgtttttttttagtagagatggggtttcttcatgttggtcaggctggtctcg

SEQ ID NO: 937116 - DNA, 596 bp, Homo sapiens
gtgcagtggctcatgcctgtaatcccagcactttgggaggctgaggcgggtatatcatttgaggtcaggagtttgagaccagcccggccaacatggtgaaaccctgtctccactaaaaacacaaaaatcagccgggcgtggtgatgcacacctgtaatcccagctacttgggaggctgaggcaggaaaatcgcttgaacctgggaggtggaggttgcagtgagccaagattgcatcactgcactccagcctgggcaataagagcaagaattcgtctcaaaaaaaaaaaaagaaaaggaaaagaaagaaagtatacccctaccaaatctcatgttaaattrtaattgccagtgttgaagttggggcttggtgggaggtgtttggatcatgggagcagattcctcatgaatggcttgggcgatccccttgatggtgagctctctgagttcacatgagatctggtggtttaaaaatatgtagcaccccctccccacctccactttctccctttcgttctcattctcaccatgtgatgtgcctgttccctctttgccttccaccatgattgaaagcttcttgaggcctccccagaagcac

SEQ ID NO: 937117 - DNA, 596 bp, Homo sapiens
gtgcagtggctcatgcctgtaatcccagcactttgggaggctgaggcgggtatatcatttgaggtcaggagtttgagaccagcccggccaacatggtgaaaccctgtctccactaaaaacacaaaaatcagccgggcgtggtgatgcacacctgtaatcccagctacttgggaggctgaggcaggaaaatcgcttgaacctgggaggtggaggttgcagtgagccaagattgcatcactgcactccagcctgggcaataagagcaagaattcgtctcaaaaaaaaaaaaagaaaaggaaaagaaagaaagtatacccctaccaaatctcatgttaaattgtaattgccagtgttgaagttggggcttggtgggaggtgtttggatcatgggagcagattcctcatgaatgrcttgggcgatccccttgatggtgagctctctgagttcacatgagatctggtggtttaaaaatatgtagcaccccctccccacctccactttctccctttcgttctcattctcaccatgtgatgtgcctgttccctctttgccttccaccatgattgaaagcttcttgaggcctccccagaagcac

SEQ ID NO: 937118 - DNA, 633 bp, Homo sapiens
aatttgttagtcctacaaaggcagtctagtctccaagcaagaaggatgattgttttggaaacgggctgttattgtctttgttttaaacgataaactaaggccagtcccggtggctcacacctgtaatcccaccactttgtggggaggaggcaggcgcatcatgaggtcaggagttcgagaccagcctggccaatatggtgaaaccccgtctctattaaaaatacaaaaattagccgggcgtggtggtgggttcctgtagtcccagctattcagaaggctgaggcagaagaactgcttgaactcgggaggcagaggttgcagtgagccgagatcacaccactgcactccagcctgggcgacagagcgagactctgtctcaaaacaaacaaacaaacaaacaaaaaaaaaactataaactaagttactctcaaagttagttcagcatacccccaggaaygaacaaggacagctttgaggttaaaagcaagatggagctggctaggtcaaatctctttcattatctcagttacaattttgcaatggcaggtttctacaataggtggctagtcaggcatgagcagggcaggagagagtttcccccacccaccagaaatgtcaggccaccatcagatt

SEQ ID NO: 937119 - DNA, 561 bp, Homo sapiens
atgtagaaagtaatattatcctctccctccctggatattgtgaacaatatcacaggagggtgtacaccccctgcagtattgaggttaatatcattttctttccacctgattactacgaacaatatgacagaacggtgtacaccccctgcgatattgggggcgatatgctcccccccccaccgggtaatagcaaaaatatcacaggtgggtgtacaccccctgcaaaattgggaataatatcatcctttcccygccttgatattacaaacaatatcccgagggggtgtacaccccctgcgatattaagagtaaaaacatactctcacccctggatatcatgaacaatattacaaaggggtgtacacgccctgcagtgttaaaagtaatatcatcctctttccccctggatattatgaacaatatcacgaggggtatacaatctttgcgacattgggagtaatatcattttctcccccagtgcatattacaaacaatatcacagaaggatgtacaccctctgtgatattgggaatacttttatgctcccccctgaaaaactat

SEQ ID NO: 937120 - DNA, 561 bp, Homo sapiens
atgtagaaagtaatattatcctctccctccctggatattgtgaacaatatcacaggagggtgtacaccccctgcagtattgaggttaatatcattttctttccacctgattactacgaacaatatgacagaacggtgtacaccccctgcgatattgggggcgatatgctcccccccccaccgggtaatagcaaaaatatcacaggtgggtgtacaccccctgcaaaattgggaataatatcatcctttccccgccttgatattacaaacaatatcccgagggggtgtacaccccctgcgatattaagagtaaraacatactctcacccctggatatcatgaacaatattacaaaggggtgtacacgccctgcagtgttaaaagtaatatcatcctctttccccctggatattatgaacaatatcacgaggggtatacaatctttgcgacattgggagtaatatcattttctcccccagtgcatattacaaacaatatcacagaaggatgtacaccctctgtgatattgggaatacttttatgctcccccctgaaaaactat

SEQ ID NO: 937121 - DNA, 770 bp, Homo sapiens
aatgaacaaaattacagggaatgtgtacacgcccagcgttattgggagtaatatcaaactcgcccttcttaaatattagaaaaaatataaaagggggtgtgtaaaccccttgcaatattgaaagtaataccatcctctctctttctggatattaggaataacatcacagaagggtgtataccctcctcgatattgggagtaatgtaatcctctcttttcctggatattaataacaatatcacggtggggggtgtaaatctccttcgatattggtagtaatatcattctctacacccctggatattaggaacaatatcacagaaaatgtgtacaccccctgcgacattgggagtaatatcatcctctctgccrtggatactagaaacaatatcacggcggggggacaaggtttacatcccctgcgatattgtgagaaatatcatattctcccatactggatattatgaacaagatcatagtggaggtgtacatcttctgccatattgggagtaatatcatccttttccaccttggatattaggaacaatatcatacgtttggcatacacacgctgatatattgggagtaatatcatctgctccctttctgaatattaggtacaatatcacagtggggttgtaccctccctgaaatattgagagtaatattatcttcttcccctttgaatattaaaacatatatcacagagggggtgtacaccccctgtgatattgggtttaatatcatctgctacaaccacctgtgatatt

SEQ ID NO: 937122 - DNA, 756 bp, Homo sapiens
cttgagtgtgcagcagaattactttaagggcacatctcatcacatagaatgttaaatacacatgtactctagggtttatatttaatataaattatattttcagtgcttcaccaaagacattcttcaatgaaactgactttctttttttaagtacaagtgcatggtagtgaagaatatagtcactgccggtacagttcattgccaccgtcttgatttgtgctaaggcccaataattttacacacaattggtctagcacagataatgaatttatcaacacagttggcccaggataaacaatcagaaaagttattcaacactttgattattttggtaccacttgtgtttcctatcaggcgttgacataaaagaatattttcttggatgattagttggtgctgacaccatataaatgcaacaaaataagccctgccacatctgtacattcattcatttgtaagacaaaaatgtgtttgtagacaaaacattaamttaatctttacattttcagttaaatccttaaatcagtgaatttctgtataattggaaatggcaatgccatggttcttttataaactttccatccagcaggcattcagcaatgtcaattatataaggctatactagtttctaagctattgtgtactttattggccaatgcgatataataacttagcctttaaaatgcttcagtgagtggccatttcctttctagtctggaaagttataaaaacaatatttggtgtttaaagcattca

SEQ ID NO: 937123 - DNA, 771 bp, Homo sapiens
tttcaacaaaatcaccactaacagaaaccagaaaacatcaaaagaaaaattatttttacagattattttccacatagaattccctctcagtgttagttgaaataaatatgagttttaagagagagagaacagataaaaatatttttatatctcttgttgtaaccatgcacaggtacagaaaaagttataaaaggagacatgatctccacgttacaagatttgggaaaagtaaaagaaatataaagggaaaaatccaccaaatccaatatcattagctataaatcagaggcttaaaagatattaatgttgtwgaattaaaaaaaaaaaccagaaatgtgacttaacaatagataactttaaagcaggggtcaacaaattacagaccagaggccaaatctggtccaccaccatttttgtaaataaaattttattggaacttgggccaggcacggtggctcatgcctggaatcccagcactttgggaggccagggcgagcagattaccgatgccaggagttcaagaccagcctggccagcatggtgaaaccctgtccctactaaaaatacagaaattagccaggtgaggtggcacatgcctgtaaacccagctactcgggaggctgaggcaggagaatcgcttgaacctggaagggagaggttgcaatgagccgagatcacgccactgcactccagcctaggcgacagtgaactccatctcaaaaagaaaaaaaaattattggaaccctaccatgcctatttattcactactgc

SEQ ID NO: 937124 - DNA, 763 bp, Homo sapiens
agggaaccagttaagtatacaatggaatggaacgaaggactgtgcaggaataaaaaaaagaacaaggaaaagctttatgaattatatggtgttcatatgttatgttacattacaaccacgttatattatgttaaaaccagtatcagggcgggcgtggtggttcacgcctgtaatcccagcactttgggaggccaaggcgtgcggatcacctgagggtcaggagttcaagaccagcctggccaacacagtgaaaccccgtctctactaaaaatacaaaaattagccaggtgtggtggcaggtgcctataatcccagctactcgggaggctgagggaggagaatcacttgaacccaggaggtggaggctgcagtgggccaagattgcaccactgcactacagtcaaggtgacagagtgagactccatctcaaaaaaaaaaaaaaaaaaaaaawagtgtccaaacaccacacagaatattttcacttctaggagaaaaaatataaccttatgatgaagggatcaggctgtcactatgtaatctaatcttagaatcactaattgggaaaaatcggataataggtttctcctaacgtgatataacatgaaatacataacatcatttatggtgtattccagctcaaaacgtttaagtttaacctattgagactttagatctagcttcccaattactactagaattcagcagaggcaggaataagttaaaagatactataaggacacaaccaagtgagcattcctggatt

SEQ ID NO: 937125 - DNA, 811 bp, Homo sapiens
gtattatgatcgtacgggacgcctgttgtacacacagtctatcattgatggaagcatcgttatatggcacattactgcactgtaaaaagacaccaaacttcggccggcgcagtggctcatgcctgtaatcccagcactttgggaggctgaggtgggtggatcatgaggtcaggagattgagaccatcctggctaacacggtgaaaacccgtctctactaaaaatacaaaaacttagccaggcgtggtggcagacgcctgtagtcccagccacttgggaggctgaggtgggagaatggcatgaacctgggaggcagaggttgcagtgagccaagatcgcgtcactgcactccagcctgagcgacagagcgagactccatctcaaaaaaaaaaaaccaaacttccaagactcaagaatgacgacattctactcccccataaatatatatacctactatgtacccacacaaattaaaaataawttttttttaaattacaacttccacacaaagtgctaactcaggtactttgaattaattaccttttcattttcagcagttagcttcttgttttcatcaaacagcatcgctctttctcgttcgtatttatcttttattgtacctactgcctcctccatctcgttatgcctgccaaggtgagcgagaaacagttttaaaagctcgtaacttcactgatattcgtatctatggcgtgggtatcagcttgcatcttctgaactgagaagctcatgaaaacctaccgttctcgctttgacttttctaacttatcttttaacatcaagatttctttctg

SEQ ID NO: 937126 - DNA, 311 bp, Homo sapiens
gaaagtgaaacccgaagccaagtacctacatcccagtttaacttgttttccaccaatccctcttcctaaggagccaggaggcaccaattaagctaaaagggcccttttcaatcccggcatcgaggcagtgggacaaaacrggtccttcagatggggcgattaatgtgcacagttcagcgtcacaagtatgtccatgttacatagaaaagaattaactgaacaaaacgcagacaaaaccagaataataaatttgagtgtctctgaaatgtgtacgagacgtgcatttatgtattttcatgtagttatttata

SEQ ID NO: 937127 - DNA, 581 bp, Homo sapiens
caaaggacatgatcttgttcttttttatggctgcataatattccatggtgtatatgtaccacattttcttatccactctatcattgatgggtatttaggttgattacatatctttgctattgtgaataatgctgcagtggacatatgcatgcatgtgtctttaaaatagaatggtttctcttcctttgggtatatatccagtaatgaaattgctgggtcgaatggtattttatccctaagtcttggagtaattgccacactgtctttcacaatggttgaactaatttactctcccaccaaaagtgtaaaagcattatttttttctccacaatctcgacagcatctgttcttttttgaccttttaataayagacattctggctggtgtgagatggtatctcattatggttttgatttgcatttctctaatgatcagtgatgttgagctctttttcatatgtttgttgtctgcatgtatgtcttgagaagtgcatatattcaggtcctttgcctactttttaatgaggttgtttttttcttttaaattagtttgagttccttatagatgctggatattagacc

SEQ ID NO: 937128 - DNA, 609 bp, Homo sapiens
aacacttgctttttatgttctggctggaatgtgttggtgagggaatgagtgttttagaaaaggatataattatacctcatgctaaatgacgagttaatgggtgcagcacaccagcatggcacatgtatacatatgtaactagctggcacattgtgcacatgtaccctaaaacttaaagtataataatataataataatatagtacaatattaaactagaaattttccattggtataaaaaaaaaagaaaactgaaaaaaaaaatccactgactgcctgtcttaacctgctacatttgatacaacaatgatttgaaacatcagcagcatttactttctttctttctgttttctttttttttttgayggaagtttcactcttgttgcccaggctgaagtgcagtggtgcaatcttggcctactgcaacctccatctttcagtttcaagtgattctcctgcctcagcctccccagtagctgggattacaggcacccgccaccacgcccagctaatttttgtacttttagtagaggcgcggtttcaccatgttgcccaggctagtctcgaactcctgacctcgtgatccaccctccttgaactcccaaagtgc

SEQ ID NO: 937129 - DNA, 578 bp, Homo sapiens
gccccacatcaagtgcatgagaattttatgactcatgatttctagagagggaaaaatgaaattaagatggactaccagcttcccaatcattttagattccctggcaggagacctgtccttacttcaacccacagaaatcaccaacagtgtctgaagggaggaatatccctgagaatcaycctaaacaaaggagggaggtaggactaccatcccctgctctggaaactctgctctataactctgctaaaggagttgccaaatcagagtggctgttcagaagcatcacattgtagaaagtttgttccacaggtcccctgaacacacatctgtagccagccttcccacactaatggaatacccgcttagggaccttcccattctgaccttcagcattctgattgtttactagaactgagacaaacctaggctttaaggccatcaagtgctgaaaaggagacagtgaccttgttggggtaaaaataaaaacatcaacaggcaaattacaaaaaaaaaaatctaagcaaacatatcctataaaaaacaaaacagacagcaaacactagaagaagtaactaatt

SEQ ID NO: 937130 - DNA, 547 bp, Homo sapiens
ggagcctgtgccctgcaaagctacaagggtggagcttcccaaaagcatagggacccacctcttgcatcagcataacctggatgtgagacatggagtcaaaggagatcattttggacctttaagatttgactgccctgctggattttggacttgcatggggcctgtagcccctttgttttggccaatttctcccattcggagtggctgtatttacccaatgcctgtaccttcattgtatctaggaagtaactaacttgcttttgattttataggctcataggcagaagtgacttgcattgtcttgaatgagacttccgacattggactgaggacctttgagataactctgaaatgaatyaaggctttgggagactgttgggaaggcaagatttgcttgaaatgtgaggacatgagatttgggaggggccaggggcagaatgatgtggtttggttgtgtccctgcctgaatctcatcttgaattctcacatgttgtgggaagaacccagtgggaggtaactaaatcatggtggcaggtctttcccatgc

SEQ ID NO: 937131 - DNA, 568 bp, Homo sapiens
ggccagcctaaaacagtaaggtcaagttgtttggacaaagaagctacaggacgcaatcccggtccttgtgtaagaattctgactgcacagccctgcacttcggctgtgtgtaatgaaaagggttgggatgagtcaggaagagctagggtggggacagtctctaaagctgtcttcaaggaatggaaagatgagtggggaaaggatttaggatctatggggtcagctaggtttccttttgtgagtttatgtaatggttttgttaggatggcaaaaccaggtatccaaaggcaaaagtatccaaccatgcccaggaaggaaaggagttgttgttttgtagaaggtgctgtagtttgagagatcagttggacactatcrgcagggagagcacatgtgtttttatgagaattatgccaagataggtaacagatgaggaagaaatttgggcttgactgaagtgatggaggctatctgtgagggcttgcagcagtacagcccaggtaatttgctgagcctgatgggtgtcagggtcagtacaagtgaaagcgaagagaggctgggacgaggggtg

SEQ ID NO: 937132 - DNA, 469 bp, Homo sapiens
gttcttcccaacttgatctatagattcaaggcaatcttattcaaaatcccaacaagttatttcatagatatcaataaattggttctaaagtgtatagggagagataaaagacccagaatagccaacaaaatattgaaggagaagaacaaaggtaaacgactcatactacctgactctaagacataatataaagctacagtaatcaagacagtgtagtactgacaaaagaataggcaaatagatcaatggaacagactagagagccagagaatagacctacaccaatagagtcagttgacctttgwcaagggatgaaagacaacacagtggagaaaggagtttctttaataagtgttattggaaaaagtgagcattcacatgcaaaacaaatgaatctagtcacagactttatacccttcacaaaaattaactcaaaatgaatcatagacctaaatgtgaaacataagat

SEQ ID NO: 937133 - DNA, 673 bp, Homo sapiens
ttggacatggagccaagcaaaaccctgcttagagcatgtggcttttggtcttctgtgaggcaaacctcacaaaggctgtcttccgcagaagcccaaaggaggcaccagcagccacatttttctggaaagactataattttaaatcaaatcataatcactataccaattatccgaagagataatttttttaggatctttggggttctttctgcctcccccgcccctcaaatttcagttttatttctaaaaatgaagaaattctccaattaacttccttgtattttttactgtaaaaattcatcctgaaaatcagtgtagtaaaagagatacgtacggctgcttcctttgaccaggcaactgtgttatgtttgatactggcagtggagtggtccttgggaacccacatgaacgtgtgtgtctcaggtcttcaaagtaaccscccccccccaatacatttcaaaactccaagttgagagatctggtttcctgtgttttgggagtaggataagtgaggtaacaccttccaaattcagtgagttaaaataataaaagttcatttctcacttgagttgggtaggagaactcagctccactcagtcattcagggatccagcctcctcccattttggagttccaccaactgttagggcctgagagttatcccctggatatt

SEQ ID NO: 937134 - DNA, 468 bp, Homo sapiens
cagactttgggaacatggtgtgaccctactaagtaatgccttttatgcttagaactgacacaatgagtccattgaaaagcaagtctaaaaatggccgtatgcattgctgaattgcagcatgggcgaaattcccaatattaacattttctatcacccaggttaagtatctgattgataaagactagactttgctaataaacatggtatatctggaagatattcaaagatttggagatcccctaccctctagactctgaacacttcccattttatctcccccactgccatcctcatmgacgctactctctcttcattaataatgggctggctaggcgtggtggctcacgcttataaatcccagtactttgggaggccaaggcaggcggatcacttgaggtcaggaattctagaccagcttagccaacatggtgaaactctgcctctactaaaaatataaaaaattagcca

SEQ ID NO: 937135 - DNA, 712 bp, Homo sapiens
aaaaggctgcactgtaaaacctcgtttaatttacacttctctcaattcgtgtttttttgtttgtttgtatttatatttttcatagagacagggtttcaccgtgttggccaagctgttctcaaactcctgacctcagatgacccacccaccttgacctcccaaagtattgagattacaagcatgagccacagtgccaggccaatttgtgtttttaagatttgatttttgtgtcacaacttcttggtctcagtgttggcaccgcggtctggacctctcttgggtgtgaactgaagctggccaggccttgttgacattatctgtgttgtttgtgacacggataattcacttcagttttggaacatttgttgcatgccagatgtttatttgttcttcaaccataatgaagggtagaattgaggtaaacttagaagaattaattcattcatgtcttaaaaattatgtgttgcttttctgttctgtgtcagrtgctgccctaagtcctggttaaaagtggccagaacctcatggagctgccattgtaggggcagagacaggcgggaaggcagggaatgagaggagagaggaagggagggaaggtggctgtagaccaatgccaagtgcaactaccaagcaaatgcatagcaggggaggaagggaaagaggacggtgtggggatttcagacagcattagggacatgcacaggtgctgccc

SEQ ID NO: 937136 - DNA, 484 bp, Homo sapiens
cctcacttcaccgtcctgtgactcagattgggttagcaaaatgtagtggcatcttttggcacaaacgccgtggagcaatgttgcatgatgacatgtaccacacagcttgatggtttcacctccatcagaaacaccccagagtggccgggcatgtggctcatgcctgtaatcccagcactttgtgtggccaaggtgagtggatyacctgaggtcgggagtttgagaccagcctggccaacacggagaaatcccatctctacttaaattacaaaaattagctgggcattgtggcacgcacctgtaatcccagctactcaggagtctggggcaagagaatcgcttgaacccaggaagcagaggttgcagtgagctgaaatcgcaccactgcactccagcctgggcaacaaagcgagactccatctcaaaaaacaaacaaacaaaaaaaaacaacaaaaaagaaacaccccagagctattgtggtaac

SEQ ID NO: 937137 - DNA, 484 bp, Homo sapiens
cctcacttcaccgtcctgtgactcagattgggttagcaaaatgtagtggcatcttttggcacaaacgccgtggagcaatgttgcatgatgacatgtaccacacagcttgatggtttcacctccatcagaaacaccccagagtggccgggcatgtggctcatgcctgtaatcccagcactttgtgtggccaaggtgagtggatcacctgaggtcgggagtttgagaccagcctggccaacacggagaaatcccrtctctacttaaattacaaaaattagctgggcattgtggcacgcacctgtaatcccagctactcaggagtctggggcaagagaatcgcttgaacccaggaagcagaggttgcagtgagctgaaatcgcaccactgcactccagcctgggcaacaaagcgagactccatctcaaaaaacaaacaaacaaaaaaaaacaacaaaaaagaaacaccccagagctattgtggtaac

SEQ ID NO: 937138 - DNA, 484 bp, Homo sapiens
cctcacttcaccgtcctgtgactcagattgggttagcaaaatgtagtggcatcttttggcacaaacgccgtggagcaatgttgcatgatgacatgtaccacacagcttgatggtttcacctccatcagaaacaccccagagtggccgggcatgtggctcatgcctgtaatcccagcactttgtgtggccaaggtgagtggatcacctgaggtcgggagtttgagaccagcctggccaacacggagaaatcccatctctacttaaawtacaaaaattagctgggcattgtggcacgcacctgtaatcccagctactcaggagtctggggcaagagaatcgcttgaacccaggaagcagaggttgcagtgagctgaaatcgcaccactgcactccagcctgggcaacaaagcgagactccatctcaaaaaacaaacaaacaaaaaaaaacaacaaaaaagaaacaccccagagctattgtggtaac

SEQ ID NO: 937139 - DNA, 768 bp, Homo sapiens
actttatataaggagatttttcttggattacctgggtgggcctggtgtaaccacagggtctctacgagtggaagaaggagccagagttagagtcagagagggagaagacactaggagaaaggtccaagtgtgagaagaatccagcctgcacttgctgactctgaccatggaggaaggggccatgagccaaggaatgtgggcagctctagaagccgaaaaggtgagaagtggattctctctcagcctccrgaaggaacgtagccctgacggcatgcagatattagcccaggcagacttgtgtgggattttgaacatacagcattgtaagataataactgtgtgttattttaagccactaaatatgtggtgatttgtaatagtagccataggtaagtcatacagaggggaaggcatttttttttcgagatggagttttgctcttgttgcccattctggagtgcaatggtgcgatcttggctcactgcaacatccgcctcccgggtttaagcaattctcctgcctcagcctcccgagtagctgggactacaggcatgtgccaccacacctggctaattttgtatttttagtagaaatggggtttctccatgttggctgggatggtctcgaactcctgacctcaggtgatctgcttgcctcggcctcccaaagtgctgggattacaggcggaaggcatattttaagctccatgtctgattgttcatccctggcactcatcgcctggtacaggctcattaacgatttgtggaa

SEQ ID NO: 937140 - DNA, 564 bp, Homo sapiens
gtctatcatcatccttgctcttcctgtgttgagttttctgttccctgtgtcccgcatcttggtctttgtgctttattcctttgctctgctggagcacatcctgccaaagcttcctaaagaagatgcatgggtggttcactttttgagaccaggtcgttggaaaaggtttccttactcccatactgttacacaacttgggtctgcctgctcagcacagtaagaccagatatccacactgaggcttcrcagcagtagaaaggaagccatttatttgcagggcaccatgcagggaggaccaggaagcaaatgctcaaatcctgactcccctgatggcttgtgggtaagggtttttagaggtggggtacatttcaggaaagtggaagctacaggcataatcatgaatcaatacatagagattacacattggttttggccttgaagggtgggatattgtgaaggaggggtggggcttacaggtaggttcaaagatgttctgatttgcaattggttaaggaagagaagctttgtttccaactttggggtccgtagaaaagaatattatct

SEQ ID NO: 937141 - DNA, 485 bp, Homo sapiens
ccagcatggtgaaaccccgtctctattaaaaatacaaaaattagctgggcatggtggtaggcacctataatccccgctactcaggaggctgaggcaggagaatcacttgaacccaggaggcggaggctgcagtgagcagagattgcaccactgccctccagcctgggcgacagagggagactccatctcaatcaatcaataaaatcaaaataataaaaaatgaaagtttcagagcaggaatgaaagacagtaaaatacacttgaaagagggccaagtgggtgacttgattcaagtgcatggtttgactcttgacttggggtttyatctgttggcatgcttgtgaggtctacgtctcttctcccctgattcttccctgaggtgggctgtctgcatgcacagtggtctgccagcacctgggacaggaacatgcgcagtgtgtttaactggagttgtgcgcatgctcacttaaggcgttcttccctta

SEQ ID NO: 937142 - DNA, 485 bp, Homo sapiens
ccagcatggtgaaaccccgtctctattaaaaatacaaaaattagctgggcatggtggtaggcacctataatccccgctactcaggaggctgaggcaggagaatcacttgaacccaggaggcggaggctgcagtgagcagagattgcaccactgccctccagcctgggcgacagagggagactccatctcaatcaatcaataaaatcaaaataataaaaaatgaaagtttcagagcaggaatgaaagacagtaaaatacacttgaaagagggccaagtgggtgacttgattcaagtgcatggtttgactcttgacttggggttttatctgttggcatgcttgtgrggtctacgtctcttctcccctgattcttccctgaggtgggctgtctgcatgcacagtggtctgccagcacctgggacaggaacatgcgcagtgtgtttaactggagttgtgcgcatgctcacttaaggcgttcttccctta

SEQ ID NO: 937143 - DNA, 625 bp, Homo sapiens
ctgcccagccaagggctctggcattcagatgagggagagggagaggaaagaggagagaatccagtgagaccaatccatgaagtgtcgggaggaccctggaagcaaaggctctggactcaggtggcatcaatgggactaccagtttccagtgaatatgtgggagtggcctaggtccagctcartcagaagcccatttgttcaaggccctggtattactgaaggcccagccctgtctcacctgccagaaagcacgtggcctctccctggctaggctaagggctggttgacggcatcataaaaggaatctgcctgggagccctcaatttgtttcagtttcctcccccaaggccaagaagggattgggttgcctctgttgttgttgctgctgctgctgctgctgctgctgctgggggttggaaaagaggaatttgtgtgaccagatccccttattgtatagaagaagagaaatgtgagcattcagagatggtgagatgtcagacacccagccacacagccagtgagagacatgttggggacagggccaggcctgccagttcatggcccaggggtctttctcatgagatcaactgaccagtgtgtcttagcacctgccatgcaaatagaa

SEQ ID NO: 937144 - DNA, 604 bp, Homo sapiens
acactgctttctcaagctcatgtggaacattcaccaagatagaccacattctggactataaacataccttaacaaatctaaaagaatagaaatcatacaaagaatgtcctcagaccacaatacaattaaattagaaatcaacaatggaaagataattgggaaaaccagaaacgtttggagattaaacaacatatttctaaacaacatatgggtcaaagagaagtctcaagagaaattttaaaatattttgaactaaaaaatgcaacttatcaaagtttgtgggatgcagcaaaagcagtgaggtttccatagtattaaaaktaacatgttagaaaagaaaaaaaaggtggaaaattattaagcttcaccttaggaaactggagaaagaagagcagtgtaaacccaaaggaagcagaagaaaagaaataataaaaatcagagcagaaatcagtgaaactgaaaactggaaaacaacagagaaagtcaatataaccaaaagctgcttctttgaaaacatcaataaaattgaaatctctatctaggctaagaaaaaaagaaagaagatgcaaattactaacatcagaaatgaaagaatggccatcac

SEQ ID NO: 937145 - DNA, 578 bp, Homo sapiens
aaagatcactggttggttgttccttcaggccttgtttaaaaaaaaagtaattgggctgggcacagtggcttacacctgtaatcccagcactttgggaggccaaggcgggcggatcacctcaggtcaggttttcaagaccagcctggccaacatggtaaaacyccatctctactaataatacaaaaattagctaggcatggtggcgcatgcctgtaatcccagctactctggaggctgaggcaggagaatcacttgaatctgggatggagattgcagtgagccgagatcacgccactgcactccagcctgggcaacaagagcgaaactccacctcaaaaaaaaaaaaaaagtaattggatcactggttgtttgggtagaagatggactggaaggggtgtcttcctgaagtcaggagaaagcactgtgtagattggaaagtcattggaataaaagtggtagctggcacttgctgggcgtggtgactcatacctatagtcccagcactttaggagactgaggcaggcagatcacctgagttcgggagttcaagaccagcctggccaacatggtgaaacccc

SEQ ID NO: 937146 - DNA, 578 bp, Homo sapiens
aaagatcactggttggttgttccttcaggccttgtttaaaaaaaaagtaattgggctgggcacagtggcttacacctgtaatcccagcactttgggaggccaaggcgggcggatcacctcaggtcaggttttcaagaccagcctggccaacatggtaaaaccccatctctactaataatacaaaaattagctaggcatggtggcgcatgcctgtaatcccagctactctggaggctgaggcaggagaatcacttgaatctgggatggagrttgcagtgagccgagatcacgccactgcactccagcctgggcaacaagagcgaaactccacctcaaaaaaaaaaaaaaagtaattggatcactggttgtttgggtagaagatggactggaaggggtgtcttcctgaagtcaggagaaagcactgtgtagattggaaagtcattggaataaaagtggtagctggcacttgctgggcgtggtgactcatacctatagtcccagcactttaggagactgaggcaggcagatcacctgagttcgggagttcaagaccagcctggccaacatggtgaaacccc

SEQ ID NO: 937147 - DNA, 457 bp, Homo sapiens
aaatgagtcacattagatgtttagtttctcagtacatataaaagttatgttgatcctatcttgtagtctattaagtgtgcgatagcatttttttaattaaaaaatgccaacaatcacccgacccatcagtaagtcataatcaatttgctggtcaaggtatcttgcctcattgttgacagctattgactgatcagggtggtgattgctaaagattggggttgttgtggcaatttatgaaaataagatacaaattaagtatgctgcatcaattcagtcttcttttcacaaaagatttctctttrgcatgtgatgctgtttgataacattttacccatagaactgcctttaaaattaaggttgatcctctcaaatcctgcctctgatctatcagctacgtttatgtactattctaaatttgctgttgtcatttcaacagtgtttacagcatcttcaccca

SEQ ID NO: 937148 - DNA, 567 bp, Homo sapiens
accaatggcaaagaagttaaaaacttggaaaaaaaaattagatgaatggctaactagaataaccaatgcagagaagcccttaaacaacctgatggagctgaaaaccacggcacaagaactatgtgatgaatgcacaagcctcagtagccgatgcratcaactggaagaaagggtatcagcgatggaagacgaaatgaatgaaatgaagcgtgaagagaagtttagagaaaaaagaataaaaagaaatgaacaaagcctccaagaaatatgggactatgtgaaaagaccaaatctacatctgattggtgtacctgaaagtgacagggagaatggaaccgagttggaaaacactctgcaggatattatccaggagaacttccccaatctagcaaggcaggccaacattcaaattcaggaaatacagagaacgccacaaagatactcctcgagaagagcaactccaagacacataattgtcagattcaccaaagttgaaacgaaggaaaaaatgttaagagcagccagagaaaaaggtcaggttacccacaaagggaagcccattagact

SEQ ID NO: 937149 - DNA, 606 bp, Homo sapiens
gtacatacatcacaatatcacattgtaccccataaatatatacaatttttgtcattaaaaataaattaaatatttttaaaaatgtattttaaatagcagaaatttttattttgataaagaaaaatttatgattttgtgggtcttgcttttcatattgtttctaaaaattatttgcttaacccaaagattaaatgattttatctttccagacatttacactttgggcatttacttttaggtctataatctatatttatacaatttttatatattatatatatatatgttgctaatatgatgaatcacaattttttaaactttaagttcaggatacatgtgcaggtttgttatataggtgaactactgtcactgaggtttcttgtacagattattttgtcacycaactattaagcctagtattcattagttatttttcctaattctttctctcccacccttcaccctctgggaggtaacagtgtcttttgttctcctttatgtgttctcatcatttagctcccacttataaattagaacatgtggtatttggttttctgttcctgcaaatgacatgatcttgttctttttagtggctgcgtagaattc

SEQ ID NO: 937150 - DNA, 626 bp, Homo sapiens
tcttagcaaatggcacaccaggagattatatcccgcacatggcttggagggtcccacacgcacagagcctcactcattgctagcacagcagtctgagatcgaactgcaaggcagcagcgaggctgggggaagggcgtcggccattgctgaggcttgagtaggtaaacaaagcatctgggaagcttgaactggstggagcccaccacagctcaaggagacctgcctgcctctgtagactctacctctgggggcagggcacagctgaacaaaaggcagcagaaacttctgcagacttaaacttccctgtctgacagctttgaagagagtagtggttctcccagcacgcagcttgagatctgagaatggacagactgcctcctcaggtgggtccctgacccctgagtatcctatctgggaggcacctcccagtaggggcagactgacacctcacatggccgggtacccctctgagacgaaacctccagaggaacaatcagacagcaacatttgctgttcagcaatattcgctgttctgcagcctctgctgctgataaccaggcaaacagggtctggagtggacctccagcaaactccaacacacctgcagctgagggtcctgactgtta

SEQ ID NO: 937151 - DNA, 626 bp, Homo sapiens
tcttagcaaatggcacaccaggagattatatcccgcacatggcttggagggtcccacacgcacagagcctcactcattgctagcacagcagtctgagatcgaactgcaaggcagcagcgaggctgggggaagggcgtcggccattgctgaggcttgagtaggtaaacaaagcatctgggaagcttgaactgggtggagcccaccacagctcaaggagacctgcctgcctctgtagactctacctctgggggcagggcacagctgaacaaaaggcagcagaaacttctgcagacttaaacttccctgtctgacagctttgaagagagtagtggttctcccagcrcgcagcttgagatctgagaatggacagactgcctcctcaggtgggtccctgacccctgagtatcctatctgggaggcacctcccagtaggggcagactgacacctcacatggccgggtacccctctgagacgaaacctccagaggaacaatcagacagcaacatttgctgttcagcaatattcgctgttctgcagcctctgctgctgataaccaggcaaacagggtctggagtggacctccagcaaactccaacacacctgcagctgagggtcctgactgtta

SEQ ID NO: 937152 - DNA, 628 bp, Homo sapiens
tgtagtcccagcactttgggaggccaaggtgggaggattgcttgagcccaggagttcaagatgagcctggtcaatatagtgagacctcgtctctataaaaaaattttttttaaacaattagccaggtatggtggtgcatgcctgtggtcccagctacttggaaggctaaggtgggaggattcactgcactccagcctatgtgagagtgaccctgtctctaaaaaagacagtcagccaggcgcagtggctgatgcctgtaatcccaatactttgggaggccaaagtgggtggatcacttgaggtcaggagctcaagaccagcctggccaacacagcgaaaccccgtctctactaaaactacaaaaattagatggatggtggtgtgtgcacctgtaatcccagctacttgggaggctgaggcaggagaatcactcgaacccaggagacagaggttgctgtgagccgagatagcrtcactgcactccagcctaggcaacagaaatgagactctgtctgaaaaaataaaaataaataaaaaataaaaataagacagtcatcttatttacttctctatcacacagacacacacacacacacacacacacacacacacacacactaggaaaaag

SEQ ID NO: 937153 - DNA, 685 bp, Homo sapiens
atgtgcaccaggcagacccggcccttctgctctggatcccttctctctgtctctggctgaagacgagagcatcctggggtcgggactcttaatcctcctaacctaagggaggatgtgcgcctgacacagggccaaggccccccgacaccctgatgcgcggccccgggcccatctggaatgttcagaaatgctgccatcttgtggcgcctgcaggccggagcaaggcaccttccggctgatcttgaagttgattcctagaagatgttgctccaaataagcacacacagactgtgtgcatttgcattgccacatgctaagccgcctataccacccactcactgctaccccaggtgtgttatctgctttgggccagcctgaggtaaaactgtcaacactgaaaatcattacctttggcacctcccagctctccggaagttatcyggtctgtagacaacaagtccctgagggaagtgggtggggcacagggcaggtaagttttgacagaaaaggaaactgggcacaaagtctaaggtgctacaacaacaacaacaacaacaacaacaacaacaaaaagatgggccctacaggagcctgctgagcacagagttactgagttgagctgttggaatcacagtggtaaggggccctccccgctggtgcaacaagacacaacagagtgtagtta

SEQ ID NO: 937154 - DNA, 608 bp, Homo sapiens
atctatattgctgcaaaggacatgatttcattcttttttatggttgtgtagtatttcgtggtgtgtatgtaccagattttctttatctagtccaccattgatcagcacctgggtcaattacatgtctttgctattgtgaataatactgcratgaacattcaagttcaagtgtctttttgatagaacaatgtattatcctttggatataaacccagtaataggatgctaggttaaatagtagttctgagttctttgagaaatctccgaactgctttccacagcggctaaactaatttacattcccacgcacagtgtgtaagtgttcccttttcttcgaagccttgccagtagctgttattttttgacttttaaataatagcccattctgatgggtatgagacagtatatgccattgtggttttgatttgcctttcactgatgatcagtgatgctgaggatttttcaaatgtctgttgcccacttgtgtgtcttcttttgaggagagtctgtttatgtcctttgcccactttttaatgggattattttttgcttgttgaattgtttatttatagattctggatgttagacctttgttggatgcatagttt

SEQ ID NO: 937155 - DNA, 744 bp, Homo sapiens
ccctcttttttttttttttttttgccactaaaaagaaaactatggcaagaacacttaacataagatctatcctgtgtggagaaaagaaagagagatcagactgttactttgtctatatagaaagaagtagacataagagactccattttgttctgtactaagaaaaattcttctgccttgagatgctgttaatctgtaaccctacccccaaccctgtgctcgcagaaacatgggctgtgtcgactcaaggtttaatggatttagggctatgcaggatgtgctttgttaaacaaatgcttcaaggcagcatgcttgttaaaagtcatcaccactccctaatctcaagtacccagggacacaagacactgcggaaggccgcagggacctctgcctaggaaagccaggtattgtccaaggtttctccccatgtgatagtctgaaatatggcctcatgggaagggaaagacgtgaccgtcccccagcccgacacccgtaaagggtctgtgctgaggaggattagtagaagaggaaggcytctttgcagttgagataagaggaaggcatctatctcatgttcgtccctgggcaatggaatgtctcggtgtaaaacccgattgtatattccatctactgagataggagaaaaacatcttagggctggaggtgagacatgctggcagcaatactgctctttaatgcaccgagatgtttttgtatgtgcacatcaaagcccagcactttttc

SEQ ID NO: 937156 - DNA, 548 bp, Homo sapiens
tgctgaaccaatgctgtgatttgtctgaatgccatactcaacgcctaaacccatcactgtagacccctgtgagatacaatcgctccattctctgttttagattaaccagggccttcctgagggaggggccttcctctcccaaagccatgggctgcatgaggcaggagaggctacttaaatgaaaatctgaaaccccttaggaaagggaaaggggaggatggattctagttgcaatcaacaaagtgtacaacaccagacattaggatattagggttcttctatttgcgactctwagggatgtagtgttttggaaggggagagctctttatctttaaaggagaacagcatccttcattattcatgtagcatttcatatagcaaaccttgcgaccagacatgctaatgaatattcaagaacatccaagaatgaggaggctcaagtcttgactcttttttttttcactttgagacagagtctgactctgttgtctaggctggagtgtagtggctcaatctcggctcactgcaacctttggcttactgcaacc

SEQ ID NO: 937157 - DNA, 609 bp, Homo sapiens
gctggagtgcagtggcgcgatctcggctcactgcaacctccgcctcctgggttcacgccattctcctgcctcaggctcctgagtagctgggactacaggcgcccgccaccacgcccagctaattttttgtatttttttagtagagatggggtttcatcatgttggccaggatggtctcgatctcctgaactcgtgrtctgcccacctcggcctcccaaagtgctgggattacaggcgtgagccaccgcacccagcctttttcgtattcttagtagagacggggtttcaccatgttggctgggatggtctggatctcttgaccttgtgatccgcctgcctcagcctcccaaagacaacaatgtatttctttagctaaggattttatcattttccctagaaaattaggaggaaaaatcccaaacaactctctttattactcctaattttaaatatttctgagtatgttaaatttgccagtgttcagagcaaaccaaagtataagccatgttttcttctctctttttttttttttttaagctaacaaattggtctaggtctagaatggcacttaagggaattagctttatgtttacagtgatttatcctgtc

SEQ ID NO: 937158 - DNA, 638 bp, Homo sapiens
aatttctgcagtgtcagttgtaatgtctcctttttaatttctgattttatttatttggatctcctcttttttttccttagttagtctggctataagtttgtcagttgtgtttaacttttcaaaaaaccaactttttgtttcattgatcttttctattttttattttaatttcacttatttctgctctgatctytattatttcttttctcctactaatttgggatttggtttgctctggcttttctatttatttaaggtgtgtcattagaatatttacttggaatttttcctccttttgatgtagacactttacctataaactcccctctttggtattgtttttactgtatcccttatcccatatgttgtgttttcattattatttgtttcaagaaacttttcaatttccttcttaatttcttcattgaattactggtcattcaggagcatattgcttaattttcattacttgtataatttcaaaaattcctcttgttattaatatctagttttattgtggtcaaagaagatacttaatgttacttcaatatttatgaatgtattaagacttgttttgtggcttaagatatggtctatcttagaattatacatgtgctgaggagaagaatgtgtattat

SEQ ID NO: 937159 - DNA, 575 bp, Homo sapiens
ggtgctggtatccacagctgcaaaacctgaaagtggatcatgtcacatgactcattgctgatattccccaggaccagccctgagcccagtagctccactgggtgcctagacccagaaaagcaaaaatagtcactayagtttggctcttaggaagccctattcatagggaaagggggagaacaccacatcaagcaagcactctttgggacaaaagaatctgaacagcagctcttgagccccagatctttcctctgacataatctatccaaatgagaaggaatcagataaacaatactggtaatatgaccaaacaatattctttaacagccccaaaagatcataccagatcatcagcaatggaacgaaacaaagatgagatctctgaattgccagaaaaagtcatttattaaactaataagtcatttattaaactaaccaaggaggcaccagagaaaggtgaaatccaacttaaagaaatcaaaacacatgatacaagatgtgagagtaaaattcttctgtgaaacagcataaataaaaaacaaccacaacttctggaaaacaaggacacacttaga

SEQ ID NO: 937160 - DNA, 618 bp, Homo sapiens
gctgcaaaacctgaaagtggatcatgtcacatgactcattgctgatattccccaggaccagccctgagcccagtagctccactgggtgcctagacccagaaaagcaaaaatagtcactacagtttggctcttaggaagccctattcatagggaaagggrgagaacaccacatcaagcaagcactctttgggacaaaagaatctgaacagcagctcttgagccccagatctttcctctgacataatctatccaaatgagaaggaatcagataaacaatactggtaatatgaccaaacaatattctttaacagccccaaaagatcataccagatcatcagcaatggaacgaaacaaagatgagatctctgaattgccagaaaaagtcatttattaaactaataagtcatttattaaactaaccaaggaggcaccagagaaaggtgaaatccaacttaaagaaatcaaaacacatgatacaagatgtgagagtaaaattcttctgtgaaacagcataaataaaaaacaaccacaacttctggaaaacaaggacacacttagagaaatgctggaaagtcccagcaatcaaactgaaccagcagaagaaagaacttcagagct

SEQ ID NO: 937161 - DNA, 720 bp, Homo sapiens
gttcctggtgtgaggagattactttcaagtattccattatcactgaccactgtgtacctcgctttttgaagtcctttttctacaacggaacttccatcagtgtacaagttgaagtcaggatcagtcaagggaacctctaaaagttcccctcgagtggtgtaggtttgagcaattacttgttgacagttatgttctatcttttctttattatttggaagaaatgtggctcagttaagagttgcacaagcacgcagttgcagcactggctcttcaagtaatagagcctgatatttaagtaagtggttgtctgacagccacaagtctcctttagcagtgagtatgccattcacatcatggatgyccacacagtaagatctcttccttgtattcttttaacttcttcagatactaagcctgctactgctgccactacctgtaaaccatgaggccaaccctttgccactacatcagtttccttactcaggtatgccacgggttgcaagctcatcccttggacctgtgtaaggactcctagagctattcctgttttttttctgtgttatataaagaaaagtcttgccctgttggcaagcttaacactgagtcttgggttagagacttctttagggcctggaaagccacttctgtttcaggtgtccatcttactaaatggatattgactttctgagtttccttaattagtgtatataatggtctgtc

SEQ ID NO: 937162 - DNA, 616 bp, Homo sapiens
atgtgacttgacttttattgttttgaggtatgttccttctataccctgatttttgagaattcttatcatgcagggatattgaatgttatcaaatgctttttcatcatcatttgaaatgattatatggtttttttccttcattcttttggtatgatgtgtcacgttaattgatttgtatgtatgttgaaccatccttgcatccctggtataaccctacttggtcgtgatgaatgatctttttatttatttattttatcttattgttaytaatatttgagacagagcctcagtctgttgcccaggcttgagtgcagtggcatgatcttggctcactgcaaactctgcttcccagttcaagtgattcttgtgtgtgagtcccccatgtagctgggaccacaggcatgtgccaccacatccctccctccctaattttttgtatttttttgtagaggtgcacagaagtcaagtattgagatttgagaacctctgcctagatttcacaggttgtatggaaatgcttggatgtccaggcagatgtttgctgccggggcagggcactcatggtgaacctttgctagggcagtgtggaagggaaatgtggggtgggcacccgcac

SEQ ID NO: 937163 - DNA, 554 bp, Homo sapiens
ctgcagcctctgcctcctggtctcaagcgattctcttgcctcagcctcccaagtatctgtgactacaggcacgcaccaccatgcctggctaatttttgtatttttaatagagatggggttttactatgttggccaggctggtctcgaactcctgacctcgtgatctgcccacctcgggctcccaaagtgctgggattacaggtgtgagccaccaagcctggcctctttctttctttttttttagagacagtgtctcactgtcacccaggctggagtgcagtggygcagccttagctcactgcaaccttgaactcctgggctcaagagatcttcctgcctcagtgtcccaggtagctaggactgcaggtgcctgccaccacgcctggctaagttgtttttgttttgttttggtagagacagagtctcactgtgttgcccaggctggtcttgaacttctggcctcaagcagtccgcctgcctagtagctagggctgcaggcacacaccaccatgcctggctaatttttatattttttgtagagaccagtgtctcac

SEQ ID NO: 937164 - DNA, 638 bp, Homo sapiens
gtcactgtagattcgttctgacttttccagcatttcatataaatggaatcatacatgtctacgttttgtgtctggcttctcttgctcatcagtggcttgttccttttaattgctgagtagttatggactgaattgtgtcttcctcaatccctcagaatttgtaggttgaagccctaacccccaaggtgagtgcatttggagataggacctttaaggaggtaattaggtaaaaggaacatcataagggctgggccctggttcataggacgggtgtccttataagaggaggaggatgccaggaatgcaggcacacagagaaaaagccatgtgaagacacatctgcaagcccaggtaagagatctcaggagaaaccagccctaccggcaccttgaccttggacttccagcctccacaactggaaggaaatgcatttctgttgcataagccactcaggctatggtgttttgttatggmagcctgagttggtgaatgcagcagtgtcccaccaggtgagcacagtttccttatcaaccagagggagtggttttataggtgaggacaatgagacttagagaaccccagctaaggtcccacagatcagcaaagaactaagacctggtctgtgtgactgtgggacc

SEQ ID NO: 937165 - DNA, 595 bp, Homo sapiens
aacctccgtctcccgggttcaagcaattctcctgcctcagcctcccgagtagctgggatgacaggcacgtgccaccacacctggctactttttttgtatttttagtagagacagggtttcaccgtgttagcggggtttcaccatgttagccaggwtggtcttgatctcctgacctcgtgatctgcctgcctcagcctcccaaagtgctgggattacaggcgtgagccaccgcacccagccagaacaggggcttttgatggaaggagataagatggcttcacagctcttcttccccatgactttctctgatgagccctctttggggcttccctctgtccttatggatagcttctttcttggcacatcctgaggctggtgctcagggcctctttagcttgggggagagagcagttggcatggtttagtgagtatcacagcagtctggtagatatgacttagggtatgagctacagaatggaaaagggtcttcttttatttctttatttttaaacttatttttatttttaaagtaaaaataaagatggcatcttgctatgttgctcaggctagagtgcaatggctattcatgggcaca

SEQ ID NO: 937166 - DNA, 615 bp, Homo sapiens
gtggcagtcttcttcctgggcacccaggctttcccaaacatcctctgaaatctaggcagagtctgccaagcccgcttcatgcttgcattctgtacaactgcaggcttaataccatttgcaagccaccaaggcttatggttttrttctcttcagagtggtgaccagaccaatatctggggccctttgagccaaggctggagctagagcagtggggatgtgaggaacatccttgtagggtggctcataaaagctgtgccctggacctagaccctgaaaccattctttcctcctaggtctctgggcttccaatgggagggcctatcctgaaaatctataaaatgcctttgacacctttttctaattaccttgtatattagcacttggctcccatttagttacgctaatctctctagcaagtgcttgctccacagcccacttacattcctctcctgaaaatgctttttctctctctactacatggccaggctgtgaattttccaaatttttatgctgtgtttcctttttaaatgtacgtttcaactttaagtcatttcttagctcccatatctgaccgtacgttgtcagaagcagccatgtcacatcttgagtgctttg

SEQ ID NO: 937167 - DNA, 607 bp, Homo sapiens
agtgagcagtagcaagatttattgcaaagagcgaaagaacatagcttccacagtgtggaaggggacccgagggggttggcgctgctggctcgggcagcctgcttttattctcttatccggccccacccacgtcctgctgattggtagagccgagtggcctgttttgatagggcgctgattggtgcgtttacaatccctgagctagatacaaaggttctccacctccccatcagattagttagatacagagtatggacacacatgttctccaaggccccaccagagtagctagatacagagtgtggattggtgcactcacaaaccctgagctagacacagggtgctgattggtgtgtttamaaaccttgagctagagacagagtgccgattggtgtatttagaatccctgagctagacataaaggttctccaaggccccaccagagcagctagatacagagtgtggattggtgcattcacaaaccctgagctaaacacagggtgctgattggtgtgtttacaaaccttgagctagagacagagtgccgattggtgtatttacaatccctgagctagacataaaggttctccacgtccccaccagactc

SEQ ID NO: 937168 - DNA, 618 bp, Homo sapiens
gtggatccaaagagtgagcagtagcaagatttattgcaaagagcgaaagaacatagcttccacagtgtggaaggggacccgagggggttggcgctgctggctcgggcagcctgcttttattctcttatccggccccacccacgtcctgctgattggtagagccgagtggcctgttttgatagggcgctgattggtgcgtttacaatccctgagctagatacaaaggttctccacctccccatcagattagttagatacagagtatggacacacatgttctccaaggccccaccagagtagctagatacagagtgtggattggtgcactcacaaaccctgagctagacacagggtgctgattggtgtgtttacaaaccttgagcwagagacagagtgccgattggtgtatttagaatccctgagctagacataaaggttctccaaggccccaccagagcagctagatacagagtgtggattggtgcattcacaaaccctgagctaaacacagggtgctgattggtgtgtttacaaaccttgagctagagacagagtgccgattggtgtatttacaatccctgagctagacataaaggttctccacgtccccaccagact

SEQ ID NO: 937169 - DNA, 733 bp, Homo sapiens
gcgtctggagtttgttccttctgatgttcggatgtgttcggagtttcttccttctggtgggttcgtggtctcgctggctcaggagtgaagctgcagaccttcgcggtgagtgttacagctcataaaagcagcgtggatccaaagagtgagcagtagcaagatttattgcaaagagcgaaagaacatagcttccacagtgtggaaggggacccgagggggttggcgctgctggctcgggcagcctgcttttattctcttatccggccccacccacgtcctgctgattggtagagccgagtggcctgttttgatagggcgctgattggtgcgtttacaatccctgagctagatacaaaggttctccacctccccatcagattagttagatacagagtatggacacacatgttctccaaggccccaccagagtagctagatacagagtgtggattggtgcactcacaaaccctgagctagacacagggtgctgattggtgtgtttacaaaccttgagctagagacagagtrccgattggtgtatttagaatccctgagctagacataaaggttctccaaggccccaccagagcagctagatacagagtgtggattggtgcattcacaaaccctgagctaaacacagggtgctgattggtgtgtttacaaaccttgagctagagacagagtgccgattggtgtatttacaatccctgagctagacataaaggttctc

SEQ ID NO: 937170 - DNA, 456 bp, Homo sapiens
aattgcttccacctcttatactctcaagatatttaaatgatataacttccagggctcaatccctttctctattatggaatggtgggggcagagggcaacatgacaaagcccagtggcttctgagtccacagtgaacatgcaggcttcatcactctccttgtgtgaccttaaacacaacattttaacttctgtcagacacagatccctcactccccaaatggagatattaatatcaatctgacygagttgttcttgggattaaacgtgatattttcttgtacctggttatgccagatgctcaacaaatttaagttaaacggaataacagctacaacactgagcaactgtaccgttcttaactgctttctggatacacgcttatcttagctttataactgacgtttgagaggagctctgccgccatttcccttaccatagagatgaggaaactggggc

SEQ ID NO: 937171 - DNA, 633 bp, Homo sapiens
ttgcctacctgcagtaagggaaggaaaaggaatgttggcaaagctttttaaagacctttgctgagaaatcatgcttgccagtcagtattccatgcttctaggaatattgggaaaaggctgtccctttgcatcccaaataaggcaatacgaaattgtacctggatgctaccatggacaaccagattctatccaggagaacataaatagaagtgatgagaacaccctctccctgctggaaatacatgtggggtccccctgtggggtttgactgtargttcagggcaaaatgactctgtcttttctaaggcggctccaccaaccctgaggtgcagaagcttatgagtattgaagaatcttacctgcaataaaggactgcaaacactacaaaggtggaatactcaacattgtggttaaacgggaataaagtgagagtaaaagtctttggtttctcttttaatgccctgcaatgtctatctcatcaagaaccgaaagaatctaaggatggtcttgcacacaggaattgcaagggttaagcactttctaagatcagggatttaccaaataaatgactcttccaggggcagagtcagcaaacatctaacaataaggccagttagatactaagaattgata

SEQ ID NO: 937172 - DNA, 737 bp, Homo sapiens
acagggcaccaagtccctaggctgcacacagcacggagaccctggtcccagaccatgaaaccattttcccctatgcctccaggcctgtgatggcaggggctgcgtgatgacctctgacatgtcctggagacattttcctcattgtctgggggattaacatttgactcattacttatgcaaatttctgcaaccagcttgaatttctccttacaaaatgggtttttcttctctatcacattgtcaggctgcacattttccaaacttttatcctcttcttcccttataaaactgaatacccttaacagcacccaagtcacctcttgaatgctttggtgcttagaaatttcttccatcagataccctgaatcatctctctcaagttcaaagttccacaaatttctagagcaggagcaaaatgctgacagtctcttygctaaaatataacaagagtcacctttgctccacttcccaacaagttcctcatctccatctgagaccacctcaacctggaccttactgtccatatcgctatcaggcttttggtcaaacccattcaacaagtctctaggaagttctaaactttcccacattttcctatcttcttctgagccctccaaactgttccaacctctgcctgttacccagttccaaagttgcttccatatttgggggtatcttttcagcaatgccccactccttgtaccaatttactatattaatctgttttcacaatgctg

SEQ ID NO: 937173 - DNA, 655 bp, Homo sapiens
gtgacacaggcactgaatgctctgcctctacacaaagcccacatagccctctacacaaaaccatgaacatcaaggcttgggttgagcttccctgggtggcaacactttgcacattttgtcacatgttgttggaggaattaagtgagtcccttgcaactctactggggggtgtacctgaaagcttgcacctggtttctcctgggctgtgtcccatgcaccttttccctttgctgattttaatctgtatccttttacagtaataaatggtgtgggtataacagcttttgagtcctgtgagtctctctagtgaattatcaagcccgggggtggccatggaaacccccaacacatatgataaccaattttattactcttttaaaaaattacatttggatttactgaaggttttctattttactgattkatactcttcttatttctatcctgtgtttattttgtctaatttgttcttcacacttttttaaggtgaaagcttcaatgatggatctcagaccattcctcatttttaatgtaatgctacaagtttccttctaagtaatgcttcagcagcattccataaattttgatatgctgtaatttcatttttagttagttcaaaatatgttctaattcttttgtgttttcttcttcaata

SEQ ID NO: 937174 - DNA, 603 bp, Homo sapiens
cacagtcgcagtggtcgttggcaacaggggtacttgattactccaccctcagccttaggtggctcagaacagaaaaaaggactatatttgtgagaaagtaataaaagagaataagaaattctgcctggtaatccagagaattctcccagattttgtcgaagaccatcaaagtggtatctttacgagtctgcaagaaccgcaggattttgggtgtcccttaaagcagaaacagcttagattacaaacttaagtcctttcaaatatctggaaaccttccaaagaaggatggctacaraaaaggccagacagtgaagacaacaataatgacctaactcttcaatgcccagacagtgaacaacatctaatagcatctacaccatccaggaaaacataatcttaacaaatgaacttaacaaggcaccagggaccaatcctggagaaatagaggtatgtgaccttttagacagagaattcaaaataactgtcctgagaaaactcaacaatattcgagataacacataaaagaaattcaagattgtattagattaatttatgaaagagattaaaataatgcaaaagattcaagcataaattctgcaaaaa

SEQ ID NO: 937175 - DNA, 581 bp, Homo sapiens
aatgtgtctaatgaacttctcttacagcagggtatagatcaagagattcttgcacgtctgcaagccctcgaggctgccttggaatttgtgggggagcgacaagatgccctagcattctgatagcaattaaactgtgactgggagcataaacatatctgtgtcacatttttaccttggaatcaatcaatacatagttgggatgaggtgaaacaacacctctggggaaactttcatgacaatttaacagcagacgtaaagcaacttaaaactaaaattttagaatcccttcacatgatagatctacatactcaacaaacagccatatggaaaggtgtgcaagatcatttctcctggttatacccccgatcctgsgggtcacactttgactggaaaggaatgttactaattatactcatgattgtcttacgttatttgctaattctatgatgcaaagccggaataaaagcaaaacctaacaaacctgttgctgcacacatctgtactcttaagtcaacagaacccgatgcaaagaacagaaaggggggagatgtgagagttcagtcaggctggtgggaaaattt

SEQ ID NO: 937176 - DNA, 581 bp, Homo sapiens
aatgtgtctaatgaacttctcttacagcagggtatagatcaagagattcttgcacgtctgcaagccctcgaggctgccttggaatttgtgggggagcgacaagatgccctagcattctgatagcaattaaactgtgactgggagcataaacatatctgtgtcacatttttaccttggaatcaatcaatacatagttgggatgaggtgaaacaacacctctggggaaactttcatgacaatttaacagcagacgtaaagcaacttaaaactaaaattttagaatcccttcacatgatagatctacatactcaacaaacagccatatggaaaggtgtgcaagatcatttctcctggttatacccccgatcctggggktcacactttgactggaaaggaatgttactaattatactcatgattgtcttacgttatttgctaattctatgatgcaaagccggaataaaagcaaaacctaacaaacctgttgctgcacacatctgtactcttaagtcaacagaacccgatgcaaagaacagaaaggggggagatgtgagagttcagtcaggctggtgggaaaattt

SEQ ID NO: 937177 - DNA, 581 bp, Homo sapiens
aatgtgtctaatgaacttctcttacagcagggtatagatcaagagattcttgcacgtctgcaagccctcgaggctgccttggaatttgtgggggagcgacaagatgccctagcattctgatagcaattaaactgtgactgggagcataaacatatctgtgtcacatttttaccttggaatcaatcaatacatagttgggatgaggtgaaacaacacctctggggaaactttcatgacaatttaacagcagacgtaaagcaacttaaaactaaaattttagaatcccttcacatgatagatctacatactcaacaaacagccatatggaaaggtgtgcaagatcatttctcctggttatacccccgatcctgggggtcacactttgactggaaaggaatgttactaattatactcatgattgtcttacgttatttgctaattctakgatgcaaagccggaataaaagcaaaacctaacaaacctgttgctgcacacatctgtactcttaagtcaacagaacccgatgcaaagaacagaaaggggggagatgtgagagttcagtcaggctggtgggaaaattt

SEQ ID NO: 937178 - DNA, 591 bp, Homo sapiens
ggactacaggtgtgcaccatcacgcctggctaagttttgtatttttagtagagacagggtttcaccatgttagtcaggctggtctcgaactcctgacctcaagttatccacccgccttggcctcccaaagtgctgggattacaggcgtgagccactgtgcccggccgagtttttcaatataaatgtactttatttgagttacagagaagagatatataactggaaaagacctggttattactgttacagtaattcaaagatgaagtagggagattgtctctgccactgtttcagttttatcctgttgctttcaagtggtttgatgggcttgatagaccgtgggtctgatgtttgatacatgatgatttgaaatcagaaaggtgtttggtgttactatcctgctcttacatgacttcaaaattcagacaatrctattattcaaatgaatagactttgcaccttcataggttcccctataaagtctaaacttcaagaatttagtctcacagcttcaatgacaaaaagagaattgaagacactttaaagtatcatacaatcatattaactttgaacaaggtgaacaaaaaagaa

SEQ ID NO: 937179 - DNA, 753 bp, Homo sapiens
tggtgttagccatggaagttcttttaattcaaatagttcaaatataacaacagctacatctacagttttgtcccttaagcatgttttttcgactttcttcttctggtttctacctcctgccctgctttctctttgggaaatttttgattttttaatttttagaaatagggctgtctgtctcccagggtggagtgcaatggcacattcatggctcactgcagccttgacttcctgggctaaagccatcctcccacctcaataccctgagtagctgagattataggcacgtgccactatgcccagctaattttttatttttatttttttgagacagagtctcactctgtcaccagactggagtgcagtggcgtgcaatcttagctcactgcaatgtctgcccccggagttcaagagattcccctgcctcagcctcccgggtagctgggactgcaggcgygcaccaccacacctggctaattttttgtattttagtagagacggggtttcaccatgttggccaggatggtctggatctcctgaccatcatgatctgtctgcctcggcctcccaaagtgctgggattacagatgtgagccactgtgcttggtagctaatttttaaaaaattttaatttttgtagaaatggagtccctctcactatgttgctcaggctggtcttgaactcctggccccaagcaatcctcccaatttagcctcccaaagtgctgggattataaacgtgagccattgcaa

SEQ ID NO: 937180 - DNA, 598 bp, Homo sapiens
taagtatctgcagcaaattagatcggtgagcacttagcctaaatggaagaaagagcagcagaaatggcttaagataggttaggattgctgaatgctgtgtctccgtttccctcagcgcctgcatttaaatactcacaagtcctatgaactgaatctcctgaaatagagctccttagaggccacaagtcctgggcattaatgtgcactatcccatttgattttcacaactactcagaggggccatttccccattttttctagggaggraaactaaaactcatacaaggggattaatgagccgtaagtcagcagagtcagtgctcaaaaactggaaatcttagactcgaaattccattctctttccacactgccccatcaaactcctctcttttacatgatttttccggtcagttttccagactgctttgcataacagtagtctcaacacacatgaaaaagatatcttaaaccttagcacatcacgccatcagccaaaactctcctcttattcttcccctttccctttgttaaatatttgctcaaggtttggcagacctggggtgaacacccttcttaattcttaggccaggttaatcag

SEQ ID NO: 937181 - DNA, 581 bp, Homo sapiens
ggagttcaagacaagcctggcaaacatggcaaaaccctgtctctactaaaaatacaaaaattagctgagcgtagtggtgcacacctgtagtcccagctactcgggaggctgaggtaggaaaatcgcttgaacccaggaggtggaggttgcagtgagcccagcattgcactscagcctgggggacagagcaagactccatctccaaataaataaataaataaataaagccaccctattttttatatttttttctttttctttttctttctttttttttttttttctgagacagggccttgctctggtcacccagactggagtgcagtggcaatcacagctcactgcagcctcagcctcggacttaattggtcctcccacctcatcctcctgagtagtttggactgcaggtgcacaccaccatgcctagctaaattttttttattatttttttgtagagacagggtctcactatgttgcccaggctggtctcaaattcctggctcaagggatcctcccatctcagcctcccaaagtgctgggattacagtcctgagctacagtgcttagcctccagaaacccc

SEQ ID NO: 937182 - DNA, 644 bp, Homo sapiens
acgcaaggctgtgcacagctcacagttcacagcgggaggtggagagctttcttgaagctcttggcttgtctatgggttgcaatctgtgtctagctctttgtgtgaggaaacaatgagaaagaagcagctcttgttttcctgggtggcatcatggctctgactgtgacatttccataggacacgttcttctccctgccaggctcatttgagctcttgagcatgggtcctgccctctgcagtcatggggatggccactctggaggtgttggtggccattacgagttttatgacttccaaatggaatgaagttctttggttttgttttatttctgtgagggtaggaatgacatttaatatcattcctttyttcctctaccttcctcccggcactttggcttgattttacagctccctcctgtgggggccatcaccccccaacaggcggctatgggactcagctccagcccatgccaaactggcctaagcctttctgttgtggatgctactggaaggcacaatgaggctcttctaccggctccaaaatcaatttaaattaaacctcatttagccaggcgctcctttttgatttatcggcagatgcctgtcgctgattgagtcttgttaaattgctcacaaacacttca

SEQ ID NO: 937183 - DNA, 722 bp, Homo sapiens
gaccaaaacttagttgacagccattgtccatgtaagaaacagtcctgcccttccaggaacaggtgtgcaccaacattccaactccaaacttgtccaaaaaatttgcttctggattctgaaactttttggattgtagaatcttttgagtattaattaggcagaaattctgaaccctcattccagaaaaagaagttttgcctataatttcccctgaaaggagggagctttgkagctcacttataacctccagtttagcatcctgtgttaggtgatgacaaagaagtccctccaaggagaagattctgctgcaatgtgcaaattattgtgttctccacgaataccttgtaaatgatcagttttaaccaaaatccaaattatttacaacaacttaccaggcacatctctgccaataaagcaagatacacctgtggtgtgaaggagcaaggtggtctctgagggagaaggctggaaggaactggttttctccagaatgtgtgtcaactgcaatcccaactgcttcaagagattgtctgagttggagtgtgtcactgatattttcttgagtgtcttgtctgcttctgataatttatctgagcagcgtttgtccaaggtgtgtttagtgacaatgttagtaatgagttttttgtgaaagttctctcaccctggtgtgattcattaccgactagctgggctataattttgtgctgctgaagcatatgtta

SEQ ID NO: 937184 - DNA, 722 bp, Homo sapiens
gaccaaaacttagttgacagccattgtccatgtaagaaacagtcctgcccttccaggaacaggtgtgcaccaacattccaactccaaacttgtccaaaaaatttgcttctggattctgaaactttttggattgtagaatcttttgagtattaattaggcagaaattctgaaccctcattccagaaaaagaagttttgcctataatttcccctgaaaggagggagctttggagctcacttataacctccagtttagcatcctgtgttaggtgatgacaaagaagtccctccaaggagaagattctgctgcaakgtgcaaattattgtgttctccacgaataccttgtaaatgatcagttttaaccaaaatccaaattatttacaacaacttaccaggcacatctctgccaataaagcaagatacacctgtggtgtgaaggagcaaggtggtctctgagggagaaggctggaaggaactggttttctccagaatgtgtgtcaactgcaatcccaactgcttcaagagattgtctgagttggagtgtgtcactgatattttcttgagtgtcttgtctgcttctgataatttatctgagcagcgtttgtccaaggtgtgtttagtgacaatgttagtaatgagttttttgtgaaagttctctcaccctggtgtgattcattaccgactagctgggctataattttgtgctgctgaagcatatgtta

SEQ ID NO: 937185 - DNA, 483 bp, Homo sapiens
ttcattccttctttccttcccttttttggtttcaaaatagtaaaagtatacattttaaaatccaaatattaataagccttacagcaaaacaaaacaaaaaacagtgttaaagttaagaaaaaagtatcatcagacataatgaccattattagccaggaagagtgaggccttaaagggatacttgaaatatctttaaattatctaggtggctggcaagatggccaaatagaaacagctccagtctgcagctcccagcaagatcaacgcagaaggtgggtgatttctgyatttccaactgaggtacccagctcatctcactgggactggttagacagcaggtgcatcccacagagggcgagcagaagcaggttggggcatcacgtcagggaactcctttccctaaccaagggaagccataagggtctgtgccatgaggaatggtgcactccggcccagatattacacttttcccatggtctttgc

SEQ ID NO: 937186 - DNA, 635 bp, Homo sapiens
tctgggaagtgaggagcgtctctgcctgagcacccatcgtctgggatgtgaggagcgcctttgcccggctgccccgtctgggatgtgaggagtgcctctgcctggctgccccgtctgggaagtgaggagcgtctctgcctgagcgcccatcatctgggatgtgaggagcgcctttgcccggccgccccgtctgggatgtgaggagcgcctctgcccggctgccccatctgggaattgaggagcacctctgcccggccgccccgtctgggaggaagtgaggagcgyctctgcccggctgccccgtctgggaggaagtgaggagcgcctctgccccgttgccccaaatgggaagtgaggagcgcctctgcccggccgccccatctgggaagtgaggagtgcctctgcccggctgccaccctgtctgggaggtcaggggcgtctctgccccgccgccaccccgtctgggaagtgaggagcgcctctgcccggccgccaccccgtctgggaggtgaggggtgtctctgcccagccatcccgcctgggaagtgaggggcgcctctgcccggccgcccttcgtctgggaggtggggagcgcctctgcccggccgccccgtctgggaagtgggcgcctctgc

SEQ ID NO: 937187 - DNA, 635 bp, Homo sapiens
tctgggaagtgaggagcgtctctgcctgagcacccatcgtctgggatgtgaggagcgcctttgcccggctgccccgtctgggatgtgaggagtgcctctgcctggctgccccgtctgggaagtgaggagcgtctctgcctgagcgcccatcatctgggatgtgaggagcgcctttgcccggccgccccgtctgggatgtgaggagcgcctctgcccggctgccccatctgggaattgaggagcacctctgcccggccgccccgtctgggaggaagtgaggagcgcctctgcccggctgccccgtctgggaggaagtgaggagcgcctctgccccgttgccccraatgggaagtgaggagcgcctctgcccggccgccccatctgggaagtgaggagtgcctctgcccggctgccaccctgtctgggaggtcaggggcgtctctgccccgccgccaccccgtctgggaagtgaggagcgcctctgcccggccgccaccccgtctgggaggtgaggggtgtctctgcccagccatcccgcctgggaagtgaggggcgcctctgcccggccgcccttcgtctgggaggtggggagcgcctctgcccggccgccccgtctgggaagtgggcgcctctgc

SEQ ID NO: 937188 - DNA, 613 bp, Homo sapiens
cctcctgcgggtctccgggcggcgtcacctcctctgaggcttcccctccctttccaccccgtcgctctgactgccttacggaaagggcaccaaggaactctcgggtgaagcagcttcctgttctcagtgctttccctccgtccggtgagattcccagtgagactgtttgaataaaatcacctggcaaaggaaaagcccaaactttagggaccagccacggctgagtaggggctgagcggtggcagccaatgagatctcgagtcggacgtgcaggccgccgttccaattgggcggccgccccagagtaaccaatgggaagcgcgggaaggccgggagggggcgggagctctcacctgccactggtctaggtgtctgaggagcatcttcctggctcagagaccttttgctccaggtgctcatgccgcaaatggcaatctgcgcgcgaactaattcgcggccgcataatttaataacwtcctccatccatgagtccgcgactgctctggaaaattggttcagtagtaaacagactcctagcaggtggaaaaaaaacaggcgaggcatcctgggcctggtctctcctggaggtcgggacgttgcagcctttcaggac

SEQ ID NO: 937189 - DNA, 564 bp, Homo sapiens
ctggatcagcaagcacagtggtccccaacctttttggcaccagggaccagtttcatggaaaacaatttttccatggaccaggttgacggatggtttcaggatgattcaagtgcattatatttatggtgtactttatttctattattattacattgtaatatataatgaaataattatacaactcaccataatgtacaatcagtaagagctctgagcttgttttccttcaactagacggtcccatctaggggtgatgggagatagtgacaggtcatcaggcattagattctcataaggagcatgcaacctacatccctcacatgcacggttcacaacagggttcacactcctatgagaatctaatactgcccttgatctggcaggaggtggagctcaggtggtaatgctcactcactgccgctcatctcctgctgggcagtcyggttcctaatgggccaatgaccagtaccagtccgtggcccaggggttggggatcctagagttagtggatacaggtgtgccatttattgagccagggaatggaggagaagcaatttgaaggcc

SEQ ID NO: 937190 - DNA, 636 bp, Homo sapiens
gggctaacagcccccatgattcaattacctcccaccaggtccctcccactgggtctctcccatgacacgtggggattatgggaactacaattcaagatgagatttggctggggacacagccaaaccgtatcagaaggattttaattttgagacttcctgtgatgtgcgtgaattccctacaatttgcaaatgtgcctattcatcaagacttctattttggaataagtatgggtactctgtctttgacaagttatcatcaaaggaaacaatgaaaattaagtttatggaagtcacaagtccatgttgatacaagaaaatgttaattgtcttccatataaatttccaaagctgtttatcaaaacttagaatgctgtacagaccratcccaattacaagaatcttaaatatagttgtgatcaagttgctaatcataacctgttgcaaacccacaagtccactgattcactgaagtaatttagctaaaagttatctgtgaagacactactgtttgctgtgcttcttagttctccttttacataccttatatgaagaaattcaatggctgggtgtagtggctcacacctgtaatcccagcactttgggatgctggggtgggaggattgcttgaggccagga

SEQ ID NO: 937191 - DNA, 738 bp, Homo sapiens
attcttttctttctttccaactttcattttaggttcaggggtacatgtgcaggttgtacatgagtaaattgcatgtcacagggatttggtgtacagataattttgtcacccaggtgatcagtataatatccttgatatagtttagatgtgtgtccccaccaaatctcacattgaattgtaatccccagtgttggagatgggacctggtgagaggtgattggatcatggtggtggatttctcactaatggcttagcaccatcctcttggtgctgttctcctgatagtgagtgagttcccttgagatctggtcatttcaaagggtgtggcacctcctgccttgctctctcctgctcttgctctggctgtgtgacatcctcctccccctttaccttctgccaagatggtaagtttcctgaggcctctccagaagccaagcagatgccagcatcatgcttcctgtacagcccatggaactgtgagtcaagtaaacctcttttctttacaaattacccagkctcagatatttctttgtagcaattcaacaacagaacagtacaaccctatacatagtttttcaatcctcgccctcttcctacccaccaccatcaggtaggccctgtgtctattgttcccttaatggtgtccatgtgtactcaatgtttaagctcccactgacaagtgagaacatgcagtatttagttttctattcctgtgtcaatttgcttaggataatggcc

SEQ ID NO: 937192 - DNA, 622 bp, Homo sapiens
aaaggtggaattgaggccgggcatggtggctcatgcctgtaatcccagcactttgggaggccgaggcgggcggatcacctgaggtcaggagtttgagatcagcctggccaacatggtgaaaccccatctctactgaaaatacaaaaattagttgggcattgttgcacacgcctgtactcccagctactcggaaggctgaggcaggagaatcacttgaacccgggtggcggaggtttcagtcagccaagatcgcsccactgtactccagcctgggtgacagagtgagactctgtcacacacacacacaaaaaagtacggactctcagccaggcgtggtggctcacacctgtaatcccagtactttgggaggtcaaagcaggtggatcacttgagccgaggagcttaagacctgcctgggtaacatagtgagaccccatctctgtaatgatagaaataaatacaaatgtttttaaaactactgacccaggctggaagcagtggctcctgccttgtaatcccaccactttgggaagccaaggtgggaggattgcttaagcccaggagtttggaccagcctgggcaacatggtgagacctcattctacaaaaaaaaaaaaaattaa

SEQ ID NO: 937193 - DNA, 637 bp, Homo sapiens
ttttcaacaagtcaatttcattaaataaatacataaacaaagagtgagggtattttccaggttaaaaaagtcttgagctaaataatcaaatgcaatgtgtgtcccttgattagaagaaactaatttgagcaaaccagccacaaaagatatttcagggagaccaagctggaaggatcacttgaggccaggagtttgagaccagcctgggcaacgtagtaagacctccatctctacaaaaacaataaattagctgggcatggtggtgtgcacctatagtcctagctactcaggaagctgaggcaggaagatcacttgagcccaggagtttgaggctgcaatgagctatgattgtttcactgcacttcaggctgtgtgaaagagcaagactttgtctcaaaaaataaaaggacatttcataataattgaggaaatctgaatgtggactgggtaataaatgatataaaaaaactattttttattytgtttgaaaagatgattttgtaaccatacaggaaaatgttcttattttttagaaatctgcactaaataatttaggggtaaaatatcattttctttaatatactttcaaacacaagcaaaaaataatcatgacacaaatatagcaaaatgtttacaa

SEQ ID NO: 937194 - DNA, 717 bp, Homo sapiens
caaaaaataatcatgacacaaatatagcaaaatgtttacaatctatgttctatgtttgcctatgagtgccattaatctcatctctctgcttttctgaaagtttgaaaatttcaaagttttataataaaattttttacatcccataattttataataaattttttaaagtttgaagcaaatcaacaactatagcttcaaaaatattctgacccacaataaacattgaacagggtatatttctcccatttcctaaaaaagttgcccaggaagagtatgagagttccatagctctcccaaggctcattattcttcatcacttcatgggaaatcccaaaataaatttttaaaaagttgtttaaatttataatgtttttgattctataataattttataataaaataattttataatgtttttgattttatatttttaatttataaaaatttttatacatgtttatgtttgaaatgtctatttcaaactttatgagatattaaaatataagtaatatagttcatcattttagaaatgccatgyttttcttctccagcaattacataatcaaagagtaactgtagtttttcctagaacattgctttgtaggctgggcatggtggttcatgacactttaagaagccaaggcaggcagatctcttgagatcaggagtttgagactagactgggcaacacagagaaaccctatgagtagtaaaaac

SEQ ID NO: 937195 - DNA, 466 bp, Homo sapiens
gctttagttatttgatgggaggaaaaataagtgggaggtgaggagtaactcctgggctctgatgagtattctaggcaagtacagatctggaaagcctgtatgcaaaggaggaactcactgaaaagtgctggcctgaggagggcagaagggagggctggggaagccagcagggggagcaaaggagtaggctccagctgggtgaagatgttggtgtggtaygttatgtaaaatatacaaattattattgggaataaccacgtctcagcagtgcgagttctcagtttgaagaatgggaaatggaaaggatcagattcagagacggcaacttactcaaggtcacagcattttaaacccaaatgaaatctcctaggcccttcatgccacactcatccatccctacctacttgtgttgcaaccaagggccccactgtagtgcctaggggagcaggtctagggcatagtgcca

SEQ ID NO: 937196 - DNA, 596 bp, Homo sapiens
agggcaccaagtccctagactgcacacagcagagggactctgggctcagcccatgaaaccacttttttctcagaggcctccaggcctgtgatgggaggggctgttgtgaagacctctggcatgtcctggagacattttccccattgtcttggtgattaacattcagctcctcgttacttatgcaaatttctgcagccagctaggatttctcctcagaaaatgggattttcttttttattgcattgtcaggctgcwaatttttcaaactcttatgctctgtttcctttttaaaactgaatgcctttaacagcacccaagtcacatcctgaatgctttgctgcttagaaatttcttccaccagcttccctaaatcatctctctcaagttcaaaattccacaaatctctaggacaggagcaaaatgctgccagtctctttgctaaaacgtaacaagcatcacctttgctccagttcccaacaatttcctcatctccatatgacaccacttcagcctggatttcattgttcatatcactatcagcattttgttcaaagccatttaacaagtctctaggaagttcgaaactttgacgcatt

SEQ ID NO: 937197 - DNA, 596 bp, Homo sapiens
agggcaccaagtccctagactgcacacagcagagggactctgggctcagcccatgaaaccacttttttctcagaggcctccaggcctgtgatgggaggggctgttgtgaagacctctggcatgtcctggagacattttccccattgtcttggtgattaacattcagctcctcgttacttatgcaaatttctgcagccagctaggatttctcctcagaaaatgggattttcttttttattgcattgtcaggctgcaaatttttcaaactcttatgctctgtttcctttttaaaactgaatgcctttaacagcacccaagtcacatcctgaatgctttgctgcttagaaatttcttccaccagcttccctaaatcatctctctcaagttcaaaattccacaaatctctaggacaggagcaaaatrctgccagtctctttgctaaaacgtaacaagcatcacctttgctccagttcccaacaatttcctcatctccatatgacaccacttcagcctggatttcattgttcatatcactatcagcattttgttcaaagccatttaacaagtctctaggaagttcgaaactttgacgcatt

SEQ ID NO: 937198 - DNA, 596 bp, Homo sapiens
agggcaccaagtccctagactgcacacagcagagggactctgggctcagcccatgaaaccacttttttctcagaggcctccaggcctgtgatgggaggggctgttgtgaagacctctggcatgtcctggagacattttccccattgtcttggtgattaacattcagctcctcgttacttatgcaaatttctgcagccagctaggatttctcctcagaaaatgggattttcttttttattgcattgtcaggctgcaaatttttcaaactcttatgctctgtttcctttttaaaactgaatgcctttaacagcacccaagtcacatcctgaatgctttgctgcttagaaatttcttccaccagcttccctaaatcatctctctcaagttcaaaattccacaaatctctaggacaggagcaaaatgctgccagtctctttgctaaaacrtaacaagcatcacctttgctccagttcccaacaatttcctcatctccatatgacaccacttcagcctggatttcattgttcatatcactatcagcattttgttcaaagccatttaacaagtctctaggaagttcgaaactttgacgcatt

SEQ ID NO: 937199 - DNA, 439 bp, Homo sapiens
gcacagaagaccaaactggtccatgccactgatcatcagtctagtgtctcctgaactcaagtagggcattgaaagcccattccttctaatctgcacaatgaatgtctagaatggcttctctttccttgggagaagtactggggtcttctttcctgagtttcacagactcagagctttgtcagtgacttcagaatttagtgtgggaacagtcrgatggatctagccttctgaacagggctgcagttatgccatgcagtctactactttctcctgcctgttggactctggagccagactgcttgagtttgaaacccagctctgtgaccttgatcagtttaccctttctgagcctatctttcatgtgtaaatgggagctaatagtagacctgtgatatggtttggctgtgtccccaccaaatctcgtcttgaattgtagctc

SEQ ID NO: 937200 - DNA, 666 bp, Homo sapiens
atgctgcactcaagaagccagtaccttgggtgctgagggagtttgaagcactgtgtctaactgaaagaacagggaccattcagatccatgtttcctgtagagcatccaatgcagcaagtgccacccacccatagcacctgagccagaagcccaggaattgccctggacacctctctctctccaccccacatccagagtccccagtcctgtgtgtcaacctcttaaattcacgttcagctcccttcaccactgtccatctgcacggcctcagccgcgtcatcatcccgtggaccgcagcccgccccgcccatgccctctactcatgaaaccaaggctgcctgtcgagttttaggcayggggacacatcagtaaacacaacggataaaagcccttgccctgggctgggcacggtggctcacgcccataatcctggcactttgggaggctgagacgggcagatcacaaggtcaggagttcaagaccagcctggccaacatggtgaaaccccgtctctactaaaaatacaaaaattagccaggcgtggtggtggacacctgtagtctcagctacttgggaggctgaggcaggagaattgcttgaacccgggaggctgaggttgcagtgagccgagattgggccactgcactccagcctgggagacagagt

SEQ ID NO: 937201 - DNA, 436 bp, Homo sapiens
ctgtgatgggaggggctgctgtgaaggtttctgacatggcctggagacattttccccacggtcctggggattaacattaggcaccttgctacttatgcaaatttctgcagccggcttgaatttctccccagaaaatacgttttttttttctatcacatagtcagattgcaaattttccaaacttttatgctctgcttcccttataaactgaatgcctttaacagcaaccaagtcacatcatgaatgctttactgcttrgaaatttcttccgccagacaccctaaattatctctctcaagttcaaagttccacaaatctctagggcaggggcaaaatgctgccagtctctttgctaaaacataacaagagtcatctttactccagttcccaacaagttcctcatctccatctgagaccacgtcagcctggattttat

SEQ ID NO: 937202 - DNA, 436 bp, Homo sapiens
ctgtgatgggaggggctgctgtgaaggtttctgacatggcctggagacattttccccacggtcctggggattaacattaggcaccttgctacttatgcaaatttctgcagccggcttgaatttctccccagaaaatacgttttttttttctatcacatagtcagattgcaaattttccaaacttttatgctctgcttcccttataaactgaatgcctttaacagcaaccaagtcacatcatgaatgctttactgcttagaaatttcttccgccagacaccctaaatyatctctctcaagttcaaagttccacaaatctctagggcaggggcaaaatgctgccagtctctttgctaaaacataacaagagtcatctttactccagttcccaacaagttcctcatctccatctgagaccacgtcagcctggattttat

SEQ ID NO: 937203 - DNA, 719 bp, Homo sapiens
ttgcttcagtgctgcagcaataccctactcactgcagggctggcaactgtaccatttaaaccatttcatgtttaccatgatcatatgcttcaccaccctaactcctggtcagaatttcccagttgccattttagagggtcaagcctaataagagatccattcccaagatatattctcagatggaatyggtgtatgctaaacaggattttggtggcaatctcccaacttgtaatatttaattcagcctgtctttcatggcccctgtataaccatctattgctattacaggcccttggaaccaatgaatgttatgcgtgcattcagttccagtagccaatggagcaagcacagcctaagtgagcaatatgcacttctacatgtggccaccagcccccagacaccctagtcgccattgctgttattgggattctggggccttggcctacatcctagtctaaagcggttgatgctggccatccctctgcaggaagggcagtgggttgaacttttgaggctcctttggtgaagtgctgttctggcttgaactgctgccacagtcccacaagaacagcattaagctatttttgcagtaggtgtccctgccaatatcaggtcataccacatttgttggtgggtcaccctgatgggccccttggctgttccctttcctttggctcccttgtcttttaccccagtagtacacacccctcagtttctcc

SEQ ID NO: 937204 - DNA, 608 bp, Homo sapiens
cctggagcaaggaaagtggccacctaacaagctgtggctcttgaggaatgacactgccaaaaccatgcccagaaggaagatggagggataccccaactgccatgtccttctaacctctgatttcctgcccatgcctcccattggcctaacccaaccagaagactgatggcacagtagcccaggtgatgcaatctgtaaagttcagcctcctagacacagaaggatgtagaggagaaaacgtgcacaggaggtttgttatggaccgcatgtttgcatcctccattccccaatttatattgaagacctaactcccaatrtggtggtatttggaggtaattggatttagatgaggtcatgagggtggaacccatgatgggattaatatccttagagcaagagagattagtctcttcctcccatgggaggaaaaagcaactttgtaagttaggaagagggccctcaccaggaagaaaatctgctagcaccttgactttggacttcccagcctccagaactgagacataaatatccattgtttaagctacccagcctatagtattttgttatgccagctcaagttgactaagacaaatctctagtggtaattc

SEQ ID NO: 937205 - DNA, 614 bp, Homo sapiens
tcagggtacaatgttgttgttagtatatttcatttcttatctctgtaatctttggcactaaactctttccttgtataatacacaggtttaatctatgcatacttaaaaaacttctttttttctctcatgcctagaaggcatcaaattccaaatggtcaggcaaccagagcctcggacaatggctaccctttgctaggaaccctttgatagacctctgggaggaatctgactgccattttcccccaaaacaatgccccctgtcatcaggaagcagctaagacctgtcatcatccatattctaatggcagttagatgtatctcttcagagggggaaatgatacgggagtgctaggaagggaagagtgtgatccctttaaataatatgraagcggggaagaaaagttctgggtagaggagggtgtggtccctggctagacttccaccaccacggacctaggtgaggacaggcatttcctgcccaaatgttgcatttcccaagaccaccctggccagctacgcccccatcctggggctgtaaaaacccaagaccctagcgggcagatgacacacaggtggacagatgtgaagaggagcacatcagacagaagaagatg

SEQ ID NO: 937206 - DNA, 628 bp, Homo sapiens
acttaaattgtgaagatttcatggacatttatcagttcccaaaattaatacttttataatttcttacacctgtctttactgcaatctctgaacataaactgtgaatatttcatggaaatttattagttcccaaaattaatactttcataattycttacacctgtcttactttaatctcttaatcccgtcatcttcgtaagctgaggatgtatgtcacctcaggaccctgtgatgattgcgttaactgtacaaattgtttgtaaaatgtgtgtttgaacaatatgaaatcagttcaccctgaaaaagaacagaataacagcgattttcagggaacaaggaaagataaccataaggtctgactgcctgcggggtcgggtagaatagagccatatttttcttctcacggaaagcctatagacggatgtgtgagtagaagaaatatcactgaattcttttcccagcaagaaatattaataattgaggccctggggaagaaatgcattcttgggggtaggtctacagatggccgctctgggattgtctgtcttatgcggttgagataaggactgaaatataccctggtctcctgcagtgccctcaggcttactaggattggaaaattccagcc

SEQ ID NO: 937207 - DNA, 676 bp, Homo sapiens
accaaaagatacccctgtgaagttttaaaaatggcaaaaataaaagcaatcaatataaaaaaaatctcaaaggtgcttcagggtgcagataaaagccccagccaggccgggcatggtggctcacgcctgtaatcccagcactttgggaggccaaggcgggyggatcacgaggtcaggaaatcgagaccatcctggctaacacggtgaaaccccgtctctactaaaaatacaaaaaattagctgggcatggtggtgagtgcctgtagtcccagctactcaggaggctgaggtaggagaatggcatgaacccaggaggcagagctggcagtgagccgagatcgcaccactgcactctagcctgggcaacagagcgagactccctgtcaaaaaaacagaagccccagccagttttataaaagactttgtgaggccagcacatggtaaacacagcatttataaggcaggcccagggaaaatggctaaacttgctcatgtcccagttcaaacctggaaaaaatagtccccagattcactttttagtgaatggttgtcatctttcaataatttaaagactctaataaaaagctttatagttaaaagatgtctaattctcccttgcctcctgcctctattaatcaaaagtatccagtcaactgtagaggcaatggtaacaaag

SEQ ID NO: 937208 - DNA, 606 bp, Homo sapiens
cagtgaacttcctaaagtcacttctttctgactttatcttgccttgtaaatgtacagcagcatctgtctttaaactgttaccaatataaaaagtatccaggccaggcggggtagctcacacctgtaatcccagcactttgagaggccgaggcgggcggaccacctgaggtggggagttcgagaccagcctgaccaacatggagaaaccctgtctctactaaaaatacaaaattaaccaagcatggtggcacatgcctgtaatcccagctactcaagaggctgaggcaggagawtcgcttgaacctgggaggtggaggttgcagtgaaccgagattgcaccactgcaccccagcctggggaagaagagcgaaaccccatctcaaaaaaaaaagaagtatccactctcccaataaaaagcattccgcaaaatgcttctgcctagatttgcctggttaaacctcatgaatgtcatttattcctgcacttttgcatcaaccattgagaggcaggcctagagaacacatgtgacctctgtcctcggagctcacaacatacaaggtgcatccttgggctggagactgctaaggcacaaagtgtgtcttcatt

SEQ ID NO: 937209 - DNA, 746 bp, Homo sapiens
ggagtttgctggaggtccactccagatgctgtttgcctgggtatcaacagcagaggctgcagaacagcaaatattgcagaacagcaaacattgctgcctgatctttcctctggaagcttcatcccagaggggcacccccctgtatgaggtgtctgtccatccctactgggaggtgtctcccagttaggctacacgggggtcaggamcccccttgaggaggcagtctgtccattctcagagctcagtcgtcatgctgggagaaccactgctctcttcagagctgtcagacagggacatttaagtctgcagaattttctgctgccttttcttcagctatgccctgcccacagaggtagagtctatagaggcagtaggctttgctgagcagtcgtgggctccgcccagtttgagcttcctggccactttgtttactgactcaagcctcagcaatggtggacacccctccccacaccaggcttcagccttgcaggttgatctcagactgctgcactagcagtgagcaaggctcagtgggcgtgggacccgccaagccaggcatgggagtgtcccatttttccaagtctgtcacggcttcccttggctaggaaagggaaatccctcgaccccttgtactacttgggtgaggcaatgccccgccctgcttcttctcaccctccatgggctgcacccactgtccaaccagtcccagtgagatgaaccaggtacctcagttggaaatgccggaa

SEQ ID NO: 937210 - DNA, 746 bp, Homo sapiens
ggagtttgctggaggtccactccagatgctgtttgcctgggtatcaacagcagaggctgcagaacagcaaatattgcagaacagcaaacattgctgcctgatctttcctctggaagcttcatcccagaggggcacccccctgtatgaggtgtctgtccatccctactgggaggtgtctcccagttaggctacacgggggtcaggaccccmcttgaggaggcagtctgtccattctcagagctcagtcgtcatgctgggagaaccactgctctcttcagagctgtcagacagggacatttaagtctgcagaattttctgctgccttttcttcagctatgccctgcccacagaggtagagtctatagaggcagtaggctttgctgagcagtcgtgggctccgcccagtttgagcttcctggccactttgtttactgactcaagcctcagcaatggtggacacccctccccacaccaggcttcagccttgcaggttgatctcagactgctgcactagcagtgagcaaggctcagtgggcgtgggacccgccaagccaggcatgggagtgtcccatttttccaagtctgtcacggcttcccttggctaggaaagggaaatccctcgaccccttgtactacttgggtgaggcaatgccccgccctgcttcttctcaccctccatgggctgcacccactgtccaaccagtcccagtgagatgaaccaggtacctcagttggaaatgccggaa

SEQ ID NO: 937211 - DNA, 596 bp, Homo sapiens
gaccagagcttagtgcagagccctactcagaaagagggcttaataaataggaacaactctgggaagattgtgtatattctcaagactgacaactaaaccaaaaatgacaatctccagtgagatttatttcaggacaaaataaaggtctgaagtttccttgggattaaaatttttaattgttcctgcctaaaatgtttctttcaaaaaaaaaaaaaaactggattagggcactaagctttatttaggtaaactgtgatctyctaccaattttattcacaaatataaaacagcctgagtagcgccaaatattctcagtacccaagttttacagctaccttccaagaacagaattttcaaagccacatgaaaaccagcaagctcaggccttttggttgtgtacatttttaagaagcagaagagagagggacgaggacctgagagcacaaagagagtaaaacaaaaacaaagtttagtaccagatgcagactcaggaaggcctgagcgctatccaagtgggagttttgagtgatcctcagcaactgtgaggacctttgaaaggtttaaaaatataaattgtggccactaaaaaaaatatg

SEQ ID NO: 937212 - DNA, 540 bp, Homo sapiens
ctgcaattactttccctgtgtatttgttcctttttcccctgtcagtcctccaatatctatataactaaatttccctgtgtaaattatctcttaaaatagttggtgtggtttcttttttcctgactaaaccctgactgatacaaatgttaatatttgagttctagtgagttgggacattaaggagacaacgtatctctaagacagtctcttccaattgtcaattgtttaaaccytctttcggtaccagtatacaaaagagtggtgccaggagtttcaaccactatattttattgccttaagaaatttctaggccaggcgcagtggctcatgcctgtaatcccaacattttaggaggccaaggcgggcagatcacctgaagtcaggagttcaagaccagcctggccaacatggtgaaatcccgtctccactaaaaatacaaaaattagctgggcatggtggtggatgcctgtagtcccagctactcaggaggctgagtcaggggaatcacttgaaccagggaggcggaggttgcagtgaacc

SEQ ID NO: 937213 - DNA, 845 bp, Homo sapiens
cgagtagagcagacccctcttgccctgccttcacctctttcctgccagaaaccattcgccaagtttgtggagtcgtggcgctggatgggcttgtgtgtttgtaccttccttttttccaaaaaggacatgagatggcttgtagtataacagtttcaaaaataagtgaagaggtctggatgaagggcaagagtcgaattggtgcccacgatgcatgccgtgggtcttgtgtgcgtgggaaggaacctgacgcttgttccaagcttccccgcagccaccacagaaagaaccacagtcacagccagtttatgacagtgactcagagcacgagctttgaagcgacgcagacctgggctcaaattcaaactctggctcccctgctttgtaaccatgtgtgtttgagaggctcttatctgtgccaagccttagtttacttttctgtaaaatggggctaacartatctaccttatagggttctagagaggattaaagagcgtaatataagaatttggctgggcatgggggctcatgcctgtaattccagcaatttgggaggccaaggtggacagatcacttgaggtcaggagtttaagacaagcctggccaacatggtgaaatcccatccccactaaaaatgcaaaaattagctaggcatggtgtcaggttcctgtaatcccagttattcaggaggctgaggcaggagaatcacttgaacctgggaggcggagtttgcagtgagccaagattgtgccaccacactctagcctggtcaacagagtgcgactctgtcaaaaaaaaaaaaaaaaaaaaaaaaaaaacacacagtatctagaatctaaaaagtactc

SEQ ID NO: 937214 - DNA, 670 bp, Homo sapiens
tcttttttggttccatatgaattttaaaatagttttttctagttctatgaagaatgtcaatggtagtttaataggaatagctttgaatccataaattgctttgggcattatgtccattttaatgatattgattcttcttatccatgaggatggaatgtttttccatttgtgtcatctccaatttctttgagcagtgttttgtaattctcattgtagagatctttcacctccctcataaactgtattgctaggtattttattcttctcrcagcagttgtgaatgggattgtgttcctgatttggctctctgcttgactgttgttggtgtattgattttgtattctgagactttgccgaagctgtttatcaggttaaggagattttgggctgagactgtggtgttttctagatatagaatcatgttgattgcaaacagggatagtttgattcctctcttcctattgggatgccctttatttctttctcttgcctgattgccctggtcaaaacttctaatactattaatatgttaaataggagtgatgagagagggcatccttgtcctgtgctggttttcagcttttgcccattcagtatggtgttggctgtgggtttgtcataaatggctcttattagtttgaggattgtggatctaaccaaactaaagagc

SEQ ID NO: 937215 - DNA, 647 bp, Homo sapiens
ggaaatggccatgtagttttcctgttttgatacaacattttgctggagggtaggccctagttgcagctttcttggtgggtaaaactccagtagaaatccagtcttattggcttggagaaccacaggacagattttggaggccatggcagctggagattgagggggaaacccacaaaaggtaaaagccatgggtggggcggggcaagggggattctatatatgaacatggataaaatctctggctgacccctgtactacatatgcacagggataactccaaataggccttatgagtctaaaataactgaattgagttttcagctgctccactccacaaaaaacaggattggagtttgaattaaakttaaattaattgcctgcttaaaaacaaaaacaaagaaaacaaattcctcaaagggacataacagattccagtgtccctacaacacatcattcataatattcatgtgatccacaattactagatttatgaagaaacagagaaatgtgatctcaagacaaaaggcaaataagtgaagactgacactgcgatgacccagaggttggaattagcacatagggattttaaaacaactattataaccattccaaggatttagagaaaaacatgctcacaatgaatgaaa

SEQ ID NO: 937216 - DNA, 775 bp, Homo sapiens
atgaatacaggttactgcagacttcaccttctgggttcaagtgatcctaccacctcaacctgccaaatagctgagactgcaggtgtctgccatcacacccagctttttaattttttgtaaagaggaggtccaagcttgtctcaaactcctgggctcaggcaatatttttgtcttagcctcccatagtgctgggattacaggcatgagccaccgcatccagccaacatgatttcatgtatagaaaatctaaaaactccaccaaaaaactcttcgatctgataaataaattcagtaaaactgcagtatacaaaatcatcatctgaaaactagtaatatttgtgtatgttaatagtgaactatctgaaaaaggaatcaagaaaacaatttacaataacatccagaaaataagataactaggaatgaacttcacaaaggaggtaaaagwtctccatactgaaaactgtaaaatattatgaaagaaattaaagatgatacaaataaatggaaagatatcttgtattcatagattgaaaaacttaatattgttaaaatggtcataccacccaaagcaatgtacagatttaatgcagattgtctatcaaaaggccaatgacattcttcacagaaataaaaaagaatcctaaaactcatatgaaaccacgaaagatcccagatagtcaaagaaatcctgagtaaaaagaataaggccaaatgcatcacattttctgactttgaaatacattacaaagctataatagctaaaacagcatggtac

SEQ ID NO: 937217 - DNA, 500 bp, Homo sapiens
actgcaaggtggcagtgaggctaggggaggggagcccaccattgctgaggcttcagtaggtaaataaagcagccgggaagctcgaactaggtggagcccactgcagctcaaggaggcctgcctgcctgcctctgtagactccacctctgggggcatggcatagccgaacaaaaggcagcagaaatctctgcagacttcaatgtccctgtctgacagctttgaagagaccagtggttctcscagcacagagtttgagatctgagaacggagagactgcctcctcaagtgagtccctgacccccgagtagcctaactgggaggcacccccaagtaggggcagactgacaccccacatggccgggtacccctctgagatgaagcttccagaggaatgatcaggcagcaacatttgctgttcagcaatattcgctgttctacagcctccactgtgatacccaggcaaacagggtctggcgtggacgtccagcaaactccaacag

SEQ ID NO: 937218 - DNA, 569 bp, Homo sapiens
ggaagattgtttgagcccaggaggttgtggctgcagtgagccgtgataatgccctgcactccagcctgggtgacagagtgaaaccctgtcacaaaaatataaaaagaaaaaatattttaaactcatatattgttcaaagagctaatttacacaatatgttaaaagcctcctataattaacaagaaaatgatcaataacttgtggggaaaagcaagagatcagattgttactgtctgtgtagaaagaagtagacataggagactccattttgttctgtactaagaaaaattcttctgccttgagattctgttaatctatgaccttacccccaaccccctgctctctgaaayacgtgctgtgtcaaactcagggttaaatggattaagggttgtgcaagatgtgctttgttaaacagatgcttgaaggcagcatgctcgttaagagtcatcaccactccctaatctcaagtacccagggacacaaacactgcggaaggccgcagggacctctgcctaggaaagccaggtattgtccaaggtttctccccatgtgatagactgaaatatggc

SEQ ID NO: 937219 - DNA, 596 bp, Homo sapiens
tgatattttctatgtgtgcatcagaatttcaagagatgttgtcaaatgttataataaaattaataagctcaaatcccatgcatgacatttaatctattccaaaagaatgccattatgaaacgtaggaaatatagtaatccctcttatccatagaggatacattccaagacccccagtggttgcctgaaactgtaggtagttcaaatcctatatatactgtactatgtattttttttctatacatacatagctatggtaaagtttaatttataaattaggcatagtaagaaactaacaacaataaaaatgataaaatagaacatttataatgtactgtaataaaagtagatgaatgtggtctcttactctctctcaaaatatcttgttgttatacactcacctatttttagacctyagttgaatgctggttaactgaaaccagggaaaacagccacgtacccggggtgggtggggtggggggcagggggaactaaacatgctttctttattctgaagttctcaaaatcctaataattgagtaactttattctttccctgtgtaactccaggcaatttattgaaactctatgcaccta

SEQ ID NO: 937220 - DNA, 667 bp, Homo sapiens
cagtcgatggcctcaactttgctgggctacaggtgtgttcctggtggcctttagatgacatcattgacaagattatgaccaagataattttgatgcatcctagtttcagcttaaaatttgggaaaacattcatttaaaaataacccataccaaggttttcacaaaatacaatcaaaatcagggcatattagtaggtagctcatatgtgtacctgctcggtatgtgctgttgtcattgatgtctggaatgaagtaatgaattagaaagtcttcaaacaccaaagaatgatttaatgaactatatttacatagtgtatataacacatataacataattactttttcctaaagataagaaattataattgtgcattttagaaagatttggtcaaaagaggaggaggtatgaggattttatcatrattctcaatttcacaagcatttctgtaaattaggagcctactgtactaactagaaatggtgaatgggttttcaacttcaattccatccatcacgtcccatctaaatgctctgaggtggtaacaacaaactgtgtcctagatcttcttcaagctgaagtgctttgggatgaccgcatattccaacaataccccctggaggccagttggccagggccaggggacacttgtcctcacagaagcaggtct

SEQ ID NO: 937221 - DNA, 667 bp, Homo sapiens
cagtcgatggcctcaactttgctgggctacaggtgtgttcctggtggcctttagatgacatcattgacaagattatgaccaagataattttgatgcatcctagtttcagcttaaaatttgggaaaacattcatttaaaaataacccataccaaggttttcacaaaatacaatcaaaatcagggcatattagtaggtagctcatatgtgtacctgctcggtatgtgctgttgtcattgatgtctggaatgaagtaatgaattagaaagtcttcaaacaccaaagaatgatttaatgaactatatttacatagtgtatataacacatataacataattactttttcctaaagataagaaattataattgtgcattttagaaagatttggtcaaaagaggaggaggtatgaggattttatcatgattctcaatttcacaagcatttctgtaaattaggagcctactgtactaactagaaatggtgaatgggttttcaacttcaattccatccatcacrtcccatctaaatgctctgaggtggtaacaacaaactgtgtcctagatcttcttcaagctgaagtgctttgggatgaccgcatattccaacaataccccctggaggccagttggccagggccaggggacacttgtcctcacagaagcaggtct

SEQ ID NO: 937222 - DNA, 698 bp, Homo sapiens
tacactcagacacacagacagtctaacctctcaattctctttaggcaatctttctcttttggaagtatctattatcaaaaacatctcttgtcacattacttcattttataatgttctaaattattatttatctttattagtttacattgtaggtcgtctgctctttaatgaggcttgggttggactttctattgaacatggggctttgagtcatccattttgcagcagctaggaggtttggggcattgatttcagctaaaaggatgagctctaattagtctatgaaaatcccagtaaagccttactcccaagccagcaccagtaccgttttcaggatgtgaggcttaagctcccatagcatatccttggctggagggcttggtcaaagaatttgtgctatgacagtctggataaatgggatatgaaggtaaacttggcagaagggctattctggaaaaagtttccctacttttaagtgggagccatagaaagagtatgggtgtaaggccagaatggctaaagctacttwtctgacaatctgaagacaaagcctcatggcagaaggaagaacacagagcaatgcatggaaatggggccagagtcattgcattaagtcaaggccagagcccagcctgcctctagactttcactcatgtaaattccctttttgtgggagccagtttaatttaggttttttg

SEQ ID NO: 937223 - DNA, 620 bp, Homo sapiens
ccgtgtaattgtatggttttgagtgaatttcttagtattgatttctaattcgattgcactgccatctgtatgagtggttgtcatgatctcagttgttttgcatttgctgaggtgtgttttacttctgattatgtgatcaattttggagyatgtgctatgtggaaatgaaatgaatgtatattctgtggtttttgggtggaaatttctgaatttctgcgatagatatcaggttctttagacccactgccgagttcaggtcctgaatatctttgttacttttctgtctcaattatcagtctaatattgttagtggtatataaaagtctcccactattatagtgtggaagtctaagtctctttgaaggtctctaagaacttgttttatgaatctagttgttcctgttttgggtgcatatatatttaggatagttagatccttttgtcgaattgaaccctttaccattatgtaatgtccttctttgtttgtcttttttgatctttgttgatttaaagtctgttttgttagaaactaggattgcaaccctgattttcttctgttttccactttcttggtgaatttttctccatctctttattttgatcatgcatgtatcattgca

SEQ ID NO: 937224 - DNA, 611 bp, Homo sapiens
ttactgctctgatctttatttcttttggtcctgcttattatggtttgtttttctcttgctcttcttgttttttaaaatgcatcacttgattgtttacttgaagtttttcgtgttttctgatgtaggcacttatagctataaacttcccccttagtactgattttggtgtattctataaattttggtatgttgtatttccattatcatttgtttcaagaagtttgtcaattgttttcctaatttcttcattgacccacaagtcatttaggaacatatggtttcattttcatttgtttttataggttctaaaattcctctggtttgtggttttctagttttattctattgtggtcagagaaggtgatagatattattttgatttctttgaatgttatgagacttgttttgtgacctacccatatggtctatctttgaaaataatccgtgtgctgaggaaamgaatgtgtattctgcagttgttgaatgacatattctgtaaatatctattcaatccatttagtctatagtgtagattaagtctgatgtttctttgttgattttctgtctggaatatctgttcaatgctgaaagtggggtgttgaagaccccaa

SEQ ID NO: 937225 - DNA, 744 bp, Homo sapiens
ccacctaccttggatgagggtagatcttccttactcagcccactgattcaaatgccaatctcttccataaacaaccacacagacatatggcaaaagtatgccctaccagctatctgagtattccttaatccaatcaagttaacaactaaaattaatcatcaacatctcctggtgtataagctaaggtaccagaatttccaaaccaactagaccacagcatttstcaaagcaaaaattttgttctgcatctgggcctttatgtatatatgtgtcattatatgcacacatgtatgtatgtatgcctctgtctatctatctatctatctatctatctatctatctatctatctatctatctatccatagctgtatggtaagttaggctcaaagcttgacacctttttggggtgtataatcacatatgtactggtgagttcataatcaatgaaaacttcataaggcactttatcaacaaaaggtgttgctggtaacaaatgaacagatcctttcaaatttcttaagaagtcaccaaactatgtctctctttgagatgaatgctatctcagatataggctgcatttcaagaatctgatctagtgcggcagaaattggaaaatagtttgaaaagtaaaaaatgccacacagacacaaggtgcttatcagcagatacagtgcggtctagaaaattattgccaagaattttggaattaaaaaatatgcgacaaaacattctgtgaattctgg

SEQ ID NO: 937226 - DNA, 744 bp, Homo sapiens
ccacctaccttggatgagggtagatcttccttactcagcccactgattcaaatgccaatctcttccataaacaaccacacagacatatggcaaaagtatgccctaccagctatctgagtattccttaatccaatcaagttaacaactaaaattaatcatcaacatctcctggtgtataagctaaggtaccagaatttccaaaccaactagaccacagcatttctcaaagcaaaaattttgttctgcatctgggcctttatgtatatatgtgtcattatatgcacacatgtatgtatgtatgcctctgtctatctatctatctatctatctatctatctatctatctatctatctatctatccatagctgtatggtaagttaggctcaaagcttgacacctttttggggtgtataatcacatatgtactggtgagttcataatcaatgaaaacttcataaggcactttatcaacaaaaggtgttgctggtaacaaatgaacagatcctttcaaatttcttaagaagtcaccaaactatgtctctctttgagatgaatgctatctcagatataggctgcatttcaagaatctgatctagtgcrgcagaaattggaaaatagtttgaaaagtaaaaaatgccacacagacacaaggtgcttatcagcagatacagtgcggtctagaaaattattgccaagaattttggaattaaaaaatatgcgacaaaacattctgtgaattctgg

SEQ ID NO: 937227 - DNA, 683 bp, Homo sapiens
ggtaaatgaggacacaagccaaggaatataggtggctactagaagttgaaagaagacaagggaatggattctcccttcagagcctccacaaggaaccagccctgctaatattttgattttagtctcataagactcatttcagacttccaacctctggaactgtgagagaataaatttgtgtttaagtcattaactttgtcataatttcttaccacagcaataggaaactataccactctccagrgcacacatgccagtgtctagagacattttttcctattgtagcaggagaggtggtactacttggtagtatctagtgggtggagactcaacctcctgcaagacacagagcagtctcccacaacaaataattatccagcccaaatgtcaccagtgcttgacagagcaggagcaccgtcatgttggacaaacaccaccactttaagttccagctctctttctagtgtcatgcatttcaaggaaatcacttctcttctaactacaagcagccagaaagagcagacagtaaaacacagataaacagaggtggggggaaaggctcttgggtaactgccaaacttcgccctcatacaatgggccccggtaaaacagtgggccccaataagcacattcctttcccttcaggtgcactaagttagggaagctaaaagcagaattggggg

SEQ ID NO: 937228 - DNA, 732 bp, Homo sapiens
cccccagtgcctggtttctccttgcacgtgaatccaggtcccagcatcttgtcattgacaggagcagccctggctcaccctcttggaaaacagaaagatgctcatggaggctggctgtgaggcaacctgagggctctgaagacctcctgtggggctcacactggggccagagcctcagcctctgacacccgagaatggagtaggcaggatgggtggggcagagaagaagaaagttctctggatgtcctggttagtcaccctgaccctgggaaatgcacactcacggctgaatcagggagaatcaagtctcttggccagaaaaacaagccattatggccagcgaagcgctcactaagcacacacaaatacacatatatgtgcacccacaaacacatagaattacacacatgctcaatacacacataggtacatgcacactaactcattacacatatgagcatgtatgcacacaacacacctatacacatacacttatgtacagatgcccaaatacacacatactcacacccttacacaatacgcatrtatatacatgtagtcctgacacacattcacacacatgtgcacacacacctacatacacaccacagtataatacacttagtagagtagtatcggggggcctcagttgtggtcagatggcctgacacttagtctgaattgttaatcattgaactgtgtaattttgtctaaatcttttcatctctgctt

SEQ ID NO: 937229 - DNA, 627 bp, Homo sapiens
cattgatggggatttgggtttattccctgtctttgctattgtaaatagtgttgcaacgaacatacacgtacatgtatctttataatagaatgatttatattcctttgggtatatacccagtaatgggactcctgggtcaaatggtatttctggttctaggtctttgaggaatcgccacactgtcttccacaatggttgaactaatttacattcctgcaaacagtgtaaaagtgtttctatttctccacagcttcgccagcatcttttgtgtcttgactttttaataatcgccatactgactggagtgagatggtatcacaatgtggttatgattttcatgtctctaatgatcagtgatgttgagcttttttcatatgtttgttggctacatagtagacacaataaaaaaatgataaagggaatatcaccactgaccccacagamgtacaaacaaccattagaggatacaataaacacctctaagcaaataaactagaaaatctagaggaaatgaacacataaattctggacacatatactctcccaagactgaaccaggaagaagttgaatccctggatagaccaataacaaattctgaaacaaaaaaaaaagcccaggaaccgaca

SEQ ID NO: 937230 - DNA, 682 bp, Homo sapiens
accctcttttatctttccatgctgtcctgcacaatttatctgcatatgtaaaccaacagattgacaaatgaccagagcctgattctgtgcttaaatattttgaagtcaaatttatttaaatatttttatttatttgttatttttttgaggtgaagtctcactctgttgcccaggctggagtgcagtagcacgatctctgctcactacagcctccacctcccaggttcaagccattcttctgcctcagcctgccaagtagctgagattacaggcatgtaccaccacacctggttaatttttgtatttttagtagagatggggtttcaccatgttggccaggctggtctcaagctcctgacctcaagtgatccccccacttcggcctcccaaagcactgggattacaggtatgagccactgtgcctggttaatgtttttatttttattttaaaaatttttttgtgaagacagggtctcactatgttgcccaggctgatcttgaactcctgggctaagtgatcctcctgygttggcctcccaagaaaaaataacaggttaaaatcagttaatatagtcatctcagttttgaaactcagtaaatgtggtttttaaaagttactttcatttctgataaatttagcctttttgaggccacaatttggccttttctctctagtggggac

SEQ ID NO: 937231 - DNA, 721 bp, Homo sapiens
tggtggagaacagcagtgagcaaggaaagcaccaccctgagggatctggcctatgttcagaggcctgtgggggtttgattttaaaattaacaaaagaagcctggacaacaaggcaaaaccttgtctctacaaaaaacacaaaaattagctgggctggctgggcacggtggttcatgcctataatcccagcactttggaaggccaaggtaggcggatcacctgaggtcaggagttggagaccarcttggccaacatggtgaaaccccatccctactaaaaatacaaaaaaattagccaggcatggtggcaggtgcctataatcccagctactcgggaggctgaggcaggagaatcgcttgaacccaggaggcggaggctgcagtgagctgagactgtgccattgcactccagcctgggcaacaagaatgaaactccttctcaaaaaaaaaaaaaaaaaaaaaaatagccaggcgtggtggcatgcgcttgtagccccagctactggggaggctcagttgggaggattgcttgagcccaggaggtcgaggctgcagtggagctgaggtatgccactgcactgcagcctgggcaacagtgagaccttgtttcaaaacaaaacaaaaaaagccacattcggactggctcatgcctgtaatctcagcactttgggaggctgaggcaggcagatcacttgaggtcaagagttccagaccagcctggc

SEQ ID NO: 937232 - DNA, 721 bp, Homo sapiens
tggtggagaacagcagtgagcaaggaaagcaccaccctgagggatctggcctatgttcagaggcctgtgggggtttgattttaaaattaacaaaagaagcctggacaacaaggcaaaaccttgtctctacaaaaaacacaaaaattagctgggctggctgggcacggtggttcatgcctataatcccagcactttggaaggccaaggtaggcggatcacctgaggtcaggagttggagaccagcttggccaacatggtgaaaccccatccctactaaaaatacaaaaaaattagccaggcatggtggcaggtgcctataatcccagctactcgggaggctgaggcaggagaatcgcttgaacccaggaggcggaggctgcagtgagctgagactgtgccattgcactccagcctgggcaacaagaatgaaactccttctcaaaaaaaaaaaaaaaaaaaaaaatagccaggcgtggtggcatgmgcttgtagccccagctactggggaggctcagttgggaggattgcttgagcccaggaggtcgaggctgcagtggagctgaggtatgccactgcactgcagcctgggcaacagtgagaccttgtttcaaaacaaaacaaaaaaagccacattcggactggctcatgcctgtaatctcagcactttgggaggctgaggcaggcagatcacttgaggtcaagagttccagaccagcctggc

SEQ ID NO: 937233 - DNA, 551 bp, Homo sapiens
aaggtggtatctcattgtggttttaatttgcatttatctgatgattagtgacgttgaatattttttcatatgtgtgttggctattcatatatctttttttgagaaatgtatattcatgttctttcccaactttttgatgtgattattagttttttttcttgctgatttgtttgagctcctcattgattctggatactagccctttgttggatgcatagtttgcgaatgttttctcccaccctgtgggtagtctgtttgctgattatttctgttgttgtgcagaagtttttagtttaattaagtcctatttatttattctttggttttgttgcatttgcttttggattcttagtcatgaattctttgcctaagctaatrtctagaagaggttttctgatgttatcttctagaattttttatggttttaggttttagatttaagtctttgatccatcttgggttggtttttgtataaggtgagagatagagatccagtttcattcttctgcatgtggcatgcccattttctcagcaccatttattgaatggtc

SEQ ID NO: 937234 - DNA, 580 bp, Homo sapiens
ccatgatggaaaggatccaatgcaaataatccacaaccacagagtacacaggcccctgaggagctgactccatcagaggctcaggtttggcctctgtgtatgtcaattgggcacttagcagtggtcagactggcctgggtgagtacatccttatgttactgaatccttccataaactctgcaccttccaccaaggccgcttcattaatgagccctttgagcaattgctggagtaactggagaaagaggctgcctgacattcagccagagcagatgatcacagcctcctgattcctgagatcttcctcagtaaggccttgggtgagtattctcataagacacaaatattctcatactctggatccattcaaagaggtccaayaatatgattcttgcctaatcttgcagttttattctttccaaattcctgaccatacagctccaaacactagccactgctcatgaatcagagtaaagcctcacctctggacatctcatcttccagtcaaagtggaccactgggaatacccatctctgtcacaatcctccagggattcctgaatgtggttgaggtgctgcaa

SEQ ID NO: 937235 - DNA, 480 bp, Homo sapiens
acgtagatttggtcttttcacatagtcccatatttcttggaggctttgtttgtttctttttattcttttttctctaaacttctcttcacacttcatttcattcatttcgtcttctatcactgataccctttcttccagttgatcccgtcagttactgaggcttgtgcattcgtcacgtagttttcacactgtggttttcagctccatcaggtcctttaaggactgctgtgcattggttattctagttatccattcatctaatttttttttcaaggtttttaacttctttgccattggttcgaacttastcctgtagctcatagctcagagtagtttgatcttctgaagccttcctctctcaactcgtcaaagtcattctccatccagctttgttccattgctagtgaggagctgtgttcctttggaggagtagaggcgctctgatttttagagtttccagtttttctgctcgttttttcc

SEQ ID NO: 937236 - DNA, 579 bp, Homo sapiens
ttggggaaacccaaagacagaatcagataaaagtacagtttttgcatccaaaagaatttgagacctcttgaaagttctatttttccaccaagttgataccactgtaccttggtttggattccccgatgcaaatcctgagataatgattttggtacaaatagtgtatttgggaggagattccagggggagcaggaaagtgagatagggaagggaaggaagaaagaaagtggatgttatcaagccaatcacgagtgcgggtagctacagcccagtcctgctgaggcactctggaactccgtagaacatgcctcagaactgtcctgtcccagaagtgaagaagttaagatgttgatcaccaactcctcattcatcattgatcaagggtttctctaggagtactaactttcctgtgcttctgagatgccctgcactcaractgatcatgtactgtggcctgaaaagaagtccttaggaagagagtctcatgtttgcagtaagcagcctttgagaatagagataaatgctgagggaatttgggaaggacactaaaaccccttttacacactcagagatgctaaa

SEQ ID NO: 937237 - DNA, 696 bp, Homo sapiens
tgactgtatatggagacaggatcttaaaatcctgtcctcattttaacttaactattatattaaagttaagtggaaatgatgacattagggtgggccctagtccaatatgatgagtgttctcacatgaaaagaaaatttagaataggcacacagaggcccagcatggtggctcacgcctgtaatcctaacaatttgggaagccaagatgggcagatcatttgaggycacgagttcaagatcagcctggccaacatggtgaaaccttgtctctagtaaaaatacaaaaaaatgagctgggtgtggtggcatgtgcctgtaatcccagctacttggaggctgaggcacgagaatcacttgaacccaggaagtggaggttgcagtaagctgagatcacaccactgcactccggcctgggtgatagagtgagaccctgtctccaaaacaaaaaacaaacaaacaaacaaaaacaaaaaataggcacacagaaagaagaccatgtgaagatgcagagaaggctgttacctgcaagccacagagagaggcctctgaatgaaaccaactctgctgacaccttgatcttggactctcagactccagaactgtgaggaaataaatttctgttgtttaagccccacagccctcggtactttatgtcaacggagcagactcatgcacctttgaccaaggaaatcctct

SEQ ID NO: 937238 - DNA, 531 bp, Homo sapiens
tgggagaaccactgctctcttcaaagctgtcagacagagacatttaagtctgcagaagttactgctgtctttttgtttgtctgtgccctgcccccagaggtggagcctacagaggcaggcaggcctccttgagctgtggtgggctccacctagttcgagctttgtttacctaagcaagcctcggcaatggcgggcacccctcccccaacctcactgccgccttgcagtttgatctcagactgctgtgctagcaatcagtgagactccgtgggcrtaggtccctccaagccatgtgcgggatataatctcctggtgtgcccttttttaagcccgtcggaaaagcgcagtattggggtgggagtgacccgattttccaggtgccatctgtcacccctttctttgactaggaaagggaactccctgaccccttgcgcttcccgagtgaggcaatgcctcgccctgcttcagctcgcgcatggtgcgctgcacccactgtcctgtgcccactgtctggcactccctagtgagatg

SEQ ID NO: 937239 - DNA, 814 bp, Homo sapiens
taattttgtcaagcatttcttaagcaggatacaaaaagcaccaatttaaaagggcaagaaataaataatttatttcatcgatggactccatagacaaagtttttttctttatctttttttttgagatggagtttcactcttgttcccaggctggagtttaatggcgcaatcttggctcatcgcaacctctacctcccgggttcaagtgattctcctgcctcagactcccgagtagctgggattacaggcatgtgccaccacgcctggctaattttgtattttcagtagagatggggtttctccatgttggtcaggctggtctcgaactccccacctcaggtgatccacccacctcggcctcccaaaatgctgagactacaggcattagccaccacgcccggccaaacatttttgaaggagcagaatagtcatggttttcatagtttaaactgatcagaccttatcaacgtctatgagggaaacatacttaaaattcagtaagaacataagcagaaaatacaataaaaatgaaaataatgcaatttgggtaaaccggaattgttaasaaactagaaactacaatgagttactctttgtaaatatcagattgttaaagaatggaacatcacatacaataacatgctaatgagaatctacatgtactactggcaggggtttgaactgtacatgttctgatgagtaatctgttgatttaggccattcttgcattactataaataaatatctgaaacagggcgatctatgtgaaaaattgtttagctggctcgtggttctgcaggctgtacagaagcat

SEQ ID NO: 937240 - DNA, 758 bp, Homo sapiens
atgagcaaatatacaattctcaggtgatgacttctcacattccagcttcattaaaattacttattaacatatttttttcttttctgacaatctatttcaattggtaactgtgatattgtgaaatacacatttgatcttcttccctgtctcctggtatacaactcctaaaatccttggaaaatctaaagtaataagtgtttttctgtatattaatgagttgactggtggctggtctccccaaggtagcttctggatgtgggctggtcacaggaaagaccaaagcattatcaaaggttgraactttcagcccatccccaacctttgtggaggggagaggggttacgggttaagtttattatcaatcgccaatagtttcatgcctatgtaataaagcctccataaaaacccaaagggacagagctcagagagcttccatatagctgaacatgtggagcttcctggagggtgacatgtatctcttgccctatgtatctcttcatctgtatcctttgtagtatctttcacaataaaccagtaaatttaaatgtttcttgtagattctgtgagccactttagcaaattaaacaaactcaaggagggtgttatgggaagcccaattaatagctggttggtcagaagaacaggtacaataacatggggattgtgattggcattggaagtgggaatagtattgtaggactgagcctttaacctgtgggatctgacactatctctagatagatagtgccagaattgaa

SEQ ID NO: 937241 - DNA, 758 bp, Homo sapiens
atgagcaaatatacaattctcaggtgatgacttctcacattccagcttcattaaaattacttattaacatatttttttcttttctgacaatctatttcaattggtaactgtgatattgtgaaatacacatttgatcttcttccctgtctcctggtatacaactcctaaaatccttggaaaatctaaagtaataagtgtttttctgtatattaatgagttgactggtggctggtctccccaaggtagcttctggatgtgggctggtcacaggaaagaccaaagcattatcaaaggttggaactttcagcccatccccaacctttgtggaggggagaggggttacgggttaagtttattatcaatcgccaatagtttcatgcctatgtaataaagcctccataaaaacccaaagggacagagctcagagagcttccatatagctgaacatgtggagcttcctggagggtgasatgtatctcttgccctatgtatctcttcatctgtatcctttgtagtatctttcacaataaaccagtaaatttaaatgtttcttgtagattctgtgagccactttagcaaattaaacaaactcaaggagggtgttatgggaagcccaattaatagctggttggtcagaagaacaggtacaataacatggggattgtgattggcattggaagtgggaatagtattgtaggactgagcctttaacctgtgggatctgacactatctctagatagatagtgccagaattgaa

SEQ ID NO: 937242 - DNA, 547 bp, Homo sapiens
aaaactttttttttaattatactttaagtactggggtacatgtgcagaatgtgcaggcttgtcacataggtatacatgtgccatggtggtttgctgcacccatcaacccatcatctacattatgtatttctcctaatgttgtccctcccccatcccccamcccccaacaggccccagtgtatggtgttcccttccctgtgcccatgtgttctcattgttcgactcccacttatgagtgagaacatgtggtgtttggttttctgttcctgtgttagttggctgagaatgatggtttccagcttcatccatgttcctgcaaaggacatgaactcatccttttttatggctgcatagtattccatggtgtatatgtgtcacatttctttatccagtctatcattgatgggcatttgggttggttcctcttataatgagaattatgctacatgcatttttactacttttctaattgcctttctccctctgtgaacccgaattataggctaagagagagtaggaacttagttttatttgttgatcatgttat

SEQ ID NO: 937243 - DNA, 725 bp, Homo sapiens
gaacagctctcagtagacctgaagctcctttctgcaggcaggtcatcctgactagtgtccagctctcagcagagaggagactcctagtgggtagctcctttctgcaggtaagtcgtcccgctgcgtgtgtgagtctggccaagtctgggaatttgatgtgctgagaacgaagaaagtgcgtgttgattggtctgcgggaggccatgggagggtctaaaaaagcaccattcgactggctgaatggtcatcagtgaagttcttactccaggctgtgtacttcgcccagaactggtagcctggcccccaggcttcaggccgttcctggcctgaaggaacggtttcaccagcgaaccaccccttcgcgcctacaaacctgtctgcctcccaccaccgtcagcatgcsgtccagagcacgcaggatatccgtgctgagggatgcctgcaggccggtgctgagccacccttagccccacccagccctctccagtgctggttggtgcccaaagtctgaaggggcctaagggggtgggtgtgtcagcgtcgccctgagtgcacgcacaccttgtcccttgccgtgttacaacagtgcctgcactcaaccacaactttgctccgccctagagcaggtgccgggcacaggaagaggcccgacagggggagcaggaactttcaagcctgcaggagcagagggcttcctgggtcgctgagagtgcaggaatgctggg

SEQ ID NO: 937244 - DNA, 628 bp, Homo sapiens
actcaattattaggttggtgcaaacgtaattgcagtttttgcattgttgaaatttgctgtttgatattggaatacattcttaaataaatatgcttatgttggccgggcacggtggctcacgcctgtaatcccagcaytttgggaggccaaggcaggtggatcacgaggtcaggggatagagaccatcctggctaacatggtgaaaccccatctgtactaaaaatacaaaacaaaattagccgggtgtggtggcaggtccctgtagtcccagctactcaggaggctgaggaaggagaatggcatgaacccaggaggcggagcttgcggtgagccaaggtcacaccattgcactccagcctgggcgacagagtgcgactccgtctcaaaaaaaaaaaaaaaaaagagaaaaaaaatatatatgcgcttatgttatatatcattttaatgtgcatttcttgctttgcattttttttggctaaggacttgttacttgctgtttattttatacttattttagactatggaaatggtgttagacaaaaagcaaatttgagcgattttcttatttgagttcaaaatgggttgtaaagcagtgcagacaactcacatcatcaacaatgcatttggc

SEQ ID NO: 937245 - DNA, 629 bp, Homo sapiens
gagattagactgaactagaacttggttcacctaacgcctgcctagtgtttctactaggtccaaggccagcaccttttcttactgataaatctactgattgctctatgatgttttcttctattaaggaagagaaaaattagcgtaaataacctaggaacacagttgagaggattttaaaccaattataacaattctaaatcttatttgtacataattgatgcctgttttgcccaagaatattaagctcttttttttttttttttttttttttgagacagagttttgctcttgttgcccaggctggagtgcagtagtgcaatcttggctcactgcaacctccacctcccgggttcaagcgatttcctgcctcagcctcccaagtagctgggattacaggcatgcactaccacgcccrgctaattttttgtattttgtagagacagggtttcaccatgttggtcaggctggtctcgaactcctgacctcaggcgatccacctgcctcagcctcccaaagtgctgggattacaggcgtgagccaccacacctggtctgttaagctcttaatattatttggtggtgaccatcttatgaatttaggcatggtgacaccttagcaacaaaacagac

SEQ ID NO: 937246 - DNA, 578 bp, Homo sapiens
tagattggtcttttcacatagtcccatatttcttggaggctttttttatttccttttattcttttttctctaaacttctcttctcgcttcatttcatttatttgatcttccatcaatgataccctttcttccagttgatcgaatcggctactgaggcttgtgcattcatcatgtagttctcrtgctgtggttttcagctccatcaggtcctttaaggacttctctgcattggttattctagttagccattcgtctaatcttttttcaaggtttttaacttctttgccataggtttgaacttcctcctttagcttggagtagtttgatcatctgaagccttcttctctcaactcatcaaactcattttccatccagctttgttccattgctggtgaggagctgtgttcctttggaggaggagaggcactcttatttttagaattttcagtttttctgctctgttttttccccatctttgtggttttatctaccttttgtctttgatgatggtgatgtacagatggggttttggtgtggatgtcctttttctttgttggttttcctcctaacagtcagga

SEQ ID NO: 937247 - DNA, 653 bp, Homo sapiens
gctgtatcccagaggttttgataggttgtgtcattatcaccatttagttcaaagaatttttaatttccataggtatataacttaaagtataataataataataatagtaataaaagaatttttaatttccaccttgattttgtttttgacccagtgctcattcaggatcaggttatttaacttccatgtatttgcatgattttgaaggctccttttggrgttgatttcctgttttattccactgtgctctgagaaagtgcttgatataatttcaattttcttaaatttattgaggctcattttatggcctattatatggtctatcttggagaaatttccatgcactattgaatagaatgcgtattctgcagttgttggatgaaatgttctgtatagatctgttaagtccatttgttccaatgtatagtttaaatccattgtttctttgttggccttctgtcttgatgacctgtctagagctgttagtgtagtattgaagtcccccactattattgtggtcgtatctcattccttaggtctactagtaattgttttataagtttgggagctccagtgttaggtgcatatattttaggattgtgatattttcctgttggacaaggccttttacaattatatgtcattctttgtct

SEQ ID NO: 937248 - DNA, 628 bp, Homo sapiens
gtatgcacccttacccccaacagacttcttgagtttctcctggaaatgatatagcacaacaaaggtaacaaacagaagatcgatgtgatacagactcagaacgcatcttcttctcctaattcccaggacacatgtacacaagcacatataataacatgcaagagatctcagctctctttctttgcccatatcaccagccccctgaccaacgttacagaatccccaacttgattgaagcagaaattctcatcactaaggttcaaaatgatcagactttgaatctggtagaatggcactattataactgtttcaggactgtgaaggcgaagactttgctgtgtgtgcttaaagtatgtttgcctatgaggctaagagacttctgagaaggtgagactagtgagactaccaagctccactctcagaataagtaggcataggtctgtgcccatrcaatggaatataaaagtattatatataaagaggctgatgaggaccagctctgcagcagtgttactgatctgtaggactttagtgctggtgaaaagtagacccatatattgaaggaagcagtgagggagataatagacagagctattggtgagactgaaacctctaggtttatttcatt

SEQ ID NO: 937249 - DNA, 766 bp, Homo sapiens
cgcctacaaccacgctggctatttttttttttttttgacagagtctcactctgtcgccaggctggagtgcagtggtgcaatcttggctcactgcaacctccgcctcccagcttcaagtgtttctcctgcctcagcctcctgagtagctgggcctacaggcatgcgccaccatgcccaactaattttttatatttttagtagagatggggtttcaccatgttggtgaagctggtcttgatctcttgaccttgtgatctgcctgcctcggccttccaaagtgctgggattacatgcatgagccaccgtgcctggccaatttttgtatttttagtagagatggggtttcaccatgttggccaggctggtctcgaactcctgtcctcaagtgatctgyctgccttggcctcccaaaatgctgggattacaggtgtgagccaccatgcctggccaactcccgttcttgaaagctctcatagcaacatttgcctttgcttggagaatggggttttataagtatttgtgtggttctctgatgaatgtctggctcttcccccatcatactgtaagctccatgaaggcaagagcccggtcagagtttgcttaccacggtagccccagcacttaggacaatatttgttatgtggtaagtgttcaagcaatagctgttgagtaaatggagctacaacacccttccctggggtgtgtgaaactgacaagccctttgcaaaactctaaaatgtgcttagtccttctacagaggataaag

SEQ ID NO: 937250 - DNA, 616 bp, Homo sapiens
taggtagtttttcaatcctcaccctcttcctatcctctaccctcaagtagaccctggtatctatgttattctcttctttgtgtccatatgcactcgatgtttagctcccacttacaggtaacaacatgtggtacttggttttcttttcctgtgttaattcgcttagggtaatggcctccagctccatccatgttgctgtaaataacatgatttcattcttgttatggctgtgtattattccatggtgtgtatgtaccacattttctttgcccagtccatcatcgatgggccgattccatgtctttgcgattgtgaagagtgctgcaatgaacatctgcatgaatgtgtctttatggtagaacratttatattcatttgggtatatacccagtaatgggattgctgtgtcaaatggtaattctgctttaagttgttggagaaatctccaaactgctttccacagtggctgaactgatttacattcccaccagcaatgtataggtgttccctttttctccacaaccttaccagcatctgtcatttcttgactttttagtaatagctattataactggtgtgagatggcatctcatcatggttttgatttgcatttttc

SEQ ID NO: 937251 - DNA, 465 bp, Homo sapiens
agggcgaggcattgcctcactcgggaagcgtaaggggtcagggagttccctttcctagccaaagaaaggggtgacagacggcacctggaaaatcgggtcactcccaccccaatactgcgcttttccggtgggcttaaaaaacggcgcaccaggagattatatcccgcacmtggctcagagggtcctacgcccatggagtctcgctgattgctagcagagcagtctgtgatcaaaccgcaaggtggcagcgaggctgggggatgggtgcccaccattgcccaggcttgcttaggtaaacaaagcagccctgaagctcgaactgggtggagcccaccacagctcaaggaggcctgcctgcctctgtaggctccacctctgggggcagggcacaaacaaacaaaaagacagcagtaacctctgcagacttaaacgtccctgtctgacagctttgaagagagcagtggt

SEQ ID NO: 937252 - DNA, 551 bp, Homo sapiens
aaaaaaataaagaatcttgatctaggtctaataacggtcattaaaagttaactcaaaatgaatcatggacttaaaagtgaaatgtaaaactgtaaataatttaacataaagtatagaagaaaatgctcacaatctaggggcaggcataaagatttaggcttggcactaaaagcataatctatgaaataaatatggataaattggrcctaattaaaaaaagtttgctctgcaaaagttatgtgaagaagataaaaagacaagctatggactaggaggaaatatctgtagaccacaaagaggtctacaaagagaaaaagctagtatctagaatatgtaagaaattttcaaacaacaataacatacagtccagttagaaaacaggcaaaagacatggtcagacatttcaccagagacaatattccgatgtcagagaagcacatgaaaagatgtttaacatcattaactatgaaggaaatacaaattaatactataatcagatatcactacacatatatcacaatggccaaaataaaaatactaacaataccaaa

SEQ ID NO: 937253 - DNA, 605 bp, Homo sapiens
aagatttttccttcctaatctagtatctaagcaagaatcaggtgtgacactttaatcaggccattgctgtgcctctttagcctcactcagtcgggaacagttcctcagtctctcatggtctgttatgacgttgacatttttgaagagtaaagacccgttggtttataaaatgtytcagtttgggtctgtcagacactttctttgtgatttattttatggtatgtattactgcaaaatttagtggcttaaaatagcaataaacacttgttatttcacatagtttctatggactaggaatttaggagtagcttaactgggtggttctgacttggaatctctcttgagattatagccaagatgtcacttgggactttgatcccctgaaggcataattgggtggggctggaggttctgattccaaaatggctcattcacgtggctggaaagattgtactggctgttggcaggaagtgtcagttgcttgccacatagactcctccatagggctgcttgagtatcctcacaacatggcagccggctttctccagaatggatgataccttccattgaggaaacaagaggaatcctcaatgttttatgatgta

SEQ ID NO: 937254 - DNA, 624 bp, Homo sapiens
caactgggggtgcacatcagaatcacttaaggagcttgtaaaagcacacagacagctgggccctactccagacctactgagttaaaatttgtcaatagggtcccctggtgattccaatgctcaccccttgttaagaaacactgcttatggcttcaagcccagtttcaatgcaagtactctgtgcagaagttactgagaatacaggccctacagaagtttagataggatggtgtgtaggagccagcacgtcccctacatgcctgcctgctttccagacatttgggagccactgtgataaaagtaaatagggcttcaggggtttgcaaccaggaaagcacactctctgtaaggttgaaactgcctgcatcgggcccttgtaggtgcttgataaaatytgaataaccataaccatcgcacagctgctacatgggttaggaacttcatatgtattgtcttgtataatctacaactcccactccaagtggggaaactgagctttgatagaggaagtaatcgcccaggatggcactgctggtaagcagagctagtgggagaactggctctgtccgatttcaaagctggtgctctttcctctgtaagtgattccaataatgaaggaagcca

SEQ ID NO: 937255 - DNA, 604 bp, Homo sapiens
tagagaaagccaaagacaacgagagaaaaccaaagacattcagaacattttagatttggacactgacagctatgacaaacagtaaacacagcctagcccttggctattctttttttttttttttttttttgagacagagtctcgctgtctcccaggctggagtgcagtggcgcgatctcggctcactgcaagctccgctccccgggttcatgccattctgctgcctcagcctcctgagtagctgggactacaggcgccggctaccacgcccggctaatttttttttccttctgtatttttagtagagacggggtttcactgtgttcgccaggatggtctccatctcctgacctcgtgagtgatccgcccgcctcggcctcccaaagtgctgggattacaggcgtgagccaccgcgcccggccgcccttggctgttctaaacatcacactaaacmcttttttagtgtgataaaactaaatgcttatttgcctcagctccttttacccaggacatcatgtctggctctcaacaaaagattatatgttatactaatgaacaaaaaacacagtttgagcagatacagcgagcatcagaaccagattca

SEQ ID NO: 937256 - DNA, 739 bp, Homo sapiens
gcgcagtggctcatgcctgtaatcccagcactttgggaggctgaggtgggtggatcacctgaggtcaagagttcaagaccagcctggccaacatggtgaaaccccatctctactaaaaatacaaaaaattagccagacatggtgatgggcacctgtaatcccagctacttgggaggctgaggcaagagaatcacttgaacccaggaggcagaggttgcagtgagccgagatcgcaccattgcactccagcttgggcgacagagmgaaactccgtctcaaaaaacaaaaacagaaacaaaaaaagaaagaaatgcatccccatttcccaatgagtatcacaagagacaggctagcatctgcaggcccagactgccagggttgaaactgtctctgccatgtgtaccaactgtgcaacagtcggcaagtcaagttactgctcctcagagcctcatgaggaagtagaactaacaagactaataacagccctcataggaatgtcatgaaaattaaatgagttaatacatgtaaaatgtttgcaaaagtgcctagctcataagtaaaccctcaatcaatgttagttgttgttactattatagttataattattaatcatcttggctgtgaaatatgattcaccatgaaaagccatttatgatacttaatttgttagtaaatgcaatagagcaaaaatataaaataaaaccaagggttaaaaggttcctatgtcaggaaaaggcct

SEQ ID NO: 937257 - DNA, 564 bp, Homo sapiens
aagttggattcctacttattttattctctttgtagcaattgtgaatgggagttcacccatgatttggctctctgtttgtctgttatttgtgtataggaatgcttgtgatttttgcacattgattttgtttcctgagactttgctgaagttaattatcagcttaaggagattttgggctgaggcgatggggttttctaaatatacaatcatgtcatctacaaacagagacaatttgactttctcacttcctatttgaataccctttatttmtttctcttgcctgattgtcctggccataacttccaacactatgttgaataggagtggtgagagagggcatccttgtcttgtgcctgttttcaaagggaatgcgtccagtttttttccattcagtatgatattggctgtgggtttgtcagaaatagctcttattattttgagatatccatcaatacctagtttattgagagttttcagcgtgaagggctgttgaattttgtcgaaggccttttctgcatctgtttagataatcatgtggtttatgtcatcggttctgtttatgtg

SEQ ID NO: 937258 - DNA, 735 bp, Homo sapiens
ctagggcctgattcacagatggttctgcatgaatggccttttgaagtcacaattacaatgccaactaggtgacaacactttgcagggctagggcaaagttctccagaaggcgttgtatgctctgaatcagcatccaatatatggtactgtttctctcacagccaggattcatgggtccaggaatcaaggggtggaagtggaagtggcagcacttaccatcacccctagtggcccactagcaaaatgtttgcttcctgttcccacgacattaagttctgctggcctagaggtcttagttcaagagggaagaacgctgccaccaggagacacaacgatgatttcattaaactggaagttaagattgccacgtggactttttgggctcctcctacctttaattcaacaggctaagaagggagttacattgttggctggggtgattgacccagactatcaagatgaaatcaatctactactccacaatggaggtatggaaaagtatgcattgaatacaggagatccattagggtgcctctcagtattaccatgccctgtgattaaggtcaatggaaaackacaacagatcaatccaagcaggactacaaatggctcagacccctcaggaatgaaggtttgggtcactccaccaggaaaaaaaccatgacctgccaaggtgctttctgaaggcaaagggaatactgaatgggtggtggaaggtagaaccagctaggaccg

SEQ ID NO: 937259 - DNA, 733 bp, Homo sapiens
gaaaagtatgcattgaatacaggagatccattagggtgcctctcagtattaccatgccctgtgattaaggtcaatggaaaacgacaacagatcaatccaagcaggactacaaatggctcagacccctcaggaatgaaggtttgggtcactccaccaggaaaaaaaccatgacctgccaaggtgctttctgaaggcaaagggaatactgaatgggtggtggaaggtagaaccagctaggaccgcgtgaccagttacagaaacggggactgtaattgtcatgagcaatttttccttcttgtgctaaaaacatgcttgtgcttgtatacacttgtattaagaaaatatcattattttgtttccttttcctttatcatgtgacatgagattgattgactctatatcagcatttaagtattgttaaccttacgtaatagtatttggattggtgagtggtgcgtttccggttgtatgaaggacagtagtattatgttaggcataattatgaccttattattgccttaatttgargactgtgtgatcttaggagatgtatatgggttcaagttgacaaggggttgacttctgatggttaacactgagtgtcaacttgattgagttgaaggatacaaagtatttctcctggatgtgtctatgagggtgttgccaaaagagattaacatttgagtcagtgggctgggcaaggcagatccactttaacctggtgggcaccatc

SEQ ID NO: 937260 - DNA, 611 bp, Homo sapiens
tcggattagctaatgcctctgcagttaaaaattagcatagaaatagaaataagaaaatagatgctttgtaaaaattagaaacactactttgtaatgtaaagatctttcgcaatcggccaggcgcggtggctcacacctgtaattccagcactttgggaggccgaggcgggcggatcatgaggtcaggagattgagaccatcctggctaacacagtgaaaccccgtctctactaaaaatacaaaaaattagcccggcatggtggcaggcgcctgtagtcccagctactcgggagactgaggcaggagaatggcatgaatccaggaggcggaggttgaagtgagccgaggtcacgccactacactccagcctgggcgacagagtgagactccgtctcwaaaaaaaaaaaaaaaaaaaaaaatcttttgcaatcattttatgtaaaaggcagaatgttgtaagtaatctgccttgtctgttacctaaatgcttcccctgctcaaattctccttaccctgtaaagtagtgtctgttggtaattttggttgcaattagcctaaaaccttcatgccttcatagtgtttgaacagtggacatttgctttggggatgca

SEQ ID NO: 937261 - DNA, 696 bp, Homo sapiens
attgctcgtgtaataggtgaggttggaaatgtaagagcgtaaaagctggattgcatgtcctattagggtatttttggtcctatcagagatggggaagtcagctaatgattgcatatttagaagttggaaagggtcttttccttcttaacaggagtggtaggttaagttaataaagacccagttttgcgggaatgggagtggcaacgtaagcagtggttgatagagaggtacaaagccaacagtcatttgccagggaaggactgaactggcttaacagagagtaggttaaattgagagtctcgtagaggtaattaggagctagtggaaagggatgggtgactatgtagggtatccaaggaatcaggagggatagataggcaaagagtaagtaggaaggtaaagagagtgccctggaagatgagatcattttatccagtctgagttaaaggtaggagtaaattgctgtcagaaggaaggatgatagaaaaaaggttgatgtgattaagactttygtcctggcaggaggtacagatatagtcctactgcaaagagtatggttagtatgctgcttaataatgtgatgaaacagtaaaaggattccattaaatgggcaaggagaggtgttaaagattatgtaggttttcacttatcttttttaattaggaaggggtttttcctcaggatcagctgtaggag

SEQ ID NO: 937262 - DNA, 873 bp, Homo sapiens
tcatctcttacttaagggtccattgtaaaggaaagctgagactatactggaaaacaaatgtgacaagaactgaaccacatctttctcttttaaacatacatatacacacgcaacaacaatgacaatattattttagctggctcgttctgttggtcaagggtctttattgtttttcttaggtgctattatttgttaatgtatctagtacttgatgtgtattttcaaaatactagattaattcatgacctttctttttagcacctctatgttccacattgatgatgacattcaatgcagacgcagtaagatttgaagagtaacagcttggagcagactgcttggattcaaatgcccattttgctattaccagctctgtaaccttggatgcatgtctgaacttctatatgcctcagttgctctatctatagaaaggttgttgtgaggattaaatgggttagtatgctcaaaacaccagagtgcctggcacatcctaaatactcaataaatgtcagctattatgattattgttgacttccctgtctgccttgtgagaaagcagagctggtgcagtgtgtggtgagggactgctytctggggctagagccacattttctgctcaaggcaagggccattattttcccagggttctgcagcatcctcacctcccatggcaggagcaaagcttgactagaacatacagctcagggccctcttccaaacctctttcaccttccaggcaaaggtgatatattccatgcttgttttctgaagagatttgtcagaaagaatgtttctcaccattcacgtccagagaagactacagaaatatagctgtacagtgtgcataatgttatttccaggtgttgataaagt

SEQ ID NO: 937263 - DNA, 615 bp, Homo sapiens
gttgcccaggctggtcttgaactcctgggctcaagtgatcctccctcctcagtctcccaaagtgctgggattagaggtgttgagccactttgcctggtgatctccatttctttagggttagtttctagagatttatttgttcctttgatagggccatgtttccctgtttcatggtatgccttgtgatttttttttttttttgagacagagttttgctcttgtccccaaagctggagtgcaatggtgcgatcttggctcactgcacccttcgcctcctgggttcaagagattctcttgcctcagtctcccgagtagctgggattatggcgccctccaccacgtccagctaatttttgtatttttagtacagatggggtttcaccatgttggccrggctggtctcgaactcctgacctcaggtgatctgcccgcctcggcctcccaaagtgttgggattataggcatgaaccaccacacccagccgttttttttttttaaagacagggtctgggctggggtacagtggcttgatcacggctcactgcagcctcaaactcctgggcgcaggcaattctcctgcttcagcctccccagtagctgggataacaggcatgc

SEQ ID NO: 937264 - DNA, 596 bp, Homo sapiens
gctggaatatttgtgggtgtggaggcatttgctatcgttattattattatttttattttctttatttatttttttgctgtcctgttggcataagcgtttcctttagcaataagatcagttggtttctggggtcctttgcaatgaataaccccaggcttggctggcaggaaagcagccttaaggtgrgcctctaaaactattagggcggcagcagccaccgcacgcagacatgcgggccagactaaaacagtgaggtcaagttgtttggacaaaaaggctacagggtgtggtcctggtccttgtgtaagaattccaaccacacagccctgcacttcgactctgtgtaatagaaagggttgggatgaatcagggagaactgtgtgggaacagtttctagacctgttttcaaggaacagaaagaggagtggggaaaggatttaggatctatggggtcagctaggtttccctttgtgagtttatataatggttttgttaggatggcaaaaccaggtatccaaaggcgaaagtatctaaccatgcccaggaaggaaaggagttgttgttttgtagaaggggttggggtttgagagatcagc

SEQ ID NO: 937265 - DNA, 596 bp, Homo sapiens
gctggaatatttgtgggtgtggaggcatttgctatcgttattattattatttttattttctttatttatttttttgctgtcctgttggcataagcgtttcctttagcaataagatcagttggtttctggggtcctttgcaatgaataaccccaggcttggctggcaggaaagcagccttaaggtgagcctctaaaactattagggcggcagcagccaccgcacrcagacatgcgggccagactaaaacagtgaggtcaagttgtttggacaaaaaggctacagggtgtggtcctggtccttgtgtaagaattccaaccacacagccctgcacttcgactctgtgtaatagaaagggttgggatgaatcagggagaactgtgtgggaacagtttctagacctgttttcaaggaacagaaagaggagtggggaaaggatttaggatctatggggtcagctaggtttccctttgtgagtttatataatggttttgttaggatggcaaaaccaggtatccaaaggcgaaagtatctaaccatgcccaggaaggaaaggagttgttgttttgtagaaggggttggggtttgagagatcagc

SEQ ID NO: 937266 - DNA, 676 bp, Homo sapiens
tgttcctttccatgtttagtgtttccttcaggagctcctttagtgcaggcctggtggtgacaaaatctcttagcatttgcttgtctgtaaaggattttatttatccttcacttatgaagcttagtttggctggatatgaaattctggattgaaaattcttttctttaagagtgttgaatattggcccccactctgttctggcttgtagagtttctgctgagagatccgctgttagtctgatgggcttccctttgagggtaacccgacctttctctctggctgtccttaacattttttccttcatttcaactttggtgaatctgacaattatgtgtcttggatttgctcttcttgaggagtatctttgtggcattctctgtatttcctgaatttgaatgttggcctgccttgctagattggggaagttctcctggatagtatcctgcagagtgttttccaacttggttccattctccccgtcactttcaggtacaccaatcagacrtagatttggtcttttcacatagtcccatatttcttggaggctttgttcgtttctttttattcttttttctctaagcttctcttctcacttaatttcattcattttatcttccatcttccatcactgatactctttcttccagttgatagaatcggctactgaggcttgtgc

SEQ ID NO: 937267 - DNA, 778 bp, Homo sapiens
gacagagccagggttcagctcaggtggtctggctccagggacacagctcagccagcctcacctgaggacgaggggccctttttctcgggctgggtgagccccctccccatccacccgaaatcatgaaatccccaaaataatgaagattcaattttaaaatgaggagttgacacatctcaggggaacaagtccccatttgagcatttctacctcccttcccacaaaggtgtagagattgtacctgctcctaccatgacgatgacaatatgtaagcaaacctctaaccgtgaaacacaagtcctgggcatcccgctgggcagggtctttggtcctccacggggacaggtcctgtgagagggtggcattctcctgggtgggaacatcctctgtaaatgcaactcccagagtatccccccggccactgactgtgccttgactctgggatgggaagatcatctttccagagacagggaaagaagcagtggttcggaggcagtcagggttccagtcccagctctgccagtaagtagctgtgtgaccttgggcaagttgcttggcctctctgtgcctcggtgtcttcctctgtaaaatgggcatgaaggtaatggcccctcccacagagagggcttggggatgagcttkgtcagcacgcataatggagcagtactgggcacagggtaggcgccctgcaaagtcagatgttctatttgtttgtttcaggcttctaatcctatcccagccagagcctgggaagaaggagatgaaaccaaaccaaaaa

SEQ ID NO: 937268 - DNA, 743 bp, Homo sapiens
cggcccagatcccacatctgtcaagggtgagccaggcatggagtggcaaggggtgtgtgagtgagcacggggttcggccacagcgcacggccaggtgtgctggctgcggtggggcaggcagctccaagtgccagtataggcgctggctccaagagaggctgcatmtggaccaggcgtcctgcaagtagcttccaccatgggcaccagggaatgctgtggtgcctggaagctgggagacgccaggaaccacagagccctaaagagggcgtcacagccctgacttggagagcccctaggtctgggctccctgaagggccgcagctcttctccttctcattacctgcaacgtgttaggcggagaggcgtgtttcagccctgtttgtgttaaatctcttttagtctggccattggcggatcttgagttcctgtcctgcatccaggaagaatgaggtacgtggacaactggaaggtgagcaaggcagggaggagcttcactgagcaacagaatagctctcagaagacccacagtgtgtatgtagctcctttctgcaggcaggtcattggagtggggagggtgtctatgggctcaaagggaggaagtgagtgctgattggtccatgggctgccatgggccagccggaaaaagcatcataaattctcactccaggagggggactccacccggcaccggcagcccggcccccaggcttcaagccatccctggcttgaaggtggggtttcac

SEQ ID NO: 937269 - DNA, 743 bp, Homo sapiens
cggcccagatcccacatctgtcaagggtgagccaggcatggagtggcaaggggtgtgtgagtgagcacggggttcggccacagcgcacggccaggtgtgctggctgcggtggggcaggcagctccaagtgccagtataggcgctggctccaagagaggctgcatatggaccaggcgtcctgcaagtagcttccaccatgggcaccagggaatgctgtggtgcctggaagctgggagacgccaggaaccacagagccctaaagagggcgtcacagccctgacttggagagcccctaggtctgggctccctgaagggccrcagctcttctccttctcattacctgcaacgtgttaggcggagaggcgtgtttcagccctgtttgtgttaaatctcttttagtctggccattggcggatcttgagttcctgtcctgcatccaggaagaatgaggtacgtggacaactggaaggtgagcaaggcagggaggagcttcactgagcaacagaatagctctcagaagacccacagtgtgtatgtagctcctttctgcaggcaggtcattggagtggggagggtgtctatgggctcaaagggaggaagtgagtgctgattggtccatgggctgccatgggccagccggaaaaagcatcataaattctcactccaggagggggactccacccggcaccggcagcccggcccccaggcttcaagccatccctggcttgaaggtggggtttcac

SEQ ID NO: 937270 - DNA, 539 bp, Homo sapiens
gccattggcggatcttgagttcctgtcctgcatccaggaagaatgaggtacgtggacaactggaaggtgagcaaggcagggaggagcttcactgagcaacagaatagctctcagaagacccacagtgtgtatgtagctcctttctgcaggcaggtcattggagtggggagggtgtctatgggctcaaagggaggaagtgagtgctgattggtccatgggctgccatgggccagccggaaaaagcatcataaattctcactccaggagggggactccacccggcacyggcagcccggcccccaggcttcaagccatccctggcttgaaggtggggtttcactgggcacccacccccttccgcccagggacctgtctgccttccacgttgcccaggctgttcatgttgaggggtgtctacaggcccgcagggagctgccctcagcaccccctgggctgcttcctgcgctcactgacgcccaaagtctggagggggccaaggcagcagggggcgctagcgtgtgagtgctgccctgagtgca

SEQ ID NO: 937271 - DNA, 563 bp, Homo sapiens
tcctaagacagagaaaaacttcagattcattttgcagtaacactcattgaccgctccttgagcaaaaataaatccttgtttcctttttggaggatcaggctgaagtaccaaagaaaagtgctcccaaaacccgtcattttgaaaccatcatctaaagtgtcatggtactcgctcttctttgagctattatatataaattgaaagattttaattagaggtcaacattaatttacatctgaaactagcaaagtagttcatgactctttttcacatcacacatacccatactacttctcagagtcaactggyctctcatctcttcattatatactaaataagcaaggtatgtctccaccttgaaggtatagcacctccttataagaagtaagacaggtttctctagaaatgtccacctaaccaccaccattggaatagaggacagagtctgagggcagtggctcaggcctgtaatcccagcactttggaaggctgaggctggtggatcacctaaggttaagagttcgagaccagcctggccaacatggtgaaatcctgtctctact

SEQ ID NO: 937272 - DNA, 563 bp, Homo sapiens
tcctaagacagagaaaaacttcagattcattttgcagtaacactcattgaccgctccttgagcaaaaataaatccttgtttcctttttggaggatcaggctgaagtaccaaagaaaagtgctcccaaaacccgtcattttgaaaccatcatctaaagtgtcatggtactcgctcttctttgagctattatatataaattgaaagattttaattagaggtcaacattaatttacatctgaaactagcaaagtagttcatgactctttttcacatcacacatacccatactacttctcagagtcaactggtctctcatctcttcattatatactaaataagcaaggtatgtctccaccttgaaggtatagcacctccttataagaagtaagacaggtttctctagaaatgtccayctaaccaccaccattggaatagaggacagagtctgagggcagtggctcaggcctgtaatcccagcactttggaaggctgaggctggtggatcacctaaggttaagagttcgagaccagcctggccaacatggtgaaatcctgtctctact

SEQ ID NO: 937273 - DNA, 646 bp, Homo sapiens
taattagcagtaaaacttatgtaagcagtcccttgtgaagggctgtgtctttttgcgattatatctggtgctatagtgtacatccttgtgtgtgcatcttggtgtgcctgtgctacgtatttctgtaggataaatctgtaaaagtggaatcactaggtcagagggtatgatccattttctttacttatttattttatttatttattcatttatttttgagacagagtcttgctctgtcgcccaggctggagtgcagtggcatgatcttggcttactgcaagctccgcctcccgggttcacaccattctcctgcctcagcctccggagtagctgggactacaggcgcccgccacccacgcctggctaatttttttgtatttttagtagagacggggtttcaccatgttagccaggatggtctcgatctcctgacctcgtgatccacccatctcagcctcccaaagtgctgggattacaggygtgagccaccgcgcccggccccattttattacctttatttgcttggatccttcttagcttcttcaatgttaaagatattgagttttcctcttactgaaatttataaatccattgactcccttgatattattgccctggcctgactgattcttctctctcctttctc

SEQ ID NO: 937274 - DNA, 640 bp, Homo sapiens
tcatattaagcagaagttttgcttcacaaactctcagccaaatacaaaatactatgaatagtatttaccttgtgtctctttccaaagaactcatagtggtttgcagctattgcagatatcctggccatgaggtatgcagttcctttttttttttttgagacggagccttgctctgtcgcccaggctggagcatagtggcgcgatctcsgctcactgcaagctccgcctcccaggttcgtgccattctcctgcctcagcctcccgagtagctgggactacaggcgcccaccaccacacccggctaatttttgtatttttagtagagacggggtttcaccgtgttagccaggatggtctcgatctgctgacctcgtgatcctcccgcctcggcctcccaaagtgctgggattacaggcgtgagccaccgcgcccggccgcagttcctttttctagctgtttgaataggaaagatgacttggaaaatgctggattctgagcagatttatgtgcagccttaaaaagtgtagtttttctctatcaataatgagtgtgggttgtaattgcttagtaagtaattttgtttatgtaaacgtacatttgttaaattttttttcttaggtaatcccgtttgttggcacca

SEQ ID NO: 937275 - DNA, 640 bp, Homo sapiens
tcatattaagcagaagttttgcttcacaaactctcagccaaatacaaaatactatgaatagtatttaccttgtgtctctttccaaagaactcatagtggtttgcagctattgcagatatcctggccatgaggtatgcagttcctttttttttttttgagacggagccttgctctgtcgcccaggctggagcatagtggcgcgatctcggctcactgcaagctccgcctcccrggttcgtgccattctcctgcctcagcctcccgagtagctgggactacaggcgcccaccaccacacccggctaatttttgtatttttagtagagacggggtttcaccgtgttagccaggatggtctcgatctgctgacctcgtgatcctcccgcctcggcctcccaaagtgctgggattacaggcgtgagccaccgcgcccggccgcagttcctttttctagctgtttgaataggaaagatgacttggaaaatgctggattctgagcagatttatgtgcagccttaaaaagtgtagtttttctctatcaataatgagtgtgggttgtaattgcttagtaagtaattttgtttatgtaaacgtacatttgttaaattttttttcttaggtaatcccgtttgttggcacca

SEQ ID NO: 937276 - DNA, 593 bp, Homo sapiens
gaagaggtaggaatacactgttctcaaggatagagatgctatattaagcactaagagccagttgtgacaaatgtccagaaatccttaatgagcgatcccaagacacacaatgagaagattgtttctccccagataggatttggatttgtgtctccacccaaatctcatgcggaattgtaatccccagtgttggaggaggggcctgatgggaggtgattgcatcctgagggcggatatcccctttgctgttctcatgctactgagtgagttctcatgagatctgcttatttaaaagtatggagcacctcccccttgactttmttccccctgctccagccatggaggacgtgcctgcttccccgttgccttcagccatgattttaggtttcctgcggcttccccagccatgcttactgtacagcctgcagaactgtgagtcaattaaacctcttttctttataaattacccagcctcgggtagttctttatagcaagaactatgcaaaaatggactaatacatccccctaaggtttatgttaggcatttgcagttagtacagggtttacaggtcttaaggaagagatggtgttgg

SEQ ID NO: 937277 - DNA, 821 bp, Homo sapiens
cgtctccaggatggggctcactgagagaataatggtgccacaagcagaaatgggaacgggaggggaggcactgttacatttggtttgagatgagttgaaaatgcctcaaaccttcctctataaattgtggtcatggctgtctgcctcagaggggctgtggtagtatgaaatagttcaycaatcagccccaagcctgtgataacagaaaatatcacacaaacatgcagtccttctgcagagtggggctacttagtaatcatccagtacagtcctggtccttcagagagttaatccacagtggccatctgggtttacacataacaatgaaatctcaagtcttttttgtagatgtagtttttatttagatatgagttgaggcagcaaaatatatcataagagggcatcttggggaacagagggctacttagtttggagaagagaaagctgagaggaaaaaagaggttcgttctgtgcaacgccagggggcagctctgagagaagggtggggttaagggttggaggtgggcggggggcggaggtcaccaggaaggtaaaatagagaagagccttccaaggattgatttactctgcccattgttggcatgagcccttcacagaatggtgggtacctgctcctaagggagattaaacttaggctaaatgcttgctggtcaccaactctgcaaaaagagtttctgtgttgtgttgtaaatcgggctgaagaaaatcacatcatattccatttccatgtgttccaggccagtgattctatgagctctcaccctgtaaatacagatgcagaggtggactgatggccacaa

SEQ ID NO: 937278 - DNA, 560 bp, Homo sapiens
tgggcaaaggctcacagataataaagcagtaaagtcaagacactggacatcttcataaggcagaaaaacaagtatattgagtataaaacaggcagagagctagaagcaaaaagatgaataattgagtgatgtttgaatttaagatttttaaggtactacagttctgggtgggctttgatcatgggtggctaaaatggagtgaaagtaaagttgaaagtatagttgaggaggtcaaataatttaagttaggtgctcagagtgtttctacttccagtaagatggagtagacataattttccctagtcctcttccaaagtacaactaaaaaaccatatatatatcatacatatatatacaccatatatatctatatatacatcatatctatatctatctatctatatctatatctatatctatatatwaaagactgaaatgagaaaacagaaagctgaccagataggcatcttgagactggagaaatgaaatggtagtgaattccctggattttctttttgtctcacatatggcagacttggagtggaagaagccagtcaaaa

SEQ ID NO: 937279 - DNA, 553 bp, Homo sapiens
gcagataaaatagatcgattcttcaaaaataagaagctgccacgcctgacccaatacaaaataaataattggaatggccctatcatcattaagaaaattgaatttgtaagttaataattccccccaaagaagtctcctggcttaaatgattttacyggaaaattctaccaaacgtttggacaataagtaccaattttgcaatctcttacagaaaataaaagaggagaaatcacttctcaattcattttatgaagctagtattatccttataccaatgcatacaaaggcagtatcaaataaaaaaacttcagatcaagagtctcataaatatagggtgcaaaaatctttaacaaaatattacaaacagaattcagcaaatatacaaagaagtatacaccatgactaagtggggtttaggccaaggatgcaaggggttcaatatttgaaaatctatcattataatccatcatattaacaggcatagaacccagaaacagacccacacaaatatgctcggttagtttttacaatggtgcaaaagtgattcaatgga

SEQ ID NO: 937280 - DNA, 621 bp, Homo sapiens
taggtctggtggagtcagccagtggtcaaaaaggcagaagtctgaaaagacatctcaaaaagccagtatgaacaaggacatcttggaggttagcctcaagatggagtcaactatgtcatatttcttttactgtcataattttgtagaggcagtttcaaaatcagtagtaytttctttattattgcttagtggtatattattctaaatttaaaaagtttatttacccaatttcccattaaaatttttagattttggaatttataaataggtgaataaatagtttctacaaacagttttgaacaagtatcttttgaatctatgtttctgttagccttgggtaaaatcctacaagaggaattcttagaccattgatacttatttaacttataagaaactactaaattattttccaaagtggttgtaccatattacacaaccaccaaaaatatctgaaattcacagttgttccatatgctcaccaacattttatgttgataatctctttaatcatagtgattctagagacagtaaagtggtatcacctggtttaatttgcatttctctgatattgagcccctcttcacatgcatttagtcattgatatgcatgcttttgtgaagt

SEQ ID NO: 937281 - DNA, 693 bp, Homo sapiens
gatgccacttcaccttgtcacacgaacagcctggctgctcacacaaagcctgttcgtggactctcttcacgtggacgcgcgtgacacaccttaagtgctttaatatgtactcctaagagcaaaaacattgtcttttataatcccagtgccattattacactcaagaaacctaacattgatattttaagggacactttttcaaaaaaaaggtaaaattatgactygtacagatactaaaaaaaaaagttaaagatttattcaattcattaataatgaggaaactgcaagacgctactgccagttcaaaagataatccaaagaagacacacatttattgataaggatactgaaaggaataagcaaactgaggcaaaactggctgcttcttgtctgtggtcaaggattgttttgcattgttatccatgatctacaatttattgagttgtaaaataactcaaaggccgtgaaaggtgcagagcccctataggatcaaaattagataaccctgaagggtgggtgggtgggttctagaccttttcctataaagggctagattgtaaatgtttttggttttgcaagccatatggtttttgtacagatactcaactgtcagtgaacatgcaagtaatcttagacaatatgtgaagggtgaatgctgctgtgtgccaataaactttatttacaaacacaggt

SEQ ID NO: 937282 - DNA, 693 bp, Homo sapiens
gatgccacttcaccttgtcacacgaacagcctggctgctcacacaaagcctgttcgtggactctcttcacgtggacgcgcgtgacacaccttaagtgctttaatatgtactcctaagagcaaaaacattgtcttttataatcccagtgccattattacactcaagaaacctaacattgatattttaagggacactttttcaaaaaaaaggtaaaattatgactcgtacagatactaaaaaaaaaagttaaagatttattcaattcattaataatgaggaaactgcaagacgctacwgccagttcaaaagataatccaaagaagacacacatttattgataaggatactgaaaggaataagcaaactgaggcaaaactggctgcttcttgtctgtggtcaaggattgttttgcattgttatccatgatctacaatttattgagttgtaaaataactcaaaggccgtgaaaggtgcagagcccctataggatcaaaattagataaccctgaagggtgggtgggtgggttctagaccttttcctataaagggctagattgtaaatgtttttggttttgcaagccatatggtttttgtacagatactcaactgtcagtgaacatgcaagtaatcttagacaatatgtgaagggtgaatgctgctgtgtgccaataaactttatttacaaacacaggt

SEQ ID NO: 937283 - DNA, 693 bp, Homo sapiens
gatgccacttcaccttgtcacacgaacagcctggctgctcacacaaagcctgttcgtggactctcttcacgtggacgcgcgtgacacaccttaagtgctttaatatgtactcctaagagcaaaaacattgtcttttataatcccagtgccattattacactcaagaaacctaacattgatattttaagggacactttttcaaaaaaaaggtaaaattatgactcgtacagatactaaaaaaaaaagttaaagatttattcaattcattaataatgaggaaactgcaagacgctactgccagttcaaaagataatccaaagaagacacacatttattgwtaaggatactgaaaggaataagcaaactgaggcaaaactggctgcttcttgtctgtggtcaaggattgttttgcattgttatccatgatctacaatttattgagttgtaaaataactcaaaggccgtgaaaggtgcagagcccctataggatcaaaattagataaccctgaagggtgggtgggtgggttctagaccttttcctataaagggctagattgtaaatgtttttggttttgcaagccatatggtttttgtacagatactcaactgtcagtgaacatgcaagtaatcttagacaatatgtgaagggtgaatgctgctgtgtgccaataaactttatttacaaacacaggt

SEQ ID NO: 937284 - DNA, 686 bp, Homo sapiens
aagcctcagcaatggcggatgcccctccaccagcctcgctgccgccttgcagttcaatctcacgctgctgtgctagcagtgagagaggctctgtgggtgtgggaccctctgagccaggtgcgggatataatctcctggtgtgccatttgctaaggccattggaaaagtgcagtattagggtgggagtgtcctgtttttccagatactgtctgtcacagcttccctttgctaggaaagggaattccccgaccccttgtgcttcccagatgaggcaatgccctgccctgctccrtgggctgcacccactgtctgacaaaccccagtgagatgaacccagtacctcagttggtaatgcagaaatcacccgtcttctgcgttgctcatgctgggagcttcagactggagctgttcctgttcggccatcctggaacctctcctacctagtttattgagagtttttctcattaagggatattgaattttacccaaagtcttttatatagctattgagataattatgtggtttctgtctctagttttgtttatgtgatgaatcacatttattgatttgtgtatgttgaaccaactttgcatgctggaaatgaagcctacttgattgtggtggattacctttttgatgtgcttctggattcagtttgcagatattttgttgaggatatttgcat

SEQ ID NO: 937285 - DNA, 686 bp, Homo sapiens
aagcctcagcaatggcggatgcccctccaccagcctcgctgccgccttgcagttcaatctcacgctgctgtgctagcagtgagagaggctctgtgggtgtgggaccctctgagccaggtgcgggatataatctcctggtgtgccatttgctaaggccattggaaaagtgcagtattagggtgggagtgtcctgtttttccagatactgtctgtcacagcttccctttgctaggaaagggaattccccgaccccttgtgcttcccagatgaggcaatgccctgccctgctccgtgggctgcacccactgtctgacaaaccccagtgagatgaacccagtacctcagttggtaatgcagaaatcacccgtcttctgcgttgctcatgctgggagcttcagactggagctgttcctgttcggccatcytggaacctctcctacctagtttattgagagtttttctcattaagggatattgaattttacccaaagtcttttatatagctattgagataattatgtggtttctgtctctagttttgtttatgtgatgaatcacatttattgatttgtgtatgttgaaccaactttgcatgctggaaatgaagcctacttgattgtggtggattacctttttgatgtgcttctggattcagtttgcagatattttgttgaggatatttgcat

SEQ ID NO: 937286 - DNA, 718 bp, Homo sapiens
ttcatttcttttatgctcttcagtagtattccatggtgtatatatagcatgttttctttatccactcattgattgttgggtacttagattggttccacatctttgcagttgtgaattgtgctgctataaacatgtgcgtgcacatgtatttttcatataatgatgtctgtccttttggatagatattcagcagcaggattgctggatcaaatgatagctttacttttagttcttcaaggaatctgttttccatagtgattgtactaacttgcagttccacaaacataaaagtgttttcttttcaccacattcacaccaacatctattgttttttgactttttaattatggccattcttgtaggagtraggtggtatctcattgtgtttttaatttgcatttccctgataattagtgatgctgagcattttttcatatgtttgttgactgttggtatctcttcttttgagaaatgtctattcatgtcctttgtccacttttttatgggatttgtttgagtttcaggaaatttttttaaagctttccttgtaacttttgtttctaattaattcttccaggtatcaaaagtcattgaaggaaacacatatataaaaatactttcaaaaatgaattagaggttaggattttatctagagtaaaatatttgttgggggcagtaatacataacagtcaacttagttatcaaatgctgcttaaac

SEQ ID NO: 937287 - DNA, 722 bp, Homo sapiens
cctgctcgccatcccctcctgccatacacccacagagcctttcttcccctggccaaggagttcagcttggtccaaactgggggagagatgcagtgattaaaggaacccgtttgcagaaagcaagagttcccccctcttaaacctcttttttctttccttttcaatgcgagagggttcttctcctacctcaacactctgcttataacagggaggcaacaaaggagygacaccaccgactatgaactgcaagtttggcaaaaccagtgtgagaattaatctaaatggacccacgcatcccctgagacacctttttggcccaaatttgattccaagcttctagttgaagccctagaaggaaaaccagattggagaaatccaaggcaaggtaacaggcacagtataaatgggcaggactatttcctgatgattaagcccctgcttcatgggaggaggccatgctccatggcatagatggggcccaggtaacccaaaggttgctgacagtaggagggatgaaggcataggtgagtgtagacaactcctactctctaggccctccctgcctaatgggtgctggccgcaatggcacccacggatggtgtccatctaaggtcactgagtcttggggataaaaaaaaaaaaacagaagagaaaagggggatgtccacattctctctccctcacaccccaagtttttgctgaaaggagcaaaggaaacgagg

SEQ ID NO: 937288 - DNA, 722 bp, Homo sapiens
cctgctcgccatcccctcctgccatacacccacagagcctttcttcccctggccaaggagttcagcttggtccaaactgggggagagatgcagtgattaaaggaacccgtttgcagaaagcaagagttcccccctcttaaacctcttttttctttccttttcaatgcgagagggttcttctcctacctcaacactctgcttataacagggaggcaacaaaggagtgacaccaccgactatgaactgcaagtttggcaaaaccagtgtgagaattaatctaaatggacccacgcatcccctgagacacctttttggcccaaatttgattccaagcttckagttgaagccctagaaggaaaaccagattggagaaatccaaggcaaggtaacaggcacagtataaatgggcaggactatttcctgatgattaagcccctgcttcatgggaggaggccatgctccatggcatagatggggcccaggtaacccaaaggttgctgacagtaggagggatgaaggcataggtgagtgtagacaactcctactctctaggccctccctgcctaatgggtgctggccgcaatggcacccacggatggtgtccatctaaggtcactgagtcttggggataaaaaaaaaaaaacagaagagaaaagggggatgtccacattctctctccctcacaccccaagtttttgctgaaaggagcaaaggaaacgagg

SEQ ID NO: 937289 - DNA, 662 bp, Homo sapiens
tccctctgttcccagcttctgaatatcgaaggaaccacagactcattcccggatttactcctcttctctgtccacatggctttaaacaccatcctcacacctctgactccgaaattcatacctcaggttcagaccactccccgaccccaaaactcayatagggtctgtccaccgaacctctcctctcagtagacatggataattcaaaatgtccaaactgagctcttgatctccctttccaatccgtcctcacctgcagccaccccacctcaggtgagggcaatgccgtcctttctgttgcttaggccgaaaaccttgaagagcccctgaattctcccttatcttacacatcacatccagtccgtccaattaccctcctagtgcatgtccagacacacctccttccctccttggtgacgccctggtggagccgccatcactgcccacctgagtgagtgcagtggctctcccatggctgtcctattcctctccttcctctccatggggagttccttccatcatgaaggctgtgccaccctggctcctcgctcccccttgaacacacccatgggtgttcctgcctagaggcctcggcactgctttcccctcttcctggaactctgtcccctgggatcaccacctgcctaatttccccacctgtt

SEQ ID NO: 937290 - DNA, 621 bp, Homo sapiens
cgcccggccgcttttgtagttctttaagatgcatcattaggttatttatttgaagcttttcttctttaatgatgtaggcacttacagctataaatttcccttttagtgctgttttcactatatcccacaggttttggtatgttgtgttttcattattatttgtctcaagaaatttttcaatttccttctaaatttcttcattgacccactggtcattcgagcatattacttaatttccatgtatttgtatagtttccaaaattcctcctcttattattttctagttttattccattgtggtcagaaaaggagtttgatattatttcagttgttaaaaatgttttaagacttsttttgtcacctaatatatgatctacccttgagaatgatccatgtgctgaggagaagaatgtgtattctgaagccaatgtaggaaaagctctgtaagtatataagtcaatttttcctatagtgcagattaagtctgatgtttctttgttgattttctatctgggagatgtgtccaatgctaaagtggggtgttgaagtctccaactattattggggtctatctctgtctttagttataataatatttgctgtatatatctgggtgctcca

SEQ ID NO: 937291 - DNA, 621 bp, Homo sapiens
tggagcacccagatatatacagcaaatattattagaactaaagacagagatagaccccaataatagttggagacttcaacaccccactttagcattggacacatctcccagatagaaaatcaacaaagaaacatcagacttaatctgcactataggaaaaattgacttatatacttacagagcttttcctacattggcttcagaatacacattcttctcctcagcacatggatcattctcaagggtagatcatatattaggtgacaaaasaagtcttaaaacatttttaacaactgaaataatatcaaactccttttctgaccacaatggaataaaactagaaaataataagaggaggaattttggaaaatatacaaatacatggaaattaagtaatatgctcgaatgaccagtgggtcaatgaagaaatttagaaggaaattgaaaaatttcttgagacaaataataatgaaaacacaacataccaaaacctgtgggatatagtgaaaacagcactaaaagggaaatttatagctgtaagtgcctacatcattaaagaagaaaagcttcaaataaataacctaatgatgcatcttaaagaactacaaaagcggccgggcg

SEQ ID NO: 937292 - DNA, 621 bp, Homo sapiens
tggagcacccagatatatacagcaaatattattagaactaaagacagagatagaccccaataatagttggagacttcaacaccccactttagcattggacacatctcccagatagaaaatcaacaaagaaacatcagacttaatctgcactataggaaaaattgacttatatacttacagagcttttcctacattggcttcagaatacacattcttctcctcagcacatggatcattctcaagggtagatcatatattaggtgacaaaacaagtcttaaaacatttttaacaactgaaataatatcaaactccttttctgaccacaatggaataaaactagaaaataataagaggaggaattttggaaamtatacaaatacatggaaattaagtaatatgctcgaatgaccagtgggtcaatgaagaaatttagaaggaaattgaaaaatttcttgagacaaataataatgaaaacacaacataccaaaacctgtgggatatagtgaaaacagcactaaaagggaaatttatagctgtaagtgcctacatcattaaagaagaaaagcttcaaataaataacctaatgatgcatcttaaagaactacaaaagcggccgggcg

SEQ ID NO: 937293 - DNA, 398 bp, Homo sapiens
agtgtggctgtggctcgcagactgagaggtgcaattcaagctaaacatccccttaggggaccaattagtaatgattccataggaatcgttgtgcagcacctctgcctgttctgcaatgcaatcttactaaacaagtatgttcattttttctaactgggtccaatcctktttacaaaaaggtttttgagggtggtatgcctcaattatagtagcagatttattatggtaaatactgagatcagaaagcatgtgtaactgtgttatagagtgattgcatctaggcattattgccagccaagattgataaatatgcccaataagtataattgttctctgtgtcagcccttgctgaaggaatactcatggcagtggtgatcactgctatcatagctaccatt

SEQ ID NO: 937294 - DNA, 575 bp, Homo sapiens
tcgggtgatcaaagccatcagcaatcccggggcctgctctgcttcaaaaatacttctgtccttgttcccctctttctaccatctggcttcagctccatggcttctccattcctctccagcttctccaattctttttcctcccagcagccagaaaccactttaatgccacaggaaggatcatgctacctctgtgcttaaaccctccctgcacacaaaataaagcctgccttcatcgcctgtccacaaggcccggccttgtctgcctcctgaccatctcttcagcctccttgcaggcccctctcaccctctgcacacaataatctctccttmcttgaacatatcagtgttgtgtccgcttagggacttcgtacttgctgttccctccttcaggaacatgctgcctccacatctttgcatggatacctccccctcacctttcaggattctgttcatatgtcacctcctccaagaggctttccttgaacacctctcccctcctcccttgcaatataaatggcatccccaagttgcttgcattccactcttttaattttcttcatggtatttatctctag

SEQ ID NO: 937295 - DNA, 691 bp, Homo sapiens
atggcaccaagtccccaggctgcaaacagcacggggaccctgtgcctggcccatgaaaccactttttcctcctgggcctctgggcctgtgatgggagggactgccatgaaggtctctgacatggcctggagaaattttccccattgtcttggggattaacattaggctccttgccacttatgcaaatttctgcagccagcttgaatttctcctcaaaaaatgggtttttcttttctaccacatcgtcaggctgcaaattttctgaacttttatgctgtttcccttttaaaaaggaatgcttttaacaacacccaagtcacctcttgaatgctttgaagcttagacatttcttctgccagatacccgaaatcatctctctcaagttcaaagttccacaaatttctagggcaggggcaaaatgccaccagtctctttgctaaaacgtaacaagagtcaccttcactccagttcccaataaattcctcaactccatctgaggccacctcagtctggaacttattgttcatatcaytatcagcatttttgtcaaagccattcaacaagtctctaggaagttccaaactttcccacattttcctgtcttcttctgagccctccaaattgctccaacctctgcctgttacccagttccaaagttgcttccacatttttgggtatcttttcagcaatg

SEQ ID NO: 937296 - DNA, 777 bp, Homo sapiens
agtctctttgctaaaacgtaacaagagtcaccttcactccagttcccaataaattcctcaactccatctgaggccacctcagtctggaacttattgttcatatcactatcagcatttttgtcaaagccattcaacaagtctctaggaagttccaaactttcccacattttcctgtcttcttctgagccctccaaattgctccaacctctgcctgttacccagttccaaagttgcttccacatttttgggtatcttttcagcaatgccccactctactggtaccaatttactgtatcagttcgtttttacactgctaataaagccatacctgaaactgggaacaaaaggaggtttaattggacttacagttccacatggctggggaggcstcagaatcatggcaggaggtaaaaggctcttcttacatggcagtggtaagagaaaatgaggatgaagcaaaaagggaaatccctgataaacccatcaaatctcatgagacttcttcactatcatgagaccagcacaggaaagaccggcccccaggattcaattacctccccctgggtccctcccacaagaagtgggaattctgtgtgagatacaattcaaattgagatttgggtggggacacaggcaaaccatatcaggcatgcttgctcccagagaaagacagtaaaagagccagagctctctgtctttggagatgaacagaggggagccagggccaagcttggctcgctaatgcccagagagagaaagagttaagctactgacccc

SEQ ID NO: 937297 - DNA, 777 bp, Homo sapiens
agtctctttgctaaaacgtaacaagagtcaccttcactccagttcccaataaattcctcaactccatctgaggccacctcagtctggaacttattgttcatatcactatcagcatttttgtcaaagccattcaacaagtctctaggaagttccaaactttcccacattttcctgtcttcttctgagccctccaaattgctccaacctctgcctgttacccagttccaaagttgcttccacatttttgggtatcttttcagcaatgccccactctactggtaccaatttactgtatcagttcgtttttacactgctaataaagccatacctgaaactgggaacaaaaggaggtttaattggacttacagttccacatggctggggaggcgtcagaatcatggcaggaggtaaaaggctcttcttacatggcagtggtaagagaaaatgaggatgaagcaaaaagggaaatccctgataaacccatcaaatctcatgagacttcttcactatcatgagaccagcacaggaaagaccggcccccaggattcaattacctccccctgggtccctcccacaasaagtgggaattctgtgtgagatacaattcaaattgagatttgggtggggacacaggcaaaccatatcaggcatgcttgctcccagagaaagacagtaaaagagccagagctctctgtctttggagatgaacagaggggagccagggccaagcttggctcgctaatgcccagagagagaaagagttaagctactgacccc

SEQ ID NO: 937298 - DNA, 606 bp, Homo sapiens
tttttcatttttctcttttgaacattctaaaatagaattctgggtaatctggtaagtgtatacttaactttataagaaattgccagaaaagtttaccaagtggttttactattttttttttatcctcactggcaattttgccacatgctctccaacacttgatattgtcatagtaaaacaattttagccactgaagtactatctcaccgtaggttaatttacatttccctgatgactagtgacattgaacactttcatgtgcttaatgaccatcttttgtgaattgtctactcaataatttcttgtccatttattactgcattgtttaactttttactattagtctatctgcatttttatatgatctggatgaatttttcggatatatgtattgtagtgggaaatcagcgactggagagaccaagyggtgttcaggagggcatattttaggtgtacactggctcagcggacaggcatcctgaaagtctgagcagcaaacaaagaaaacaaacaccttttatgcaccttgaggcgggaattacatgatgcaggaagctggcttacaaaagcgagaacaaagtagttaattatcaggtgacattctta

SEQ ID NO: 937299 - DNA, 714 bp, Homo sapiens
aacagtcctttattatttatcatgagtctatgagttggttggacagttctcctgagctgggctgctgagcgggtctaggcttagctaatctcccattgtcttgttcgtatgtggtcagctggtatgtatgctgtgggctagcatggctggcttcagttaggatgatttggttctgcttcatgtgatctccttactcctaggcttggttgtcagttctcacagcagagccaaatgcccaagggaataygcagaagtgcttaaggccttatgctctattctatcagtgaaggaaagtcacaaggccagcctagatacaagagaattaaacatggacttcacctcttgatgggaggaaaggtgtgggtctaaggaggaattgataatggggccattttttttttttttttttttgcaatcagtctatcacatccctctgtaaacctgattttacatcctttcacagcaccaggcctacaatctatcaatctcacctttccaatgtgaccacactctcacatgtcctcaattccctcctacctagcttaaattcaatgatcaagcattattatcatgtcctcacattcatcctcaactccatgtcattcttttaagttataaaactggcttgtctaaatcacagctctggttcaatgtacctgtctgtcaactccacacctgtgttgctgttgctgaaagtagctggagaacaaccac

SEQ ID NO: 937300 - DNA, 645 bp, Homo sapiens
gatcagcaggcaaagcacgtgtgtttttatgagaattatgctgagataggtaacagatgaggatgaaatttgggcttgactgaagtaatgggggctgtctgtgaagccttgcggcagtacagcccaggtaatttgctgagcttaatgggtgtcagggtcagtctaagtgaaagcaaagagaggctgggacgaggggtgcaggggaataatgaaaaaagcatctttaagatcgagaatggaatagtgagttgtggaggaaggtattgaggacaaaagagtgtacaggttgggcaccacaggatggatgggcaaaacaatttggttgataaggcgcagatcctgaactaatctgtaagacttgtccagtttttggacaggtaaaatgggggaattgtaagttkataggttttagaagcccatgctgtagcaggtgagtgataacagactttaatccttttaaagcatgctgtgggatgggatattggctttgagcggggtaagggtgattaggttttaatgggatggtaatgggcatgtgatcggttgccagggaaggagtagatatgtcccatacttgtgggttaaggtggggggatacgagaggaagacgcgaaggaggctttgggttggggagaagggcggcaa

SEQ ID NO: 937301 - DNA, 776 bp, Homo sapiens
aactacaggcatggcggtacatgctaattttttttttttttttgaggcggagtctcgctctgtcgcccaggctggagtgcagtggtgcgatctcggctcactgcaagctccgcctcccgggttcacaccattcttctgcctcagcctcctgagtagatgggactacaggcgcccgccaccacgcccggctaattttttgtagttttagtagagacggggtttcactgtgttagccaggatggtctcaatctcctgacctcatgatctgcccgcctcggcctcccaaagtgctgggattacaggcgtgagccaccgcaccgggcttaatttttgtattttttagtagagatggggtttcaccatattggccaggctggtctcgagctcgtgacctcaggtgatctgcccacctcggcctcccaaagtgctgtgattacaggcgtgagccaccgggcccagccagyattaataaatactttcattgtgaacactggtatcttctctatgactacactagaatataattccaaaagtttatgagtaatttatttgaaatagagaatatattctctttaatccataatgaagctatcacgaagcctgatcatcccttcctgatctctagctttcctcaaggtctcgtctttggaaacgtcagttgttgaaaacaatttagtgagaattgagaaaaacaaaaagctgacaggacaacaaccagaacatttcccactccctgaacaatcttacctccccaccttggctacacctgtcacacc

SEQ ID NO: 937302 - DNA, 457 bp, Homo sapiens
tgggaagttcaagttcaaggcacccactgattcagtgtctggtgagggcccattcctcctaaagggtgccttctcgctttgtttgcacatggtggaaggaaattgtgcattttcaacagtatgcaagattgttgtatcttgttgttgtatcttgttgttgtatcaggcagaattatgacctagttattgtctttatttggagattaagtatggtttaaggagatacatatgagtgccaagttgacaagaggtggacttgtgactgttagttttatgtgtctayttgactgggttaaagaatacctagatagctggtaaaacattatttctgggtgtatccgtgaggatatttctggaagaggttggcatttgaatcagtagactgagtaaggtgagtaagaaagatccatccttaccaacgtgggcaggcatcatccaatccactgaaggcccagat

SEQ ID NO: 937303 - DNA, 559 bp, Homo sapiens
caaagagatgtctgtactttcatgttaattgcagcattattcacaacagtcaagaagtatgtattagtctgttctcacactgctataaaaaaatacctgaagctgggtgctgtagctcatgcctgtaatcctggcactttgagaggccaaggaaggtggaccacctgaggtcaggagttcaagaccagtctggccaacatggtgaaaccccatctctactaaaaatacaaaaattagtccgggcgttgtggctcacacctgtaattccagcacttcaagaggctgaggtaggcagatcacttgaggtcaggagttcaagaccagccttaccaacatggtgaaaccccatctctactaaaaaaaaaaaaaaaaaaaattagctcggcgtggtggcaggtgcctgtagtcccrgttactcgggaggctgaggcaggagaatcatttgaacctgggaggtggaggttgcagtgagcccaggtcgtaccactgcactccagcctgggcaacaaagctagactccatctcaaaaataaataaataaatacaaataaaaatataa

SEQ ID NO: 937304 - DNA, 545 bp, Homo sapiens
cccatcccatatccgtctctctgtccatcccagtctctctgcccttttcgtcttctggccatcctctgccctgctctggctgagcccagggtttttatggacctcagcggggaggaagtgcgtccatgctgataggtccaggggtggccaatggcagcccagaagaggcaccacgagtccccattccagtcagcaggactggcagcccagcccccagccttcaggccctccctgacccaaaggtggggccttactggggactccccctcttccccgcccaggaatcaatctgccttctgctgccattcatagcccccaggctcggccccaaccccggctccaagatcagagcaggtsccgggagtggagaggggccaggcagcaggagaagacaccccggaacctgcagggacagaggttcctcctggggccccgagggtgcaggctgcagagacacccggctcctgagcctgggagggcgtggcagccgcaccagggaaggcagatcctgcctgctcctggccctccaggaagggcacagggag

SEQ ID NO: 937305 - DNA, 744 bp, Homo sapiens
gccttagtccttctctccttttcttatttctgctgcccagaactgggatgtgttggctggagctcttgcagccattctggaccgtgagatgaccttgagaatgaaagccatgtgctaaggatgtggagcagaaaagcggaatattaaaatatatatggcaccattttgcaccaggttctgttcaaaacgcatttcctttattaaatcatttaatcctcagagcagtcctcaaagatagatacttttattatcctcattttacagatgaagaaagcagagaggaaaggtaacttcctcaaaatctcatggcctgagaaaggactaaaactcaggccagtgtgactctggagtcygtgctctaagcagtcatcttgcattgcctgggttcttcatgactcaggaactacctaccacaccagccccgggctgcctagctctgcacttctcttgtgtatgaaagaaataaacctctagcttacttaagtcactgctattttgagttctctattgttggctgccaagcctatgcctacctgatccattctccaattgattttcatgcctccaggcacttgttcaaactcttccttctgcttggaatgccctttccattgtacactcctctgttagcacacatcaaatgcagaataacatcacagctatttctttacccatctgtcttccaagctagatgttcaccatccagaatggagggacactgtcttatagtctgttcccataaaa

SEQ ID NO: 937306 - DNA, 571 bp, Homo sapiens
ttggagtaggtgaaggtggtgaagacatttatgaccctgggaaacgttaagccgagagcactcactgcaaagaagcttccaaaaacaagttagatcagatgacagcccttgtagctgtggtcgacttctttccccagccamtttgctgcttgctccacagcccatgtgtatagtggccattgtgcagaaatggtcactcacttcccttcacagggcttccctgtcaatcaccactgttgagtccccagcttgccagtagcagagcaaaacaatgagctctgctcacacagaatccctgtgggaaccagcctatcacctcactttacgaattccttccaccttggaggggcagggctttgtcttcacgggaatagatacacattctgtatgtagatttaccttctttgttcaaaactcttctgccaacactatcatcaggggacctacagaatctcatcattatggtatcttatgcaacattgcctctgacaaagggactcattttaatacaaaaatagaacagtaataggttcatgcccatagaattcagattttgccacgtacccatcac

SEQ ID NO: 937307 - DNA, 753 bp, Homo sapiens
ggtccttgagcaatgcagggttagggacccctgcacagtcaaacatttgtgtatcttttgactctctaaaaactcaattactaatagcctatcgttgaccgaaagccttaccaataatgtaagtaggcaattaacacacattttatgtgttaatatattatatgtacattttatatatattatatgttatgtatattatgtactgtattgttacaataaagtaagctagagaaaaggaaatgttattaagaaaatctggccaggtgcrgtggctcatgctgataatcccagcactttgggaagctgaggagggcagattacctgagggcaggagttcaagaccagcctggccaacgtggtgaaaccccatctctactaaaaatacaaaaataagccaggtgtggtggcgggcacctgtaatcctagctactccagaggctgaggtgggggaatcacttgaacctgggaggcggaggttacagtgagcggagatcatgccactgccctccagcccgggtgacaagagtgagactccacctcccccccaaaaaatgaaaatcttaaagaagagaaaatatacttatttactattcattaagtggaagtggatcatcgtaaaggcctttattctcttgttttcttcatgtcgagtaggttgaggaggaggataaggaggggttggccttgctgtctcaggggtggcagaggtgagagaaaattcacatataagtggactcacacagttcaaaccca

SEQ ID NO: 937308 - DNA, 813 bp, Homo sapiens
catgcaaactttgctttctactttaaaatgtatctacatttgcttaagacatatgcagttggtccttgagcaatgcagggttagggacccctgcacagtcaaacatttgtgtatcttttgactctctaaaaactcaattactaatagcctatcgttgaccgaaagccttaccaataatgtaagtaggcaattaacacacattttatgtgttaatatattatatgtacattttatatatattatatgttatgtatattatgtactgtattgttacaataaagtaagctagagaaaaggaaatgttattaagaaaatctggccaggtgcggtggctcatgctgataatcccagcactttgggaagctgaggagggcagattacctgagggcaggagttcaagaccagcctggccaacgtggtgaaaccccatctctactaaaaatacaaaaataagccaggtgtggtggcgggcacctgtaatcctagctactccagaggctgaggtgggggaatcacttgaacctgggaggcggaggttacagtgagcggagatcatgccactgccctccagccygggtgacaagagtgagactccacctcccccccaaaaaatgaaaatcttaaagaagagaaaatatacttatttactattcattaagtggaagtggatcatcgtaaaggcctttattctcttgttttcttcatgtcgagtaggttgaggaggaggataaggaggggttggccttgctgtctcaggggtggcagaggtgagagaaaattcacatataagtggactcacacagttcaaaccca

SEQ ID NO: 937309 - DNA, 785 bp, Homo sapiens
tgtagaagcagaaattaatttatcatgaatgggaggggaagtagagatattatcttatgtatcctgattatgtgtccggcaatttggcaatctttatgtatatgttttcttatttaattttcacaacagatcttggagttaggcagaatcgttacgcttactggattgacagggatacggaggcttataacaattaaatatctccagtaagtccacaccatagggtacctgatatctgaacccagttctgtctgacgtggaacatggggtcccacaaggggggcaagacttccacagattcttgggtcagtattattttcatgagggtacattgcctcttcctcactgttaagaaagcagattgcagccaggcgcagtggctcacacctgtaatcccagcactctgggaggccgaggcgggtggatcacgaggtcaggagatcgagatcatcctggctaacacggtgaaaccccgtctctactaaaaatayaaaaaattagccgggggtggtggcgggtgcctgtagtcccagctcctcgggaggctgaggcaggagaatggcgtgaacctgggaggcatagtgtgcagtgagccgagatcgcgccactagactccagtcagggtgacagagcaagactctgtctcaaaaaaaaaaaaaaaagcagattgcagggaatattactcagccataaaaggaatgaggtacagatgcatactgtggtgcagatgaaccctggaaacattatgctaagtaaaagaagccagcatgaaaggtcacatgttg

SEQ ID NO: 937310 - DNA, 570 bp, Homo sapiens
gaaggtgtccccacaaagctcataagttaaaaccctatcccaatgcgatggtagttagaggtagggcctttgggaggtgctgtcgtttgaatatcccctccaaaacttatgttgaaatttaattgcattgtgataatatcaaaaagtgggaccattaygaggtgattagaccatgagggctgttctcattgatggattatatctcattattgcaggagtgggttagatatcgccagagtgggttgttataaaagcgaatttggcactctcttgccctcttgctctcaggcacgctctctttcccttccacctgatgccatgggatgatgcagcaagaaggccctggccagatgttggcaccttgatgttgggcttctcagcctccagatctgtgagaaataaattttatttccttataaattagctggtatgtggtgttctgttaaacaacacaacatggactaagaaggtaattaggttatgaggatgaagctatcatgaatgggattagtgctcttaaaagaggccagagagcaaactagctctgtttctgccatgtgaggacacaaa

SEQ ID NO: 937311 - DNA, 661 bp, Homo sapiens
gcaccgcccagatggataaactgtctcatctgatcttgtggctcccactcaagaactgactcagcacaagaggacggcttcagcttcccatgattcatctctgacccaaccaatcagcactctcgactcactggccttcccccacccaccaaattatcattagaaactctscttcccaaatgctcagggagactgatttgagtaataataaaactctggtctccccgcacaccgggctctgcgtgaatgacttcctgtttctctgttgcaattcccctgtcgtgataaatcggctctgcctaggcagcgccctgctgggcggttacactaagttgtatctgcttgcctatttataaaagggtgaaatttcttcctttcactgcgatctctttgcagattgcctgtgatgtgcctcacattctggtttaatgtttattacataataaaactgttttctgtctctattacctttgaggagaggttttctggattgacagaagattttaatgctattcccccaacaggtgcaaatatttatcataggttccccaggagaagtagtgagcctacccactctgcagaaaccacagatttaggggagcttattcccttgtctccagggccatgtgatcagcctgtgagggtcccttaggaccacagg

SEQ ID NO: 937312 - DNA, 766 bp, Homo sapiens
acttccaggtcaactggaagaaaggctaatttcaattatgaaaatagagaatcacagcccctcaatttccagacatgaaccagtttatacacccagaaccctttgaatgaaagggaggctggatcccttaaagaaggacccaactccactaccaacaatttatactgttaatcttttccaatccttcccaaggagacctccagccttttaccagggtaactgtgcattggggaaaggtaaatgatcagaactttttggaactatttgacactggctctgagctgatattgattccgggggacccaaaatgtcactgtggtcctccagttaaagtaagggcttatggaggtcaagtaattaatggagttttagctcaggtccaacttacagtgcatccccggactcatcctgtagtcatttccctagtgccagaatgcataattagcaaagacatacttagcagttggcagaatccccacattggctccctgattggtagggtgagggctaaaayggtgggaaagaccaaatggaagccattaaagctgcctctacttagaaaaatagtaaatcaaaaacaatatcacatcgctggtgggattgcaaagattagtgctaccgtcaagaacttgaaagatgcaggggtcgtgattcctaccacatccccattcaacactcctacttggcctatgcagaagacagatggatcttggagaatgacaatggattattgcaatcataagcttaaccaagcagtgactccaat

SEQ ID NO: 937313 - DNA, 645 bp, Homo sapiens
tgtaaaagtgttcctatttctccgcatcctctccagcacctgttgtttcctgactttttaatgattgccattctaactggtgtgagatgatatctcatggtggttttgatttgcatttctctgatggccagtgatgatgagcattgtgtattttgtttttaattgacacataattgtacatatttatrggacaccatataatgttttgatacatgcatacattgtgtaataactaaatcagggtaattgacatatccatcacctcaaacattaatgattatttctttgtggtgacaaaattcaaaattttctagctattttgaaatatactatacaatattgttaactacagttggtcaatgagtacaaatgtgcagttaggaggaatgaattctggcaaaaggtttttttaaaaaaatttacatctcagagaggcagggaaataatctaaaattatgttttctaaagcaaatgctctaagaaaagggaggtcaggagcctagagtcaggaagaagcctgcctaatgtttgttcaagctgtggagaacattaaggctgttttggtcataccaaatctatattctcacatgtttttcagcttgtctgttaacctgtcaccagcgacagactctacttttgtgccag

SEQ ID NO: 937314 - DNA, 645 bp, Homo sapiens
tgtaaaagtgttcctatttctccgcatcctctccagcacctgttgtttcctgactttttaatgattgccattctaactggtgtgagatgatatctcatggtggttttgatttgcatttctctgatggccagtgatgatgagcattgtgtattttgtttttaattgacacataattgtacatatttatgggacaccatataatgttttgatacatgcatacattgtgtaataactaaatcagggtaattgacatatccatcacctsaaacattaatgattatttctttgtggtgacaaaattcaaaattttctagctattttgaaatatactatacaatattgttaactacagttggtcaatgagtacaaatgtgcagttaggaggaatgaattctggcaaaaggtttttttaaaaaaatttacatctcagagaggcagggaaataatctaaaattatgttttctaaagcaaatgctctaagaaaagggaggtcaggagcctagagtcaggaagaagcctgcctaatgtttgttcaagctgtggagaacattaaggctgttttggtcataccaaatctatattctcacatgtttttcagcttgtctgttaacctgtcaccagcgacagactctacttttgtgccag

SEQ ID NO: 937315 - DNA, 645 bp, Homo sapiens
tgtaaaagtgttcctatttctccgcatcctctccagcacctgttgtttcctgactttttaatgattgccattctaactggtgtgagatgatatctcatggtggttttgatttgcatttctctgatggccagtgatgatgagcattgtgtattttgtttttaattgacacataattgtacatatttatgggacaccatataatgttttgatacatgcatacattgtgtaataactaaatcagggtaattgacatatccatcacctcaaacattaatgwttatttctttgtggtgacaaaattcaaaattttctagctattttgaaatatactatacaatattgttaactacagttggtcaatgagtacaaatgtgcagttaggaggaatgaattctggcaaaaggtttttttaaaaaaatttacatctcagagaggcagggaaataatctaaaattatgttttctaaagcaaatgctctaagaaaagggaggtcaggagcctagagtcaggaagaagcctgcctaatgtttgttcaagctgtggagaacattaaggctgttttggtcataccaaatctatattctcacatgtttttcagcttgtctgttaacctgtcaccagcgacagactctacttttgtgccag

SEQ ID NO: 937316 - DNA, 640 bp, Homo sapiens
ctgaaatttttaagatagtttataaccaatgcttggtcccatattcctgggaagacaattaaagcttcatgtacatttggtcaccttgtgggccatttaaacattttataaagggatttcattcaattgttatttccaatgcatgctttctggttgtataaaagctttcccacgtgagagggctgatgttatyacagtagattattatgctacagtgtatttgcaccaggtaaaaaagctttttatggtttgaatcttctgagaacaccagagaaagactctccttaccatcctcactgcaactaaacttcgggaccctgggctttgggttcatggtctcgccactgaaaaggttccctccacacttttggaattgtgcacccattggaacccttgaggtaaagctaaccagagaaatttctcccaagaagaagaagatggcatccttgaagtgaacagcttttcccaagttcacagagtaagacttctactatcatgaaactcttatctttgaatattttttcttgcttatatctctactaacaatagaagtggaaaaagggtctgttatgtgcacttatggggtatacttttatttgtgaagaagtttgcagccagccttatacatggataaccttct

SEQ ID NO: 937317 - DNA, 572 bp, Homo sapiens
ggaacccttgaggtaaagctaaccagagaaatttctcccaagaagaagaagatggcatccttgaagtgaacagcttttcccaagttcacagagtaagacttctactatcatgaaactcttatctttgaatattttttcttgcttatatctctactaacaatagaagtggaaaaagggtctgttatgtgcacttatggggtatacttttatttgtgaagaagtttgcagccagccttatacatggataaccttctactttgatagagatgaaggcccaaygcaggtaagaaactttagtggtacatatgttgccccataatcactcaaaaacaaaatattggttcatccctcttaacccacatcatgggttaaagagaacattgccagggggtcttcactctcctagaagggcatcatttgttaagtcctttttccatggcttaaagtaaaggaagcaatgattagaaatgtatccctcatgataggctctatagcaaatctactttaaaggctatcgttacacaacagattttaaattctctttgaaagttatgctaaatagaattggctaa

SEQ ID NO: 937318 - DNA, 855 bp, Homo sapiens
catgaggacaccatacctataaatgatgtgctgagactggaaacccaaaatgttggtaactgagaagtggcactaaggccctaagttttggttgcacactcacctaagtgagaacctgaccaaaaaggggggatttttaaaacaaaactctgtgaggccattgttttggactaagctcatgcactcatgccctgggccccaacagactaaagcaaacacagatggagtcatttgtgctaagactttaaggaaacgcttggattcyacaacagactagcttttgtttttttcttctgcaaatctctataacaaacatttctgacaacataggtatccaccccctgaagttcccattaaatcttttaaccaaattcatttcctctcacctagagaccatcaagcttcagatgatgatgcaacaaaggtttcagccagttccaggtgaagacaccacccttggacatcaagaagctaccctgcctccactagatagagcagggagagttctgtgatccccaataggtaaggactatgccccaagccagcatgaagcagttaccaaaaaagatcatcggtccctctgcctcccataaagatttatgggatcacatctctcagggaggagatgaggcaggaaaatacggtctggaggcaggaaacataaggacaattcacacttcagctatgacaggaaatatcctctccatagggcataggccaagtaaatgactttgcaactttacttcatcctcttcatttatgtagtatgtgtcccaatcctctagaggatattgaaactcccaaaattctaaatagtgtggacttggagcccctatgctcaggcccgctcccaca

SEQ ID NO: 937319 - DNA, 559 bp, Homo sapiens
agtgggtttgtttacaccagcatcactgagtaatgtgttgcactatgacggtgacaatgttactggatgatagaatttgttagccccatcataatcttatggaaccaccatcataaatgaggccagtggcttatgtggaacatgactgtatttggtctttgtccccaggttcctggcacagacttcctaaaacactggaatctcgtgagtgataaagagcgtcttttgtattctcatgagatgactcaaagctgcggagggagggaggtgcctcgagagcttctagatrgggtctagccaccagaaagatccagccaggattaaaaggttggaactttcagccccacccgacagtccacttctcaagaggggaggggacagcagatagagttaaatcactaaggcctaggcctcgcgcagtggctgactcttgtaatcccagcactttgtgaggctgaggttggactgattacttgaatcaggagttcaagaccagcctagccaaaatggtgaaaccccatctctactaaaaatacaaaaattatccaggcgtggtggc

SEQ ID NO: 937320 - DNA, 603 bp, Homo sapiens
tgtagtagaggtgctgttgagagttttagaaggggtggacggagaaggtcttttgagcttagtgtgaaaatcagttcaaaaagaaaaatttgaacatactgaaacacagcagatcctgggcaaatgtatcaatggagcagacaacccagaaagctaaagagcttgtgcagaggatggaagtgtggagagtggagccctcaggaagagctagtggaatatgctgcccaagtcagtgtgagaagacaaccatggaaagaatctgtgactatgggggaataggacatytaaaggtgggcagaggaagatgctgcaaagaggcatcaaggagggtggctcaaaggagcctgcagaggaggaggaagaggaaaatgaggctggaaatgtgaagggagaaagaccacagtctcaacagctgtgaagaccaaggaattagcctagaacagaagaagaggtgtctttcctgtgaagaagaaaggatgggtgaatgttagaatagatttcatctgggaagcagtaatgtagaggacagaatgtacttcatgaagtaggaagtaaagtaggtcacacctgaaggggatgaaaataaggatgaggtggaggttt

SEQ ID NO: 937321 - DNA, 643 bp, Homo sapiens
gcattcctaccagcagtgtatgaggattctggtttctccacatccttaccaacacttgttactgtttttatattttaattatagccaccctaatgggtgagaagtggtataatttcatgattttagtttgcatttccttaatgactaatgacgttggtaatcttttcatgtgcttattggctatttgtatatcttctttgaaaaatatctattcttacttttgcccattttaaaattggactatttttctttctttcytttttttttttttttttttttttttgagctgtcaaagctctttgtgtattctggatactactccagtatcagatttatgtgatttgcaaatatattctctcttcttctatgggttgtctttttactttcttgatagtatcctttgtgtataaatgtttttaattttgatgaggtctaagttatctattttttctttccatgtttatgcttttgatgtcatatctaagattccactggcaaattgaggtcattctctagaaggctgtgtatgctctgaatcagcatctaatatatggtagtgtttctcccgtatccaggattcatgtgtccaggaatcaaggggtagaaggggaagtggcaccactcaccaccaaccctagtgacc

SEQ ID NO: 937322 - DNA, 562 bp, Homo sapiens
gatctgttcagccctgaaaagtccaaactcccaggtttgtctaggaaggagtttcctcccttctccacccgcaaggtagtctgaccaaaagtggaagagttggagaaagaatagaaaggagcaacaagtcaggactcctggatactgatcctagtttctactgctaatttgtggaaatctcttttccttttgagacctcagtttcctcttctgtaaaagggaagtttgttcttggatctccatgggcccagcyagcactggtgccctgtgagtctgtatcaggtagaggagatgggaccaggtggagaggaatttgaaagggcattggaattcagagcaaagagacagatattaagagctggggaaatgtggttcccattacacaggcctcactgacatttattattattattattattacttgagacagagtcttactctgttgcccaggctggagtgcagcggtgcgatctcggctcactgcaacctctgcctcccgggttcaagcgattctcatgcctcagcctcctgagtagctgggattacaggcacacgtcaccat

SEQ ID NO: 937323 - DNA, 581 bp, Homo sapiens
cttgaatcagcacaccaggaatgctggaccaataaaacacaatggaagtaacactgcagtggttataaaaatatgcccaccaaattctttaatactcctcctttggggtaaaacctgtttccttccccttgcctgtgggctgaactgaacttagtgacttgcttctagtcactaagcagaagtgatgctgtgtgactttgaaggctaagtcctaacaagacactgtggcttttttttttttttttttttttttttttgagacggagtcttgctctgtcacccaggctggagtgtagtggcgcgatatsggctcaccgcaagctccgcctcccggttcatgccattctcctgcctccgcctcccgagtagatgggactacaggcgcccgccatgacgcctagctaattttttgtatttttagtagagacggggtttcaccatgttagccaggatggtcttgatctcctgacctcgtgatccacccacctcggcctcccaaagtgctgggattataggcgtgagccaccgcgcctggcatctgtggcttctgtcttatttggtctctctccctcagatcactg

SEQ ID NO: 937324 - DNA, 639 bp, Homo sapiens
gccgcccttcttcccaatccaaagcctcctttgcgtcctcctcttgtatccccccaccttaacccacaagtataagatacctctactccctccttggtgaccgatcatgcaccccttaccatctcattaaaacctaatcacccttagcctgctcaatgccaatatcccatcccacagcackctttaaaatgattaaagcctgttatcactcacctgttacagcatggccttttaaagcctataaactctccttataattcccccattttacctgtcctagaaccagacaagccttacaggttagttcaggatctgcgccttatcaatgaaattgttttgcctatccaccctgtggtgccaaacccatatactctcctatcctcaatacctccctccacagcccattattctgttctggatctcaaacatgctttctttactatccctttgcacccttcatcccagcctctcttcgctttcacttagactgaccctgacacccattaggctcagcaaattacctgggctgtactgccacagggcttcacagacagcccccattacttcagtcaagtccaaatttcatcctcatctgttacctatctcggcataattctcataaaaacacacatgctctcc

SEQ ID NO: 937325 - DNA, 612 bp, Homo sapiens
cctcttgtatccccccaccttaacccacaagtataagatacctctactccctccttggtgaccgatcatgcaccccttaccatctcattaaaacctaatcacccttagcctgctcaatgccaatatcccatcccacagcactctttaaaatgattaaagcctgttatcactcacctgttacagcatggccttttaaagcctataaactctccttataattcccccattttacctgtcctagaaccagacaagccttacaggttagttcaggatctgcgccttatcaatgaaattrttttgcctatccaccctgtggtgccaaacccatatactctcctatcctcaatacctccctccacagcccattattctgttctggatctcaaacatgctttctttactatccctttgcacccttcatcccagcctctcttcgctttcacttagactgaccctgacacccattaggctcagcaaattacctgggctgtactgccacagggcttcacagacagcccccattacttcagtcaagtccaaatttcatcctcatctgttacctatctcggcataattctcataaaaacacacatgctctccctgctgatcatg

SEQ ID NO: 937326 - DNA, 639 bp, Homo sapiens
gccgcccttcttcccaatccaaagcctcctttgcgtcctcctcttgtatccccccaccttaacccacaagtataagatacctctactccctccttggtgaccgatcatgcaccccttaccatctcattaaaacctaatcacccttagcctgctcaatgccaatatcccatcccacagcactctttaaaatgattaaagcctgttatcactcacctgttacagcatggccttttaaagcctataaactctccttataattcccccattttacctgtcctagaaccagacaagccttacaggttagttcaggatctgcgccttatcaatgaaattgttttgcctatccacccygtggtgccaaacccatatactctcctatcctcaatacctccctccacagcccattattctgttctggatctcaaacatgctttctttactatccctttgcacccttcatcccagcctctcttcgctttcacttagactgaccctgacacccattaggctcagcaaattacctgggctgtactgccacagggcttcacagacagcccccattacttcagtcaagtccaaatttcatcctcatctgttacctatctcggcataattctcataaaaacacacatgctctcc

SEQ ID NO: 937327 - DNA, 588 bp, Homo sapiens
ccattgagcaagcagggggtacgtgactgggggctgcatgcaccggtaattagattggaacaaaacagggtagggattttcacagtgcttttctatacaatgtctgtaatctatagataacataaccgattaggtcaggggtcgatctttaactaccaggcccagggtgtggcgccgggctgtctgcttgtggatttcatttctgccttttagtttttactttttctttctttggaggcagaaattgggcataagacagtatgaggggtggtctcctcccttagtttcaaaatgcaaagtaggaaatgtaaaaaaaagtctaagatgggttttgattttggatccttcaaagcagctccagcataataatcacmtatagtaagataacggtccactttttccatatccagatttaaaaattatgaataaattcaaatttaagagctgtatgtgatttttaggcctgctgtaacaaagtaccacaaattgagtggcttagacaacagaactttattgtctcccagttctggagtcaggaggtcctaaatcaaattgctgatagggctggttccttctgagggctgcgag

SEQ ID NO: 937328 - DNA, 522 bp, Homo sapiens
gtggtctgttttgacagggcgctgattggtgcgtttacaatccctgagctagacacaaaggttctccacgtccccatcagattacttagatacagaatatcgacacaaaggttctccaaggccccaccagagtagctagatacagtgtcaattggtgcactcacaaaccctgagctagacacagggtgctgattggwgtgtttacaaaccttgagctagatacagagtgccgactggtgtatttacaatccctgagctagacataaaggttctccaaggccccaccagagcagctagatacagagtgtcaattggtgcactcacaaaccctgagctagacacagggtgctgattggtgtgtttacaatccctgacctagacataaaggttctccaaggccccaccagagcagctagatacagagtgtcgattagtgcactcacaaaccttgagctagacacagggtgctgattggtgtgtttacaatccctgagctagatataaagactctccatgtcccca

SEQ ID NO: 937329 - DNA, 554 bp, Homo sapiens
gtgtatatatgtataaatagtatattatacataatagagattcattatagggaattggctcatatggttatgcaggcttagaagacccaaaatctgtagatggcaagctggagacccaggaaggctcatgggatagtctgagaagcaggaaagctaatggtgtaagttccagttcaaatcctagtccaaatccaaaggcaggagaagattgatgtcctagtttgaagataaccagagatcccttactcagccttttgtttcattcaggccttcaatggattggataaggcccaccctcattggggaaggcaatcagctttactcagcctgccatttccagtgttaatctcatcaagaaacactcacagacacaaccagaataatgtttaagcaaatatctaggcacwctgtgtcccaggctagttgacatattaaacatttctggttttttttttaaggcagagtctcactctgttactcaggctggagtgcagtggtgccatctcagctcattgtaacctccacctcccaggttcaagtgattctcctgcttc

SEQ ID NO: 937330 - DNA, 583 bp, Homo sapiens
ccagtgttggaggtggggcctggtgggaggtgtttgtcatggggcaagtccctcatgagtggcttggtgctgtcctttcggtaaagagtgagttctcacactattagttcacgcgagagatggttgtttaaaagagcctggcatctctctgtttcttcctctcttgccatgtgacatggctgctccccttcagcttccaccatgaytggaagcttccccaggctctcaccagaagcagatgctggcacgatgcttcttgaaccatctacagaactgtgagccaaaataaacctcttttctttataaattacccagcctcaggcattcttttatagcagcataaaatggacaaatacagtgactatgtgaggtgttggatatattagcttaattatggtaatcatttcacaatgtatacatatatcaaaacatcacattatataccataaatatgtataatacttttctattataactcaataaagttggaaagaataaagtgtttgcttaatgaagaaacagaaaaagtgtaattttgggcagtaataggagaaaaacatcatatactagtgaactccaataa

SEQ ID NO: 937331 - DNA, 583 bp, Homo sapiens
ccagtgttggaggtggggcctggtgggaggtgtttgtcatggggcaagtccctcatgagtggcttggtgctgtcctttcggtaaagagtgagttctcacactattagttcacgcgagagatggttgtttaaaagagcctggcatctctctgtttcttcctctcttgccatgtgacatggctgctccccttcagcttccaccatgactggaagcttccccaggctctcaccagaagcagatgctggcacgatgcttcttgaaccatctacagaactgtgagccaaaataaacctcttttcyttataaattacccagcctcaggcattcttttatagcagcataaaatggacaaatacagtgactatgtgaggtgttggatatattagcttaattatggtaatcatttcacaatgtatacatatatcaaaacatcacattatataccataaatatgtataatacttttctattataactcaataaagttggaaagaataaagtgtttgcttaatgaagaaacagaaaaagtgtaattttgggcagtaataggagaaaaacatcatatactagtgaactccaataa

SEQ ID NO: 937332 - DNA, 681 bp, Homo sapiens
aagtgacctcctctttggctcacattttcttctggacttctagagcacagctttgtgtcagttcatctatttgactggtcaagtcttctcactcccctttggtgcatcctcttcaacttcctgccatctaaacactgggaggaccccaggacttggccctcagacatttttcttcctaacatactctgcatcctctaatggcacctggtctcataactttaaatgccatctgtgtggctatgacwttagtctactctctccccaacctacgtgacatctccatttgtaacttccattttcctcaactaaacctgattcttttacagacttccctatctcaataaatggtttccaatgacttaggccaaaacttttggattcattcttgtctctcttttttttacccaattccattccatcagcagatgctttggattttaccttcaacacacctcagatcttcccactcttctcaccttcatttctatccctcaggttctagctcatcttcttgcatccagcttccagcatcctctcgctgtctttttgccactgtaaccttagtcagcttcgtaaaaggtacatcatatcctatcgctcttcttttctcatttcaaaatcttcccatcgtacttgatatcgtagatcaacactcaggattgattctaaacttctccagta

SEQ ID NO: 937333 - DNA, 815 bp, Homo sapiens
cgcgccactgcactccaggctgggcgacagagcaagactccgtctcaaaaaaaaaaaaaaaaattggccgggcactgtggctcatgcctataatctcagcactttgggaggtcaaggtgggcatatcacgagatcaagagatcgagaccatcctggccaacatggtgaaaccccatctctactaaaaatacaaaaattagctggacgtgctggcacaagcctgtagtcccagctactcgggagactgaggcagaagaatcacttgaacccgggagacggaggttgcagtgagccaagatggtgccactgcactctagcctggcaacagagtgagacttcrtctcaaaaaaaaaaaaaaaaaatttgctgggcatggtggcatgcacttgtaatcccagctactctggaggctgaggtaggagaatcgcttgaacccgggaggtgaagttgcagtgagtcgagacggtaaccactgcactccagcctgggtgacagagcaagactacatcttaaaaaaaaaaaagacagctctgcatggcagttatttcatcaattacttaccaagcaatgaaacggctgctttggggttgtgtgcctacttttggacaaatcacttattaatgtattatattcttcactctcccatccctctttgttttgcttttgttcctagggtctcatggccctcatacgtcctcttatattttttctttgatcttcatatactaagggagggtgaaccccaggcttcatggaacatccacccttcctcctctaccatccacaatatcctcatttcaaacagactggcttgg

SEQ ID NO: 937334 - DNA, 564 bp, Homo sapiens
attattattattttttgtatttttagtagagacagggtttcaccgtgttagccaggatggtctcaatctcctgatctcgtgatccgcctgccttggcctcccaaagcaaagggtctttcttacaagggctcttagttgtcctgataacataagcaggtgaaatacattgttcaaggagacattaayaatggtgaacaagagcatatagagaggggaggaagacagggctgacccctaaagtcattctggtgatggcagggaagcaggggagggaggctgatctttggtaaatgcaggaacaagttggcttaggatagggctgcatacaaggaccacaagtttaacaagggccagcacttgagttctcacataataattatacagctaacactgtgggctggatgctgctctaattaatttacccctcccaacaacctgtgaaatgaggataccattactgtctccattttacaagtgaggcaactgaggcacagagggcaggaactgcccatggccacaagggctggaagtggtgcggtagggctggccctctgctgtgtgtcc

SEQ ID NO: 937335 - DNA, 564 bp, Homo sapiens
attattattattttttgtatttttagtagagacagggtttcaccgtgttagccaggatggtctcaatctcctgatctcgtgatccgcctgccttggcctcccaaagcaaagggtctttcttacaagggctcttagttgtcctgataacataagcaggtgaaatacattgttcaaggagacattaacaatggtgaacaagagcatatagagaggggaggaagacagggctgacccctaaagtcattctkgtgatggcagggaagcaggggagggaggctgatctttggtaaatgcaggaacaagttggcttaggatagggctgcatacaaggaccacaagtttaacaagggccagcacttgagttctcacataataattatacagctaacactgtgggctggatgctgctctaattaatttacccctcccaacaacctgtgaaatgaggataccattactgtctccattttacaagtgaggcaactgaggcacagagggcaggaactgcccatggccacaagggctggaagtggtgcggtagggctggccctctgctgtgtgtcc

SEQ ID NO: 937336 - DNA, 555 bp, Homo sapiens
atctcagacaataaaaatacctggcccacagttggctgtaagttgaacaaattgttgattaccaagaggccctcattccatcttaccctctgtaacttgctaattgtgtaattagacacacacacacacacacacacacacacacacacacacaccacttcactgggagtaatactgagracaaaattgaggaagagggtaatgcatgtaaaacggccatctcacaggagtgataagctgagaagcgaagattaagtaattagtaatattggtccttgattttaaattagactgaaattctcgtatgattttttttccccagggttgatatttaaagtacgaatggattgaataacttcttctctttggtcaaggtggttatttttgaggcaagtgctaattctggttcccaaggttttatcagaatatcttgttgttcaggtcatcttgttagtggatgtgtacctcttctttggcatgtagagaatcttagaacttaaagagattttaaagataatctcattcagtccctttacttctgatgaaactattgct

SEQ ID NO: 937337 - DNA, 749 bp, Homo sapiens
agaccaacttggccaacatggcaaaaccccgtctcttctaaaaatacaaaaattagctggttgtggtggtgcacgcctatagtcccagctacttggtagtaggctgaggcacaagaatcgcttgaacctgggaggcagaggttgcagtgagccaagatcatgccactgcatactccagcctgaggaagactctgtctaaaaaaaaaaaaaaaagaagattctcctgtgactttcaccctgatcctctagtgttgagtgtaatttgccctgcrgtcccctggagtctcctaagctggtcttagcctacagaatggcacagcttagagtaacaatccactgtgtccgcccagcacccttgctgccgtctgggagtagtcacgcccatcttttagaaaatgttccttccggccgggcggggtggctcacgcctgtaatcccagcactttgggaggctgaggcgggtggatcactaggtcaggagttcgagaccgtcctggctaacgcggtgaaacgccgtctctactaaaaatacaaaaaacatttagccgggcgtagtggcgggcgcctgtagtcccagctactccggaggctgaggcaggagagtggcgtgaacccggtaggcggaggttgctgtgagccgagattgcgccactgcactccagcctccagcctgggcaacaaagcgagactctgtctcaaaaaaaaaaaaaaaaaaaagaaagaaagaatatgttccttccctgctgccc

SEQ ID NO: 937338 - DNA, 545 bp, Homo sapiens
gttatttgttcctcccagtgggttggtggtctcgctgacttcaggagtgaagctgcagaccctgcggtgttacagctcataaaggtagtgcagacccaaacagtgagcagcagcaagatttattgtgaacagtgaaagaacaaagctcgcacagagtagaaggggatcccagtgggttgctgctactggcttgggtggccagcttttattcccwtatttggccccagccacctcctgctgattggtccattttacagggcactgattggtccatcttacagagggctgattggtccatttttacagagtgctgattggtgcgtttacaaacctttagctagacacagagtgctgactggtgcatttttacagagtgctgattggtgcgtttacaaacctttagctagacacagagcgctgattagtgggtttttacagagtgctgactggtgcatttacaaacctttagctagacacagagcgcttattggtgtgtttacaaacctttagctagacagaaaagctctccaagaccccacctgacc

SEQ ID NO: 937339 - DNA, 781 bp, Homo sapiens
aatcctgtatacctctgaacatttagaaagagctctttttcttgccagtgaaagcacctgagaaaataaggccctttgatttttttatatgggcctttccaaatattctactgcacatgacattttattaaatctgggttctctaaaaaggaactttataaatattcacacaaagatacctttcattccttgtacaaccatgtgtacattgtatacctatgtgtttgtccatgtgtgcggatgccatgcaagagagaaacttaactaattgtttaatgattgttccacacaaactttgctgaaagtacatataagtgctggtttcacagattgtctaatgagttggtttttgtttaattatagaaagcaattaagtctgctgtgacatttgaagaaagccagcagggttttcttctcagatgttttcagttttaaagtccaaagaactagaatgagagttktgtttgtctccagctatgagtatttcaaatgagctgtaagtaaataatattttgtgatgagattttctaataagcagtaattaagattttcttacttatttcttaaatgatgacagacacagctcactccaattctagtttggtttaactctgtgtgtgtgaaatacatttttatttttcatatttttaaggcacaactatttactatcagcattttgttatttatacatctttttagtcaaaattttataacagtggccacataattttttggaataaagtcgtagtcaatttttttaaagaggcatttaagggttcac

SEQ ID NO: 937340 - DNA, 567 bp, Homo sapiens
agatttacccacatatttactaacagcaaaccagtcattagcattgtttctatagatattaaattaactaaaagtatcccttatgggaaacgaagggatgggccaaattaaaggaataggttgggctagttaactgcagcaggagtatgtccttaaggcacagatcgctcatgctattgtttgtggcttaagaatgcctttaagtggttttccaccctgggccagccaggtgttccttgccctcattcctgtaaacccacaaccttccagcttgggcgttagggccattatgaacatgtcacagtgctgcaragattttgtttatggccagttttggggccagtttatggccagattttggggggcctgctcccaacaagagacatttattcttttgctcatacaccaaagctattattctttactttcctactcaaactcttccagctttggccactgggaatgttttttggggtggcatctgggtccttttatcacacctatcagtttgcttttcaagtacatcctaatttcctggagccacaagatgctccaggctcattttgc

SEQ ID NO: 937341 - DNA, 595 bp, Homo sapiens
ggccaacatagagctcaagctgtggcttcagagggtgtaagccccaagccttggcagcttccatgtggtgttgagcctgcaagtgcacagaagtcaaggattggggtttgggaacctctgcctagatttcaggagatgtatggaaacacctggatgcccaggcagaagtttgcctgtacccccatcgtatctaggaagtaactaacttgcttttgattttacaggctcataggtggaacggacttgccttgtcttggatgagactttgaactgtggacttttgagttaatgctgaaatgagttaagactttgggtgactcttgggaaggcatgattgtttttgaaatatgaggacatgagatttgggagggacyggggcggaatgatatggtttggctctgtgtccccacccaaatctcatcttgaattgtactcccacgtgttgtgggagggacctggtgggagataaatgaatcatggggcagttttccccatactattctcttggtagtaaataagtctcatgagatctgatggttttttaaaggatttctgcttttgcttcctcctcattctcttctcttgtctgccgcca

SEQ ID NO: 937342 - DNA, 584 bp, Homo sapiens
tgagtgcctgcaactttcccaggcatgtggtgcaagcggccagtgaatctacctttctggggtctggaggatggtagccttcctctccaagctccactaggcagcgccccagtggggagtctgtgtggggttccaaccccacatttccccttagcgctgccctagtagaagttctctataagggctccacccctgtagcagacttctgcctggacatccaggcatttccacacatcctctgaaatctagacagaggctcccaagcctcaactgttgccctctgcacacctacaggcttaayacacatggaagctgccaaggcttggggctcgcatcctccgaagcaatggcctgagctgtaccttggtcccttttagccatggctagagttggagtggctgcgatgcagggtgccatgtcccaaggctgcacagagcagcagggccctgggcctggcccaggaaaccattcttccctcctaggtttccaggactgtgatgggcagggctgctgcgaaggtcactcaaatgccgtggagtcattttcccaattgtcttggctattatcattcggctcctcttatg

SEQ ID NO: 937343 - DNA, 584 bp, Homo sapiens
tgagtgcctgcaactttcccaggcatgtggtgcaagcggccagtgaatctacctttctggggtctggaggatggtagccttcctctccaagctccactaggcagcgccccagtggggagtctgtgtggggttccaaccccacatttccccttagcgctgccctagtagaagttctctataagggctccacccctgtagcagacttctgcctggacatccaggcatttccacacatcctctgaaatctagacagaggctcccaagcctcaactgttgccctctgcacacctacaggcttaatacacatggaagctgccaaggcttggggctygcatcctccgaagcaatggcctgagctgtaccttggtcccttttagccatggctagagttggagtggctgcgatgcagggtgccatgtcccaaggctgcacagagcagcagggccctgggcctggcccaggaaaccattcttccctcctaggtttccaggactgtgatgggcagggctgctgcgaaggtcactcaaatgccgtggagtcattttcccaattgtcttggctattatcattcggctcctcttatg

SEQ ID NO: 937344 - DNA, 584 bp, Homo sapiens
tgagtgcctgcaactttcccaggcatgtggtgcaagcggccagtgaatctacctttctggggtctggaggatggtagccttcctctccaagctccactaggcagcgccccagtggggagtctgtgtggggttccaaccccacatttccccttagcgctgccctagtagaagttctctataagggctccacccctgtagcagacttctgcctggacatccaggcatttccacacatcctctgaaatctagacagaggctcccaagcctcaactgttgccctctgcacacctacaggcttaatacacatggaagctgccaaggcttggggctcgcrtcctccgaagcaatggcctgagctgtaccttggtcccttttagccatggctagagttggagtggctgcgatgcagggtgccatgtcccaaggctgcacagagcagcagggccctgggcctggcccaggaaaccattcttccctcctaggtttccaggactgtgatgggcagggctgctgcgaaggtcactcaaatgccgtggagtcattttcccaattgtcttggctattatcattcggctcctcttatg

SEQ ID NO: 937345 - DNA, 652 bp, Homo sapiens
agctatgcgcaaccaaaaatgcagatgtctgctcaaatcagtgagtagaactcaagtccattctcactgttctgcccactattcccctcaataaactatgttaaattttgaccggcttttggactaggaccaatggtctaattgtttggtctgccacttgaaaactgtaggctggcagattaaagatacccttattttgcttcatgaaatgaaaaaaaaaaaattactgctgctaatgaaatcttctgggttactcacacaggagtccagggtaaaggcctattctgtgatggaactagctggagtcaaattgctgattgagtctgtaccacctggactgccactggtgccgtctggctctgtccttatacygaatacggcaacacatgccccagcatagactaagtaagaagtaaaggactatatgttttttgatgctgagttatcatgacaagccagacttctgactcttgccaagtcaacccatttattttacagtgagtgaggcaacataacacagggtatggctcccatccactcctggaaaatagagcacatcagacttttaatcccttctcagagctatcagtggtacctcactgctactgacattttggggggattatggtgttacttttccagtctgatcagc

SEQ ID NO: 937346 - DNA, 652 bp, Homo sapiens
agctatgcgcaaccaaaaatgcagatgtctgctcaaatcagtgagtagaactcaagtccattctcactgttctgcccactattcccctcaataaactatgttaaattttgaccggcttttggactaggaccaatggtctaattgtttggtctgccacttgaaaactgtaggctggcagattaaagatacccttattttgcttcatgaaatgaaaaaaaaaaaattactgctgctaatgaaatcttctgggttactcacacaggagtccagggtaaaggcctattctgtgatggaactagctggagtcaaattgctgattgagtctgtaccacctggactgccactggtgccgtctggctctgtccttataccgaatacggcaacacatgccccagcatagactaagtaaraagtaaaggactatatgttttttgatgctgagttatcatgacaagccagacttctgactcttgccaagtcaacccatttattttacagtgagtgaggcaacataacacagggtatggctcccatccactcctggaaaatagagcacatcagacttttaatcccttctcagagctatcagtggtacctcactgctactgacattttggggggattatggtgttacttttccagtctgatcagc

SEQ ID NO: 937347 - DNA, 640 bp, Homo sapiens
gaggtggaagaagaataggaggcagagaaggggactcagaaagaattgtcgaaaaagagaattattaaataagttttgagcaggatgggaggtgagggagagtttttaaactttaggccgggcgcggtggctcatgcctgtaatcccagcactttgggaggcctaagcagatggatcacttgaggtcaggagtttgagaccagcctggccaacatggtgaaatcctgtctctactaaaaatacaagaattagctgggcatggtggtgggcacctgtagttgcagatacttgggaggctgaggcaggagaatctcttgaacccaggaggcgggggttgcagtgagccaagatggcaccactacactctagcctgggccacagagcaagaccctgtttcaaaaaaccaaaaaaaaaaaaamaaaaaaaaaaaaaaactccaaacaaacctttatgtaatgtacatcagaccatcaagactggcaaaaattttaaaaggcaacaatacttgctggcaggggatcttcaagcgttgctggtgggaataaccattctggaaagagttctggcagagtctattaaaatttcaaacacacatagcctttgacccagcagttcctcccctgggactctctcccataga

SEQ ID NO: 937348 - DNA, 615 bp, Homo sapiens
cattcattctctatccatttattcagcccacatttattgagtgtctactgtaagccaggtattgttctgagccatgtaagtacaagagtgaataagaaacaatctgtgctctcatggagcttacattctattggggtaagaaacataataactaagtgaacataaaataatagtatgatgaatagtagaaaggaaatatacaaggtggtaaaatagaacaggttgaagaagaaacgagaacttcatttagactcactggccagattggcctaagagtatgagatttggtctaagatctaagaagaaaagcatgaccactagcaagcctttcaaagtaagagaaaaggcaaagggaatagcaactcgaaagggccatgagttaggaaaggaactgccatgtttgaggaactgaaaggagtccaagasagattttggggtgggagagggcaaggaaggtgttagggagagggtttaagaaacgacattcagggccgggtgcagtggtgcacaccggtagtctcagcactttgggaggccgaggcggacggatcacctgaggtcaggagttcgagaccagcctggccaacatagtaaaaccccgtctctactaaaaat

SEQ ID NO: 937349 - DNA, 716 bp, Homo sapiens
atcaaaactagacttagtgcaccactacgcaagagaagttctgaaaagcaaaaactcactggtaatattccaggactggctttgtttggtcttcataagcctttagtctcttgataaccgtctctggtttatcatcctcacgctgaatgagaggctccccagtcaggtcatcaatgccctaaacaggattagaagagactagtatcagatatcatatttctgaaagatattttcataagcagttcaattatttttaaacagacatctctgtgcaagtgccaagcacaaaaatgtgctaacttttaaaaaaatggaatccaacctcaaaagagatcatcgcaacagaaacagggtacgccagtttcatttctacagttatcagtcactttagccttagagtaaaaggttttctaagcagcctctaagtaagttcatatatattcaaaaagattcagctataaacttggaatttcaactgcaagtcctaaataaaccaaggtgttatgaatctctatcagcgcaactcctaacacactccttggcagagcaggaaatcaacaamtgtttttgaatgagtaacaaacccctgctgctcctggggcaacctttcgcaccaagctcagtggacttgatcagtcaactctaccaagtaacctgagaatataccctcaggagttttggtcagaggatttccaagttcactcaacttatgtctg

SEQ ID NO: 937350 - DNA, 782 bp, Homo sapiens
aggaccgagtggattttggaaagtgtgtatgagctgcatttgttataccttgtgtaatccaactttttgcctattctttgcttgctttcccatagctcaatgtggctggagaaaccatactgatcactctgacttcacagtcatgattaccaagaccaagaggcttttattataggttatagtctgttttcctattccaattactcttctagatagtttaaatgtcttactttaatcctctaattctccctgccttatcctccctttatttcattggggaaaaaacctgaatcaattagaagaaaactacycactccccttaccagatgtgctacctgtctacatctgtgcctggtactctgccttctgtaactgctagctaaggccaaaccctgtgcacgtatactaggctccatgcttttctacctgtttaaggataatcactccagtagttcatcctttatttgcatcatcaaatttttcatctctgttgtatcattcttatcagcgtattaaacgggctattacttcttgtttaaaaacttttttgccgggtgtggtggctcacgcccgtaatcccaacactttgggaggccaaggctggcggatcacctgaggtcaggagattgagaccagcctggccaatgtggggaaaccccatctctactaaaaatacaaaaattagctgggcgtggtggcgggtgcctgtaatcccagttactcaggagactgaggcaggagaatcgcttgaacccgggaggcagaggttgcagtgagctgag

SEQ ID NO: 937351 - DNA, 605 bp, Homo sapiens
ttgatacttgtttatgcttcatgaagttctcgtgttatgttttttcagcttcatcaggtcatttatgttcttctctaaactggttattctagttagcaattcctctaaccttttttcaaggctcttagcttccttactttgggttagaacatgttcctttagcttggaggagtttgttattacccactttctgaagcctacttctgccagttggtcaaactcattctccgtccagttttgttcccttgatggcaagtagttgtgatcctttggaggacaagaggcgttctggtttttggaattgcagcctttttgcagtgttttttcctcatcttcttggatttatctacctttggtctttgacattggtgacctttgcatggggtttttgtgtggacatccttttggttgatgttgakgctattcttttctgtttgttaatttaccttcaaacagtgaagcctccctgctgcaggtctgctggagtttgctggagatccgctgcagactcagtttgcctgggtatcaccagtggaggctgcagaacggcaaagattgctgcctgttccttcctctggcagctttgtctcagaggtgcacctgcc

SEQ ID NO: 937352 - DNA, 606 bp, Homo sapiens
gtgagttggagggaaacattggtggatacttcacaactatctctttagcctcttcatttgacagatggggagatggagtctcagggaagtaactcatttgccaaggcaacgtatagttagtggtgaagcagagaccaaactgtagataccctattactcctgtattctttgatgttatatattgtcagttatttgaaacccttatggagtttaggtcctacaaccccatatatatttcaaatagatttttaattacatcgtaactgctatccttaacaaatgagtcatctttagatactgacttttcttgataattagcgattcagtattttaaggacaagtaagctttctttcatgcttagtctttcagaagaaacactttctaaaatctgctatactcrttcccctttgtgaaagcaggtgttgcttgttccttcttgcatttccattacctggcacaggtgtgccccggcagaggcgctaagttgatctttttcttgaggacgaagggcaccattttggatgtcgatcctctatgctctactgtgatatagtgatgccccaagatctcactgggtgagtgaagcatttgcccccaaaccctgc

SEQ ID NO: 937353 - DNA, 609 bp, Homo sapiens
tgacaaaatcccatctctacaaaaaatacaaaaattagctgggcatggtggtgtgtgtctgtagtcccatggccttagggctttctgggagggtgaggtgggaagataacctgagcctgggaggttgaggctgcagtgagccgtgatcatgcactccagcctagacaacagtgggatccccatgtcaataaataaataaataagttctgaggaatctgtacaagaaaaatctcacagaactaataactgagctcagtaaagtgacaagatacaaaaaaaaccatgaataattcattatatttctgtgtgtctacagatgaacrtgtactgaaatatatactgatattaaaactgtatcatttataattgttaaaaactgaaataatcaagtgtaaatctaacaaaacatgtttaagagttagatgctgaggactacaaaatgctgataaaagaaataaaagtgatctaagtaaatagagagattccctgtttatagattggaagaatcaggatagtaaacatgtcatttctcttcaaattgatatacagatttaagcaattcctgtcaaaattccagcaaggcttttttttttgtacatgtaaacaaga

SEQ ID NO: 937354 - DNA, 848 bp, Homo sapiens
tgccaccatctggtggcttaaacatcaggaatatacttatcaagttctggaggctggaagtccaagatggagatgtcaataggtgtggtttctcctgaggcctgtccttggcttatagatggctgtcgtcttgctgtgtcttcacatggtcttttctctgtgcacatgcacccctggtgtgtattcctcttcttataaagatacaagtcctaccgtattagggattcaacacatgaaatttggagggacacagttcagttcataacatactactttaggctrtgtattagtttcctgtggctgccataacaaagtgccccaaacttgggggcttaaaacaacagcaatgtggtctttcacagttctggaggccagaagtccaaaatcaagttgtcatcagggccattcatgctccctttgaagtctctgggggagcctcatgtagtttgtagtggctccaggcatttactggcttgtggtggcatcactccaatctctccctacatttgcacatggccttcttctcttctctattccattctctttctcttttaatgacagatatcattgaatttagggtgtacccagttaatctaggatgatctcatcttaagatctttaactaaattttatctgaaaagacccttttccaaataaggtcatatgcatgggttccaggtggacatatcttttttggggggccaccattcaacccactgcagtctggttaattcatccagcaaaatgcatgggataacttattgatttgtatgacaactagttatggtgtcagtgtctagtaaagaaaactatttgagtgatcttgcttttaaaaagctttttgcaaa

SEQ ID NO: 937355 - DNA, 587 bp, Homo sapiens
tatggggcaaaactccttctgcttgagaaaaacagagggaaaagtaaagtggactttgtcttgcaccttaagtaccagcatggccacagtggggtaaaaagccaagcaggcttgtggggctcctgattatagatcctgactcttggatggcatttctggacctgccctgggacagaggggagaccacttccytgaagggtgagtcccaagccaggcagtattcatgccaagctgacttaaaagaccttgggctgtaagggaacatcaggagtagtctgttggtactcctcatggcctgggttggtggtgcctatagggtgagactcctctgcctttgaaaaggggagggaagagtgggaaggactgtatcttgtggtttgagtgccagctcagctacaatacagtagaataccaggtagacttctaaggtctttttttactttagtcactgactccagacgccacttctgtacccacccagggcctaggggaccttatcaccctgaagggaaggagacaggcctggctcactttgccacctcctgattgtagagtcccagggccttgagtgaacataggcagtagcc

SEQ ID NO: 937356 - DNA, 587 bp, Homo sapiens
tatggggcaaaactccttctgcttgagaaaaacagagggaaaagtaaagtggactttgtcttgcaccttaagtaccagcatggccacagtggggtaaaaagccaagcaggcttgtggggctcctgattatagatcctgactcttggatggcatttctggacctgccctgggacagaggggagaccacttccctgaagkgtgagtcccaagccaggcagtattcatgccaagctgacttaaaagaccttgggctgtaagggaacatcaggagtagtctgttggtactcctcatggcctgggttggtggtgcctatagggtgagactcctctgcctttgaaaaggggagggaagagtgggaaggactgtatcttgtggtttgagtgccagctcagctacaatacagtagaataccaggtagacttctaaggtctttttttactttagtcactgactccagacgccacttctgtacccacccagggcctaggggaccttatcaccctgaagggaaggagacaggcctggctcactttgccacctcctgattgtagagtcccagggccttgagtgaacataggcagtagcc

SEQ ID NO: 937357 - DNA, 608 bp, Homo sapiens
tgtaatgagctgtgattgcactactatactctgcctgggagacagaaaaaaaggaaaagtaaaataagtagagaaagtatgttgtaataaataataaatctggtcattgtccccactccggtcacacagcttcaaaagtacttggaattttcctgataggtatgttatgttaatgaggtggctcgttatgggttcctagatagcttaatgatgtaggctgatcatcagaaagaccaagcacagaattagagggttggaactttcagctagcccagcctccaggraggggagaggagctggagattgagtttagctacatggccaatgatgaaatcaaccatacttacctaatgaaaccctgaaaaacttggcatactgaggtttggaggagcttccctgttgttaaacacattgttgtgctgggagtgtgacatgccctgactccaagtggagatggcatagacactatatctgggaccctcccagaccttaccttatatgtgtcctttataatagacctataattgttaagtgtagtggttttagtgagttctgtgagtcattctagtgaattaccaaacctgatgggaagttgtagaaacccccca

SEQ ID NO: 937358 - DNA, 761 bp, Homo sapiens
gccagcaccagttctggtagaagtagcaggggagtgaaatggactctgtgagggtccttggttgtagttttgtttagtgtgctcgttttcttgaatactggttgatatggtccccacccaaatctgatcttgaattgtaatccccataatccccagatatcaagggaggaaactggtgggaagtgtttgaatcataggggtggtttaccccatgctgttctcatgatagtgagtgagttttcatgaaatctgatggttttataagcatctggcatttcccttgcttgcacttctctctcttgctgctatatgaagaaagtgcttccttccccttcaccttccatcatgattgtaagtttcctgaggcctccccagccatgtggaagtgtgagtcagttaaacctcttacttttataaattacctggtctcgggtgtttccttctagcagggtgaaaatggactaatacactggttgtgctagcagcgaagttgtcacatggacagactcaggacccctggttggccaggatgttacagagagtggarttagctgttgttttctcatttcttggaacaggattgttcttttatgagttgctgtaatgacttgagtttgttggcctccagccaggaggtggtactttcaagagggcatcagttttggtagtatagtggggatacaagcttaccctaagatcacctggataagtatttgggtttctcaggtgatgagcaggaccatagagctcccaggagatta

SEQ ID NO: 937359 - DNA, 617 bp, Homo sapiens
agctgctatacttattttcctagacccccaggttattctaaagatcaatcaggactaagaaacactgaactaaataattaatgtgtgaataattgagagatactttgtcacactatgtgaagtataagtagataattagtgtacatgaagaatcamcccaaactttgtttggctagaacaggaacttttgaggttttctactaagcatgacatatttgcattgacatactttctttgttcacttgacttatagaaggtgagggggagtgtgcaagataaggctagatagcggggcagaatggatcttaaatgtgcctcacagagggctcattctaaggggagccatttagcatttaaaccaggaaaaagcataatctgaatactattcttctaacagagtttccaaatatttctttctcatttaggcttcctataaatgggctattctttttgttgttgttgtttgtttgtttcttcgtttgagacagagtctcactctgttgcccaggatggagtacagtggcatgatcttgactcactgaaacctccgcctcccaggttcaagtgattctcttgccccagcctcccaagtagctgggattacaggcgtgcaccac

SEQ ID NO: 937360 - DNA, 601 bp, Homo sapiens
atgtatctttttaaaatttatttccttaaattgggcttcaccttttctggtgcctccttgattcacttaataactgaccttctgaattctttttcaggtaggtcagagatttcttcttggtttggatccactgctgatgagctagtgtgggttttattttgsggggggtgttaaagaacctcattttgtcatattaccagagttggttttcttgttccttctcatttgagtaggctctgtcagagggaaagtgtagggctcaagactgttgttcagattcttttgtctcatggggggttcccttgatgtagtactctcccccttttcctagggatgtggcttcctgagagccgagctgtagcaattgttatctctcttctggatctagccacccagcaggtctaccagtctctgggctggtactgagaggtgtctgcaaagagtcctgtgatgtgagccatctgtgtgtctctcagttgtggataccagtacctgctccagtggaggtagcagtggggtgaaatagactctgtgagggtccttagtttttttgtgtgtgctgggtggcctcctgctgggaggtgacattttcaagacagca

SEQ ID NO: 937361 - DNA, 601 bp, Homo sapiens
atgtatctttttaaaatttatttccttaaattgggcttcaccttttctggtgcctccttgattcacttaataactgaccttctgaattctttttcaggtaggtcagagatttcttcttggtttggatccactgctgatgagctagtgtgggttttattttgcggggggtgttaaagaacctcattttgtcatattaccagagttggttttcttgttccttctcatttgagtaggctctgtcagagggaaagtgtagggctcaagactgttgttcagattcttttgtctcatggggggttcccttgatgtagtactctcccccttttcctagggatgtggcttcctgagagcygagctgtagcaattgttatctctcttctggatctagccacccagcaggtctaccagtctctgggctggtactgagaggtgtctgcaaagagtcctgtgatgtgagccatctgtgtgtctctcagttgtggataccagtacctgctccagtggaggtagcagtggggtgaaatagactctgtgagggtccttagtttttttgtgtgtgctgggtggcctcctgctgggaggtgacattttcaagacagca

SEQ ID NO: 937362 - DNA, 675 bp, Homo sapiens
aggaggaggaggctggctccagagttcacactggtgaccacgacaggcgatgtcgaaacccagcggagcagttactcaacagtttactcaccatctacacacacacagtgcacagacggggtgcgcactaggaagctgatgaggcctgggccagcctggctaaagaccacaaagtgcttsttccatccgggaaccccctggactctccctttgccggctgcagcaagtccctctcttctaagctgctttcactctgattaggtgtcggtcatgcagtgtggtctattggaaatggcagccgaaatacgaactgaaatcctgttgttggacaagtttcagaatttggagcatggcagcatccccagccgtcgtgctagggatctaggtctttgtcccgggcactcttgtgctgcgccctccatgggttcctggaccagcatctcctctggggtaacacagtgagagctcacgatggtcctgcctgcgtgcctgcgagaaggaggcttccccaggaggctgcaccacgagagatgttcagggggtcgcaggggctgcagccggctctgctaaccagcccgtgaggacggcagggttctttgtctacattgagctaacacatcaagggggacagtgctgtgggtcctttgctactataaacatgtcccatcacagaga

SEQ ID NO: 937363 - DNA, 703 bp, Homo sapiens
gtgagagctcacgatggtcctgcctgcgtgcctgcgagaaggaggcttccccaggaggctgcaccacgagagatgttcagggggtcgcaggggctgcagccggctctgctaaccagcccgtgaggacggcagggttctttgtctacattgagctaacacatcaagggggacagtgctgtgggtcctttgctactataaacatgtcccatcacagagaagcagggcaggacagcagccagagtgagcggggaaagaaacacttgggcctggtgtgtccaggcctgggcgtattttggtagcaatcgtcatcaacaagctcacctgggcagggtttagcaatctttgatctcatctaattcatctttattttaagaccccaacctcgcttcctaytggggacaacttaaaccgaagtcttattgtgattctcctcagtctgctgaatatgggccattctagaatcgcctgtaaagctttattctcttttggggcaggggcagggtttgttgggggtaggaggctgtaggtctgtctgcctggctcgggtgctaggattctgtcactagtctcttccttttttttttttttttttttttttttttttttttttttttttgagacagagtctcactttgtcatccaggttgcagtggcacaatctcagctcaatgcaacctccacctcctgggttcaagcgattctc

SEQ ID NO: 937364 - DNA, 791 bp, Homo sapiens
catttccccgatgacttatgatgttgaatacgtctgcctacatttattggccatttgtatattgtctttgaggacgttctattcaaatcctttgaccattttataaattaggtgactggtctttttattgttgagttgtaagagtacctttcatattctggttactagacctatgtcaggtatataatttgaaaatctcccatcctgtagatttgtcttttcactttcttggtgttgtctctgtgaaggacaaaaggttataatttcaataatatccagtttatctattttttttattttgttgcttgtgtttttggtgccatatttaagaaccattgcctacttcaaggtcatgaagttctgtgcctaagttttcttccaagagttttgcagttttagcacttacgtttaagtctttgatccattttcagttaaactttgtatagggtatcatgtaaaggtccaactttatttgtttgcattgtgtatccaatcgtcccagctcgatttgttgaaaagacaactctttgcccattgaattgtcttggcaccttgattgaaaattgattgactctaagtgtgatggttgatttttggactctcagttcttctcctccattgatctatragtctattcttatgctcagacgacactgtcttgtttattttagctttgtagtaagttttgaaatcaagaaatgtatcgtccaacttcttttacaagattttcttggcagttttgggtctcttgcatttccatatacattttaggcttaccttaaaatgtctac

SEQ ID NO: 937365 - DNA, 557 bp, Homo sapiens
ctgcttggagacccctttctttatagagagagctgtttctccttctcttctcttctcttctgcctattgaacctccaccttgtgtgtgtccatgtcttaaattttcctggcccatgacaatgaaccccagggtatataccccagacaacacagtcgcttcaaaaagatttatctattctgttcctagaaaatctcatagtttctgcccaaaagctcctagatgtgataaacaactttagcaaagtttcaagatattaatacaaaatcaatgtacaaaaatcagtagcatttctatacaccaaccatgtccaagctgagagccaaaycaagaatgcaatcccattcacaatagtcacaaaatgaataaaatacctaggaatacaactaacaagaaaggtgaaggatctctactatgagatttataaaacactgctcaaaaaatcagagatgacataaacaaatggaacaacattccgtgctcatggataggaagaatcaatattgttaaaatggccatactgcccaaactaatttacagattccatgttattcctatg

SEQ ID NO: 937366 - DNA, 711 bp, Homo sapiens
ttagaaactatatgttgcatggtttcaaccattttttgggaaaattttttggtgtattttaaaataatatgttttctataatttttggttttagcattttttgaacattattaggtcaagtttgctgattatgttttcaaatattccatatctctactgactttttatgtattcactttttcagttactgagagctttgttgaaaatataatgattttggatttgtctatttttctttcagtttggttaacttttgttttatattagatgcctacaaatttagaattttataacttcctcttgaatctaaccttctattatcattaaatttctatctttatgactgctttttrccttaaagtctacttttgtttctaatatcaatacaactatccaagtttttttgaggggggagcagagtgtttgtgtgatatatctttctccatatttttacttacaaaccatctgtattcttttattttagatatttcttgcaaacagcacatccttcaaaaaaaattcagtcagggccaaatgcagtgggtcatgcctgtaatcctagcacttcgggatgtcaggcaggaggatcacttgaggtcaagagttcgagaccagcctggccaacatggcaaaaccccatctctactaaaaatacaaaaattagctggatgtggtggcacatgcctgtaatctcagctactcaggaggctg

SEQ ID NO: 937367 - DNA, 550 bp, Homo sapiens
aatattattaactatactcaccatgctgtacattaggcctccagaacttactcatcttgcataactgaaattttgtacattttgaccaacatggtcaccccattcccttccacagaagcccctgccaaacaccattctactgtctgcttctatgagttcgacctcatagaggtcacatataaatgagaacatgatgtatttgactcatttcacttagcgcaatgtcctcctggttcaaccatgttgtcacaaatggcaggattctcttcccttttaaggcagtataatattccattatatatgcacacacacacacacacacacacacasacagacacacaggcacaccacattttctttaccaattcatctcttggtagacacttagataggttccatatcttggctattgtgattgatgctgcaataaacttgagagtattttgagaggcttattttatttcctttggatatatacccagaagtgaaattgctggatcatatgttacttctatttttattttttgagcaacctccatactgctttcca

SEQ ID NO: 937368 - DNA, 754 bp, Homo sapiens
cagtgctctcttcaaagctgtcagacagggacatttaagtctgcacaggttactgctgtctttttgtttgtctgtgccctgcccccagaggtggagcctacagaggcaggcaggcctccttgagctgtggtgggctccgcccagttcgagcttcccggctgctttgtttacctaagtaagcctgggcaatggcgggcgcccctcccccagcctcgctgccgccttgcagtttgatctcagactgctgtgctagcaatcagcgagactccgtgggcgtaggaccctccgagccaggtgccggatataatctcgtggtgcgctgtttttttttgttttgtttttttttttgtttktttttttttgagacggagtctcgctctgtcgcccaggccggactgcggactgcagtggcgcaatctcggctcactgcaagctccgcttcccgggttcacgccattctcctgcctcagcctcccgagtagctgggactacaggcggtgcgccgttttttaagcccgtcggaaaagcgcagtattcgggtgggagtgacccgattttccaggtgccgtccgtcacccctttctttgactcggaaagggaactccctgaccccttgcgcttcccgagtgaggcagtgcctcgccctgcttcggctcgcacacggtgcgcgcacccactgacctgcgcccgctctctggcactccctagtgagatgaacccggtacctcagatggaaatgcagaaatcaccgtct

SEQ ID NO: 937369 - DNA, 764 bp, Homo sapiens
ggattaggaaggtgatgttaatggtattgttaatccattgtatttgtgggtaggggggtgtggttaagaaggcatagacaccactcggttttcaaattgatgaaagaaattatattaaaattggtacaagcacacaccggggactgttatggggtggggggcggggcragggatagcattaggagatatacctaatgctaaatgacgagttaatgggtgcagcacaccaacatggcacatgtatacatatgtaacaaacctgcacgttatgcacatgtaccctaaaacttaaagtataataacaataaaataaaataaaataggtacaagcaaggaaattttgactatttctgacccatggaggaaacaagtttggtgttagatatacttgtatctggtttacagtgaatgtgggacagtcatgtggaaatgcccagaagacatttaaaatggaaatgcatctcggcagctaggatggggctgaaaaggtggaggctgaaatggactgaatgaaaagcatcatagaacgtggatcagagtcctaggggagatggcacagggggagattctaagactggaaagagtctacctttcagcgatgagagcggggcaccataaagagacctagaagaggagaatcaggaaaattcatggaagatttgctgaaaccagatgggaagagacaatttctggatggctggatgagggcaaggggtagagtgagaactgagagcgccaagtgcctttgctcaggatggacttcc

SEQ ID NO: 937370 - DNA, 451 bp, Homo sapiens
catatctttgactgaagcataaaatcaagtccttaataagttgacaaatctccagctcactttatatgtttttaaaatggtaaggatattcttctcccccaaaagccattttaaatattcaagataaattgaaaaaagaaaaaaagtacctcttctatgaacgtgctgccctcataaatttctatcatctycacgtttattttgtaatggaaatatacaaacaatgccaagcatagaaattgtagtttaaaacatgtgagtgggttttcagctacttttgatttgtttctgattttaaggctttgttctaatctactttttatactctggtttcaacatgaatacagccctcttgtttgaaaacagacaatgggcttattcaaccctcaaggccctctacatttggtgtttctgccacggcccttggtggctttaccacatatattattat

SEQ ID NO: 937371 - DNA, 612 bp, Homo sapiens
tatctttatgtgcatgaaagcttctgttatcagtttatcaaatattacatctttgacaaaaatgcgtatacatttgtcactatgatagtaaggcatgcaaactgcactagtacggagttgttttggttttgcttttttagaaaactctgatgttcaggtgggggtgatttgcgaccttatagcaaatgcacaaagaaaaatcacatgtagcttttaggagtttcagtttggggatctaaaggagcctacttaaaaggaggttgcgtggagctaaattaatccttatttttatattatacacacatattcatgataggaacatgtctatctcagtgacaacatctcttgccacactcatatttatatcatatctttatccttyctgctgtatgtcccagaatgcaattgttgacctcactttttttattaaattttttaaaatttaatttttactttttttttcctctgtgactctagccaaggaaaatcaagctaattaacatgtacattactgagaggtgacagcgtgctggcggccctcacagccctcgctagctctcggcgcctcctctgcctgggctcccactttggcggcacttgaggagcccttca

SEQ ID NO: 937372 - DNA, 637 bp, Homo sapiens
ttcatccacctgtcagccacctccccaggaatgatccactagcacaattattgcttcctgttcccatgacattatgttctgctggcctagaggtcttagttcaagagggaggaatgctgtcaccaggaaacacaacaatgattccattaaattggaagttaagattgcgacctggccacttkgggctcctcctacttctaaatcaacagtatggaagggagttatagtgttggttggggtgattgacctagactatcaaaatgaaatcagactaatactccacagtggaggtaaggaagagtatgtgtggaatacaggagatcccttagggcatctcttagtattaccatgccctgtaattaaggtcatgggaaaccacaacaacccaatccagggaggaggactacagatggcccagagccttcaggaatgaaggtttgggtcactctaacaggtaaaaaaaaccacgacctgctgaggtgcttgctgaaggcatagggaatacagaatgggtagtagaagaaggtagtcatcaataccagctacaatcatgtgaccagttgcagaaacgaggattgtaattgtcatgagtatttcctccttattttgtttagaacatgtttgtgcatgtatagac

SEQ ID NO: 937373 - DNA, 637 bp, Homo sapiens
ttcatccacctgtcagccacctccccaggaatgatccactagcacaattattgcttcctgttcccatgacattatgttctgctggcctagaggtcttagttcaagagggaggaatgctgtcaccaggaaacacaacaatgattccattaaattggaagttaagattgcgacctggccacttggggctcctcctacttctaaatcaacagtatggaagggagttatagtgttggttggggtgattgacctagactatcaaaatgaaatcagactaatactccacagtggaggtaaggaagagtatgtgtggaatacaggagatcccttagggcrtctcttagtattaccatgccctgtaattaaggtcatgggaaaccacaacaacccaatccagggaggaggactacagatggcccagagccttcaggaatgaaggtttgggtcactctaacaggtaaaaaaaaccacgacctgctgaggtgcttgctgaaggcatagggaatacagaatgggtagtagaagaaggtagtcatcaataccagctacaatcatgtgaccagttgcagaaacgaggattgtaattgtcatgagtatttcctccttattttgtttagaacatgtttgtgcatgtatagac

SEQ ID NO: 937374 - DNA, 564 bp, Homo sapiens
tgtgtgtggcaactagcagtatatataagggaataggctgtgggccctccaagttcgggggcaaatgccggaatcaatggtccccttaaaggaagtggcaggaaagggggacccagtctaataggcaggagagatgcctctaagttctcatctctggccaccagcttgagccatgtaggtgtggtgtcagactggaaactgccaggggtcactgagccctgcttctgcaggagaaagttaaacttgcattcagaatggatgctgaggcaacacaaaattataagaatgcattataggtctgaccgaaccaggtgagcattctgaaagaaactctaggggtcagaaagctgaagaaatcagctagcctsgaagaaatgagctgacctgagttatacagctgcgatgtaatggattcagccaacaaccctgtgaacatgcccaagaacccagcctcagaggagcccccagccctggctaacactcttgattccagccttgtgagatcctgagcagagaactcactaagtcatgcctggaaacctgcccatagaaaccacgagataa

SEQ ID NO: 937375 - DNA, 632 bp, Homo sapiens
agatcatggccagactgcttttttaggtggaacctggatccatccctactcattgggtggggcccccttgtgggaatttcaccaactccagccagaggtttatggacagaactctgatcttcctgggcagaactcctgtggggagggacagccacagtctctgcggttcagcagacttagtctttcctgcctgctggctctgaagggtctggacattctggacaagggagattccctccagtkcagtgcaccctctctgccaaggggcagccagagtgctttgttaagtggtccccgatcctgtacatactccctaactgattgagaccaccaacaggggtctccaggcaccttatacaggagtgttcctgctggcatcacatcagtgcccctctgggatggagctcaaaaaagaaggagcaggcagccatccttgctgttctgcagcttccactggtgacacctccaggtaggggagggaccaagtgaatagggtctggagtggacccccagcaaactgcggcagccctaaggaagaggggtctgactgttgaaagaaaaacaaacaaacagaaaacaacaacaacaaaaacatccacaaaaatggccccacaaaaaccccttccaaagat

SEQ ID NO: 937376 - DNA, 775 bp, Homo sapiens
tggagcccttggagccctaagaggcctcttcctgtgtcttcatgtgttcgaaggatttccctctttgcatcttcctttcctattccttcatgtgggagcactctggcaccaggaagaagaaagaggagcccaaccccttaccagccttcaatctataacaagcattctcaagggaattaaaactgattcttaaaaggggaggtgaaaaaaaatcttactcttttttacgtataaagcacagaacatatacagaacataaacagatgtatagtatatctgtggtattaaaatttcatgtgattaagaaaaaaaatctggaagaatactagggaaggcactaatgaaaaaaaggctaaaaaattctgatctaccttcttgggccatgccttgtctggtccaagaaccggccagaactcggggaagggaacaaccaggggagagtctagagtccartctcaggatcccctcaaagtatttccaaagccagccccccaccagtcagctacagtcctttcaccaaaactgcccttccttcccccttgcctgaaaatccctcattctgtttctgtcattctttcatcttaccttgttcctactgagggcgcaggtcagctcttccccattctccccctggggcaccccagttcccagggcatgaaagacttgaggtgcctcacctctacaccttgggctaagacatagccctagagctcctggaagaacccaggagggaagcccagccacaggaggcccccaggaagtgggggtactgctg

SEQ ID NO: 937377 - DNA, 556 bp, Homo sapiens
ttactttttggttctccagagacctagcttcttccaatgtggtctatttaatctcctgtcatgtgggaaattatattcaaaatctccatgatcctctgtccatagtaagttatgcatgtagtgagaagtacatgccacaaggtcttgagattatatctgcaatgtgttgctgctggctgttgatcaagataggctgggagaagatcattttcaggtgtgaaaaactgtcacctttatcaaataattcttcttgcatatttcccaagacgttgtagcctgtytaaacttgggaggttaattttgtagcattcattatgaccgaaaatgtagttcacacaatcatgatgctctctttattaggtgttactgttaaacaatattaaaatacacacaatgtggctggtcttttgtaagctacatggcatgtttacttctttgccaggtttcttaattgcatctcttcatctttccgaataccagtgtcactgtcacccacaatatttgctgttttgagcacatggtttaccttttattttgcccaataatagaatatgat

SEQ ID NO: 937378 - DNA, 848 bp, Homo sapiens
agataactgaaaatgtggaagcaactttggaactggataacaggcagaggttggaacagtctggagggctcagaaaacaacagaaaaatgtgggaaagtctggaactccctagagacttgttctacggcttgaccaaaatgctgatagtgatatggacaatgcaatccagtctgaggtggtctcagatggacatgaggaacttgttggaaactggaacaaaggtgactcttgttatgttttagcaaagagacttgtggcattttgcccctgccctagagatttgtggaactttgaacttgagagagatgatttacggtatctggcaaaagaaatgtctaagcagcaaagcattcaagaggtgactttttagccggacatggtagtgtgcgcctgtagtctcagctactcgggaggccgagacaggagaattgcttgaacccaggagggggaggttgcagtgagctgagatcataccccactgcactccagcctgggtgacagagtgagacttccaaaaaaaaaaagatgtgacttgtgtggtgttaaaagcattcagttttaaaaggaaaacagatcataaaagtctagaaaatttrcagcctgacaatgtgatagaaaagaaaatcccattttctgaggagaaattcaagctggctgcagaaatttgcataagtagcaaggagctgaaagttagtcaccaagacaatggggaaaatgtgtacagggcatgtcagagacctttgtggcagtccttctcctcacaggctgggaggttttagaggaaaaaatggtttcatgaggcaggctcaggttccctctatgtgcagtctagggacctggtgccctg

SEQ ID NO: 937379 - DNA, 698 bp, Homo sapiens
ttacttaagcacgtcactaaggtttttgtaaataaaaatttctgaataagaaaatttgatacattcttcagttctggtgttgttactaacggtcttagtcagtttgagctgtgataacaagtatcctagactgggtggcttaagcaacagacactttgtttctcacagttccagaggctaggaagtccaagatcaaggtgttggcagattcagttcttggtgggggccctcttcctggcttgtaggcggctgagtttttgctgtgtcctcacatgacacacacagacaaagagcgagctgttagtcacttcttgtaaggatactaattctaacacggggctccaccctcgtgacctcatctaaacctaactacccctcaaaaccccacctcctaataccatyacattgtgggttagagattcaatgtataaattctaggggaagacacaaacattcagcccataacactaacaatcaccaaggaactcatatgtacagagtttagaagttagcaaaggaaattcacgtaaatcaccttatctgaacctcacagttgttatctgtgagatagctatttttattttccctgttttgcagatgaagaagctaagttgagaagcattcagtgatttccccagggtcatctgactagtcagtggcaatggtagagtgcaaaatcaggttttctgattccaaat

SEQ ID NO: 937380 - DNA, 698 bp, Homo sapiens
ttacttaagcacgtcactaaggtttttgtaaataaaaatttctgaataagaaaatttgatacattcttcagttctggtgttgttactaacggtcttagtcagtttgagctgtgataacaagtatcctagactgggtggcttaagcaacagacactttgtttctcacagttccagaggctaggaagtccaagatcaaggtgttggcagattcagttcttggtgggggccctcttcctggcttgtaggcggctgagtttttgctgtgtcctcacatgacacacacagacaaagagcgagctgttagtcacttcttgtaaggatactaattctaacacggggctccaccctcgtgacctcatctaaacctaactacccctcaaaaccccacctcctaataccatcacattgtgggttagagattcaatgtataaattctaggggaagacacaaacattcagcccataayactaacaatcaccaaggaactcatatgtacagagtttagaagttagcaaaggaaattcacgtaaatcaccttatctgaacctcacagttgttatctgtgagatagctatttttattttccctgttttgcagatgaagaagctaagttgagaagcattcagtgatttccccagggtcatctgactagtcagtggcaatggtagagtgcaaaatcaggttttctgattccaaat

SEQ ID NO: 937381 - DNA, 742 bp, Homo sapiens
cctctaaatatctttaaacctctgtgccaggatgtgctcaatgcctggatgagggtgagtgagaaagttgtccctccctccctagacacttctcacttggagtgagaacggcagccaccatgtcccatcctgagctgccacaaggtgtctgtgctggatcacaagcatatccaaatttgagaccagggcccttccctggtgaagggtggcagcaatcactgggcagggcatgtgaaagaggatgggggaagacacaggggttggcacgtgggtaagggtgcttgagaacccattacacagaggcccttcccacagagacaggtctatgcttgggcaggtagttccaagatcctggcacatgctccattgttctactggatttcatttacaaaacacaaattcaaagatacagtaattaagaattccaaacccctgcattttgtgaccctgaggcaggtggatcacttgagcccaggagttagagagcagcatgggcaacagggtaaaacccagtctctccaaaaamaaacaaacaaacaaacaaaaaaacaattagctgggcacctgcctgtggtcccagctacatgaggggctgaggtcagaggatcacttgagcaagagagttcaaaggctgcagtgagccatgtttacacctctgcactctggcctgagtgatagattgagatcctgtgtcaaataaaataaaataagataaaataaaataaaataaatttaaaaattt

SEQ ID NO: 937382 - DNA, 610 bp, Homo sapiens
cccctataactctcaaggacaggccttggtggaacgagccaataaaacactcaaagatcaacttcgaaaacaggacactaaaacagagggatgctgccactcctcatgctcagttaaatctggctccttttacactaaatttcttaarcctagcaagaaatcaaccttttacagtggcagaacaacatttcactggaagtaaatttgatccacaaaaaggaatgcgggtatggtggaaggatgcaactaacaaataggaattaggcacagtcgtaacatggggtaggggttttgcttgtgtttccccaggaaaaggactacagcccatgtgggtcccccccaccgacaactgaaattgcaccataactccaaagatgaaacgttcccagaaacaaaaggcaaagacccctcaaaaaccgaggaggaaatttcgcctcctgacacataaacttcatgacctcgacattgagacaaaatctcgctgtgtgacctacaacaccactcgttcaactccaccaacatggggtcaaataaaggtcttatcccatcacacagaaaatttattaaaagaaaaaggaatcccaaaaacgaccagtaatataattctggc

SEQ ID NO: 937383 - DNA, 820 bp, Homo sapiens
gcatatatcttcactggatttccagaaaaccattctctcttgattccctttatacgtttctgctactcttgctcagtctccacaaataaatccacttcattaacttcaggccttctcctcttctcttttctcctgcattcactcccttaacaatctcatgtcatctcatagttttaaawaccatcttacactgataaatccaaaatttatatttccagctcagacctctttccaaactccatacttctttatccaattacctcttcacaatcactattggaatgcctaatcgccatctcaaatatggcaaattcaactcctgttttctctcctgcacacagcccttctactgcttaagtcttccatttcaataaatcctagtcccctcctcaagttgctcaagcctcaaccttggtttcagtcatgactcttccctttgtcccatgaccacacacaatacaccagcaacttctatctgctcctatttaacatatctaaatttcaatcacttattagttcctctcctgctaccactaaggcccaggccaccagcatctcccacttgcagtattgctatagtctactaattggtcaaattggtctacttacattttcctttacagccctacacactattttcaaatataaacgcattcatttttgaacgaatgaaagaaatagaagctcccgtaaaaatgcaatgcttatcatgttactacttagctcaacattaaatttaagtggcttcccatctaactaagataagagtcagaagtttatacagtggctttcaagacaccatttcaagactccacttcca

SEQ ID NO: 937384 - DNA, 745 bp, Homo sapiens
aaggatttttgcattaatattcatcaagaatattggcctgaagttttctgtttttgttgtgtctctgccaggttttggtatcagaatgatgccggcctcattgaatgagttgggaggagtccctccttctcaatttttaaaattagtttcagtagaaatgacaccagatcttctttgtacatatggtaaaatttagctctaaatccatctgatcctgggctttttggggggttggtagggtatttattatttgttcaatttcagatctcatttttggtgtgttcaggtaatcaaattcttcctggtttagtttttggaggttatattgtccaggaatttatccatctttttaaggttttctagtttgtgtgcttagaggtgttcatagtagtttctgatggttatttttatttctgtgtggtgagtggtaacatttcctttgttgtttctaattgtgtttatttcgatcttctcttttcttctttattagtttagctagcagcctatctatctcatcaattttttcagaaaamctactctgggctcactgatcttttgaatggttttccatgtctttatttccttcagctcagcttggattttggttatctctaatcttctgctagctttggggttggtttgctcttgcttctctgatgctttcagttgtaatattaggttgttaatttgaaatattcccttttgttgttggtgtttagtgctatacatttccctgttaacactc

SEQ ID NO: 937385 - DNA, 755 bp, Homo sapiens
ttaggtaagtgagaaatggaattccttgtcaatccattgagatttcaggagattacctgtttgtattagtccattttcgagctgctgataaagacatacccgggccgggtacagtggctcatgcttgtaatcccagcactttgggaggctgagatgggcgaatcacaaggtcaggagttcaagaccagcctggccaacatggtgaaacctgtctctactaaaaatacaaaaaattagccggtgtggtggcaggcacctgtaatcccagctacttgggaggctgaggcaggagaatcacttgaacccgggaggcggaggttgcagagagccgagactgcaccacagcatttcgcctgggcaacagagtgagactctgtctcaaaaaaaaaaaaaaaaaagacataccagagactggataatttatatatatatatatatatawaaagaggtttaatggactcacagttctatgtggctggtgaggcctcataattacggtggaaggcgaaaggcacgtcttaatgatggcagacagagaatgacagacaagcgaaaggggtttccccttataaagccatcagatctcgtgagccttattcactaccaggagaacagtatgggggaaaccgcccccatgattcaattatctcccaccaggtccctcccacaactcgtgggaattatgggagctataattcaaggtgagatttgggtgaggacacagccaaaccatatcactattaggatagctggtg

SEQ ID NO: 937386 - DNA, 778 bp, Homo sapiens
accagctccgaatgactagtcttagacatcaaggaggtgggaatgacttctttgtcaaagtaatagaagagatgaatctagaagttctggctgctctcaccaagcctcatgaagtccatgaagaatcccggtctgctcctgattccaggatggagggccagtttatccaaagccatttgcttccgtgaactccccaatttgccgaacccagggccctaaacttgtgacaggagaagacacactcgaccaggattctgaagcttggggtccattcccaggccggccactggcaccgtgatagaagcacaggctttagagtgagctgatactaggtttaatcctggccctatctttctggagaagatagcatggccagttaacccagatcttgtgtctccatgtttacccctttcctcgctgttccaacaggtcttgctagcggcccgccctattttattcccctttcaagcgggccatgaakgtaccacatcaagctactgttgcctgcatcatagcaatgaggcaggtgggtgaggcatcttccctggaggtgagggggctgggaagactagaggcagggctaggcaggatggaagtcaggagtggtggacagggagggctgttttctgtttaaagcagtcagtggtggaggaagtaggtcagtggtggaggtaggcgggactcgggctggagtctgcctctctgtggggtaactcacagctcccagggctcaacaaagagctgctgggctgcataccacacctcgggtagcaaggcc

SEQ ID NO: 937387 - DNA, 778 bp, Homo sapiens
accagctccgaatgactagtcttagacatcaaggaggtgggaatgacttctttgtcaaagtaatagaagagatgaatctagaagttctggctgctctcaccaagcctcatgaagtccatgaagaatcccggtctgctcctgattccaggatggagggccagtttatccaaagccatttgcttccgtgaactccccaatttgccgaacccagggccctaaacttgtgacaggagaagacacactcgaccaggattctgaagcttggggtccattcccaggccggccactggcaccgtgatagaagcacaggctttagagtgagctgatactaggtttaatcctggccctatctttctggagaagatagcatggccagttaacccagatcttgtgtctccatgtttacccctttcctcgctgttccaacaggtcttgctagcggcccgccctattttattcccctttcaagcgggccatgaaggtaccacatcaagckactgttgcctgcatcatagcaatgaggcaggtgggtgaggcatcttccctggaggtgagggggctgggaagactagaggcagggctaggcaggatggaagtcaggagtggtggacagggagggctgttttctgtttaaagcagtcagtggtggaggaagtaggtcagtggtggaggtaggcgggactcgggctggagtctgcctctctgtggggtaactcacagctcccagggctcaacaaagagctgctgggctgcataccacacctcgggtagcaaggcc

SEQ ID NO: 937388 - DNA, 762 bp, Homo sapiens
caactggacaccacctacccagcctcattcagactttcataagccctactggccttctggagtaatctcctaattggtatctctttcacaagtctatgctctatttttttatccacccacatacctcttttcttgtttgttttggttttgtttgcttttaattaattgagatataagtgacacacaatagactgcctgtacttaaagtgtacaatttgatgagtgtgacatatgcatacacctatgaaaacatcattttgatcaagatggggaacatttatatcacccccaaagtttcctcatgtccctttgtaatatctccctcccacctctgccccacctgtccccaatcttcatccccagattaattcatatcttgtaaaattttatatcaatagaatcacatagtatgtatcatattcttgttttgggggcttcggttcattcactcaatataattatcttgagatttatccatgttagkgttattaatggttccttcctttttattgctaagcggtactgtattgaatggacataccaaaatttgtttacctattcacctgttgatggatgtttggattgtttccagtttctggcaattatgaataaagctgctattaacattcatgtgcaaaccattgtatagacatgctttcatttctcttgaaataaatacttaggagaggaatacatgatcatatcctaggtgtatggttaacttttgaagaaactgccatattatttttcaatacaattgtt

SEQ ID NO: 937389 - DNA, 716 bp, Homo sapiens
ctggccttctggagtaatctcctaattggtatctctttcacaagtctatgctctatttttttatccacccacatacctcttttcttgtttgttttggttttgtttgcttttaattaattgagatataagtgacacacaatagactgcctgtacttaaagtgtacaatttgatgagtgtgacatatgcatacacctatgaaaacatcattttgatcaagatggggaacatttatatcacccccaaagtttcctcatgtccctttgtaatatctccctcccacctctgccccacctgtccccaatcttcatccccagattaattcatatcttgtaaaattttatatcaatagaatcacatagtatgtatcatattcttgttttgggggcttcggttcattcactcaatataattatcttgagatttatccatgttagtgttattaatggttccttcctttttattgctaagcggtactgtattgaatggacataccaaaatttgtttacctattcacctgttgatggatgtttggattgtttccagtttctggcaattatgaataaagctgctattaacaktcatgtgcaaaccattgtatagacatgctttcatttctcttgaaataaatacttaggagaggaatacatgatcatatcctaggtgtatggttaacttttgaagaaactgccatattatttttcaatacaattgttcc

SEQ ID NO: 937390 - DNA, 519 bp, Homo sapiens
tgtggttcatggaaacttatcattgagatggagattttgtgcaatcaccaacagatagactgaagtttttctgtgatttaataacttagctcttacttttaaagagagcatctcattcctcacaaaacaggcctaagattatgagctgcttgatcaaagttcttaattgaaactttgtaatctagtaagtttaaagaaaaataaattcaatactgtggaatattatatacaggaggtgtgtgkgtgtgtatgagtgtgtgtgtatatttgtgtgtgtgtgtgtgtgtatgtgtagcagaatcattaaagggctgaagaaacaggtaaacagatgattctagaatgaggttttaagaattcttctcaagaatcacagcccagaactgaccaccaaggaagctcctgccagagcaactcactcctaaatcatgtaggctcggccatgatctgtgacagcaaatagatgtgttccaaatgaaagtgtcccatgcatgcatctgattagtggaacctcatcat

SEQ ID NO: 937391 - DNA, 613 bp, Homo sapiens
ccgggcgcggtggctcacacctgtaatcccagcactttgggaggccaaggcaggcagaccactcgaggtcaggagttcaagaccagcctggccaacatggtgaaaccctgtctctactaaaaatacaaaaaaaaaaaaaaaaaaattaacagggcatggtggcaggtccctgtaatcccagctactcaagaygctgaggcaggagaatcacttgaacccaggagatggaggttgcagtgagccgagatcgggtcactgtactccagtctgggcaacagagcaaaactctatgtcaaaagaaaaaaaaagtacacagagagatttttttgcatatacttacaatgagtacataggttccctaaagctcatccatgtattccaggttaagaaaatacaatatttaaaaagaagggaaattaatggatgagcaaaacttctgagccacaattgaaagtattgatgtctgagacaatatacaagataaagtcatccaaacaaaggagacttgaaaaggttggtttttctaaactactttgctttctcataactatttaactacatactacctgcctttggaaccagcacagtctataaaatgcttcaccacaaatat

SEQ ID NO: 937392 - DNA, 633 bp, Homo sapiens
ctactcaccgggcccaaggagtctcctatctcacgtcagaacacttcctgggtcaggaagacacctggagagtctcccaggccatggcagccccacagcagcacctcacttatgggagtgtctgtctgcctgcccagaatgataagtgactgctccaccactggccagctgctctcaaggaggaaaggcctcttttcataggagcccctctttcaagcttcttgccagttagactgggcctccccagccaggctgcctagtaagattctctgtatttcaggtgaagctggagctcagatcgcagcaaggtaatccttgatggctggatctttttgctggagaatgcttggactagtgagcaaggttggaaacagggccaggtgctttagcagcrtggctgcctctgaagaggagttgcttgattttagtggctcagaactgcaatttaattcttgttctttgcacctctctctccaccccttctttaactttttgttagggattcactctgtttcgtgtgtaaagagacaagacagagttaagcgctgtgtggtaactcagtgtggaaaatttaccatgaggcttgtgtgaaaaaataccctctgactgtatttgagagccgaggtttccgct

SEQ ID NO: 937393 - DNA, 602 bp, Homo sapiens
tttctcccattcaatgggttgcctgttcactctgatgatagtttttttttgctgtgcagaagctctttagcttaattagatcccatttgtcaattttggcttttgttgcaattgcttttggtgttttcatcatgaagtccttgcccatgcctatggcctgaatggtattgcctaagatttctttttgggttttttatgattttgagttttatatttaagtctttaatcaagacttttctgcatatggctagccagttttcccagcaccatttattaaatagggaatccttttcccaattcctatttttgtcaggttcatcaaagatcagatggttgtagatgtgtggtggtatttctgaggtctctattctattccatygtatgtcagtaccacgaagttttgcttattgtagccttgtagtatagtttgaagtcaggtagcatgatgcctccagctttgtttttgttttgtttttttttttttttttttgcttaggattgtcttggctataagggctcttttttggttccatatgaaatttaaagtagtttttgctaattttgtaaagaatgtcaatggtagtttaatgggaacagaattg

SEQ ID NO: 937394 - DNA, 730 bp, Homo sapiens
ttttatagagacaaggttttgccatgttgcccagtctggacttgaactcctgacctcaagcgatctgcccatctcagcctcccaaagtgttgggattacaggggtgagccaccgtgccccacctactattatatctcttatggtaatctgtgatcagcgytctttttcataatttttaatttttgtgggtacatagtaggtgtatgtatttatgggttacattagatattttgatacaggcatgcaatgtgtaatagtcacatcaggttaaatggagtatccatcacttcaagcatttatattttgtgttacaaacaatctagttacactttttgttattttaaaatgtacaatttaattatttttggctatagatgttactattataattatttgggaatccacaaaccttgctcatataaaatgaaaaacttaattgatgaatgtcctgtctgttctgactgcgacgtgaactggccctttccatgtatctctccttctccttcagcctacctattttctgagatacaacactccttaaagtaggccagttaatgacgctaaaatggcctctaagtgttcaaatgaaaggaaaagtcacatgtctctcatttaaattagaagctaaaaatgattaagtttattgaggaaagcataccaaaagccaagataggcagaaaactaggcttcttgtgccaaaaagttagccacgttgttaatgcaaaggaaa

SEQ ID NO: 937395 - DNA, 534 bp, Homo sapiens
tatgagaccaatatgatgcaatataattatacaaatttttcttttttatttggatataattttgctattttttgtgcttattgccatgtttaacactatgagtcacataaaatatgtttgaaattaaattagtgtcattataaagctcacaatttagaaagccctaacctgtttctcttcaacttaaagcaatgatctaggtgggcaaatgaaacaaacacatgaaactattaaataaaattataaggtggtaacaagtataaattacaaagtgtaatattcaaatgcaacagaaatatatttctggctcatatagcctcycaggacagatgttgttggcaggtgagtggcttttcaggtacccaaggttattgtattttttttattctgccgtgccttagaactttattgtcatattctagcacagaggatcataaagggagcatatagaattcacacatttgattgctttctttaagatttttttggagatgttaaaaatatttatcataagtgcactgctgtataataagt

SEQ ID NO: 937396 - DNA, 626 bp, Homo sapiens
ggtggaaatgatcagtgaccttctgagtggtcactttggtgggaggtgagaaccaaagcctgcctgcgtattcaggagtgcatgggagagaagaattggtgcagtgaatacaggcagctcttcaggagttttgctgtaagaggaatagtgggatgggacgtcaacccgtggggaagtgagttcaaggaagggccttggctccttctttaaagaagagagattttataatacgcttgtatgctgatgagggcgatcccaatagagggagaatttgtggatacagggagtgtgtggagggcacaattgctgtaggggtgaccctgagcaagccaggtggggtgggaaccaagggtctgcagagtgggggccatggtctgatgtgggtctgggagtgctttgttacttgtctaagaggggagataagaaatagagaggaaacaaactttatagcaatttggtagagcagttttgtctgttgagkttgataaaatattggggcttgtattttttgtctttcatttttctagtagcctattttttattgaggtagaatccacctaacattaactattaaccataattaaagtgtacaattcagtggcatttggtacattcacagagttggg

SEQ ID NO: 937397 - DNA, 727 bp, Homo sapiens
gttttcatctcactcgactctatcatcagtatttgccatatgatcactcctactgtgtctggaattggtgggttcttggtctcactgacttcaagaatgaagccgcggaccctcgcggtgagtgttacagttcttaaggtggcgtgtctggagtttgttccttctgatgttcggatatgttcggagtttcttccttctggtgggttcatggtctcgctggctcaggaatgaagctgcagaccttcgcggtgagtgttacagctcataaaagcagcgtggacccaaagagtgagcagtagcaagatttattgcaaagagcaaaagaacaaaacttccacagtgtggaaggggaccygagtgggttgccactgctggctcgggcagcctgcttttattcttttatctggccccacccacatcctgctgattggtagagccaagtggtctgttttgacagggcgctgattggtgcgtttagaatccctgagctagatacaaaggttctccatgtccccatcagattagttagatacagagtatggacacacaggttctccaaggccccaccagagcagctagatacagagtgtccaatgggtgcactcacaaaccctgagctagacacagggtgctgattggtgtgtttacaaaccttgagctagatacagcgtgcccattggtgtatttacaatccctgcgctagacataaatgttctccacgttccca

SEQ ID NO: 937398 - DNA, 727 bp, Homo sapiens
gttttcatctcactcgactctatcatcagtatttgccatatgatcactcctactgtgtctggaattggtgggttcttggtctcactgacttcaagaatgaagccgcggaccctcgcggtgagtgttacagttcttaaggtggcgtgtctggagtttgttccttctgatgttcggatatgttcggagtttcttccttctggtgggttcatggtctcgctggctcaggaatgaagctgcagaccttcgcggtgagtgttacagctcataaaagcagcgtggacccaaagagtgagcagtagcaagatttattgcaaagagcaaaagaacaaaacttccacagtgtggaaggggacctgagtgggttgccactgctggctcgggcagcctgcttttattctyttatctggccccacccacatcctgctgattggtagagccaagtggtctgttttgacagggcgctgattggtgcgtttagaatccctgagctagatacaaaggttctccatgtccccatcagattagttagatacagagtatggacacacaggttctccaaggccccaccagagcagctagatacagagtgtccaatgggtgcactcacaaaccctgagctagacacagggtgctgattggtgtgtttacaaaccttgagctagatacagcgtgcccattggtgtatttacaatccctgcgctagacataaatgttctccacgttccca

SEQ ID NO: 937399 - DNA, 630 bp, Homo sapiens
tagcagggttgaccctggtcctggtacagcccccaggtctgcttgcagctctggccaggcaggtgccatgcctgactaagcagaaacccctggtgaggctctttattgaggaggagccggcccactacagagagaagaaaaacatyccatctacatgacagtgaagggagtggtgttttatgtcacctccagaaaggaattttatggaagaaggggccccctataatgcattgaccaggaaagtccaccagagggatagccaagatgtccctgggtcctccagacctcacccatgaaactctgggtctcatggccaaagagctggaatccctggatgatatcttcaccaaagtgtacaaaaccaaatatcccatggttagctacacagtctgaagaattcttaatagggacagcaccccagcctggacttcaaacctgaagaccaaccccattttgacataaacaatgtgttctgttgtttcatctccaagagcagcttctttggagggtaggttagggagatactcagatgctaaatcttctgcaaaataggctacctaaagcctctgaatcaccaggatctgaataaagcagatgtttaacctggttggggggacatattttcaagaa

SEQ ID NO: 937400 - DNA, 663 bp, Homo sapiens
tccactttttctgtctaatgtgtcagcattttcatgctacctacaatgtatttgttcaatctgtatggaggtattttttctcatccttgtatctccaattgttaaaaatattactgcatactctataagcaaggtagcaaataytatgtatctaaaatctaatttggttgaaatagaaaattcaagaaaagcatgtaccatactagactatgaaaagcatggcttctctaatagtaaaaatttttaaatgcacatccatatttttttaactgttagagggatcactggtttctgactgtcccttttcaagaaggcctgttccaaggaaactccatgttaaatttatatatttttaaattatactttaagttctagggtacacgtgcacaacgtgtaggtttcttacatatgtatacatgtgacatgttggtgtgctgcacccattaactcgtcatttacattaggtatatctcctaatgctatccctcccccctcctcctaccccacaggccccagtgtgtgatgttccccttcttgtgtccaagtgttcccattgttcaattcccacctatgagtgagaacatggggtgtttggttttttgtccttgtgatagtttgctgaaagtgatggtttccagcttcatccatgtccctacaaaggac

SEQ ID NO: 937401 - DNA, 738 bp, Homo sapiens
taagtagtcaagagtcaacctattttgatagatagcatttctcatctgagtttcttgccaggccagaatagtcaaggctctgttggtcttactagtgatgatttctaagacagcttgtaaccgtatgattcagttgagcatgtaaatgggagtccagtatccccacgagccctyttgtgcctaagtagcaggcctataatattgtatgattctctcagggggccatttattatcttttttatttttttcatagctatgcttctctttttgcaggaagcatagacagggaagcccaggagttcgcctgtctttatgggcagtaggaagaaagatggtttaataatgccaataacacaactacctgcctactggtcgggtaatttggtgtaaggtctatgcctacatatccagtataatccagtgggggctgtccagtcccagtgggactccaggtgggtctacacagtttgcaactttgggaatctagtaaatggatttttttccagtatggtttgaactccactaggtcgctgtttttgtagtactattatatagttttggcctaaggcagctaagtcttcctacaggaagggtgaagtccttccccactcttgctatacagtattgtctaatgattgaggcttttacgacctagaagttatcagggtgatttttttttgagctgggaattcatcaggaactgggtctgtaggtactaatcctctggcttcctatggc

SEQ ID NO: 937402 - DNA, 606 bp, Homo sapiens
aagtagtcaagagtcaacctattttgatagatagcatttctcatctgagtttcttgccaggccagaatagtcaaggctctgttggtcttactagtgatgatttctaagacagcttgtaaccgtatgattcagttgagcatgtaaatgggagtccagtatccccacgagccctcttgtgcctaagtagcaggcctataatattgtatgattctctcagggggccatttattatcttttttatttttttyatagctatgcttctctttttgcaggaagcatagacagggaagcccaggagttcgcctgtctttatgggcagtaggaagaaagatggtttaataatgccaataacacaactacctgcctactggtcgggtaatttggtgtaaggtctatgcctacatatccagtataatccagtgggggctgtccagtcccagtgggactccaggtgggtctacacagtttgcaactttgggaatctagtaaatggatttttttccagtatggtttgaactccactaggtcgctgtttttgtagtactattatatagttttggcctaaggcagctaagtcttcctacaggaagggtgaagtccttcccc

SEQ ID NO: 937403 - DNA, 774 bp, Homo sapiens
taatctttgtgctagtcccctcacacaaggggtaatacaacatcccactgctgttaagactcctgccacaattatgagagatgtaaggattaaagctaccatgcctttccattttttccattttccattttcacattcttattaatagttgaccatcagaagagtcctaaaacccagcagctatttggttttaggcctaaattcattaggcacacctcyagggactccaattgagttaacatatgtattgggattaaaagaatttgtcaaatctctctggtgtcagtggccatgtgtatttttgggtatcttatggaatgccagggtgaagggaatggccaattggactaaagcacaagtcctagtcccattggatggtaacaggttacagaggttccatttcccacaataccaccagacatcagcccggggtgtatggagagctgagtaattgccattgcttgactcaccagtgatgtttaggatgtaggcagaagttgagagttctcccacaggattattgaactcttcctcctgcctagagaggcaagagaagtggttcatattccctatagagaacaaggatattgctctgggatctgagctctggaatgtgggaaagagcgatcacagactcttacaagtcttacttccgcatgcatccttgtcctggtatagaaccaacatacagtgtagtcccttaggaggggtattccatcctaggggaaatggaaccacctgtgcccaaggtcatcccacagcagttactcttgt

SEQ ID NO: 937404 - DNA, 774 bp, Homo sapiens
taatctttgtgctagtcccctcacacaaggggtaatacaacatcccactgctgttaagactcctgccacaattatgagagatgtaaggattaaagctaccatgcctttccattttttccattttccattttcacattcttattaatagttgaccatcagaagagtcctaaaacccagcagctatttggttttaggcctaaattcattaggcacacctctagggactccaattgagttaacatatgtattgggattaaaagaatttgtcaaatctctctggtgtcagtggccatgtgtatttttgggtatcttatggaatgccagggtgaagggaatggccaattggactaaagcacaagtcctagtcccattggatggtaacaggttacagaggttccatttcccacaataccaccagacatcagcccggggtgtatggagagctgagtaattgccattgcttgactcaccagtgatgtttaggatgtaggcagaagttgagagttctcccacaggattattgaactcttcctcctgcctagagmggcaagagaagtggttcatattccctatagagaacaaggatattgctctgggatctgagctctggaatgtgggaaagagcgatcacagactcttacaagtcttacttccgcatgcatccttgtcctggtatagaaccaacatacagtgtagtcccttaggaggggtattccatcctaggggaaatggaaccacctgtgcccaaggtcatcccacagcagttactcttgt

SEQ ID NO: 937405 - DNA, 709 bp, Homo sapiens
tgaactcttcctcctgcctagagaggcaagagaagtggttcatattccctatagagaacaaggatattgctctgggatctgagctctggaatgtgggaaagagcgatcacagactcttacaagtcttacttccgcatgcatccttgtcctggtatagaaccaacatacagtgtagtcccttaggaggggtattccatcctaggggaaatggaaccacctgtgcccaaggtcatcccacagcagttactcttgttgagggcttgtaccaaaaatttgaccaattcgacccaggcgtttatatccccataccctgtctcaatttctaaggtttgccttagatcctttaccatatttttcccttttagggtcattatttggtggactaaagtgtttattagggtctggggttgtagtcccaggcaaatgggaggttgagttcttgattagtttgagaacaaatcaccctagggggtctttccstgtgatttctgcccctaatgcatatatcccagattctacttttggttcttggtctacaatggctggattgtcaatggtgatgagtatagaattgcattttaaattctggcagttatttggcagggagcccttggacagatgtagtttattctttaagggtctccagctcagagttacctattctatgtttactgttcaaccctgaaattgggtagtccaccatacatta

SEQ ID NO: 937406 - DNA, 668 bp, Homo sapiens
attttcctccgattctaaggaaggataggacagaatagcaagcgaaaatcgtccaatattactcactgctttggagaatccctgtatgggctaccaaatattaccggcgggtctttgttcttagagttcccaagatggtggcgggccrctcccaaatggcagcaagccttttgttctctgacctggggttcttggcctcatggattccttggaatggaaccttgggctatgtggtgagtgttatagctctattagaagccatgggtcacagaagagaaccgtggaacccagaaactagtgttcagcttgattaggacaaacccaggcacttagccatgcaggaacaatgacaagactctagcccaatcaggagtggcaatgggcacctcactggatcagaattgtggtggacaccctgccggatccggaggggtggaagtcattggtgggcctggcatggcggcaatcagcaatggtggacagcaagtgaaagctcagctcaagtcggaacaaacagaccagaagagtgtgcagttgcaagacttaatagagtgaaaacagagctcccatacaacgggagaagacccaaagtgggttgccactgccggctcaaaatgcctgggtttatatcgcaatcattgtccctctccctgtgctctcaggcaaca

SEQ ID NO: 937407 - DNA, 673 bp, Homo sapiens
atgggtcacagaagagaaccgtggaacccagaaactagtgttcagcttgattaggacaaacccaggcacttagccatgcaggaacaatgacaagactctagcccaatcaggagtggcaatgggcacctcactggatcagaattgtggtggacaccctgccggatccggaggggtggaagtcattggtgggcctggcatggcggcaatcagcaatggtggacagcaagtgaaagctcagctcaagtcggaacaaacagaccagaagagtgtgcagttgcaagacttaatagagtgaaaacagagctcccatacaacgggagragacccaaagtgggttgccactgccggctcaaaatgcctgggtttatatcgcaatcattgtccctctccctgtgctctcaggcaacagatgattgactatttctttacctccagcttttagcctaattggtattttagtgagctctctttactacctgattggtcgggtgtgagctgagttacaagccccgtgtttaaaggtgggtgcagtcaccttctccaggtaggcttaggaattgttagtcggcctaggaaatccagctaatcctgtttctcacagagaggaagagtacagcagttgtgaggcattgaactcagtgctgccctgttacagcagaaaacaaaactgaac

SEQ ID NO: 937408 - DNA, 673 bp, Homo sapiens
atgggtcacagaagagaaccgtggaacccagaaactagtgttcagcttgattaggacaaacccaggcacttagccatgcaggaacaatgacaagactctagcccaatcaggagtggcaatgggcacctcactggatcagaattgtggtggacaccctgccggatccggaggggtggaagtcattggtgggcctggcatggcggcaatcagcaatggtggacagcaagtgaaagctcagctcaagtcggaacaaacagaccagaagagtgtgcagttgcaagacttaatagagtgaaaacagagctcccatacaacgggagaagacccaaagtgggttgccactgccggctcaaaatgcctgggtttatatcgcaatcattgtcyctctccctgtgctctcaggcaacagatgattgactatttctttacctccagcttttagcctaattggtattttagtgagctctctttactacctgattggtcgggtgtgagctgagttacaagccccgtgtttaaaggtgggtgcagtcaccttctccaggtaggcttaggaattgttagtcggcctaggaaatccagctaatcctgtttctcacagagaggaagagtacagcagttgtgaggcattgaactcagtgctgccctgttacagcagaaaacaaaactgaac

SEQ ID NO: 937409 - DNA, 781 bp, Homo sapiens
cctaggtttgcaacacccaagctgtatgtgggtgctctctgggaagctgcggcccactactgtgcttctctgaatttgtgcattacccataggagcctgcaggccctcacatgaagctgctcactgaggagcccttctctgaaacactgagccacagtgcacaggccaagctaggctggaagacacagccacaaactcagaggatgtgtgcctctggtgacctgagatcacagggtggcccccgtccacctcgcagcaccagcacagcctaggccacaggaatggagrggcacaaactgcccagcctgcgctgcaccagtgcctccttcctccaagagccccataccccaccccgccctgcccaaggctctcgtagtctggtctgcagtgtgctgtctgcaatgtgctgtgtgatggtctataagcctgctatgtgctggtgccctttgacttgctgggtgttgggagctgaaggactgtgtgctttcctcagcatcttctcaagctgcaattccttggctacaatgtgggctttaaaaaacaacaactatttattttgtagagatagcatgtcacctaggttggtctcaaactcctggctcgagtgatcctcttgcttcagcctcccgagtagctgagaacacaggcatgcagcactacgacctgctaatttttgtgtttttgtttgttttgagacagagtcttgctctgtcgcccaggctggagtgcagtggtgtgatcgcggctcaccacaacctccgcctcccaggttcaagggatt

SEQ ID NO: 937410 - DNA, 755 bp, Homo sapiens
aaggaaccaaataaaaaactgataacttggaattcgtcaaaattaaaatcttgcatgtatcaaaggacaccatcaagcaagtgaaaagacaacccacagaatgggggaaaatatttgcaagtcatgtattggataagggacttgtaagcagactatataaagcactcttacaactcaacgacaaaaagacaaataacccaattaaaatgtgggtggaagaatggaataacattactccaaggaagagaggcaaatggccaatgagcacatgaaaagatgctcaacatccttagatatcagggaaatgcaaatgaaaacctcagtgagacattgcttcacacccactaggatggctagaacaaaaacaacaagcagaaaatcacaagtgctcatgaagatgtgcagaaatcagaatcctcagaycctgctgatgggaatgtaaaatggtgcagacactctggaatagtttgacagttcctcaaaaagttaagcatggagttcctctgtgacccaattctgctcctaggtatatgccagagagaactgaaaatacacattcacacaaaaggcattatttataatagtcaagaaattgaaaaaacccaaatgcctatcagtgagtgaatggataaacaaaatatggtctatccatacaatggaatattactcagccataaaagggaaggaagttctggtatatgaccaggctcctagaccatagatttggggactccagagcaggactcgttcatagg

SEQ ID NO: 937411 - DNA, 760 bp, Homo sapiens
acagaacatttcttttactcaaataagatctcacatgactgtttataatcaaacattcccctttccatctgattaaagagcttctgcacagcaaaagaaactactgttctgtaaacagacaacctacagaaatgggaggaaatattctcaaactatgcaaatgacaaaggtgtaatatcaagcatctataaagaacttaaatcaacaagcaaaaaacaaccccattaaagggtgggcaaaggacataaacagacacttctcaaaagaagacatacaggcagacaacaaacacatgaagaaatgctcaatatcactaatcatcagagaaatatgaatcaaagccacaatgagataccacctcatgccagtcagaatggctactattaaaaagtcaaacaacaacaacaacaacagatgccggtgagactgtggagaaaaagaaatgtttatatactgttggtgggaatgtaaactagttcagccactgtggaaagcagtttggagatatttcaaagaactaaaactagaactacctctcaaccagcaatccattactgggtatatatccaaaggaaaagaaattgttctaccaaaaaracaagtgtacttgcatgttcatcacagtactagtcacaatagcaaagacatggattcaacctaggtgcccatcaacagtggactggataaagaaaatgtagtgcaatatatatcatgaaatactatgcagctataaaaaagaacaaaatcatgtcctttgcag

SEQ ID NO: 937412 - DNA, 578 bp, Homo sapiens
agtgacactatctatcaaaacctctgggatacagcaaaggtggtgctaagggaaaggttcatagccttaaatgcctacattgaaaagtctgaaagaacacaaacagacaatgtaaggtcacatctcaagaaactagagaaacaaaaacaaaacaaacccaaacccaacagaaggcaggaaataacccagatcagagcagaacaaaatgaaactgaaaaaaaaaaaaaatacaaaagataaatgaaacaaaaagctggtcctttgaaaagataaataaaactgacagaacattattagcaagattaatcaagaagagaaaagattcaaataagctcaattagaaatgaaatgsgagatactacaactgacactacagaaatacaaaagatcactcaggctactatgaacacctttacacacataaactagaaatcctagaggagatggataaattcctggatacaaccctcctagcttaaatcaggaagaatgagaaaccctgaacagaccaataacaaccagtgagactgcaatggtattttaaaaattaccaacaaaaaaagaagtccaggaccaga

SEQ ID NO: 937413 - DNA, 594 bp, Homo sapiens
atttgtatttcctgagatattgaaggagagtataggagataaagggttaaggatgaatccttggtttaggcttgagcaaacagaagatgtgagttgatattaactgagatgggaaaggctgaaaaaggaacaggcttggggagagcagttcaggagtttggttttgaacatgtgatgtttgagatctccaatagactaaagtaatatgtactgtagggagctggatatacaattgcaggagttagatgtacagaaggcaatagcagctctggataggtccaagtagattataaatttgaaagtcatcagcatatacatactactgacatccttggggcagaygtgatcagcgagagaacaggaacagaggagttataaagtctgagtccaaagacacgtctattaaaagtttgagtaaataagtaagaactagcaaagaagaataagataaagtggctagttaggagaacaccaagaaggtagtatcctggaaaccaagggaagaaagtatatcggggaagaaggaatgatcaatgatatcaagtgctattgatgaggcaagtcagatgaggcctgagagatgaccacagtaac

SEQ ID NO: 937414 - DNA, 514 bp, Homo sapiens
agcagctcttttagggcaggcctggtggtgacaaaatccctcagcatttgcttgtctgtaaaggattttatttctccttcacttatgaagcttcatttggctggatatgaaattctgggttgaatattcttttctttaagaatgttcaatattggcccccactctcttctggcttgtagagtttctgcwgagagatccgctgttagtctgatgggcttccctttgtgggtaacccgacctttctctctggctgcccttaacattttttccttcatttcaactttgatgaatctgacaattacgtgtcttgcagttgctcctctcgaggagtatctttgtggcattctctgtatttcctgaatctgaatgttggcctgccttgctatactggggaagttctccaggataatatcctgcagagtgttttccaacttggttccattctccccatcactttcaggtacaccaatcagacgtagatttggtcttttcacatagtcccatatttcttgga

SEQ ID NO: 937415 - DNA, 633 bp, Homo sapiens
ctcagcagagaggggacaggaaggttgggtcatctccccagtgtggctgaatctgggggttttcataggcacaggatggggaaggggagggccataggtagtattggaaaaggtaacatttgattggtttaaaagcattattcagaaagaaccaatcaggaaagggtgggcaaacaggaacagaagttctcactcagggtcgcaggtttcatctgtaaccaggagtccaatctttcagccttcagactatgttgggcttgaaggtggggtttcaccaaggacccgcccctaactgcctaggcatttgtctgcctcctgctgctatcactacagtgtagatgaactttgaaaacagaagaagccaaacagaaaagcctycttattatgattctatttacatgaaatgtctatttataggaaatgcctgtgaataggcaaatccatacagacaggaagtagatttgtggttgctaggggttggaaaaggggggcatgggaggtgattgctaatggatatggggagtcagacataaatagttaagatgaaatcatactggagtagagtgggcccttaatcgaatctgactcgagttcttataaaaagaggagcccccaatgtgaagatacagaaac

SEQ ID NO: 937416 - DNA, 446 bp, Homo sapiens
cagaagttctcactcagggtcgcaggtttcatctgtaaccaggagtccaatctttcagccttcagactatgttgggcttgaaggtggggtttcaccaaggacccgcccctaactgcctaggcatttgtctgcctcctgctgctatcactacagtgtagatgaactttgaaaacagaagaagccaaacagaaaagccttctkattatgattctatttacatgaaatgtctatttataggaaatgcctgtgaataggcaaatccatacagacaggaagtagatttgtggttgctaggggttggaaaaggggggcatgggaggtgattgctaatggatatggggagtcagacataaatagttaagatgaaatcatactggagtagagtgggcccttaatcgaatctgactcgagttcttataaaaagaggagcccccaatgtgaagata

SEQ ID NO: 937417 - DNA, 643 bp, Homo sapiens
caccctctcagcatttgatgttatcagtgttttggattttagccattctgataggtgtatagtgatatctcattgtattaatttgctattccctgatgacatatgatgttgaacatctttaaatatgcctactagccatgtgtatatcttctttggtgagtgtctaagtattttgcctattttataattgggctgtttgttttcttaatgctgagttttaagagttctttgcgtattttggataacagtcctttatcaaatakttgttttgcaaagatttttttcccagtctatggtttgtcttttcattctattaccagggtctttcacagagcaaaatattatttttcaacttttattttagattcagggggtacatgtggaggtttgttacctaggtatatcgtatgatgctgagatttagggtgcaagtgatcctctcacccaggtactgagcatcataccaaagagttaatttttcaaccctccgcacttccttcctcctccctctggtagtccccaggcctattgttgccatctttatgtccatgagtaccccatgtttagctcccacttataagtgagaacacacagtatttggttttctgttcctgcatcaatgctttaggataatggcctccag

SEQ ID NO: 937418 - DNA, 643 bp, Homo sapiens
caccctctcagcatttgatgttatcagtgttttggattttagccattctgataggtgtatagtgatatctcattgtattaatttgctattccctgatgacatatgatgttgaacatctttaaatatgcctactagccatgtgtatatcttctttggtgagtgtctaagtattttgcctattttataattgggctgtttgttttcttaatgctgagttttaagagttctttgcgtattttggataacagtcctttatcaaatagttgttttgcaaagatttttttcccagtctatggtttgtcttttcattctattaccagggtctttcacagagcaaaatattatttttcaacttttattttagattcagggggtacatgtggaggtttgttacctaggtatatcgtatgatgctgagatttagggtgcaagtgatcctstcacccaggtactgagcatcataccaaagagttaatttttcaaccctccgcacttccttcctcctccctctggtagtccccaggcctattgttgccatctttatgtccatgagtaccccatgtttagctcccacttataagtgagaacacacagtatttggttttctgttcctgcatcaatgctttaggataatggcctccag

SEQ ID NO: 937419 - DNA, 819 bp, Homo sapiens
ggtagggtggtgcatgcctgtaatcccagctactggggaggctgagacaggggaatcgcttgaacccggcaggcgtaggttgcagtgagccaagatcacaccactgcactccagcctgggagacagagcgagactccatctcaaaaaaaaaaaaaaaaaaaaagtaagcagatgaatacccatgtaccttgcagcactatcacaatagccaagaggtgaagaaaccccagtgtccatcaacagaggaatgaataacaaaacacggcatatgcatacaatggaatattagcctcaagagggaaacaaattytaacagatgatatgacgtggatgaactttgaatacattaggttcagtaaaataagccagtcacaaaaggaccaataccatataattccacttttatgtggtacctagagcagtcaacttcatagagacagaaaacagaatgatggttgccaggggctgggagcagaggagaatgggcagttattgtttaatgggtgcagagtttcagttttgcaaattgaaaagagttccagagatgcatggtggtgatggtagtaaaacgatgtgaatgcactcagtgccacaaaactgtacatttaaaaatggtgaaatggtaaattttatgtctattttaccccaattttaaaaaaataaataattgtttaaagagaaggcagagcgtacaaagaagcatgcctgtagtattgatcactaaaagaattaattgttcctgttggtaacaggttaggccttcggccctccgtgagaaagatctgggaagttgcagggccttcccctaaagccacagta

SEQ ID NO: 937420 - DNA, 740 bp, Homo sapiens
cttatggaaaatttttttttaaaaaagaaatagccagagaactagaattataagtggagcctgaagatgtgactgaattgctgcagtcccatgataaaactttagcagataaggagttgcttcttagagatgaataacgaaagtagtttcttaagatacaacctactcctggtgaagatgccatgagcattgttgaaatgacaagggatttagggatttagaatattccataawtttagttgataaagcaatggtaggcttcgagaggattaactccaattttgaaagacgttcaaccatgagtaaaatgctgtctaacagcatcacatgctacaggcaaatcttttgtgaaagaaagtcagttgatataacaagcttcatttttgtcttaagaaattgccacagtcacctcaaccttcaacagccaccaccctgatcagtcagcagccatcgacactgtggcaagtccctccaccagaaaaaatattacacttactgaaggtccaggtgaatgttagcattttttaggaataaggtatttctgaattaaggtatgtacacttttttagacataatgctattgcacacttaatagactacagtatactgtaaagataacttttttatttttttgaggcagggtctcactctgtcacccaggctggagtccagtggtgcaatctcggctcactgcaatctccacctcctggactcaagtgattctcccacttcagcctcct

SEQ ID NO: 937421 - DNA, 759 bp, Homo sapiens
ctaggcacgggttccatctctgtagctctgtcctggcactgagctcagtatcaaagaaccccagataccccaggtcccctaatccaatagcccctcaccctacagctaagatttaaaaatgaagtatctgatgttgagagagacaaattaagttgtgcaatgatgtagtaaccagaacaagaaagggaagcaatccaatattcactaggtggtgagcagatagtgaaacctgacttaagagtggatgtttttaactctacataatagatgctctcttgtgaaaatgtgtagaaaacaaaataacagtctacatattgaagaatttgaattttaaaagaattgcagagtactccactgcttatgaaattcaagtaatcttacatgtttttcttatctagcttatgggtagaagcagaatgagcttctccagtgggatgaacacagacacttcatattcaacaagttcacactgagcccatcatcattgcttggaaggctgctcctcttcctgtgttctctctcttggccaatggcactgccatttccccatccagaacctgggatactgcagcagtcttttcactgcccctgtctacccctctccaakccattctctacacaactgcctacaggaatctttccaaaacattagttctgaccataactctacttttcttaagacagcactttggctccccattgacatcacagtctttagagtgatgtaatgttcatcattcggtcataagctgcaaatcc

SEQ ID NO: 937422 - DNA, 678 bp, Homo sapiens
atgtggtcatatccttccctatactgtaatgagaatacaaactccttaccatagcccataaatctcaatatgatctgaccctacctatctgtattatttatctattactgtataacaaattaccccaaaacatagtgacttgaaatgacaacatctattatttcacagtttctgtaaataagaaatccaaagacagcttaactgggtcctctgtgtcagggtgtcattcaagcaattgcatagggctgcaagtcatctcagtgctcaacttagggagatcctgttccaaactcactcatgcggtagttcataggattcagttcattgtgggctgtatgtgtgagggcctcattattcactggctattggccaaaggccacgtctagttccttggatatakatcacagatctctccatagagcatctcaaaacattgcagcttgcttcaccagaaggggcgagccaaaaagagagacaaaaagccaatgatacagtctgacagtgtccccacccaaatctcaccttgaatgtcaataatccccatatttcaagggcagggtcaggtggagataattgaatcatgggggtggtttctctcatactattctcatgatagtaaataagtctcacaagatgtgatggatttataaatggaagtttccctgcataagctctctt

SEQ ID NO: 937423 - DNA, 678 bp, Homo sapiens
atgtggtcatatccttccctatactgtaatgagaatacaaactccttaccatagcccataaatctcaatatgatctgaccctacctatctgtattatttatctattactgtataacaaattaccccaaaacatagtgacttgaaatgacaacatctattatttcacagtttctgtaaataagaaatccaaagacagcttaactgggtcctctgtgtcagggtgtcattcaagcaattgcatagggctgcaagtcatctcagtgctcaacttagggagatcctgttccaaactcactcatgcggtagttcataggattcagttcattgtgggctgtatgtgtgagggcctcattattcactggctattggccaaaggccacgtctagttccttggatatagwtcacagatctctccatagagcatctcaaaacattgcagcttgcttcaccagaaggggcgagccaaaaagagagacaaaaagccaatgatacagtctgacagtgtccccacccaaatctcaccttgaatgtcaataatccccatatttcaagggcagggtcaggtggagataattgaatcatgggggtggtttctctcatactattctcatgatagtaaataagtctcacaagatgtgatggatttataaatggaagtttccctgcataagctctctt

SEQ ID NO: 937424 - DNA, 592 bp, Homo sapiens
ctatttttaagttaatagtataggctgagtgcagtgactcatgcttgtaatcccagtgctttgggaggctgaggctgaaggactgctctctgaggccgagagtttgagaccagcctaggcaacaaagtgagaccccatctctacaaagtttttaaaaatagccaggcatggtgatgcatgcctgtagtcccagctactcaggaggctacgcttggaggatcacttgaacccaggastttgaggttacagtgagttatgcttgcatcagcctccagcctggacaacagagtgaaaccttgtctcaaaaagaaaaaaaaaggtatagtatcaatgttgatttaatgatttcatggttttgatcattattatatagttttataattttttaacattagaggaagctgagtcaaaggtatatgtaggctctctatactattttcgcaatttttacatctaaaattatgtcaaaataaaacataaaaatctaaaaataaaaaataaagtcacagcccttcccactatgaggccatttcatagttggtacctgcttgccagctgccccaccccaaagctctgtgatataatgaatctc

SEQ ID NO: 937425 - DNA, 539 bp, Homo sapiens
caagagtttgaggccagcctgaccaacaaggtgaaaccccatctccactaaaaataatacaaaaattagctgggtgtggtggcgcatgcctgtaatcccagctactggggaggctgaggcaggagaatcgtttgaaccaggaggaagaggttgcagtgagctgagatcgcaccactgcactccagcctgggcgacagagtaattccatttcaaamtaaaaatcaaaaaacaaacaaacaacaacaataacaacaaaaagaaaatgcattagataatatgatgcgggtggaaaccaagtgggcaaggcaggttagcagtggccaacagttcaggtttgagttgaacctgaagtgatcgaaataaacaagggaagggtttgaaagcaaagtggagttcaataggacaacagcagtgtagggcgtgtgtggagaaattaaattgcactgagaacagatggaaaatgaatgcctatgccttagtctacctaataaagatctaaaagtcataaagacagcaagctgaacataaatcaggcacag

SEQ ID NO: 937426 - DNA, 595 bp, Homo sapiens
ttattttctgcttttattttttccagtgatgaggaaggtatatttctggaaggtagaaaagtcttatgtactcaaaggattcaaggactaccattttttattcttccttatttatagtgagaaacttagtgtgttccatttttctccacccaccttcttcatgtcacatrgaattccagaccccggtgattgctacagtaaatagattcttccagaaactgtttaacatgcatgtttaattttgcaacttcacttacgactgttactaggacgtgattctatggcctcaccttgatcagttgctcaccactgtccctctgtccttggacttgcctgctatgcgtaagttcttgcttttgattcatctcacttatcactggaataaatttacatacattttcagaactggtgcatggatggtatattttgagagacctcgcatgtccaagcaagacttacagttgccttaaaatctgaaagccatctggctgcgtacagaattcatgagtaactacctatttccttcagaataaaaataaatttttaacttcatttttttcctgaagtttaaagctgtgaaagagagtctggctag

SEQ ID NO: 937427 - DNA, 610 bp, Homo sapiens
ccactgaagtagtaaatccaaaagaaaggtttttctcattagatgacgttctgcttccattagagaagtgatcatagtttcagatcccagttgtatgaccttacttacagaagctgataaggaaaaagacagcttcatttctgggggccaaagctctcagccttcagtggttccaacaagcagcattaaatattkccttttttttttttttttttttcttgagacagagtctcactgtctgtcgcccaggctggagtgcagtggcgcgatctcaactcactgcagcctccacctcccaggttcaagtgattctcatgcctcagcctcctgagtagctgggattactgccatcatggggttatgccatgggatagctgccatcatgcctggccaatttttgtgttttttagtagagatggggtttccccatgttgaccaggctggtctcgacctcctaacctcgagtaatctgcctgcctcggcctcccaaaatgttgggattacaggcatgagccaccatgcccagacagcgtggcatatttccttcagaaagttgaatgtctgagccactcttacctgggcttcttgggtgtgtgtgtcctgtggtaga

SEQ ID NO: 937428 - DNA, 594 bp, Homo sapiens
gcaatggtctatctctccactctggcccctctcctctcaccactgcctctcttctccttcttcctgaccttcttccacttcctccaatgcagcataacctagcatgctcgggccttcatgcctgctactgcgtattgcaggaaaattcaacaagcagttgctttcagcacttgtcatgtaacaaagtctctattggttttacttatatttgcagtttacaatgaatcttataagtttactagccaagtggaatatctttttctttgtttttgcagatttttttttccttgtggtctttgtgattctttttctttttaaatgacttcaacttttattttatatacagraggtttgttacttaggaatattgcatgatgctgaggtttggagtatggatcctgtcagcagagagtgaacatggtacccaataggtaatctttcagccctatcttcctccttccttcccctttcacgtagtccccagtgtctattgttccaattgttatgtccacgagtacccaatgtttagctcctacttatgagtaagaatatgtggtatttggttttctgttcctgtatcaattcacttaggat

SEQ ID NO: 937429 - DNA, 594 bp, Homo sapiens
gcaatggtctatctctccactctggcccctctcctctcaccactgcctctcttctccttcttcctgaccttcttccacttcctccaatgcagcataacctagcatgctcgggccttcatgcctgctactgcgtattgcaggaaaattcaacaagcagttgctttcagcacttgtcatgtaacaaagtctctattggttttacttatatttgcagtttacaatgaatcttataagtttactagccaagtggaatatctttttctttgtttttgcagatttttttttccttgtggtctttgtgattctttttctttttaaatgacttcaacttttattttatatacagaaggtttgttacttaggaatattgcatgatgctgaggtttggagtatggatcctgtcagcagagagtgaacatggtacccaataggtaatytttcagccctatcttcctccttccttcccctttcacgtagtccccagtgtctattgttccaattgttatgtccacgagtacccaatgtttagctcctacttatgagtaagaatatgtggtatttggttttctgttcctgtatcaattcacttaggat

SEQ ID NO: 937430 - DNA, 465 bp, Homo sapiens
tctgttggagtttgctggaggtccactccagaccctgtttgcctgggtatcaccagcggaggctgcagaacagcaaatactgcagaatggcaaatgttgctgcctaatccttcctctggaagcttcatctcagaggggcacctggctgtatgaggtgtcagttggcccctactgggaggtgtctcccagttaggctactcgggggtcagggacccacttgaggaggcagtctgtccattctcagatctcaaactccatgctgggagatccactactctcatcaaagctgtcagacagggaygtttaagtctgcagaagtttctgctgcattttgttcagctatgccctgccccagaggtggtgtctacagaggcaggcaggcctccttgagctgtgttgggctccacccagttcgagcttcctggccgcttttttttttacctcctcaagcctcagcaatggcag

SEQ ID NO: 937431 - DNA, 614 bp, Homo sapiens
gggcaaaacttcttaagtaatatcccacaagcataggcacccaaagcaaaagtaaacaaatggaatcacaacaaattataaccttctgcacaacaaagaaaacaatcaacaaaatgaggagacaacacacgaaattggagaaaatattttctattcatctgacaaggggttaataaccagaatatataaggagcttaaacaaccctatagaaaaaaatctactaatctgatttaaaaatgggcaaaatatttgaatagacatttctcaaatgaagacatataaatgaccaacatgaatatgaaaagatgctcaacatcattgttcatcagagaaatgcaaatgaaaactccaatgagatatcacctcacctccgttaaaatggcttatatccaaacgtcaggcaataacaaatgcaggcgaggawatggagaaaagggcaccctcatatgctgttgatgggaatgtaagttagtacaaccactatcagaatagtttggaggttcctcaaaaactaaaaatagagctaccatacaatccagctatcctactgctgggtatatatccaaaagaaaggaaatcagtatattgaagagatgtctgcactgtcatgttt

SEQ ID NO: 937432 - DNA, 557 bp, Homo sapiens
agctctaggagggaaaaatggtttcatgtgctaggcccaaggccctgctgctttgtgcagccttgggacatgaggccctgtgtcccagcctctccaactcatgctgtggytaacaggggccaaggtacagatcaggcaatggcttcagaggatccaagccccaaaccttggcagctcccatgtggtattgagcctgaagttccacaggaggcaagagttgaagcttgggagcttcaagagatttcataggatgtatgaaaacacctggatgtccaggcaaatgtctattgcaggggcaaagccctcatggagaacctctgctagagcagtgcaaagggaaaatgtggggttggagcccccacatagagtccccactggggcactgcctagtggagctatgagaagaaggccactgtcctccagatttcagaattatagatccactgacagcttgcaccacgtgcctggaaaagccatggatgctcaatgccagcccatgaaagcagctgcaggggctgtacctgtaccttgaagagccacaggggtggggctgccca

SEQ ID NO: 937433 - DNA, 633 bp, Homo sapiens
agcctaaattgcaaacccatagaattgtaaacaaataaatagttgttttaagccactaagttttgcggccaaaggtaactaaaacagagtctgactccagcctccatagcttttatatcttgttcaacctatgcgagttaggattcttctgacctaccatttagaaggaggtcttattcttaggtaggacctaaatatctgtataaaacagtgactttatctgcttcactctacacaacatttgggttcatagaggcctagaattttagaactggaatgactttagaagtcatgtagttcaggcaaggtgcagtggctcacccctgtaatcccagcactttgagaggcggaggcgggcagatcactagaggtcagaagtttgaggccaggcttgctggrtgtggtggctcacacctgtaatcccaacactttaggaggccgaggcaggtggatcacgaggtcaggagatagagaccatcctggctaacatggtgaaaccccatctttattaaaaatacaaaaaattagccaggcatggtggtgggtgcctgtagttccagctactcgggaggctgaggcaggagaatggcgtgaacctgggaggtggagcttgcagtgagccgagattgcacg

SEQ ID NO: 937434 - DNA, 558 bp, Homo sapiens
tacaatcagtcctcctcttttatagcctgcaatttcccttccttcatagtctataaatttataaaaataatacaataaaaatcaagtgttctgctttacactttaaagtttgggataaaataaatcattcaagaattgtctttttatgatgataaattgatggatttggggggttgtatatgtctggggaatcttatatccctttagtgggaaaaggaaaaacttccatgtcgtttgtaataccaacaagctatttttacaaacctaacttttcagtgtacataaatcatgatacagaggcagacacaatggcagagtagaaggctccaccgattatgccccccaccacccacaaggacaccaagttaacaactgtctacacagasgaaacacctgttggctgagtgcagtggttcacgcctgtaatcccagcactttgggaggctgaggcgggcgaatcacttgaggtcaggagttcaagatgagcctggccaacatggtgaaactctgtctctactaaaaatacaaaaattagccaggtgtggtgtcaggtgcctg

SEQ ID NO: 937435 - DNA, 555 bp, Homo sapiens
ggtacttgcctcctactccacggggaaaatagaagccattgaagagaattccctcagcttcctacaaccaaacctacaattttacctcttttgtagctgctcattttttatagtggatgaagtgtccctcagccttcctgaggctactctcctcacccatgctctggaccctatgttctcctgccttctcagagaccttggtcaatcaagcacccctgcctgtactataattttaacttctccactgtacagtctcctaaccatacacatttagacatgttcaaatctccactttcttaaaaaytcaacaatgcttcctctgagtttatgtcagaggaatgccttttacttaagggtattttctcttctcaacaatgaaactccctgacgatgttgtctacatttccttgctccttttcccaacctcactgctatgctgccatacttctacccacgctgctcccacacaccacaccttagatattgttttttctaaagttactgatgacctgaatctatagacactttgctgcattttctgtaatgtataaaaca

SEQ ID NO: 937436 - DNA, 557 bp, Homo sapiens
ggttccattctcccagtcactttcaggtacaccaatcagacgtagatttgatcttttcacatagtcccatatttcttggaggctttgtttgtttctttttattcttttttctctaaacttcccttctcacttcatttcattcatttgatcttccaacactgataccctttcttccagttgattgaatcagctactaaagcttgtgcattcgttgcatagttcycatgccatggttttcagctccgtgaggacctttaaggacttttctgcattggctattctagttagccattcatctaatatttttcaaggtttttaatttctttgccatgggttcaaacttcctcctttagcttggagtagtttgatcatctgaagccctcttctctcaactcgtcaaagtcattctccattcagctttgttccattgctggtgaggagctgtgttcctttggaggaggagaggcactctgatttttagagtttccagtttttctactctgttttttccccatctatgtggttttatctaccttcggtctttgatgatggtgatg

SEQ ID NO: 937437 - DNA, 667 bp, Homo sapiens
ctcttgcctgccgccatctaagaagtgcctttgcttctcctttgccttccaccatcattgtgaggcatccccagccacgcggaactgtaagtccattaaactgctttcctttataaattacccagtctctgctatgtctttattagcagcatgagaacaaactgatataatccaattggctctatttctctggttctctttctttctctctctctctctcctctctgatttgttatgagaaaatggatcatataatgatggaggctgagaagtctgacaatctgccatctggtagctggagacccaggagagtcagtggtrtagctgcagttgagtctgaaggcctgagaaccagagaagctgacagtggaagtcccagtcccagagcaggagaacaccattgtcctggctcaacaaggcaggtaggaaggggacaaatcctccctccctctgctttttgttccattcaagcccttaatggattagatgatgcccgcccacactggggagagccatgaactttactgagccaactgattcaaatgctgatctcatctggaaacgccctcataggcacacccagaaataatgtttaatctgtgtaccccatgacccagtcaaattgacacataaaatgagctttcacattggctttcctctactccat

SEQ ID NO: 937438 - DNA, 658 bp, Homo sapiens
gtgcctttgcttctcctttgccttccaccatcattgtgaggcatccccagccacgcggaactgtaagtccattaaactgctttcctttataaattacccagtctctgctatgtctttattagcagcatgagaacaaactgatataatccaattggctctatttctctggttctctttctttctctctctctctctcctctctgatttgttatgagaaaatggatcatataatgatggaggctgagaagtctgacaatctgccatctggtagctggagacccaggagagtcagtggtgtagctgcagttgagtctgaaggcctgagaaccagagaagctgayagtggaagtcccagtcccagagcaggagaacaccattgtcctggctcaacaaggcaggtaggaaggggacaaatcctccctccctctgctttttgttccattcaagcccttaatggattagatgatgcccgcccacactggggagagccatgaactttactgagccaactgattcaaatgctgatctcatctggaaacgccctcataggcacacccagaaataatgtttaatctgtgtaccccatgacccagtcaaattgacacataaaatgagctttcacattggctttcctctactccatgatgaacagctgtgg

SEQ ID NO: 937439 - DNA, 673 bp, Homo sapiens
tgccatgattgtaaatttcctgaggccttcccagccgtgaagaactatgagtcaatgaaacctctttcctttagaaattacccagtcttgggtatttcttcatagcagcatgagaatggactaatacaataaattggtaccgagctagtgggacattggtagaagatacctgagaatgtggaagagactttggaactgggtaatgggcagaggttgcaacagtttggaggactcaggaaaagacagraaaatgtgggaaagcttggaacttcctagagattttgaaactgcctttgcaaaattataactgaggaaattatgacagtgaaagaaaccagacctaactgattccatcttgcttctaaactttaagctgtccttgttcattccttggtgtaggccgaactaactttaggtaggaattcagtttatggttagactctgaaacaaagttgattaacagccctttcccaaaaatacccccttatttcctagggaccagtctgcctctgcaggattaacaaattagccacaagattagaaattacagtttagggatcgtgtagcctctggctccaagagtctgaacctcccccacttgctcctggggataacatgactattgtaaaacctaagatcagtgcttgagatattttgcagaccctgcacttga

SEQ ID NO: 937440 - DNA, 618 bp, Homo sapiens
caatatactgatttcctttcttttgagtatttacccagcagtgagattgctgaattgtatggtagctctaattctagttttttgaggaacctccaaactgttctctgtagtggttgtaccaatttatattctcaccaacagtgtatgaggattctcttttatccacatccttattagcatttgttactgcttgactcttggataatagccattttaacyggactgagatgatgtcttgtacttttgatttgcatttctctgatgatcaataatgttgagcactttgtcatatgcctgtttgccatttgcatgtcttcttttgcgaaatatctattcaaatcttttgcccatttttaaactggattattagattttttcctatagagttgtttgagctccttatatattcttgttgttaatccctagtcatgagtcatttgcaaatattttctcccattttgtgggttgtctcttcactttgttgattgtttcctttgctgtacagaagctttttaatgtggtgtgatcccatttgtctatttttgctttggttgactgctcttgtggggtattacttaggaaacttttgcccaatatcttgaagaacttccctaaaat

SEQ ID NO: 937441 - DNA, 618 bp, Homo sapiens
caatatactgatttcctttcttttgagtatttacccagcagtgagattgctgaattgtatggtagctctaattctagttttttgaggaacctccaaactgttctctgtagtggttgtaccaatttatattctcaccaacagtgtatgaggattctcttttatccacatccttattagcatttgttactgcttgactcttggataatagccattttaactggactgagatgatgtcttgtacttttgatttgcatttctctgatgatcaataatgttgagcactttgtcatatgcctgtttgccatttgcatgtcttcttttgmgaaatatctattcaaatcttttgcccatttttaaactggattattagattttttcctatagagttgtttgagctccttatatattcttgttgttaatccctagtcatgagtcatttgcaaatattttctcccattttgtgggttgtctcttcactttgttgattgtttcctttgctgtacagaagctttttaatgtggtgtgatcccatttgtctatttttgctttggttgactgctcttgtggggtattacttaggaaacttttgcccaatatcttgaagaacttccctaaaat

SEQ ID NO: 937442 - DNA, 835 bp, Homo sapiens
attggctaattaatcatggtgttcctagaagtgaaattgataggaagtctactgcattcctacttaatttatgtcagcagaaaacttataggtcaaatggacaaaagactaatttgaattataaaaacagaaaatcatggtccgtcaatcaatttccagacttgagtcgttttacagatgcaaaaccccttgaatgaaggggagcctgagtccccttgcggaaggaacccactgcattactgataatttatgcagcgagtctttctcccatccttccccaaggagacctctagccttttacaagggtaactgtgcactggagaaagggaaatgatcagacattctgctgactgctggacactggctccaagctgttgttgattccaggggccccaaaatgtcattgtggccctccaattaaaataggggcttatgrggttaaggtaattaatggaattttagctcaggtctgacttacagtggatccagtgggtctctggactcatcctgtggtcatttcccagtgccagaatgcataattggcatagacacacttagcagctagcagaaccccctacattggctctctgacaggtagagtgagggctattgtcgtgggaaaggccaaatggaagtcattagagctgactctacctagaaaaatagtaaatcaaaaacaatatgtcatctctagagggattgtggagattagtgccaccatcaaggacttgaaagatgcaagggtggtgattcccaccacatctccgttcaaccctcccatttggcctgtgcagaagtcaaatggatcttggggaatgacagtggattattgtaa

SEQ ID NO: 937443 - DNA, 835 bp, Homo sapiens
attggctaattaatcatggtgttcctagaagtgaaattgataggaagtctactgcattcctacttaatttatgtcagcagaaaacttataggtcaaatggacaaaagactaatttgaattataaaaacagaaaatcatggtccgtcaatcaatttccagacttgagtcgttttacagatgcaaaaccccttgaatgaaggggagcctgagtccccttgcggaaggaacccactgcattactgataatttatgcagcgagtctttctcccatccttccccaaggagacctctagccttttacaagggtaactgtgcactggagaaagggaaatgatcagacattctgctgactgctggacactggctccaagctgttgttgattccaggggccccaaaatgtcattgtggccctccaattaaaataggggcttatgaggttaaggtaattaatggaattttagctcaggtctgamttacagtggatccagtgggtctctggactcatcctgtggtcatttcccagtgccagaatgcataattggcatagacacacttagcagctagcagaaccccctacattggctctctgacaggtagagtgagggctattgtcgtgggaaaggccaaatggaagtcattagagctgactctacctagaaaaatagtaaatcaaaaacaatatgtcatctctagagggattgtggagattagtgccaccatcaaggacttgaaagatgcaagggtggtgattcccaccacatctccgttcaaccctcccatttggcctgtgcagaagtcaaatggatcttggggaatgacagtggattattgtaa

SEQ ID NO: 937444 - DNA, 777 bp, Homo sapiens
ggctcatacctgtaatcctaacactctgggaggccgaggcgaagggatcacttgagcctaggatttcgagaccagcctgggtaacatggcaaaacccaatctcaaaaaggaagagagacagagagagagggagggagagagataaggaaagaaagaaagaaaagacagagctctctgctggtaataatactaacaaatgttaatgtttctaaatttagttgatctacatgactcagtgaatcagtattttcccagtggacagtggatgatgtcacaaagtcatgcataggtaaatgatctgtttaaagtgcaagacagaccaatgtaacaagggrtgaaaagttcattgatctggtttcagattccagggccactaatctgtaaaatactaccacttgtaaagttttggtatagcggatcacaaagagggccacaattaaatgaaaggctaataaaatactcttcccttttccaactacatgtctgtatgataatggattttcttcatatacttaaaccaaaacaacatattgcaacagcttgaatacaggagcaattatgagaatccaattatcttctattcagccagacactaaagaaattcgtaaaaatgtaaaataatgcccgtttctcataaaattgttttgaaaagatacttattttttgtagtaattatattattttgttaatatgtattgggctcatcattttaaattagttattaatatttttaagaatctcacagttttaattttaatacagtaagtatatatacat

SEQ ID NO: 937445 - DNA, 579 bp, Homo sapiens
gacctcctagggacatttggctggtaagggaagaatgcctcaagtgagcatgtgcacaactccagtaaacacactgtgcatgctcccctcccaagcactagcaggccactatgcatgtggacagtccaccccaagggaagaatccggggaggagggatgcaatcctggaagcaggccaacatatgaaaccccaagtcaaagagcaaactatgcacttgatctcycaagtcactcacttggccttcttccaagtgtactttccttcctttcattcctgctctaaagctttttaataaactttcactcctgctctaaaacttgccttagtctctccttctgccttatgcctctcagtcgaattctttcttctgacaaggaagaactgaggttgctgcagacccatatggattcgctgctgctgctaacatcacctaccagcccctctccacgtaagctcttatttcttacctttttttttcccctactacctggaattgggcccgacttcataggttaaggacacagtcctctacaagactgtccttttatcagatactagctgcaagttcagggtacccc

SEQ ID NO: 937446 - DNA, 579 bp, Homo sapiens
gacctcctagggacatttggctggtaagggaagaatgcctcaagtgagcatgtgcacaactccagtaaacacactgtgcatgctcccctcccaagcactagcaggccactatgcatgtggacagtccaccccaagggaagaatccggggaggagggatgcaatcctggaagcaggccaacatatgaaaccccaagtcaaagagcaaactatgcacttgatctcccaagtcactcacttggccttcttccaagtgtactttccttcctttcattcctgctctaaagctttttaataaactttcactcctgctctaaaasttgccttagtctctccttctgccttatgcctctcagtcgaattctttcttctgacaaggaagaactgaggttgctgcagacccatatggattcgctgctgctgctaacatcacctaccagcccctctccacgtaagctcttatttcttacctttttttttcccctactacctggaattgggcccgacttcataggttaaggacacagtcctctacaagactgtccttttatcagatactagctgcaagttcagggtacccc

SEQ ID NO: 937447 - DNA, 602 bp, Homo sapiens
cttgagtccaggagttctagaccagtctgggcaatatggcaaaaccctgtctctacaaaaaatacaaaaaggagctgggtgtggtggcatgcacctgtagtcccagctactcaggaggctgaygtgggaggatcacctgaggccaggaggttgaggctgcagtgggctgtgattgcaccactgcacttcagcctggtttggagtgagaccagcctggctggagtgaaacagagtgagaccctgtttcaaaaaacaagaggaagaagaaggaatagtagaattatcactgtttgctatccctaatgaaataacacatctaggcaacaatcctggatgctgctgaaaccattagctacaaagccagtggagagaatggggagatctaagggggatgaaccaggctaacagcacttaaacccacttatcaatcttagcatcattagaagtgaggtattccaacattacgcacctcctgatgggatacaatagtaagtacgcagcaccgcgtatattcttaaagaaacttgaacttgaatctagcttgaatctctctagtgcttactaccagtcttcagaaatgtggggaataggagaacaagtga

SEQ ID NO: 937448 - DNA, 623 bp, Homo sapiens
accagagagatttcaatgtgggaagggctcacctagctgttgctgactatgaaggtggaggaaggggggccatgaggcaaggaatacaggcagcctctagaaactggaaaaggctaagaactggattctcccctagagccttcagaaaggaatgcagccttcaacttaaccctagtgagacccatcctggacttctgtccatagaattaaaagataacaaatgcatattatttcagccattaagtttatggtaatttgttgcagcagtcacagtaaactaatacactgcctgtccaaatagtgaacttggctccatgcattgatggagaagaaagacacccgagggctccattctgcaggatgagtctgcagggatctccttgccagctatggaagtcagtatgacagcttcagctacctacagtccacttgccaggtgattattattattmttattattaatttgcactatcgcatcccagtgtgtgcctccagagccatctattttctttattttttcactgcctaaactgcttataactgagagtcacaattgcagagctattatcaattaatttgctagcagcaaaagtcggtgtgactcacaatcaggcagccctgcc

SEQ ID NO: 937449 - DNA, 609 bp, Homo sapiens
ctctgttactcaggctggtacgatctcagctcactgcaacctctgcctcccgggttcaagtgattctcctgcctcagcctccccagtagctgggattacagccgtgcaccaccacacccagctaatttttgtattttcagtggagacggtttcaccatgttggccaggctggtgtcaaactcctgacctcaagtgatccacctgccttggcctcccaaagtgctgggattacaggtgtgaaccaccacacccggcctggagagcacttcttgagggctggatgaaaacaactgtgactgcagcagaaaggttgagggaggattcgaatggtgacaaagcccttagcctggtctttttgccatgatccaggtcagaatgattacgtaaggctggaatatttgcaggatygtcttagaattcatgcttgaaaatcaaacaatcattccaacatctgggatagcctctctgcattacgtagcatgatatgggctggaatattttatttttatttttgagacagggtctttttttgttacccaggctggagtgcagttgtgcagtcatggctcactgcagccttgatctcctgggctcaagcaatcctcccac

SEQ ID NO: 937450 - DNA, 594 bp, Homo sapiens
atcttatatttggaagaacctaaagactccacaagaaaactattagaactaataaacatgttcagtaaagttgaaggatagaaaatcaacatacaaaaatcagtaatgtttctgtatgccaacagtgaataatgtgaaaaagaaatttaaaaagtagtcctrtttacaatagccacacataaaataaaatgcctaggaattaaccacagaagtgaaagatctctatgatgaaaaccatagaatactgatgaaagaaattgaagagcacaccaaaaaaatggaaaaaaattttatgttgttcatggattggaagaattaatattgttaaaatgtccatactacccaaagcaatctatagattcaatgcaattcctatcaaaataccaatgacattcttcacagaaatagaaaaaacagtcctcaaatttatatggaactacaaaagacccagaatagcgaaaactatcctaagcagaaagacgacgttgcttgacttcaaattatactacagagctatagtaaccaaaacagcatggtactggcataaaagcagatacatagaccagtggaacagaacagagagcccagaaacaa

SEQ ID NO: 937451 - DNA, 679 bp, Homo sapiens
aaaaatagagaaacactgcataaagctaaaaatgaagatcctgatcatgtaccgaggatggatcccttggtgttgcagtgaacacctgccacttaatgctatgtgggtcaggaaacaagcaaggatctatcaggatgaggaactgaaaatgaaaaggaactatgaatattcaacatgttggctgcagaaatttaagaaaaaacatgaaaccaaattttttaatgtggtgacaaagcatcatgaagcagcaaagaaattcattggtgagtttgccaagrtcattgctgacaaaaatctgatgccagaacaagtctataatgctgatggaacatcactgttttggttttattgctccagaaagacacaactacagctaatgagacagcccctccaggaactgaggacatcaagggcagaacaactttgctgggatgtgctaatgcagcaggcatgcataagcgtaaacttgcatgacaggcaaaagtttgtgtccttgctgttttcaagcagcgaatttcttaccagaccattattatgctaacaaaaaggcatgtttaactagggatatcttttctgattggtctcacaaacattttggacctgtggcttgtgctcactgcagggaagctgggctggatgatgactgaaatattttgttataccttgacaacttttctgt

SEQ ID NO: 937452 - DNA, 671 bp, Homo sapiens
attactaccattcatctcgagaactgttccatctcccaaactgaatgtccatactcattaagcaacagctcccatttctcctcctcctcccagaccccagaaattactgttctactttctttctctacaaatttgactwctctaggtacttcaaataattggaatcatatgctatttgctcttttgtgactgtcatatttcagttagcataatgtcctccaggttcatccctgctgtagcatgagtcagaatttcttttctttttaaggctaaataatattctattatatgtatataccacattttccttatccatttatcaatcagtgaacatttgggttgtttctgcctgttggctgttgtgagtaatgctgctgtgaacatcagtgtataaatatctgttctgcatacatcaaaataataagagccatgtatgacaaacccacagccaatatcatacctaatgggtaaaagccggaaggattccccttgaaaaccgacacaagacaagaatggcctctctctcaccattcctattcaacatagttttagaagttctggccaaagcagtcaggcaagagaaagaaataaatgacatccaaataggaagagaggaagtcaaactatccctgtttgcagatgacatgattctgtatcctgaaaaccccaaa

SEQ ID NO: 937453 - DNA, 711 bp, Homo sapiens
tgatattaatatggttgtgcaactattactaccattcatctcgagaactgttccatctcccaaactgaatgtccatactcattaagcaacagctcccatttctcctcctcctcccagaccccagaaattactgttctactttctttctctacaaatttgacttctctaggtacttcaaataattggaatcatatgctatttgctcttttgtgactgtcatatttcagttagcataatgtcctccaggttcatccctgctgtagcatgagtcagaatttcttttctttttaaggctaaataatattctattatatgtatataccacattttccttatccatttatcaatcagtgaacatttgggttgtttctgcctgttggctgttgtgagtaatgctgctgtgaacmtcagtgtataaatatctgttctgcatacatcaaaataataagagccatgtatgacaaacccacagccaatatcatacctaatgggtaaaagccggaaggattccccttgaaaaccgacacaagacaagaatggcctctctctcaccattcctattcaacatagttttagaagttctggccaaagcagtcaggcaagagaaagaaataaatgacatccaaataggaagagaggaagtcaaactatccctgtttgcagatgacatgattctgtatcctgaaaaccccaaagtctcgcccccaaagc

SEQ ID NO: 937454 - DNA, 578 bp, Homo sapiens
ctcagagttagggaatgtgctagaagggatcatggagagaaggagatggatgtgtggagggccagagttttgactgtttaaggttgtgtcaggcaactatggattttctatgttttagccaaggttgtaatatcagtcatcttttttattttttaagtttaattcatgagatactatataaagttaaatttaaattttatctaataagaaatcaagcatcattgtaagctacatagtggaatttcttcaatgtaatgctctaatttactctgattcttttttttttttttttttttgagttggagttttgctctgtcgtccaggctggagtgcagtggcgtgatctcagctcactgcaacctcctcctcctgagttcaagcgattctcctgcctcagtctccygagtaggtgggattacagtagctgcgattatagcctaccaccatgcccagctagtttttgtatttttagtagagacggggtttcaccatgttggccaggctggtcttgaactcctgacctcaggtgatccacccacctcggccttccaaattgctgagattacaggcatgagcca

SEQ ID NO: 937455 - DNA, 753 bp, Homo sapiens
tactgttattaataatgtattggtagtccgggcatggtggttcatgcctgtaattccagcactttggaaggctgagacaggaggatcactttaggtcaggaattcaagaccagcctggccaacacagtgaaaccctgtctctactaaaaatacaaaaattatctggacttgggggygaatgcctgtagtcccagctactcgggaggctgaggcggcagaatcacttaaatctgggaggcagaggttgcagtcagccaagatcgcaccactgcgatccagcctggacaacagagtgagactctatctcaaaaaacaaacaaacaaacaaacaaaaacatatataatgtattggtatatttaatctgtcttaaattttacatattactctttcttacattaatttagataaccaaatattactctaaatattattgctcatatgtatatatatttgacaaataatactttatatatgtgtgactgtgtatgttttatatatgtatacacacatatatatatacatgtatgtatatgtataattcagagcaggaaacaaattttaacacaatttcttttggattgtccttgttggcagaggataaaactatcaactcttgtattcaatttggttaatatttttaaagtgatgacttttcttcctagcaagaaaataatgggaagataagaaacatttaaatgatttggtaaacaagtgtggttgttgctaaattagaaagcagtctgcaagatgca

SEQ ID NO: 937456 - DNA, 639 bp, Homo sapiens
gtccttcccaaggtgggagtgatggtgcaacattccattactctacagcagcatggccaggcggggcagcaaaccttgttcactccaatgcaatgtgctcacttttgacccttttgaaaaccctcctgattcaacttgtgggagagaggagcaggcccctctatagtcatcatcgtacaaacaacacgctcctgatattaggggacctggctgcaccctccacatggaccatcttctgggaaggtgagacatccatctgctttcatgacctttttagacagtrggtcagtgggaagaggggaggacccaggattggcctgagctgcttctaaggacagcctggaatcaacatcatgactcctcaggggtttggtgtacttgggtctaaccttctagggggtttaatcagagagatggaacatgcaggaggcatgggatagttaggatttccgaacagaggaacattcaccacaggcaggtggcttcatgggggtggggcctgtctaggccatcagggtggaagcaggacccctctcagcagccgagggaagggtatggtgaccagttcctgccctccagagagagagagagagagagagagagagagaggttattccagcaaggaggaggcagattgtc

SEQ ID NO: 937457 - DNA, 631 bp, Homo sapiens
catattctgcccagccaagggctctggcattcagatgagggagagggagaggaaagaggagagaatccagtgagaccaatccatgaagtgtcgggaggaccctggaagcaaaggctctggactcaggtggcatcaatgggactaccagtttccagtgaatatgtgggagtggcctaggtccagctcartcagaagcccatttgttcaaggccctggtattactgaaggcccagccctgtctcacctgccagaaagcacgtggcctctccctggctaggctaagggctggttgacggcatcataaaaggaatctgcctgggagccctcaatttgtttcagtttcctcccccaaggccaagaagggattgggttgcctctgttgttgttgctgctgctgctgctgctgctgctgctgggggttggaaaagaggaatttgtgtgaccagatccccttattgtatagaagaagagaaatgtgagcattcagagatggtgagatgtcagacacccagccacacagccagtgagagacatgttggggacagggccaggcctgccagttcatggcccaggggtctttctcatgagatcaactgaccagtgtgtcttagcacctgccatgcaaatagaa

SEQ ID NO: 937458 - DNA, 721 bp, Homo sapiens
gtgccaatgtgctactaatggctgccagaattaaaatactttctccatgtctagaatatatttagacttctaaaatgtgaattagaaaaattacacaattgagaaaaaaatgctacgtttccccttctcttttctccctcctttcccatgttaataattaaagtatacaccataaagaagtctgactacaatgtagtcgattacaaagatttatgaacaagatagagattctgaagtaaatcagaaagttaaaaaattatcgattcccaggtaagatgaccaaataggaacagctccggtctgcagctcccagcaagaccaatgcakaaggtgggtgatttctgcatttccaattgaggtacccggttcatctcattgggatgggttagacagtgggtacagcccacagagggcaaggagaagcagggtggggcatcgctgcacccaggaagcgcagggggttagggaactccctcccctagccaagggaagctgtgagggaccctgccctgagcgactatgcactctggctcagatacaacacttttccccatggtcttcacaacccacagaccaggagattcccttgggtgcttacaccacaacagccctgggtttcaagcacaaaactgggtggtcatttgggcagacaccaagctagctgcaggagttttttttccataccccagtggcacctagaatgccagcgagacagaaccat

SEQ ID NO: 937459 - DNA, 558 bp, Homo sapiens
tttgattatctggcatatttcatttctcgaaacttgcaaaataaaaaatgccatttatagatagtctagggaaagaaaaaacatgcagttatcctattaagagcagatcatgagtctcaggagtcaataagtaatttgtcaaaagtatactgcacaaaatgtatccttmatagagcttataatcagaagattgtgtactaggcaatgaattttatatccaaaataatcaaatagatggatttcttatagcaaaaaaagctatctattttatatttttaaacttttattttaggttcgggggtacttgtgcaggtttgttatataggtaaactcatgtcatgggggtttgttgtacagattattcgtcaatcaggtactaagcctattaccaatagttatttttctgctcctcttcctcctcccacactccaccctcaagtaggccccagtgtctgttgccccctctttgtgtccatgtgttctcatcattcagctttcacttataactgagaacatgtgatgtttgattttctgttcctgcattagtttgctaaggat

SEQ ID NO: 937460 - DNA, 575 bp, Homo sapiens
gggatgcagggacagtttaacatatggaggtcaataaatgtgatgcaccacataaacagaattaaaaacaaaaattatatgatcatctcaaaagatgcataaaaagcatttgacaaaatccagaatccctttatgattaaaaccctcagcaaaattggcatagaaggaatatacctcaaggtaataaaggccatctatgacaaacccacatccaacattatactaaatggggaaaagttgaaagcattygccctgagaactggaacaagacaaggatgcccactttcaccacttctattcaacatagcactggaagtcctagccagagcaatcagacaagagaaataaataaaagacatctaaatcagtaaagaggaagtcaaattttcacggttcactgatgatatgatcgtatacttagtaacctctaaaaactcatcaaaaaaagctcccagatttgataaatgaattcagcaaagtttcaggatacaaaataaatgatcacaaaccagtagcgctgctatacaccaacagcgaccaagctgagaatcaaatcaagaactcaacctctttta

SEQ ID NO: 937461 - DNA, 588 bp, Homo sapiens
atgattaaaaccctcagcaaaattggcatagaaggaatatacctcaaggtaataaaggccatctatgacaaacccacatccaacattatactaaatggggaaaagttgaaagcatttgccctgagaactggaacaagacaaggatgcccactttcaccacttctattcaacatagcactggaagtcctagccagagcaatcagacaagagaaataaataaaagacatctaaatcagtaaagaggaagtcaaattttcacggttcactgatgatatgatcgtatacttagtaacctctaaaaactcatcaaaaaaagctcccagatttgataaatgaattcagcaaagtttcaggatacaaaataaatgatcacwaaccagtagcgctgctatacaccaacagcgaccaagctgagaatcaaatcaagaactcaacctcttttacaacagctgcaaaaaaaataaaatacttaggaatatacctaacaaaggaggtgaaagatctctacaaggaaagctacaaaacactgctgaaagaaatcacaggtgatacaaacaaatggaaacacatcccatgcttatggatggg

SEQ ID NO: 937462 - DNA, 588 bp, Homo sapiens
atgattaaaaccctcagcaaaattggcatagaaggaatatacctcaaggtaataaaggccatctatgacaaacccacatccaacattatactaaatggggaaaagttgaaagcatttgccctgagaactggaacaagacaaggatgcccactttcaccacttctattcaacatagcactggaagtcctagccagagcaatcagacaagagaaataaataaaagacatctaaatcagtaaagaggaagtcaaattttcacggttcactgatgatatgatcgtatacttagtaacctctaaaaactcatcaaaaaaagctcccagatttgataaatgaattcagcaaagtttcaggatacaaaataaatgatcacaaaccagtagcgctgctatacaccaacagcgaccaagctgagaatcaaawcaagaactcaacctcttttacaacagctgcaaaaaaaataaaatacttaggaatatacctaacaaaggaggtgaaagatctctacaaggaaagctacaaaacactgctgaaagaaatcacaggtgatacaaacaaatggaaacacatcccatgcttatggatggg

SEQ ID NO: 937463 - DNA, 556 bp, Homo sapiens
atatgtacatatatacacgcatatacatatatgtgcatatatacacgcatatacatatatgtagatatatacacgcatatacatatatgtacatatatacacacacatatatataggtctttatagtcaacaatttctagtaacaagaatattaaagagaaatggaaagtttaggctatttgatattcagtataaccagatgagaatgaactgctgtgttactgtttaaactaattttggctagaacaagtaaagccttactctttctagagcataatgcatttaacgatattgaatttcttttttaatttacctcaagtactttcttttgtccaaggacttatgcttcagacagtcaggagtcatacayagcacagaacattgttgtgggaggttcagataattagtagagtatacatttgcaatttgttcaaatactgtacttgaattatgctagccacacatcagaaagttcccaaataagcccccaaataaatcataataaaacaaaatatataatattctttcttgtaaaacgttagtttggagaaagttt

SEQ ID NO: 937464 - DNA, 627 bp, Homo sapiens
aggcccagtgtctgttgtgaccctctttgtttccacgtgtactcaatatttagctttcacttgtaagtgaaaacctggtattttgttttctgtttgtgcattaactcacttaggataatggcctccagctgcatccatgttgctgcaagggacatgatttatttctttatggctgtgtagtattccatggtgtrtatgtaacacattttttttaaaattcagtccaccgttgatgggtatctaggttgattccatgtctttgctattgtgaatggtactgtgataaacatacaagtgcatgcgtcttcttggtagaatgatttatatccttagggtatatacccagtaatgggattgctgggtcaaatggtagttctgttttaagttctgaatctacaaggaatttaagcaaatcaacaagcagaaaacaaccccatttaaaaatgggcaaagggcataaacagacacttatcaaaagaagacatacacttggccaacaagcatatgcaagaatgctctacatcactaatcattagagaaatacaattcaaaaccacagtgaggtaccatctcacaccagtcagaatgactattattaaaaagtaaaaaaaataatggatgttggca

SEQ ID NO: 937465 - DNA, 793 bp, Homo sapiens
actgcccttctcaggcttgctttacctgtccatttcctttcatcgttaggcaagtaagtaccaagaggcatgcaaatggatctcctgggtgccaaacatattcttgcctgccccagttgtgtaaaatcagccctctgatgagggttggtccctatgcataagaatcatgaaatgagcagatggaagctgtagcttactctatgtattcaatgtactctagctgtgttctctggctggaatgttcccccttgggtgaccaggactgctaaatccacacagtccaacattgtgagaaaggaaagcataagttttctaagtggttccttaagattgatggtagctggactgcttccaccccttgatttacatgcttatgtattctgaatattggaaacagagcccatgtatagatctttagttcaaattatctgctgtgtcctggagactggyacagagtccttgtaacatacaacttctgagctggtgcttcagcctggtcttctgcaagctattccaatgctctatcaggccagcagtgtctgaatggtgagatatactatatggccagtgaatctcatggtctatagtctcttactgtctctgccgtatagggtcccatggtctgattctcagatatgtaggaccatatgttggtggatcaaacactccacttttaggaatattttccctcacagctctttttcaacattaaccctgagtgaaaatacagtatagccatccactttcagctttgaccacagaatgaaccaacccattcatttgtatttcatgg

SEQ ID NO: 937466 - DNA, 614 bp, Homo sapiens
actgcagaacaacatttttctttttctttataataaggcaattttcacataacataaagtccacaattttaaccattttaaagtatacaatgcagtaaacttttgttcattcacaatgttgtacaatcatcaccacaatctaattccagaatattttcatcatcccaaaagaaaccctacacccattaagcaatcacctctcttctctccacccacctccagtcaatcgttcatttgtttkctgtctctatggatttgcttatgcttgacctttcatagaagtggaatcatacaatatgtggtctttcatgactggtttatttcacttagcatgatgttttcaaggtttatctatatatctatatggtggtatgtattaacatcaatactttattgcttgtatagctgaataatattccattgcatagataaaccaccttttatttttccattcatcaggtgatgagtatttgacttgttccattttctggctattatgaataaactgatatgaacatgtgtataacaagcttttgtttgaaaatgtattttcaattctcatatgcctaggagtgaaattgccgggtcatatggtaatggtatgtttaacttct

SEQ ID NO: 937467 - DNA, 614 bp, Homo sapiens
actgcagaacaacatttttctttttctttataataaggcaattttcacataacataaagtccacaattttaaccattttaaagtatacaatgcagtaaacttttgttcattcacaatgttgtacaatcatcaccacaatctaattccagaatattttcatcatcccaaaagaaaccctacacccattaagcaatcacctctcttctctccacccacctccagtcaatcgttcatttgttttctgtctctatggatttgcttatgcttgacctttcayagaagtggaatcatacaatatgtggtctttcatgactggtttatttcacttagcatgatgttttcaaggtttatctatatatctatatggtggtatgtattaacatcaatactttattgcttgtatagctgaataatattccattgcatagataaaccaccttttatttttccattcatcaggtgatgagtatttgacttgttccattttctggctattatgaataaactgatatgaacatgtgtataacaagcttttgtttgaaaatgtattttcaattctcatatgcctaggagtgaaattgccgggtcatatggtaatggtatgtttaacttct

SEQ ID NO: 937468 - DNA, 523 bp, Homo sapiens
acctggttcatctcactgggactggttggacagtgggtgcagccctgtgagggtaagccaaagccagggtagttcgttgcctcacctgggaagcgcaaggggtcggggaactccttctcccagccaagggaagccattagggactgttagggactgtatcttgcaatccagcccagatactgtgcttttcccacagtctttgsaacccgcagaccaggagattccctccagtgcccacgccaccagggccctgggtttccagtacaaaactggatggctgttttgggcagacacaaagctagccgcagtttttttttttcataccccagtggcacctgaaacaccagtcagaaccattcactcccctggaaagggggctgaagccagggagccaagtggtctggttcggtgggtcccacccccacagagcccagcaagctaagatccactggcttgaaattcttgctgctggcacagcagtctgagcttgacctgggatgctccaacatggggggaggggcgt

SEQ ID NO: 937469 - DNA, 696 bp, Homo sapiens
gcttgaaattcttgctgctggcacagcagtctgagcttgacctgggatgctccaacatggggggaggggcgtccaccattgctgaggcttgagtaggcagttttaccctcacagtgtaaacaaagccactgggaagttcaaaatgggcggagcccactgcagttcagcaaggcaactgcagccagactgcctctctagattccctcctctctgggcagggcaactctgaaaaaaaggcagcagccccagtcagggactaacagataaaacccccacctccctgggacagagcactttggacaaagggcagttgtgggcgcagcttcarcagacttacttaaacgtccctgcctggcagctctgaagagagcagcagatctcccagcacagcattggagctctgataaaggacagattaactcctcaagtgggtcctcccagtaggtgccaacagacacctcatacaggagagctctagctggcatctggcgggtacccctgtaggacgaagcttccagaggaaggaacaggcagcaatctttgctgttctgcagccttcaccagtgatacccaggcaaacagggtctggactggacctcaagtcaactccagccaacctgcagcagagggcctgaatgttaagaaggaaaaccaccaaacagaaaggaatactatcaacatcaacaaaaaggacgt

SEQ ID NO: 937470 - DNA, 696 bp, Homo sapiens
gcttgaaattcttgctgctggcacagcagtctgagcttgacctgggatgctccaacatggggggaggggcgtccaccattgctgaggcttgagtaggcagttttaccctcacagtgtaaacaaagccactgggaagttcaaaatgggcggagcccactgcagttcagcaaggcaactgcagccagactgcctctctagattccctcctctctgggcagggcaactctgaaaaaaaggcagcagccccagtcagggactaacagataaaacccccacctccctgggacagagcactttggacaaagggcagttgtgggcgcagcttcagcagacttayttaaacgtccctgcctggcagctctgaagagagcagcagatctcccagcacagcattggagctctgataaaggacagattaactcctcaagtgggtcctcccagtaggtgccaacagacacctcatacaggagagctctagctggcatctggcgggtacccctgtaggacgaagcttccagaggaaggaacaggcagcaatctttgctgttctgcagccttcaccagtgatacccaggcaaacagggtctggactggacctcaagtcaactccagccaacctgcagcagagggcctgaatgttaagaaggaaaaccaccaaacagaaaggaatactatcaacatcaacaaaaaggacgt

SEQ ID NO: 937471 - DNA, 733 bp, Homo sapiens
agagcccagcaagctaagatccactggcttgaaattcttgctgctggcacagcagtctgagcttgacctgggatgctccaacatggggggaggggcgtccaccattgctgaggcttgagtaggcagttttaccctcacagtgtaaacaaagccactgggaagttcaaaatgggcggagcccactgcagttcagcaaggcaactgcagccagactgcctctctagattccctcctctctgggcagggcaactctgaaaaaaaggcagcagccccagtcagggactaacagataaaacccccacctccctgggacagagcactttggacaaagggcagttgtgggcgcagcttcagcagacttacttaaacgtccctgcctggcagctctgaagagagcagcrgatctcccagcacagcattggagctctgataaaggacagattaactcctcaagtgggtcctcccagtaggtgccaacagacacctcatacaggagagctctagctggcatctggcgggtacccctgtaggacgaagcttccagaggaaggaacaggcagcaatctttgctgttctgcagccttcaccagtgatacccaggcaaacagggtctggactggacctcaagtcaactccagccaacctgcagcagagggcctgaatgttaagaaggaaaaccaccaaacagaaaggaatactatcaacatcaacaaaaaggacgtccactcaagag

SEQ ID NO: 937472 - DNA, 696 bp, Homo sapiens
gcttgaaattcttgctgctggcacagcagtctgagcttgacctgggatgctccaacatggggggaggggcgtccaccattgctgaggcttgagtaggcagttttaccctcacagtgtaaacaaagccactgggaagttcaaaatgggcggagcccactgcagttcagcaaggcaactgcagccagactgcctctctagattccctcctctctgggcagggcaactctgaaaaaaaggcagcagccccagtcagggactaacagataaaacccccacctccctgggacagagcactttggacaaagggcagttgtgggcgcagcttcagcagacttacttaaacgtccctgcctggcagctctgaagagagcagcagatctcccagcacagcattggagctctgataaaggacagattaactcctcaagtgggtcctcccagtaggtgccaacagacamctcatacaggagagctctagctggcatctggcgggtacccctgtaggacgaagcttccagaggaaggaacaggcagcaatctttgctgttctgcagccttcaccagtgatacccaggcaaacagggtctggactggacctcaagtcaactccagccaacctgcagcagagggcctgaatgttaagaaggaaaaccaccaaacagaaaggaatactatcaacatcaacaaaaaggacgt

SEQ ID NO: 937473 - DNA, 760 bp, Homo sapiens
ttcaaaggtagataaatccacgaagatgaggaaaaaacagcaaaaaaaggctgaaaattccaaaaagcagatcacctcttctcctccaaaggatcacaactccttgccagcaagggaacagaactggacagagaatgagtttgacaaattgacagaagtaagcttcagaaggtgggtaataacaaactcctccaagctaaaggagtgtatgttctaacccaatggaaggaagctaagaaccttgaaaaaaggttagatgaattgctaactagaataactagtttacagaagaatataaatgacctgatagagctgaaaacaacagcaygagaacttcataaagcatacacaggtatcagtagccgaattgatcaagtggaagaaagggtatcagagactgaagatcaactcaatgaaataaagcaagaagacaagattagagaaaaaagagtgaaaagaaacaaacaaagcctccaagaaatatgggactacgtgaaaaggccaaatctacatttgactggtgtacctgaaagccacagggagaatggaaccaagttggaaaacactcttcaggatattatttaggagaacttccccaacctagcaaggcaggccaacattcaattcaggaaatacagagaacgccaccaagatactccttgagaagagcaactccaagacacataattgtcggatccaccaaagttgaaatgaaggaaaaaatgttaagggcggccagagagaaaggtcgggttaccca

SEQ ID NO: 937474 - DNA, 734 bp, Homo sapiens
ttttacattgttggtgggagtgtaaattagtccaaccattgtggaagacagtgtgacgattcctcaaggatctagaactagaaatatcatttgacccagccatcccattactggatatatacccaaaggactataaatcattccactataaagacacatgcacaygtatgtttactgcagcactgttcacgatagcaaagactcagaaccaacccaaatgcccatcatcaatgatagactggataaagaaaatgtggcacgtatgcaccatggaatactatgcagccctaaaaatggttgagttcctgtcctttgcagggacatggatgaagctggaagccatcattctcagcaaactaacacaagaacagaaagccaaacaccgcatgttctcactcataagtgggagttgaacaatgagaacacatggacacagggaggggaacatcacacaccagagcctgtcagagggtggggggctaggggagggacagcattaggagaaatacctaatgtagatgacaggttgatgggtgcagcaaactgccatggcacatgtatacatatgtaacaaacctgtacattccacacatgtaccccagaacttaaagtataattttaaaaaatttaaaaagagtcgtaactgcatcttggctaaaaacaaatgtaaatagccataactgcatcttgactttattggccctaaaagaagaagaggagtattaggttagaag

SEQ ID NO: 937475 - DNA, 609 bp, Homo sapiens
caatagggaaaaaaaataaaaaaccttgactattatttcacaccatgtacaaagatttgtttgatgggtcatagacctaaacttagagaaaaaagcttggaaaaaaatctttgtgtccttgggttaggcaaggatttcttaaataggacacaaaaagcaccataaaataatggataaatttaatttcataaaaatcaaaagcttctctcaagtgaatgaaaagaaaaccacagatggggagaaaatatttatgaaacatatctgataaaacatttgtgttcagaatgtctaaagaactcattcaagttaataataagacaatctgatttaaaggaatgggcagcaaaaaaattggagataygtcaccaaagatgatatgtaaatgtccagcaggcatatgaaaagatgctcaaaaaccgttagtgatcaggaaaatttaaatgaaatatcactacacagtcactagaataagcaaaatttaaaaggctatgacaaaaccaagtgttggcaagaaggtaaagcgactagagttctcatacattgcttagtggtgttgcaaaatggtatacacactttggaaattattttggcagtttctttttggggggg

SEQ ID NO: 937476 - DNA, 647 bp, Homo sapiens
aaatgtccagcaggcatatgaaaagatgctcaaaaaccgttagtgatcaggaaaatttaaatgaaatatcactacacagtcactagaataagcaaaatttaaaaggctatgacaaaaccaagtgttggcaagaaggtaaagcgactagagttctcatacattgcttagtggtgttgcaaaatggtatacacactttggaaattattttggcagtttctttttgsgggggtgagggggaggcaaggtcttgctctgtcacccaggctggagtgcagtggcacaatcacagcccactctagcagcctgacctcccaagctcaagcaatcctcccgcatcagcctcctgagtagctgggactacaggcgtgcatcaccatgcccagctattttttgtagagatggggtttcgccatgttgcctaggctggtcttgaacccctgggctcaagcaatctgcgtgtcttggcctcccaaagtgttgagatgacaggcgtgagccaccgcaccaggctggcagtttcttataaaattaaatgtgcatgtaccttgtgacccagcagttctgtccctagaaatgaaagcatacgtccacacaaagacttgtatgtgaatgtttctagcagctttattcacctcaaactggaaaca

SEQ ID NO: 937477 - DNA, 601 bp, Homo sapiens
acctcaggtctgtgttacattcctttgtattttctctactctggcaaactttcttgtggagtattagttatctgcagaggaaatagcgcttgtggcatagaagaaattttcttgcctgatcctctgactgtaactccgttcagagctcytgtatttagaaatttcaagacttaggactttgcataaatatatatcttttgcctaaggttctgtgtgttcctctctgcctcatgtggtttagtaggctgatcttctccttatgttgagaaatagcatatttcatccaaaaaaataacaaatctgttcatgttaacgcccctgcttggaagccttcattggcttttccttacaatcaggagagttccgattcctatgccttggagaaggggcttttcacaatccaactccttctctctccagccttatctctcactcccagttctgtcaggaaaggcagtgttatgctgccctaacaaacaaccctaacatatcagtggcttattccagtgaaagttggtcatttctgctacatgaccgttgtaggttggcagggtagctctgctcattgtagtcactaaagggctcaggctgaaggaggcct

SEQ ID NO: 937478 - DNA, 745 bp, Homo sapiens
ggatggaggtggggggatgtagatgggaaacatgcccttcactttcagtgtgatgtcaagtctgttgaggcaaaatgaaaacagcctaggccgagcgcggtggctcacgcctgtaatcccagcactttgagaggccgaggcgggcggatcacgaggtcaggagatcaagaccatcctggctaacacggtgaaaccccstctctactaaaaatacaaaaaaaagttagccaggcatggtggcaggcacctgtagtcccagctactcgggaggctgaggcaggagaattgcgtgaacctgggaggcagagcttgcagtgagccgagatctggccactgcactccagcctgggcaagagagtgagactacgtctcaaaaaaaaaaaaaaaacaaaaaacaaaaaacagcctaatagcagagcaagaccagctaaggtcaaagtcttagtgtcagaggcaaatagccccaaaggaggctggaaacagaagagaccacttcactgggtaaaacacctacagaaggtgagctcagtgctaggctctcccttctctcctctcatttcaaattcttggcattttatgcaataaatatatttaagcacctatagcatatcagaccattattttatacacattgttttatttgatcctcagaacaacactaaaagctaagtattataattaccatcttttggaggaaggggaccaagatttacagatttgctcaagatcacaccactgttaaaag

SEQ ID NO: 937479 - DNA, 668 bp, Homo sapiens
aaccctatcaatctttttgtcaccacccattacactactgccacagagcctttagatttgctgtctttttttttttttttttttgagacagagtttcgttcctgttgcccaggctggagttcaatggtgtggtctcggctcactgcaacctccacctcccaggttcaagtgattctcctgcctcagcctcccaagtagctgggatttgggattacaggcacccgacaccacgcctggctagtttttttgtattttagtagagatggggtttcagcatgttggccaggctggtstcaaactcctgacctcaggtgatccacccaccttggcctcccaaagtgctgggattacaggaatgagccactgcgcccggcccttgctgttctttttgtccagatgcacttccctgagatattgttataacttgcattatgacttttctcaggtctctgttaaaatgtcaggtcttctaagaggcttttcctgatttcccttccttattctccaacattgtcctctacttcttttctctctctcatggctcatattatcaggcattatatcatttattgatgtgcttattgtcttcaccaccatcaccactagaatataagtttcatgaagtcagggacttgatttgttttcttctctgctatattcccagtgtc

SEQ ID NO: 937480 - DNA, 597 bp, Homo sapiens
ttctcaccagacaatgtgagccctgccagcttaaagatcttggacttcccaacctccatactataagaagtaaacttctgttctttgtaagttacccagtctcaggtattttgttatagcagcacaaaacggactatgacagagacaaagccaatgcccttaccatgmgcctccaggctcctagggcttggtgccttgactcctctcagacctcacctctttctactcttcctcatggccacctgcctagcgactctggcttcctgctgtcctttagataggcctggcacactacctctttggggcctttgcccttgccacctcccctgatgagaactctcttcccagttattcaaacgcacactccctcgtcccttccctcaggtctttgcctaaacaccttcctgtcagtgagatcttccctgatcacctgtttagtactaaaacccttgactctttcacactcctaacctccaccgctttttttttctcttctgtatttaacatgctttttaaaaaccacataattaatgatttattttattgttttctcccccatcctcttaatgtgagctctatgacggcagagtttttttt

SEQ ID NO: 937481 - DNA, 723 bp, Homo sapiens
tgagtttgaatgttggcctgcctttgtaggttggggaagttctcctggataatatcctgaagagtgttttccaacttggttccattctccccgtcactttcaggtacactaatcaagcgtaggtttggtcttttcacacagtcccatgtttcttggaggctttgttcatttctttttactcttttttctctaaccttgtcttcttgctttatttcattaatttgatcttcaatcactgataccctttcttccacctgattgaatcggccattgaagcttgtgcatgcgtcatgtagttttcatgccatggttttcagctccatcaggtcatttaaggtcttctatacactggttattctagttagccattcgtctaatcttttttcaaggtttttagcttccttgcgatgggtttgaacatcctactttagctcagggaagtttgttattaccgaccttctgaagcctacttctgttaacttgtcaaagtcattctatgtccagctttgttcccctactggcgaggagctrtgatcctttggaggagaagaggcgctctggtttttagaattttcagcttttctactctggtttctccccatctttgtggttttatctacctttgatctttgatgttggtgacctagagatggggctttggtgtggatgccctttttgttgatgttgatgttattcctttctgtttgttagttttccttctaa

SEQ ID NO: 937482 - DNA, 558 bp, Homo sapiens
agttaacaatcagtagctccagagaactaataattagttctagtcaattaaaccaacttttagccttatgacagagaagatagcttgcatagctaaaatgcacagtatactcttaatttatgctacccaattccttaccaaaatatttttgatttttgtttgttttgtttcattgttaacattttgttgtagttcctgttgtgggttgtttggtaggttactatgtaccatgttatagtatttttctttttcatgtagtattctrttataagccatttccatgttcttaattttaaatgactgcatataattttacagtaataattatgtaccaggctaattattttacatatattaattattttagtctttataacagttttttgaggcaggtactattattatcctcatttaaaaatgaaaaacaaaaatgagatacagggaaggtaagtggactgttgaagattccagtgccaatacatggtagaggactgaatttgtgatggtttacttacttccttcttatccacctattcttagatattatgtagtttctta

SEQ ID NO: 937483 - DNA, 631 bp, Homo sapiens
aatcataaagcaatgttggattttgttgaatgctttttctgcatctattgaaatgatcatgtgatttttgtttttatttctgtttatgtggtgtgtcacatttattgacttgcatatgttaaaccattcctgcatccctggtatgaaacccacttgatcatggtggattacctttttgatatgttgttagattcggttagcaagtattttgttaaggattttagcatctaagttcatcaaggatattggtctgtagttttctttttttggttatgtcctttcctggttttggtattagggtgatgctggcttagtagaatgaattagggaggtttccttctttctatatcttgtggaatagtttcaaaaggattggtaccaattcttttttgaatgtytggtagaattctgctgtgaatccgtctggtcctgaacttttttttgttggtaatttttaaattaccatttcaatctcactgcttgttattggtctgttcagggtatctaattcctcctgacttaagctaggagggttgtatttttccaggaacttatctgtgtcctctaggttttctagtttatgtgtgtaaaggtgttcatagtagccttgaatgatctttcatatttcagt

SEQ ID NO: 937484 - DNA, 624 bp, Homo sapiens
ccatcttgtcttgggctttttttgttggcaattttttaaaattaccatttcagtctcgctgcttattattggtctgttcagagtttctatttcttcctggtttaatccaggagtgttgtatatggccaggaatttgtccatcttttctaggttttctagtttatgcacataaaggtgttcatagtagccttgaatgactttttttgtatttctgtggtatcagttgtaatatctcccatttcatctctaattgagcttatttggatcttctctcttcttggttagtctcactaacgttattaagtttgttaattaattttcgaataaccagctttttgttttrtttatcttttgtattactatttttgtttcaatttcatttacttctgctctgatatttgttatttcttttcttcttctggatttggatttggtttgttcttgtttctctagttccttgaggtatgaccttagattgactatttgtgctttctcagacttttagatgtgggctttagatggactttcctcctagtgccatttttgctgtatcccagaatgtgataggctgtgtcactattgttgttcagttcaaagaattttaaaagtttcatctgaatttta

SEQ ID NO: 937485 - DNA, 609 bp, Homo sapiens
cacattattctcctcagtacatgaatcattctcaagggtagaccatatatcaggccacaagacaagtctcaaaaatataaaaaaacattgaaattatatcaagtatcttctctgatcacaatagaataaaactagaaatcaataacatgaggaatttgraaactatacaaatacatgaaaattaaataatacatgcctgaatgaccagggggtgagtgaagaaattaagaaggaaattttttaagttcttgaaacacataattatggaaacacaacataccaaaacctatgcgatacagcaaaaacaatacccaaagtaaaatttataggtataagtgcctacatcaaaaaagcagaaaaacttcaagtaaacaacctaaaaatgcatcttagagaactagaaaagaaagaccaaagtgaacctaagttagtagaagaaaaaaaataatacagatcagaggagaaataaatgaaaaaaagtacaattgatcaatcaaacaaaaaagtgttttttaaataaaatccacaaacctttagccagaccaaaaagaaaagagagaagacccaaataaataaattagagatgaaaactgagacattaccactgat

SEQ ID NO: 937486 - DNA, 596 bp, Homo sapiens
aaaatcaaaccggaatttgattaagcctctagatccaacttccatgcataggaaaatctgagggcagaattatctaagtcgcagttaccattagagcacaaaagacaaaatccagcatgtgaaaggtctccagaagaaaggcgttgaatagagggcaagagtgygtgcatgaaggggagtctatcatcacagacactcaggagacagacatattgaccaaacacaatgtgtgggtcacattgcatcctgattcaaatgaactactaaaaactctgtagcacctgggaggcaattagaaatttgaacactgagtatgtattactatttgataaataatgagtaagacaaatttcaatataacactaataaggaattattaagtatgtgataatggcattgcagctatatcagaaaagataaagtgtctttgaaattcagacttgcactggttgtctataataaaaaccataaaacgtcagtggcatacgacaggaagacttgattgttcacaactctgggccgtctggctaggtggctctattgatcttggctatatgtggctgagcaattctcctttctgcctgaattgcttacac

SEQ ID NO: 937487 - DNA, 550 bp, Homo sapiens
gtgaccgcttcttatgcccctgctgtgacttgttcatcagcagcatgagcatcacacaaatctaagggatgcttcaagattactcagggcaaaagcttttatccccttgcaaagaaatacaggtttgcaatcttgatatttccagaaatgaattcactcttttcttacatccactaaacacaaccaaggcattgtggtatttttcttaaaagtataaaagtatatttattttttatttttttattatactttaagttctagggtacacatgcataacgtgsaggtttgttacatatgtatacatctgctatgttggtgtgctgcacccattaactggtcatttacattaggtatatctcctaatgctatccctcccccctccccccaccccacaacaggccctagtgtgtgatgttccctttcctgtgtccaagtgttctcattgttcagttcccacctatgagtgagaatatgtggcatttggttttttgtccttgcgatagtttgctgagaatgatggtttccagcttcatccatgtccctacaaaag

SEQ ID NO: 937488 - DNA, 550 bp, Homo sapiens
gtgaccgcttcttatgcccctgctgtgacttgttcatcagcagcatgagcatcacacaaatctaagggatgcttcaagattactcagggcaaaagcttttatccccttgcaaagaaatacaggtttgcaatcttgatatttccagaaatgaattcactcttttcttacatccactaaacacaaccaaggcattgtggtatttttcttaaaagtataaaagtatatttattttttatttttttattatactttaagttctagggtacacatgcataacgtggaggtttgttacatatgtatacatctgctrtgttggtgtgctgcacccattaactggtcatttacattaggtatatctcctaatgctatccctcccccctccccccaccccacaacaggccctagtgtgtgatgttccctttcctgtgtccaagtgttctcattgttcagttcccacctatgagtgagaatatgtggcatttggttttttgtccttgcgatagtttgctgagaatgatggtttccagcttcatccatgtccctacaaaag

SEQ ID NO: 937489 - DNA, 641 bp, Homo sapiens
taagaccccacatagctcttcgtgtcagacagcaggccctggtggaatgccttcacaaggggatctcctgaccccagggttacaaaaatttgtgggagaagcatggatcccagagtcactcactgcttccctgggtaggggaggctcccctggctccatgttgctcctgggtaagcagccatcctgccttgcttttctccattttctatgggttgagttgttttcttgatgaatcccaatgtgtgtacctagatgtttcagttcaaaatcctgtatttactcatgccttctatttctctccatgagagcagcacacattagctgcttctagttgaccatcttggccaggctcttatttatttatttaaaaatgaggtctccctctgtcacctaggctggagtgtaatggcatgatcatagttgattgcagcccttgaacyctgggctcaagtgatcttcctgcctcaacctccctgagtagctgagactacaggtacaggccaccacacccagctaatttttttttattttttagacacagggtctcactatgttgcccaggctggtctcaaactcctgccttcaagtgatccttccacctcagcctcctgagtagttgggattacaggtgcaagccacca

SEQ ID NO: 937490 - DNA, 597 bp, Homo sapiens
aagcagcagggtggtacgttgttaaaacttcagaaaccggtccggcgcggtggctcatgcctgtaatcccagcactttgggaggccgaggcaggtggatcacctgaggtcaggagttcgagaccaaccttaccgacatggagaaaccctgtctctactgaaaatagaaaattagctgggcatggtggcacatacctgtaatcccagctagtcagaaggctgaggcaggagaattgcttgaacccgggaagtggaggttgcggtgagccgagatctcgccattgtactccagcctgggcaacaagagggaatctttgtctccaaaaaaaaaaaaaaaaaaccagaaagaaagaaacatttaaaaaaaaaaaaaagaaaaacttcagaagccttctgaggttcagaggtcatgtttcggaggtcatgtttcagggtgcggtatttggagccytcccggaaacacaaaagcctccctggtgacattcttagcccctaggaagggcagtaatgacagcccacaactgacaagtactgatgaatagttcttgaaggcaaaccctgccctcagggagctctgccatagcttggcatgtcttct

SEQ ID NO: 937491 - DNA, 579 bp, Homo sapiens
cttggaaatcctcataacagcctcagaaggtaggtgtattgatttcctagggcagctataacaaattctcacaaattacgtggttgaaaacaatagcaatttgttctctcacagttcaggagtcctgaagtctgaaattacagatggcagggttggttcmttctggaggctttgagggagaatccgttccatgcctttctcctagcttctcgtggttgctagcaatgtgtaacatttcttgacttgtaaatgaatcattccaaattctgcctccagattcacatggagtttcctctgtgtgtatatctgcatgccctctctttcccttataaagacaccagtcactggatttggggcccactctcacccagtatgatctcatcttaacaaattatatccgcaaagatcctatttccaagtgttacattctgaggttccgggtggacatgaattttggggcggggcactatttgactcacttcagtacttattatacccatttaacagatgatgacccagagtctcagggaggagaaaatcccttgcataagcatcacacaatcagtttatgatacccaa

SEQ ID NO: 937492 - DNA, 579 bp, Homo sapiens
cttggaaatcctcataacagcctcagaaggtaggtgtattgatttcctagggcagctataacaaattctcacaaattacgtggttgaaaacaatagcaatttgttctctcacagttcaggagtcctgaagtctgaaattacagatggcagggttggttccttctggaggctttgagggmgaatccgttccatgcctttctcctagcttctcgtggttgctagcaatgtgtaacatttcttgacttgtaaatgaatcattccaaattctgcctccagattcacatggagtttcctctgtgtgtatatctgcatgccctctctttcccttataaagacaccagtcactggatttggggcccactctcacccagtatgatctcatcttaacaaattatatccgcaaagatcctatttccaagtgttacattctgaggttccgggtggacatgaattttggggcggggcactatttgactcacttcagtacttattatacccatttaacagatgatgacccagagtctcagggaggagaaaatcccttgcataagcatcacacaatcagtttatgatacccaa

SEQ ID NO: 937493 - DNA, 457 bp, Homo sapiens
aagatggcaaaataggaacagctccagtctagagctcccagagtgagcgacatagaagatgggtgatttctgcatttccaactgaggtactgggctcatctcacaggggagtgttggaaagtgggtgcaggacagtgggtgcagcgcaccgtgtgtgagccgaagcagggcgaggcatcgcttcaaccgggaaacgcaaagggtcagggaawtccctttcctagtcaaagaaaggggtgacagatggcacctggaaaatcgggtcactcccacccaatactgcacttttccaatggtcttagcaaacagcacaccaggagattatatccctcgcatggctcagacggtcttatgcgcacaaagccttgctcactgctagcacagcagtctgagatcaaactgcaaggtggcagcgagggaggggtgcgcgccattgcggaggcttcagtgggtaaac

SEQ ID NO: 937494 - DNA, 604 bp, Homo sapiens
atattttattgaggatttttgcaacaattttcatcaaggatataggcctgaaggtgaattgttgttgtggctattgttgtgtctctgccatgttttggtatcaagataatgctggcctcagaatgagttggagaggagtccttcctcctcatttttctggaatagtctcggtaggaatggtaccagctctttgtaatctcgtagaatttggctgtgaatccatcaggtcctaggcattttcatttagtaggctgtttattactgattcaattttggagctcattcttggtcttttcaaggagtccatttcttctttgttcagccttagragggtatatgtgtctaggaatttatctcttttaggttttctagtttgtgtgcatacaggtgttcatagtagcttctgatggtttttacttctgtggggacagtagtaacattctctttgtcatttctgattgtgtttattggatcttctcccttttcttcttaattagtctagctagtggcctatccatttttttaatgtttcaaaaaaaccagttcctggatttgttgatcttttgaatggtttttcatgtcttgatttccttcagttcagctg

SEQ ID NO: 937495 - DNA, 816 bp, Homo sapiens
aagcaggcaaaaaaatgtgaaaagatggactgtcctagcctcccagcctacatctttctcccatgctggatgcttcatgccctcaaacatcagactccaagttcttcagttttgtaacttggactggctctccttgctcctcagcctgcagacagcctattgtggaccttgtggtggtataatacttaataaactcatatatataattccattagttctgtttctctagagaacgctgactaatacagattttggtaccagcagtggttctagaagaacagaatattaaggatggagttcttttgttggtttgggggtttctggaattggctgcttaatatgattagacacaaaaatgttaaggactctacttctaatagtatggagaacactgatggtccttggcatgaactgtttagagagttagtaaaataaatacactcgacactcctgattcattgctcatgagaggcaaggagtttagtgactctatacataatacttttgaccttatgtggagaaccaaggaacatartgaagctggttggctgctcctaagttcagtggaaaaactggtgaaggaaaatgatgaactcaaggattctgtctcctggcttcagaagcagatactgagtctcaaatctgctaagatttccctcagtgagagtcttatttcagagggaggaacactgccaccaggagacacaacaaggattccattaaacaggaagttatgattgccacctgaacattttgggctcctcctacctttaagtcaacaggctaagaatggagttacagtgttgtctggggtga

SEQ ID NO: 937496 - DNA, 649 bp, Homo sapiens
accatggttgaacaatggagacaatgagaagtgtttggaccatacatatacaagcatacctaattttattatgcttcactttattgtgctttacatatgtgtgtgtatatatatatatacattcatatatatatattcatatatatgaatatataggtatatgtatgtatatatacatatacgcatatgtacatatacatgtatacatatatgtatgtatacatgtatacgtacatatatgtatacgtacatgtatgtatatgtatataggtatacgtacatgtatgcatatgtatataggtatacgtacatggatgtatatgtatataggtatacgtacatgkatgtatatgtatatatgtatacgtacatgtatgtacatgtatatatacatataagtatatgtgtatatgtatatatacatattttacaaattgaaggtttgcggcaaccctgtgttgagcaagtctattagcaaattttccaacactgtgtgctcacattgtgtctctggatcatgttttgaaaattcccacagtatttcaaactttattattattatatctgttatggcaatctgtgatcaatgatttttgatgttgctatctaattgttttgaggcatcacaaactgagtccatataagatga

SEQ ID NO: 937497 - DNA, 614 bp, Homo sapiens
cagctccctgaagcctttctgtgccacctaaggggtgaggggtgctaaaaagcactggtgaagttcaccattcagggcacccattcaccaaaaccctgagacttgatcataagtctatagagcactatcccccttcctttacaccttactactacatttttaaaggmctatttactgtagttccaaaaaaacagaattaccagaccaggaattttttaaactataattaatatgctaagggctttgatggaaaaagtagacaaaatgcaagaacaaataaataatgtaggtaaagggatagaaatcctaagaaaaaattataaagaaataccagagatttaaaaaattttaacagaaatgaaggatgccttgatggctcattagtcgagtacacatagctgatgaaagaattgctaagcttcaggataggacaatagaaactttaaaaattaaaaaacaaagaaaaaaatactgagaaaagggccaggcacagtggctcatgcttgtaatctcagcattttaggggtctgaggcaggaagatcacttgagctcaggacttaaagaccactgggctatatagtgacaccctgtctctacaaaaaatgaaaaacaa

SEQ ID NO: 937498 - DNA, 614 bp, Homo sapiens
cagctccctgaagcctttctgtgccacctaaggggtgaggggtgctaaaaagcactggtgaagttcaccattcagggcacccattcaccaaaaccctgagacttgatcataagtctatagagcactatcccccttcctttacaccttactactacatttttaaaggcctatttactgtagttccaaaaaaacagaattaccagaccaggaattttttaaactataattaatatgctaagggctttgatggaaaaagtagacaaaatgcaagaacaaataaataatgtaggtaaagggatagaaatcctaagaaaaaattataaagaaataccagagatttaaaaaattttaacagaaatgaaggatgccttgatggctcattagtcgastacacatagctgatgaaagaattgctaagcttcaggataggacaatagaaactttaaaaattaaaaaacaaagaaaaaaatactgagaaaagggccaggcacagtggctcatgcttgtaatctcagcattttaggggtctgaggcaggaagatcacttgagctcaggacttaaagaccactgggctatatagtgacaccctgtctctacaaaaaatgaaaaacaa

SEQ ID NO: 937499 - DNA, 575 bp, Homo sapiens
aaatactgaaaaaaaaagcagaatagaatatccaagaactatgggacaactacaagatgtataacatacacacaatgggaataacaaaaggaaagagataaaggaatagaagcaacatttaaagcaacaatgactgagcatttccccaaaaytgatgtcagacatcaaaccacagatccaggaaacccagagaacaccaatcaggataaatgctgaaagcactacacctaagaatagcatattcaaacttcagaaaatcaaagaaaataatgtggaaaaagtcagaggaaaaaacacttaaccctttgctgtggtttgaatgtgtcccctccaaaattcagatgttgaaacttaatagccaatgtgagagtagtaagaggtgggtgtccattaagaggttgatcaggccataagtacttctccctcatgaacggaactaaggcctttataaaagaggtttcatatagtattcagccctttagcccttccatttcttctaccatgtcaagacacagcatttcctccttccagaggttgtacgatcaaggtgccatcttggaagcagacagtagccc

SEQ ID NO: 937500 - DNA, 575 bp, Homo sapiens
aaatactgaaaaaaaaagcagaatagaatatccaagaactatgggacaactacaagatgtataacatacacacaatgggaataacaaaaggaaagagataaaggaatagaagcaacatttaaagcaacaatgactgagcatttccccaaaactgatgtcagacatcaaaccacagatccaggaaacccagagaacaccaatcaggataaatgctgaaagcactacacctaagaatagcatattcaaacttcagaaaatcaaagaaaataatgtggaaaaagtcagaggaaaaaacacttaaccctttgctgtggtttgaatgtgtcccctccaaaattcagatgttgaaacttaatagccaatgtgagagyagtaagaggtgggtgtccattaagaggttgatcaggccataagtacttctccctcatgaacggaactaaggcctttataaaagaggtttcatatagtattcagccctttagcccttccatttcttctaccatgtcaagacacagcatttcctccttccagaggttgtacgatcaaggtgccatcttggaagcagacagtagccc

SEQ ID NO: 937501 - DNA, 575 bp, Homo sapiens
aaatactgaaaaaaaaagcagaatagaatatccaagaactatgggacaactacaagatgtataacatacacacaatgggaataacaaaaggaaagagataaaggaatagaagcaacatttaaagcaacaatgactgagcatttccccaaaactgatgtcagacatcaaaccacagatccaggaaacccagagaacaccaatcaggataaatgctgaaagcactacacctaagaatagcatattcaaacttcagaaaatcaaagaaaataatgtggaaaaagtcagaggaaaaaacacttaaccctttgctgtggtttgaatgtgtcccctccaaaattcagatgttgaaacttaatagccaatgtgagagtagtaagaggtgggtgtccattaagaggttgatcaggccataagtacttctccctcatgaayggaactaaggcctttataaaagaggtttcatatagtattcagccctttagcccttccatttcttctaccatgtcaagacacagcatttcctccttccagaggttgtacgatcaaggtgccatcttggaagcagacagtagccc

SEQ ID NO: 937502 - DNA, 593 bp, Homo sapiens
ggtgtggtggctcatgactgtaatcccagcactttaggaggcagaggcgggtggatcacaaggtcaggagatcgagaccatcctggctaacacggtgaaacctcgtctctattaaaaatacaaataattagccaggcatggtggtgggcacctataatcccagctacttgggaggctgaggcaagacaatcgctcgaacctgggaagcggaggttgcagtgagccgagatcatgccattgcactccagcctagacaacagagtgagactccctctcaaaaaactaaaaataaaataaaataaagagggacaaatgcactattttatagtttacaaaggggtttgattgtttgcttgatattgayccttaccaccaccttgtgaagtaggaatgcatacaagttcttgttgtggaaaagtcacaaaattatgttttgttcctgagctgcagtgtctcacttggctctggaattcatccacacaccttgggggaataagaaaaaaaaaacccactccctatgcacacaaattataaagatgctttgaatggttcattgcctagatatggaggagggttgtctatggtaataatgg

SEQ ID NO: 937503 - DNA, 593 bp, Homo sapiens
ggtgtggtggctcatgactgtaatcccagcactttaggaggcagaggcgggtggatcacaaggtcaggagatcgagaccatcctggctaacacggtgaaacctcgtctctattaaaaatacaaataattagccaggcatggtggtgggcacctataatcccagctacttgggaggctgaggcaagacaatcgctcgaacctgggaagcggaggttgcagtgagccgagatcatgccattgcactccagcctagacaacagagtgagactccctctcaaaaaactaaaaataaaataaaataaagagggacaaatgcactattttatagtttacaaaggggtttgattgtttgcttgatattgacccttaccaccaccttgtgaagtaggaatgcatacaagttcttgttgtggaaaagtyacaaaattatgttttgttcctgagctgcagtgtctcacttggctctggaattcatccacacaccttgggggaataagaaaaaaaaaacccactccctatgcacacaaattataaagatgctttgaatggttcattgcctagatatggaggagggttgtctatggtaataatgg

SEQ ID NO: 937504 - DNA, 739 bp, Homo sapiens
atagagaaggctgctttctcctgtgtccttatttgcctaggaagtttattttgatgtgggccatcgtaaattggcccagagtttctttttggaaagcagttctgatttcagtttgtatagcttgcaagatttataaatggattggtttgatgaagtcgtctcaagggtttgaggttacatattttgtagaaacgatgattgtagcttttgcarcagtctttctttcctttctaatatgttaaggacccctggtgacctctggggatttttcagaattgattagaaaaatcagagaagttttgtgatggcttaaagtttttacaagctttcaaactggcaacagagaatattctgttgcccgaagtaaattatttacatcattgggaacttgaatgttaccttagccatttgcctctgtgtctatgttgcttgcaaagttgaaagtgaataaacattatcaatgttagattgtgatgtgcagtgagtgttttactcactgggagcatacaattccaaatccaactcctttgggggattttctgtcctaactattctgctccttttgcactcctcatacgtaggagcataactatattagagcataggagaattgcatctttaaacaacaatcagtgtcttctattggtgaacgagcatttctctattgaagctggaaagtttctccctaacagaaaggctgcacaggggaaagtgacttggtccaggacctctgggagct

SEQ ID NO: 937505 - DNA, 649 bp, Homo sapiens
aaatttcatataatttaattcacaaaatataattttattttattcttaaatcttctactaatgaccctgttatacttctttgcagcaaaaatataaaagaaatataattttttaatttcctaacaggttgtaaatgttaaaaaatatttcttctgtaatattacaagtattagtagtaagcatgtattaataatgtatcaaaatacattctattattgaatcatttaatataactaattaaaatattaaaatattgataagtatacattaaatctaaaagaacaaaattatctcttaacgggttttggtttttccctcatagatctgtatctgaatgctacttattgctagaataagttagagtttgatattacttctattcttgtcattttaaytgaggtaaacgctaaaacaaacaaacaaaacctttatttatgaatgagaatgaaaacactttttaattacagttatgacgtttaattcttggacctttatacaacttttgtgccaaaaattactgtcaatgcaaaagtatttttaaagatctatcagcgaaaaatttgtttagcccttcttcattttagcagaaggcaaagaattagagcccccctgtgatttgttacccagacatgaaactctccctcttcca

SEQ ID NO: 937506 - DNA, 581 bp, Homo sapiens
taacaaaaagtctcccatcaaagaaaagcccaggagctgacaatttcactgcggaattcaaccaaactttaaaagaactaataccaattctactcaaactattttgaaaaaattgaagagaaggaaataattccaaactcattctacaagatcaacagcatcctagtaccaaaaccagacaaagacacaaaaaaaaggcgaaaattacaggccaatatttcactgatgaatctagttgcaaaaatcctcaacwaagtgctatcaaaccaaattcaacagcccctgaaaaagatcattcaccacgaccaagtaggattaatctcaaggacagaaggatggttcaacacacacaactcagtaaatatgatacatcacattaacagaatcaagaacaaaaaacatatgatcatttcaagagatactgaaaaagcattcataaaattcagcagccctttatgataaaactctcaacaaactgggtatagcatgaacatgccttaaaacaacaaaagccgtatatgacagactcgcagctagtatcatactgaatggggaaagactgaaaccccttactgtaagat

SEQ ID NO: 937507 - DNA, 581 bp, Homo sapiens
taacaaaaagtctcccatcaaagaaaagcccaggagctgacaatttcactgcggaattcaaccaaactttaaaagaactaataccaattctactcaaactattttgaaaaaattgaagagaaggaaataattccaaactcattctacaagatcaacagcatcctagtaccaaaaccagacaaagacacaaaaaaaaggcgaaaattacaggccaatatttcactgatgaatctagttgcaaaaatcctcaacaaagtgctatcaaaccaaattcaacagcccctgaaaaagatcattcaccacgaccaagtaggattaatctcaaggacagaaggatggttcaacacacacaactcagtaaatatgatacatcacattaacagaatcaagaacaaaaaacatatgatcatttcaagagatmctgaaaaagcattcataaaattcagcagccctttatgataaaactctcaacaaactgggtatagcatgaacatgccttaaaacaacaaaagccgtatatgacagactcgcagctagtatcatactgaatggggaaagactgaaaccccttactgtaagat

SEQ ID NO: 937508 - DNA, 724 bp, Homo sapiens
tcttctaattcaattcaactctgagatgatctacctggaggtaggctcaggccccacatgttgaggccccagtcccacaaggctgcccctacttcagataccagttgcaagccctgggttgttttcccagtgcttctgaccaaatgaccataaattagggtttctatgaccccatccttgggtttcattaatttgctaccacagctcatggaactcagggaagcacttatgtttactggtttattaaaaagggtattatgggctgggcgtggtggctcacggctgtaatcccagcactttgggaggctgatgtgggtggatcacctgaggtcaggagttcaagaccagcctggccaacatggtgaaaccccatctctactaaatatacaaaaatcaactgggcttggtggcgggcacctgtaatcctagctacttgggaggctgaggcaggagaatctcttgaacccgggaggcggaggttgcagtgagccaagatcacaccactgcactycagtctaggtgacaagagcaaaactctgtctcaaaaaaaaaaaaaaaaggatattatgaaggctacaggggaagagatgcatagggcgaggtatgggggaaggggacatgaagcctccatgccctctccaggcaccatcctccaggaacctccactgtcgtgaagccctctgaaccctgctttgttgtgtttgtatagaagctcattacatag

SEQ ID NO: 937509 - DNA, 588 bp, Homo sapiens
agtggagtgttgagagtctgtcaaaagttgtcgtagtccgtttgtgttgctatgaaggaatacctaaggctgggtaatttatgaagaaatgaggcttatttggctcatcgttctacaggctgtacaggaagtgtggtgctagcacctgcttctgatgagggcctcaggaagcttacaatcatggcagaaagtgaaggtggagcaggtgtrtcacatggcgagaaaggaagcaagggaggggaggaggtgctaagccatttttaacaatcaggtctcatagtaactaactgagtgagaactagaagagtgcccacaggagggcaccaaaccattcatgagggatccatctcatgacccaaacacctaccagaggcccacctccaacactgggggttcacatctcaacatgagatttggaggggaccaacatccaagctaactcaaaagtaaatggaaatagaaagaaaaggatgagtgtattatttgaagttacaatattatcaagagagatgctagaaataatctaattctcaaacatttcaaagaacagaggcgggaaaggtttggttgtcaggcaagcaaatcttc

SEQ ID NO: 937510 - DNA, 604 bp, Homo sapiens
accaagatttctccccaggcgtgcttgcccaaagcccatgttctcaaccatctggatcttgaacactgtgtgatccagtggttacctgaaattcctttcagcctgaaagatttagctttgcccttgccttactcctgattccctttcttttttatttatttatttatttatttatttatttatttatttatttatwttttaggcggagtgtcgctctgtcacccaggctggagtacagtggcacgatctcagctcactgcaagctctgcctcctgggttcacgccattctcctgcctcagcctcccgagtacctgggactacaggcgcccgccaccatgagcagctaatttttttgcattttttagttgagacgggtttttaccatgttagctaggatggtctcgatctcctgaccttgtgatctgcccgcctcagcctcccaaagtgctgggatgacaggcgtgagccaccacgcctggccctgattccctttctttttgttaatgccctcattgactgaaataaagatgaccacccctttcttccatggaaataagcagccctttggagcctctgtgggaacctgcactttgtgcttttcca

SEQ ID NO: 937511 - DNA, 618 bp, Homo sapiens
taacgggaattccattataagcgttttcatgcttttctcttgctatcttaaaaaatctttgtctttgtgtctgggttgaatgtatttggggttctttgatcttcctagaactagatgtctatctctctctcttgagttgggaagttttatgctatcactttattaaatatgttttcctcacatttctcttcacttttccttctggaatgcccataataggaatatttgttcaaattaacagtgtccaataaatcctgtaggcttttttcattattttttattcttttttctctgcctgtgttatttcaaaagacttctcttcaagttcagaaattacttcttctgcttgttcttgtctgtaaagtcattgatttcattttttatttcttytattgaactgtttagctcttagggcttgtttggttctttttatgatatctctatctttactgaatttctcattcaaatcatgttttcctgatttcattgacttgtctatctgtattacctatatctcactgagtttccttaggattattcttttgaattctttttctggcatttcatatgtttatgattggggtccattactacataattattatttccctttgtagg

SEQ ID NO: 937512 - DNA, 592 bp, Homo sapiens
tcatgcttttctcttgctatcttaaaaaatctttgtctttgtgtctgggttgaatgtatttggggttctttgatcttcctagaactagatgtctatctctctctcttgagttgggaagttttatgctatcactttattaaatatgttttcctcacatttctcttcacttttccttctggaatgcccataataggaatatttgttcaaattaacagtgtccaataaatcctgtaggcttttttcattattttttattcttttttctctgcctgtgttatttcaaaagacttctcttcaagttcagaaattacttcttctgcttgttcttgtctgtaaagtcattgatttcattttttatttcttttattgaactgtttagytcttagggcttgtttggttctttttatgatatctctatctttactgaatttctcattcaaatcatgttttcctgatttcattgacttgtctatctgtattacctatatctcactgagtttccttaggattattcttttgaattctttttctggcatttcatatgtttatgattggggtccattactacataattattatttccctttgtagg

SEQ ID NO: 937513 - DNA, 646 bp, Homo sapiens
agagtttgtgcaaaaaaagaggtaactttgtagattagggattaaaaacctgagcaaaattcagattgtttcttatagaacaaattgaggctgatggttgcaaaggggaggcgtagagaggagaaatgtggaaggctcggcaatgatgagagtttggaacagcccttgaggacaggagaggaaggggctcaaggaagacaagacaaagcattaggctggggcccartggcttgcagaaagtaccaagcgccctgcacggtggattcttccagcagactgagcacagggggttcagaggagctggtaatgcagtcatactgtggctggggtttacaaaaggttaagtgactcactaaaggtcacacagggacatttacacaaacatcctggccccaagtccagtgctctaatctgtaaccgggtctatccttgcaattttttttttttttttttttttttttgagacagggtcttggtcagtcacacaggctggagtgcaatgatgtgaacaccgcacactgcagcctcgcccttccaggctcaagtgatcctcctgcctcggcctcccagtgttgggattataggcatgagccaccatactcagccaagtctgtccttaatcagggttcttttgggtctcattttc

SEQ ID NO: 937514 - DNA, 570 bp, Homo sapiens
ttccactcctttccagaagagtcaccggagatgtgtcaaagtctctatccctggtccctgttgccaagtcaggactttgctgggcattcctagagtaggtgtggcagctcataggtcacctttggagccaaggtaaagatggcagcttggtctgactaaggaggagtccacagatgcggctcgtccgcacagcaggcagtgcaaacccaggcaggagctcatcatctttgtaagccttattcaatgagccccattttattttgctgctgattaaagctatgtatcrtagagaggcattgcctgatgttcagagtgcagggcctctgggagcctggcatgaagggcccaaggacaaccagcttagcactcaagtatccacctggtacctgcaagatggaacaagagaatgtatgaggaaaccctctgagctgcacaaatataggaacggtgggatatacagacacatactgtcttgctggtctggaaatggtccctgggatgtgatggggaaggatggggtaaattcaactgggataaatacaacagaagtgagcgcagagccagaggcct

SEQ ID NO: 937515 - DNA, 826 bp, Homo sapiens
ggagcgaaagcaaaacgaaagcacccggggcgcatcagttgcaatagcttccctgagcgcggccgtgggaggccaagatctgaggtcgcgaggcgacggtgggggcccgagctgcgcagaaactgggtgggggcggtccctggagggcgcccgggagctgctagaagttgtccggagcccctcaacccccttggaaaagcgaacgcggatgttaatataccaactccgcagggaacttttggcccgggtcttgagctgaaattccagactgaatgggaccgtgctgaaagttcgacgaggcaaaggagtatggcgcgggggcaagctttgacccccggcttcgtatcctcgggagaggccgggactccggctcgcccagcgagggtgcgcagaggcctcctgggattctaggcccacagaatttttgctccagtgaagttggataagcactccgcctccccgcaaaaaccagagttctcggmttataaacacttcaataaactctggtgacattctccgcgctcgctccttgccctcgcggcagtcactgcagggacaaaggcggcctgcgcagacttggaagaggcgcggcccgcggggcggctttaccggccaaagagttttcagtaagggaggcatcttcagagctgagggtaactccccacagccaccccgcaggtagggcagccaaccccattcggtcagcttaaaagtgtctcggtttcgccccctttcccagcgaaccaacactggcagattggcctgcgagccgctcgctctgttgctctagcacatttatgtagccaaacggtcgaagagccccatc

SEQ ID NO: 937516 - DNA, 826 bp, Homo sapiens
ggagcgaaagcaaaacgaaagcacccggggcgcatcagttgcaatagcttccctgagcgcggccgtgggaggccaagatctgaggtcgcgaggcgacggtgggggcccgagctgcgcagaaactgggtgggggcggtccctggagggcgcccgggagctgctagaagttgtccggagcccctcaacccccttggaaaagcgaacgcggatgttaatataccaactccgcagggaacttttggcccgggtcttgagctgaaattccagactgaatgggaccgtgctgaaagttcgacgaggcaaaggagtatggcgcgggggcaagctttgacccccggcttcgtatcctcgggagaggccgggactccggctcgcccagcgagggtgcgcagaggcctcctgggattctaggcccacagaatttttgctccagtgaagttggataagcactccgcctccccgcaaaaaccagagttctcggcttataamcacttcaataaactctggtgacattctccgcgctcgctccttgccctcgcggcagtcactgcagggacaaaggcggcctgcgcagacttggaagaggcgcggcccgcggggcggctttaccggccaaagagttttcagtaagggaggcatcttcagagctgagggtaactccccacagccaccccgcaggtagggcagccaaccccattcggtcagcttaaaagtgtctcggtttcgccccctttcccagcgaaccaacactggcagattggcctgcgagccgctcgctctgttgctctagcacatttatgtagccaaacggtcgaagagccccatc

SEQ ID NO: 937517 - DNA, 418 bp, Homo sapiens
aaccttatgatccccaggacagggtggcacagaccatgtcagcagtagcctggtcaacatagtgagaccccttctctacataaaattgaaaagaagaattagctgagcatggtggcaaatgcctatagtcccggctactccagaggctgagggggaaggattgcttgagcccaggacatcaaagctacagtgagccctgattgcgcyactgtactccagcctaagtgacagagagagaccctgtctcaaaaaaaacaaacaaacacacgaaaacccagaccatatctgtagattcatcctttaaataaacaaatattggttgggcacaatggctcatgcctataattctagcactttgggaggccaaagtgggcagatcacttgaggccagaagtttgagaccagcctggcaaacatg

SEQ ID NO: 937518 - DNA, 586 bp, Homo sapiens
caaaacttaatggcttaaaacaacaaaaacagattatcttatggtttcagtgggttttgaatccagggggccttgctgttgagtatcctctagctcagggtctcttccaaagctgcaatcaaggtgccacctggggctgtagtcatctcaaggtttgatcgggtgactttttcacttagctgctgacaggcctcaagtctttgctgtcctttggccagatacatcagctcttgccctgtgggtctttccatggagcagcttgcttcccttwgaacaagagctgaaaaagagacagagagggtttgggagagagaggggtgggagcagaagtcaccatctgagaagggaaatcacttggtcatattcaatgttagcagcaagtccagcttatactcaaggggaggagtttacacaaaggcgtgaataccaggaggtggggattgaagtcatcttagaggctgcctaccacagaaggaatgagatctagtgtgcagtagagaggctgacccttgctgggagcagggattgttcctcagcagcacagaagagaaggcagcgtctatgggtacacagagcctagtaagtg

SEQ ID NO: 937519 - DNA, 589 bp, Homo sapiens
gaagaggtaggaatacactgttctcaaggatagagatgctatattaagcactaagagccagttgtgacaaatgtccagaaatccttaatgagcgatcccaagacacacaatgagaagattgtttctccccagataggatttggatttgtgtctccacccaaatctcatgcggaattgtaatccccagtgttggaggaggggcctgatgggaggtgattgcatcctgagggcggatatcccctttgctgttctcatgctactgagtgagttctcatgagatctgcttatttaaaagtatggagcacctcccccttgactttmttccccctgctccagccatggaggacgtgcctgcttccccgttgccttcagccatgattttaggtttcctgcggcttccccagccatgcttactgtacagcctgcagaactgtgagtcaattaaacctcttttctttataaattacccagcctcgggtagttctttatagcaagaactatgcaaaaatggactaatacatccccctaaggtttatgttaggcatttgcagttagtacagggtttacaggtcttaaggaagagatggtg

SEQ ID NO: 937520 - DNA, 666 bp, Homo sapiens
ttatttttcttattaatataagaagtcaggaatgtcaggcctctgagcccaagccaagccatcgcatcccctgtgacttgcacgtataagcccagatggcctgaagtaactgaagaatcacaaaagaagtgaatatgccctgccccaccttaactgatgacattccaccacaaaagaagtgtaaatggccggtccttgccttaagtgatgacattaccttgtgaaagtccttttcctggctcatcctggctcagaaagcacccccactgagcacttgcaactcccactcctgcccrccagagaacaaaccgcctttgactataattttcctttacctacccaaatcctataaaacggccccacccctatctccctttgctgactctctttttggactcagcccgcctgcacccaggtgaaataaacagccatgttgctcacacaaagcctgtttggtggtctcttcacacagaagcgcatgaaaataggatattgagtttggttccaatactttttccttttaagaaaaaaatgatgtatattcaatattttgtggctaaacatttgcatttgtttaattataacactacaagtggaatttctgggtcaaaactattcgcattttaaaaactttaggtcgaccttgcttgggtatcatccagaaag

SEQ ID NO: 937521 - DNA, 606 bp, Homo sapiens
agtgcaagatgtctttctgtaccatgaactctgctccccaatcttcaaagaacctcacacgatttacaatgtgtgaaaaactgctacaaatatacttacaggtcctcacacataggttaaagcattcattagctcccactatatgatacaagctggaacatatttattttacaaaattgggattatgtgtacaacctgctctctaacctgccctttcacttgctcatttataacatttggyttggatcttttttaaaaaactttaaaaaaaaaataacttctgggccaggtgtggtggctcacacctgtaatcccagcactttgggaggtcgaggtgggtggatcgcaaggtcaggagatcgagaccaccctggctaacacagtgaaactctgtctctactaaaaatacaaaaaaaagaaagaaattagctgggtgtggtggcagatgcctgtagtcccagctactcgggagtctgaggcaggagaatggcatcaatccgggaggcagagcttgcagtgagacgagattgcaccactgcactccagcctgggcgatagagcgagactccgtctcaaaaaaaaataaaaataaaaataaaacaaaaa

SEQ ID NO: 937522 - DNA, 824 bp, Homo sapiens
gtaaccaccacccagatcaagatagagaattaaatgagattttaaaagctgacagaagcttataaactgtaaagcgctgaagaaatgttggttttgagtattaccaggaggtggagcctctttcccattaaattcccctcctataacttctaggtttctagaaatcattagcaccagttgcaacaccctagcaaatcattgctggtgccaggaccttgataccccagccatgcagagtggagacacagacccatccattgctgttaatctccacattatcagcatgacttctctgagtcatgttagcccctgcatcctccccttcaggcagcaggatgtcctcacaaaacagggccattgacaacacaggtgtgcaatttcaattcagtacaatttgattcaaaaagatgtgccctttatgctggcgctggacagagaaggggagaagaaactttcttggctgggccctccaagggggcttgaaatctgtgaggctgtggccagtttatacatacctgtgaagtgaagcccacagaggcaagagctgtgactgtcacccttctcacccatgggactctctaccagagggtttccagaccctctctccagkgctgtctactcctctgggctgtagccagcttctccactttacctgctagatttctctcctggctactctatggccctcagaacttagtgatttcctaagaaacccatctttttacctcttccacctggcttcctcctcctggcttccctctttctccgttctggcatcactaactcccaatcatccactctaagccatatccaagggtcaattt

SEQ ID NO: 937523 - DNA, 612 bp, Homo sapiens
agaacatggggtgtaggtagtacacgttatatgctgcatgtagtatgtcatactatgtgaattccctcaatattattttctaaaaagagtgtacacttcaatttagagacatatgggttcgaaagtcaaagatgtttttttctctgctcactaatctgaacctcagttgtatgatcagggaagtgaarataattcctactgctgaaagctgttttgaggattagaagaaagttcatttatatatgggcaggagatccttgctgaatgtcaagcctctttgctctcctcttcgaaaccctgttgaaattcttcatagtcttcttatattatctcagctggtgaaacattttaagactcctgacatctctcatggtatttatggtatattaacttctgcaatattatagtttctttctcctaagacattctggatgattagaagccattgttgatttaatagcaaattttcaagggaaaagaagcaacactttcacatgaaatgcatccatcagtatatgatgtgccctgattttaaaacaatttaaatgtaaaaaataaatgcattatagaatcaaggaaatgtgttagtttctgtttgcatgtcttattgct

SEQ ID NO: 937524 - DNA, 612 bp, Homo sapiens
agaacatggggtgtaggtagtacacgttatatgctgcatgtagtatgtcatactatgtgaattccctcaatattattttctaaaaagagtgtacacttcaatttagagacatatgggttcgaaagtcaaagatgtttttttctctgctcactaatctgaacctcagttgtatgatcagggaagtgaagataattcctactgctgaaagctgttttgaggattaraagaaagttcatttatatatgggcaggagatccttgctgaatgtcaagcctctttgctctcctcttcgaaaccctgttgaaattcttcatagtcttcttatattatctcagctggtgaaacattttaagactcctgacatctctcatggtatttatggtatattaacttctgcaatattatagtttctttctcctaagacattctggatgattagaagccattgttgatttaatagcaaattttcaagggaaaagaagcaacactttcacatgaaatgcatccatcagtatatgatgtgccctgattttaaaacaatttaaatgtaaaaaataaatgcattatagaatcaaggaaatgtgttagtttctgtttgcatgtcttattgct

SEQ ID NO: 937525 - DNA, 612 bp, Homo sapiens
agaacatggggtgtaggtagtacacgttatatgctgcatgtagtatgtcatactatgtgaattccctcaatattattttctaaaaagagtgtacacttcaatttagagacatatgggttcgaaagtcaaagatgtttttttctctgctcactaatctgaacctcagttgtatgatcagggaagtgaagataattcctactgctgaaagctgttttgaggattagaagaaagttcatttatatatgggcaggaratccttgctgaatgtcaagcctctttgctctcctcttcgaaaccctgttgaaattcttcatagtcttcttatattatctcagctggtgaaacattttaagactcctgacatctctcatggtatttatggtatattaacttctgcaatattatagtttctttctcctaagacattctggatgattagaagccattgttgatttaatagcaaattttcaagggaaaagaagcaacactttcacatgaaatgcatccatcagtatatgatgtgccctgattttaaaacaatttaaatgtaaaaaataaatgcattatagaatcaaggaaatgtgttagtttctgtttgcatgtcttattgct

SEQ ID NO: 937526 - DNA, 656 bp, Homo sapiens
cactgggtccctcagaagccccaggacagaagcaggggagcccagagctgggctggctttggatccaggataagatacagcaggagaggacaggaacagatgggggtgccggggggagtgaggtcaggacaggttgacaggctagcagggtcaagaggtagagggactggaggaggcatggagggtctgaaaacagaggggcccccatggcctttcccgcattccaataccatgtgctaaaaatactggatgagcataggccaggtgtgktggctcacgcctgtaatcccagcactttgggagaccgaggcaggccaatcatgaggtcaggagttcgagacctgcctagccaacatggtgaaaccccgtctctactaaagatacaaaaaattagccaggtgtggtggcacatgcctgtaatcccagctactcgggaggctgaggcaggagaatcacttgaacctgggaggcagagcagtgagctgagatcacaccactgcactccagcctgggcaacagggtcagactctgtctcaaaataaataaataaataaaataaaatactgggtgagtgaatgaaccccacatgattccctgtgtcagggctgccaactggcaactcatgcacgtaattcatccagggcacaggttttgtt

SEQ ID NO: 937527 - DNA, 656 bp, Homo sapiens
cactgggtccctcagaagccccaggacagaagcaggggagcccagagctgggctggctttggatccaggataagatacagcaggagaggacaggaacagatgggggtgccggggggagtgaggtcaggacaggttgacaggctagcagggtcaagaggtagagggactggaggaggcatggagggtctgaaaacagaggggcccccatggcctttcccgcattccaataccatgtgctaaaaatactggatgagcataggccaggtgtgttggctcacgcctgtaatcccagcactttgggagaccgaggcaggccaatcatgaggtcaggagttcgagacctgcctagccaacatggtgaaaccccgtctctactaaagatacaaaaaattagccaggtgtggtggcacatgcctgtaatcccagctactcggsaggctgaggcaggagaatcacttgaacctgggaggcagagcagtgagctgagatcacaccactgcactccagcctgggcaacagggtcagactctgtctcaaaataaataaataaataaaataaaatactgggtgagtgaatgaaccccacatgattccctgtgtcagggctgccaactggcaactcatgcacgtaattcatccagggcacaggttttgtt

SEQ ID NO: 937528 - DNA, 782 bp, Homo sapiens
atgcccagactcccctatgtcagcacactcacaaaggctaataaaatggcacatacacatatgcaggcgggacatgccaatgctaggttccacatgatgccctacgtggggccaagacctatgtgcattactcactttttgttgttgttgttgttattattgtttttgcttattttctgctttctggtataaagatgtggaaaatgtcaaaaatgtctgcagatatccctatgggtaacaatgataagaaaaagargaagtgtttatgtttacctacagcacagaaagccaagttgctggagaaaatatgcagcagtgtaagcctgaaacatcttacagaagagtatagttttggaatgaccactatatatgacctgaagaacagaagaataaactgttgaagttctgtgctgaaagtgatgtatggaggttagtgaaaaacagataaatactgcataaagctgaaactgaagatcttggtcctatattaaaataatggatcagtgtcacaatgaacgtataccatttaatagtatgttgattatgaaataagcatagatctatcacaatgaactgaaaattgaagggaacggtgactattcaacaggctggttgcagaaatttaagaaaagacgtagcattaaatctgtaaagacttgtgataaagcaactgctgatcacaaagtggacaaattcattgatgggtttgccaagattatcactgatgtaaatgatgccagaacaagtatatgatgtgaatgaaacatcactctgttgttgta

SEQ ID NO: 937529 - DNA, 782 bp, Homo sapiens
atgcccagactcccctatgtcagcacactcacaaaggctaataaaatggcacatacacatatgcaggcgggacatgccaatgctaggttccacatgatgccctacgtggggccaagacctatgtgcattactcactttttgttgttgttgttgttattattgtttttgcttattttctgctttctggtataaagatgtggaaaatgtcaaaaatgtctgcagatatccctatgggtaacaatgataagaaaaagaggaagtgtttatgtttayctacagcacagaaagccaagttgctggagaaaatatgcagcagtgtaagcctgaaacatcttacagaagagtatagttttggaatgaccactatatatgacctgaagaacagaagaataaactgttgaagttctgtgctgaaagtgatgtatggaggttagtgaaaaacagataaatactgcataaagctgaaactgaagatcttggtcctatattaaaataatggatcagtgtcacaatgaacgtataccatttaatagtatgttgattatgaaataagcatagatctatcacaatgaactgaaaattgaagggaacggtgactattcaacaggctggttgcagaaatttaagaaaagacgtagcattaaatctgtaaagacttgtgataaagcaactgctgatcacaaagtggacaaattcattgatgggtttgccaagattatcactgatgtaaatgatgccagaacaagtatatgatgtgaatgaaacatcactctgttgttgta

SEQ ID NO: 937530 - DNA, 599 bp, Homo sapiens
aatgaattttgtcaaaggcattctcaggatctatagaaatagacatataaattttccttagatttatcaatatagcgtattgtataaatagatttcctaatgttgagccaacttgtatcctttaaatatatgctatttcgtcatattgtattattattattattattattattattatgtatatattttttgmgacagagtctctctctgttgccaggctggagtgtagtggtgccatctcaggtcactgcaatctcctcttcctgggttcaagtgattccctagcctcagcctcccgagtagctgggactacaggggcacgccaccacattcagctaattttatttgtattttaatagagaacggggtttcaccctgttggccaggatggtctcgatttcctgacctcatgatccacccaccttggcctcccaaagtgctgggattacaggcgtgagccaccacattgggcctgtatcattctttttaatgtggtagtggattctatttgctaatattttgtttgctgattcccttaacttttgccacacctttaaaaagaccccatcccaatttttttttttttttttcaaaatccc

SEQ ID NO: 937531 - DNA, 734 bp, Homo sapiens
cacatggagggagtatttaaactagcccaagccagaggaaaatcacccatctcagcagtcagaacttgagttctggcaaacattaccaccttgtgccacagtgctctgggcccctaaataaacttgaaaggcagtgtaggccacaagaactgcaacttcttggcaagtcttagggctgaactggactcagagccaatggacatggcrggcagatatatgacctactgagacaccaaccaggatggcttaaggggctgctggcatcacccctccgttaaccccagactgcatagctcaccactccaaaagagaccccttccttctgctcaaggagaggagagggaagaatgttgaggactttgtctcgcatctgggataccagctcagtcacagcaagacagggcaccagacagtcgtgaagcaccctttccaggccctagctcctggatgacatttctagatacatcctgggctggaagggaacctgctgctttgaaaagaaggacccactcgacaggattcatcacctgcttactgaagagccctttggcctgaataaccagcagcaagagaaaagaaagaaataacataaaatggaactccaataggtctggcagcagacttttcagtggaaaccttacgtgccagaagagggtagcatgatatattcaaactgctgaaggaaaaagacttttatcccagaatagtgggataacatcccactattattatag

SEQ ID NO: 937532 - DNA, 844 bp, Homo sapiens
tggtggtgtacatgctttgtgatctttgtggattcatatttctctatgtttaatctgtggggatcctgtccacattgtggatgctttcctctggagaggcttcatgtcagtttctgctgtgagccagtggcactactaacctgggatccctctagccccttcaggtgttctgccttaaggtagagactcagggttggcatcctgaatggaactactattaggttgatctatgtgaaaatgttgcttttttggggtcaaaccagttgaatatccacaattttatatggtccaacctacgctagcaacacttgcactaaggacaaaagcctgttcttcctgcttgcttactgtttgcctctcctagctagttttgactmaatgtttgtttccctttttttggtggggaaggtggctttggagactttcccaatttcctgtaatcccagtaaagcattaaaaaattatattttattcaggaggaaataaattcgcagaattatattgcagagaagaggagaggtgctacgagtagctaagccaactgctagaggctaaaattcaggacaggtgtatttttcccagtgaggaaaccaaggctcaaagagatgaaatgacttactcaaggtcacacagctagtaatgggcagggctaggactttctagaaacccaggctctttccactttccctctgtcctgccctgcctccagagagctgtttgggcctgggggtgtccttacctggtgcagggggatgacgaggaaggcccctccaccagcacactcagtcacaactgcaatgaagtgggggttcacggcacagaagtggttgtcgtgaacgctgcg

SEQ ID NO: 937533 - DNA, 607 bp, Homo sapiens
ccagcaccatttttttgttttttttttgagacagagtctcactctgtcacccaggatggagtacagtggcacgaccttggctcactgcaacaacctctgcctcctgggttcaagcgattctcctccctcagcctcctaagtagctgggactacaggcatgtgccaccatgcccggctaattttttgtatttttactagagacagggttttgccatgttggccaggctggtcttgaacttctggcctcaagtgatctgcctgcctcagcctcccaaagtactgggattacagttgtgagccaccgtgcccrgtcagcaccatttgttgaggagactattctttccccgttgagtgatcttaacatccttcttgaaaatcagttgaccatagatgtatggctttatttctggatgctcagttgttcattgatctatatgtctgcacttatgccagtaccctgtcttgagtactactgctttttagtaggttttgaaatggagaagtgtgagttctctaactttggtctttgttttcaagattgttgtgactatttggagcctcttgtaattccatatgaattttagaatcagcttcgtctacaaagaag

SEQ ID NO: 937534 - DNA, 853 bp, Homo sapiens
tggaaagtggtgctgatccagatcccaagagagggttcttgaatctcacgcaagaaagaattcaaggcgagtccatagagtaaagcgaaagcaagtttattaagaaagtaaaggaataaagaattgctactccataggcagaacagtgacttgagctgctggcttaaggatacttatagttatttcttgattatatgctaaacaagggatggattattcacaagttttctgggaaaggggtgtacagttcccagagctgagggtccctcccattttttagaccatgtaggtaacttccagacattacacagtgggtacctcgggctgtggcatctgtaaactggggccatcacagggccatggcatctgtraactgtcatggtcctgatgggagtgtcttttaacatgctaatgtattataattagcatataatgagcagtgaggacaaccggagatcactctccttgccatcttggttttgttgggttttggtgggtttgtagtaattactgcaacctgttttatcagcagttagtgttttatcagtaattactgcagcctgttttatgtctttatgacctgtatcttgtgccaacctcctatcacatcctgtgactaagaatgcctgtcttcctggaatgtagcccagtagatctcagcctcattttacccagtccctattcaagatggagttgttctggttcaaacgcctctgacagagtcacatgatcagttccacagctaatgggtgctgctgtcctttaaggatggagtctggatgtgggcagttcacctgagcccttacggtgaatgaagaggggccacccagagcctgcactgccctgacaggga

SEQ ID NO: 937535 - DNA, 629 bp, Homo sapiens
catcatctctcatccccaacctcaggacaactgcaacaaccctggctggtcacctggtctaccaacccctcataatccatcctgcactcagcagtcaaagtcagtttgtaaaaggaaaataagactatgttgttcccttgcctaagactcccagtggtttccccaagcttttagagtaaaatccagtctccttactgtggccacaaagccatgcatgatgggctccttgctgcttctgaaacatgctaagttctttctagtctcaaggcttctgcacatacttttttctgcctgggacacttagcccagatggctgcttctcaccctccaggtcgcagctcaagtgtcacctcctctgagaagcttttcacaaccgccctgtccaaaggaggtgtstatctccatcactctctatccccactctgatttattttcttcaaagcactcactgcaatctgaaatcatcttattcactgtgtgcttgtctcttgctgtctccctactagaacagaagctgcatgaagacaggggtctcatctgccttggacatcactgaatcctatgcacggagcacaatgcctggaacgggaggagctcaatggttactggttgaattaatacactgagga

SEQ ID NO: 937536 - DNA, 554 bp, Homo sapiens
ttatgttatcaatcttctgtactctgaactgtttttcttttttcattgactttatcatcattaaacatactgtattagtctgttctcatgctgctaataaagacatacctgagactgggtaatttataaagaaaagaggtttaatggacttacagttccacatggctggggatgcctcaccatcacggtagaaggcaaaggaggagcaaagtcacatcttgcatggcggcaggcaagagagtgcctgtgtaggggtactccctttataaaaccatcagatctcgtgagacttattcgctrtcatgagaacagcatgggaaagacctgtccccatgattcagttacctcccaccaggtctctctcacaacatgtgggaattatgggagagatttgggtggggacacagccaaaccatgtcacatactatgattttatgtatgtgtctatatatatatgtatatacatttttacaggatatctttccccatttgaacatatgctccacaaggacatgaatctttatttttagacatggggtcttgccaagttgccc

SEQ ID NO: 937537 - DNA, 562 bp, Homo sapiens
aggggatgtgatggcttagcttgggctcagaggcctgacattcctgtcttcttatattaataagaaaaataaaatgaaatagtggtaaagtgttagacggtgaaaatttttgggggtggtatggagagatagtgggcgatgtttctcagggctgcttcgagcgggattaggggtggtgtgggaacctmgactgggagagattaagctgaaggaaaattttgtggtaaggggtgatattgtggggttgttagaagaaacatttattgtgtagaattattggtgatggcctggatacggttttggatgaattgaaaaactaaatggaataaaagaaggagaaaaacaggtataaaaggtctaagaattgggaggacttagggcatctgattagagagtgcttaaggatattcagcatagtcctgccaataaagattatttatttacttcaagagtttagagtggcagtttggggatagcaccacgagatatcagctgtgatggcttggagaaacagtgtaaaccggcagtgtaaacaagagcagggcatgtatgagtagttgag

SEQ ID NO: 937538 - DNA, 562 bp, Homo sapiens
aggggatgtgatggcttagcttgggctcagaggcctgacattcctgtcttcttatattaataagaaaaataaaatgaaatagtggtaaagtgttagacggtgaaaatttttgggggtggtatggagagatagtgggcgatgtttctcagggctgcttcgagcgggattaggggtggtgtgggaacctcgactgggagagattaagctgaaggaaaaytttgtggtaaggggtgatattgtggggttgttagaagaaacatttattgtgtagaattattggtgatggcctggatacggttttggatgaattgaaaaactaaatggaataaaagaaggagaaaaacaggtataaaaggtctaagaattgggaggacttagggcatctgattagagagtgcttaaggatattcagcatagtcctgccaataaagattatttatttacttcaagagtttagagtggcagtttggggatagcaccacgagatatcagctgtgatggcttggagaaacagtgtaaaccggcagtgtaaacaagagcagggcatgtatgagtagttgag

SEQ ID NO: 937539 - DNA, 562 bp, Homo sapiens
aggggatgtgatggcttagcttgggctcagaggcctgacattcctgtcttcttatattaataagaaaaataaaatgaaatagtggtaaagtgttagacggtgaaaatttttgggggtggtatggagagatagtgggcgatgtttctcagggctgcttcgagcgggattaggggtggtgtgggaacctcgactgggagagattaagctgaaggaaaattttgtggtaaggggtgatattgtggggttgttagaagaaacatttrttgtgtagaattattggtgatggcctggatacggttttggatgaattgaaaaactaaatggaataaaagaaggagaaaaacaggtataaaaggtctaagaattgggaggacttagggcatctgattagagagtgcttaaggatattcagcatagtcctgccaataaagattatttatttacttcaagagtttagagtggcagtttggggatagcaccacgagatatcagctgtgatggcttggagaaacagtgtaaaccggcagtgtaaacaagagcagggcatgtatgagtagttgag

SEQ ID NO: 937540 - DNA, 562 bp, Homo sapiens
aggggatgtgatggcttagcttgggctcagaggcctgacattcctgtcttcttatattaataagaaaaataaaatgaaatagtggtaaagtgttagacggtgaaaatttttgggggtggtatggagagatagtgggcgatgtttctcagggctgcttcgagcgggattaggggtggtgtgggaacctcgactgggagagattaagctgaaggaaaattttgtggtaaggggtgatattgtggggttgttagaagaaacatttattgtgtagaattattggtgatggcctggatayggttttggatgaattgaaaaactaaatggaataaaagaaggagaaaaacaggtataaaaggtctaagaattgggaggacttagggcatctgattagagagtgcttaaggatattcagcatagtcctgccaataaagattatttatttacttcaagagtttagagtggcagtttggggatagcaccacgagatatcagctgtgatggcttggagaaacagtgtaaaccggcagtgtaaacaagagcagggcatgtatgagtagttgag

SEQ ID NO: 937541 - DNA, 749 bp, Homo sapiens
attggctgctggacaaccacactccaggggaagatcatcttcccactccatcccccttccagctccccattcatcccactgagagccacctccaccattcaataaagcccccacattcatccttcaagtccatgtgcaacctgattcttcctggacactggacaagggcctgggtaccaagaggacactatgctggttaacacttaagccatccacggatggcaaggttaaaagagcgcactgtaacacaacacatgccacttgggctttgggagtcacagacacccacccctggatgctgccgtgaggccggagcccaggggcacttgccccagcttctgcacctgcccatctttgtgctcccccacccataaggggtttgagcatgcatggcagccgaacagacaagccacacccagtcacacatcccatgaggggagtcagggaactctcataggctattattactamataagcaagttgttagaaatgtgaacaccccagacctctaggagcacttaattacacgcttttaaagtataattatccttacttttgtgaatgttccttatctaccccaggtagcaagttgcatacattatatcatttagccccactgtataagtgaggaaactgtggctcaaagtgccttgcccttggttacctggcttcagccagtcctccaaaaggacatttaccagtgttggtattttaaaataaaaacaaaacctttcctcccaaaaataaaa

SEQ ID NO: 937542 - DNA, 808 bp, Homo sapiens
aactccacccttctggtcattcaggcccaaaccccagacatcatactatggtctgggtcactgtgatggcctcgtctcctgcttctacctcatccacctcactctaccctcaatatccagtcttttcaaaacttgttagcccatgccactcctttgctgaaaactgcaatggttgctcatttcagtcagggtaaaagtcaaagttttttaaatggccccattacattctgaagattacttataaacctgccattcagagacaatattataggtctcttgcttttctgcatacctcaaagaaaaggtactgactggctttgttccagactagcttttcaaaactgtttggaatgagcagctttgtaagatatagtgtctcccyccagagaagaaggcaggtttgcttactgttcagtgtgaggcaaagagaatgtctatcttccgaggaaagggcaagaaagtttgcttgcagtctgttataaaagattcaggtttggccaggcgtgatggctcatgcctgtaatcccagcactttgggaagccgaggcggacggatcacaaggtcaggagttcgagaccagcctggccaacatggtgaaaccctgtgtctactaaaaatacaaaaattagccaggtgtggtggcaggcacctataaccccggctactcgggaggccttggcaggcaaatcactcaaaaccggaaggcagaggttgcagtgagcccagattgcaccactgcattccagcctgggagaaagagcaaaaccccatctcaaaaaaaaaaaaaaaaaaaaagattcaggttcc

SEQ ID NO: 937543 - DNA, 634 bp, Homo sapiens
ggctagctacatgtaggagaatgaaactggatccttatctctcaccctgtacaaaaatcaactcaagatcaatcaacttaaacctaagatctgaaactataaaaattctagaagataacattggaaaaacccttctagacatcggctaaggcaaggatttcattaccaagaacccaaaagcaaatgcaataaaaaacaaagataaatagctgggacctaattaaactaaaagagctttcgtatggcaaaaggaacagtcggcagaataaacaaacaacccacagaatgagagaaaatcttcagaatctatacatctgacaaaggactaatattcagaatctacaatgaactcaaacaaagcagtaagaaaaaaagtctcatcaaaaagtgggctaaggacatgaatagacagttctcaaaacaagatctacaaatggccaacaaacttatgaaaaaatgctcaacatcacaaatraccagggaaatgcaaatcaaaaccacaatgtgataccaccttactcctgtaagaatggccataatcaaaacatcaaaaaacagtaatgttggcatggatgtggtgaacaggaaacacttctacactgctggtgggaatgtagactagtacagccactgt

SEQ ID NO: 937544 - DNA, 562 bp, Homo sapiens
tcagtcaacctgcaagacagatacaatgcaacacgcacttgaatgttcatctaagaatttcacagccatctctaattgctcagtttctttaaatgcagtattaacggttacaaaaggggctcatttacttcaatcagtgcattcaaagttcaagtaaagaagatgtaattttagtgatctgctcgacttcctaagctcctatttgttaaattctcatagtgcattccccagatgcaggcctgactggaggattaactccattctgagctggaagacatttaagcaagtaaatttaggtctagtatttggaggctcagaatcaggtcacttagtggttttccatctcagatcctttacttgatgctaaactttgaccyttttttaaaaaagcaaaaaaccaagctcttgctttgagcttcactaaataggttattcagtaccaaagttctcatcatttctatggggtacaagtgccctcatactttctctcaggtcctgtaaccgtctgtctctgatgccagccacatctagttttacattcacctgattgtcccgatactgt

SEQ ID NO: 937545 - DNA, 793 bp, Homo sapiens
ggccccatttttctatcctctcttgtagctgcgtgtgaccatggactaaattctggctaataatatgcaaatgaaagtttttgggttgaatttggggaaaagttcccttagcttggggagaaatgactggggcttgctagctggaatgtggacgtgatgtggttgtggaatgcggatgtgttggctgtagctctagcagacaccctgaagcatgatgtgatcttaagcatggaagtcatgtacaaaggatgtcagggaacaaagatagaaggaccctggacactgattactgagcagaaccctggattgactctccctcaagttgggtgtagaaatgcatttctgtctagtttaagtcactgctactttcactctgttactaaggtataaatgcaatttcagatgacatgaaaggtatattaagagtttctttttagagaaaagtgttgccaaaggtattcatagaggaaataatgctttggcagattattttaaaggacaaacaggaggagttgtccaggttacaggagagagatgaggaatccatggaagaatatttggtgttactgcatatgtcattagaattattattattattattattattwttttttgagacaagggctcactctgttgccctggctggagtgcagtggcataatgttggctcactgcagcctcgatctcccaggctcaagtgatcctgctacttcagcctcctgagtagcagggaccacaagcatgcatcataatgtccaggtgtttttaaaaaattatttcttgtagggacagg

SEQ ID NO: 937546 - DNA, 568 bp, Homo sapiens
acatctgtaatcccagtacttcgggaggctgaggcaggtggatggcttgaggccaggagtttgagaacagcctggccaacatggcaaaactgcgtgtctactaaaaataaaaaaattagccagatgtggtggcacacacctgtagtccaagctactcaggaggctgaggcaygagaattacttgaacccaggaggcagaggttgcagtgcggcaagatcatgcaacagcactacagactgggtgacagaatgagactttgtctaaaatatatatatatatatatatatatattatatatatatatctccaaggttgtgcaaccatcaccactatctgattccggagtattttaattttaccccaaaaagaaaccccattccctttagcagtcactcttcattcacctctccccttaacccctggaaaacactaatccactttcttttctatggatgtgactgttctgtacatttcatatcaatggaatcatacaatgtgtcctcttccgtgtctggcttctttcatttaacttaatgtttcaagtttcatccacattgtaagatgaat

SEQ ID NO: 937547 - DNA, 592 bp, Homo sapiens
gtatatttgatcgttcaaagttgtccctaagctcaccgatgctttagtgatttattttctctatgtttcattttgtataacttgtattgctgtgttttcaagttcactaatctcttttattttgcatgtctaatattccattaactccatccagtgtacatgttttttaacctggacattatagtttccatgtatagaaattttgagtcatttttatatttcccatakctgtcctttcctttaccttcttgaacatacagaaaataattacagtaacttattttgggatctgtttctactaatttatttttatcttcattatgagtcatattttttggcttctttgcatgctgctaattttttaattatatgtcaaatatcatgaatttgaccttgctgtgtactggatatttctgtattcctttaaatattcttaaatttaatcctgggatagacttaagtaacttaaatacagtttgatccatttgaggcttacttttaagcttaattaatctagagctcattttgcttgttagtaatgagaaaatggtcttctgagtactttgcttgatgctcatgtattatgaaattt

SEQ ID NO: 937548 - DNA, 708 bp, Homo sapiens
ggccctgggtttcaagcacaaaactgggtggccatgggggcagacatcgagctagctgctggagtttttttttttttttcataccccagtggtgcctggaatgccagagagatagaactgttcactaccctggaaagggggctgaagccagggagccaagtggtctagctcagtggatcccacccccatggagctgagcaagctaatccactggcttgcaactctcactgccagcacagcagtctgaagtcsacctgggacacaagcttggtgggggaggggcgtctgccatcactgaggcttaagtaggcagttttccctgcacagtgtatacaaagccaccaggaagttcaaactgggtggagcccactgcagctcagcaaaactgtggtagccagactgcctctctagattcctcctctctgggcagggcatctctgaaagaaaggcagcagccccagtcaggggcttatagagaaaactcctttctccctggtacagagcacctgggggaagaggcggccatgggtgcagcttcagcagacttaaatgttcctgtctgccagctctgaagagagcagcggagctcccagcacagcacttgagctctgctaagggggacagactgcctcctcaagtgggtccctgacccccgtgcctcatgactgggagacacctcccagcaggggtcgacagacatctcataca

SEQ ID NO: 937549 - DNA, 725 bp, Homo sapiens
gtgcctacaccaccagggccctgggtttcaagcacaaaactgggtggccatgggggcagacatcgagctagctgctggagtttttttttttttttcataccccagtggtgcctggaatgccagagagatagaactgttcactaccctggaaagggggctgaagccagggagccaagtggtctagctcagtggatcccacccccatggagctgagcaagctaatccactggcttgcaactctcactgccagcacagcagtctgaagtcgacctgggacacaagcttggtgggggaggggcgtctgccatcactgaggcttaagtaggcagttttccctgcacagtgtatacaaagccaccaggaagttcaaactgggtggagcccactgcagctcagcaaaactgtggtagccagactgcctctctagattcctcctctctgggcagggcatctctgaaagaaaggcagcagccccagtcaggggcttatagagaaaactcctttctccctggtacagagcacctgggggaagrggcggccatgggtgcagcttcagcagacttaaatgttcctgtctgccagctctgaagagagcagcggagctcccagcacagcacttgagctctgctaagggggacagactgcctcctcaagtgggtccctgacccccgtgcctcatgactgggagacacctcccagcaggggtcgacagacatctcatacaa

SEQ ID NO: 937550 - DNA, 612 bp, Homo sapiens
cctgagtctgagggggacatggtgaacctttatgtctagctaaggggttgtaaatacaccaatcggcactctatatctagctcaaggtttgtaaacacaccagtcagcaccctgtgtctagctcagggtttgtgaatgcaccaatcgacactctgtatctagctactctggtggggacttggagaacctttgtgtccacactctgtatctagctaatttggtggggacgtggataacctttgtgtctagctcagggattgtaaacgcaccaatcagygccctgtcaaaacagaccactcagctctaccaatcagcaggatgtgggtggggccagataagataataaaagcaggctgcccgagccagcagtggcaacccactcgggtccccttcctcattgtggaagctttgttctttccctttttgcaataaatcttgctactgctcactctttgggtccacactgcctttatgagctgtaacactcaccgcgaacatctgcagcttcactcctgaggccagaaggactacgaacccaccgggaggaacaattccagacgtgccacctgaagagctgtaacactcacccgcgaaggtgcgcagcttcactcc

SEQ ID NO: 937551 - DNA, 620 bp, Homo sapiens
atgtcagtggggctggttccttctaagcactgtgagggaaaatctgttccagacctcactcctaccttctcgggccttgctgacaatctttggcattccttgccttgtagatctctatcttcatcctcatgcagtgttctccctgtgtgcaggtgcctatgtccaaattttccctttttatagggacaccactcacactagattagggacctactctactccagtatgacattttatgttaataaactatatctgcagctatcctatttccaaacaaggtgacattctgagttattagctattaggactttgacatatgaattttgtgggggacaattcaacccataacattattaccctgttttacagatggggaataaaaggcacaaaagtgttaagtgacttgcctaargtcacacagctaatatatggtagagtaagaatttgaacccaggaagtctggttctaaagtgagagttcctaatccacatactctacttcctctacaccaccggtccccaacctttttggcaccagggactggttttcgaggaagacaattttcacggaccagggggtggtggatgggaagggagatggtttcaggatgaaattgttcc

SEQ ID NO: 937552 - DNA, 708 bp, Homo sapiens
ttcggtttgtctgatatgtcctcatgattagattcagattataaatttggggctgcctaagtgatgtgtccatcttgggacatcacatcaggaggaacaagtgaccaatttgtccccttgcttcatcacttgatgaaggtggcagcctgccaagtttccacactgtaaaattactagttttccttttgtaattaataaataatctgtgttactaggtactttgagattctgtaaatatcccattccccatcaaatgttgactcaacatttttttacgtctgtattcgtttgctaaggccrtcataacaaagtaccacaaactgagttacttaaaacaacagacatttactatcccacagttctggggctggaagtctgaaatcaaggtgtcggcggggttgggtccttctgagggctaggaggaaaggatcccttctagacctctctccttcgcttgtaaatgggcatcttcttcctgtgtctcttcatattttctttcctctgtgtgtgtctgtgtgctcaaatttcccctttttatcagcacatatcatattgagtgagggcccacccacatgacttcactttaacttctttagctctgtcatgaccctatctcaaaataaagtcacattctgaggtaccaagggttaggaatttaacacgttaaggggaggaaaagaattcaattcataacagatgcattccagc

SEQ ID NO: 937553 - DNA, 563 bp, Homo sapiens
ttagcggtgatttctgagattttggtgcacccattacctgagcagtgtgcactgtacctactgtgcagacctttgtccctcagcccctccacccttccccttgagtccctaaagtccattatttcattcttatgcctttgcatcctcatrgcttagctcctacttataaatgagaacatatgatgtttggttttccattcctgagttacttcacttataataattgtctctagctccatccaagttgctgcaaaagacattatttcattcctttttatggctgagtagtgtgctatggtgtatatagaccacattttctttatgcactcattggttgatgggcacttaggttggtttcatatctttgcagttgtgaattgtgctgttataagcatacatgtgcaaatgtctttttcatagaaggactttttttccctttgggtacacacccagtagtgggattgctggattgaatggtagttctacttttggttcttcaaggaatctccacactgttttccacagtggttgtactagtttacattcccaccagcagcgtaaaa

SEQ ID NO: 937554 - DNA, 615 bp, Homo sapiens
actttctccacaatttttttccaggactctcaagctacagttttcttatgggctgaattgtgtctatactgaagttccaatccccaggaccttggaaagtgactgtatttggagacaggaccttcaaagaggtaattaaggttagatgaggttattaaggcaggtcctaatccaatatgactggtgttttcacaagaagagaaaatttaagcagagtgtggtggcacaactgtaatcccagctactagggagctgagacaggaggatcacttgggttcgggaggtcaagaccagcctgggcaacacagtgagacgtcatctcaaaaaaggagaacacttggatgcagacatgcacaggaggaagatgatatgaaggcatggagagagggcgaccattgcaaagcatggagaggggcctgggaagaaacaasccagacaacaccttgatggtgaacttccatcctccagacctgcgagaacatgaatttctgctgtttaagccagccagtatgtgagattttgttatagcagcctgtattagtctgttatcacactgctaataaagacatgcccgagactggataatttataaaggaaagaggtttaatggactcg

SEQ ID NO: 937555 - DNA, 474 bp, Homo sapiens
agaaaaacaagaagagaacaagatggaagcaggtctttttgccacctaatctcagaagtgagactccatcacctttactgtattctattcactagacacgactcattaggtccaacccacacttaagcctagaaggtttgcattagttatctattgagcataacaatattaccaaaaacttagcagcttaaaaccacacacattgattatttcatggtttctgtgggttgttgagttgggccattgctgagctgtgccttctgttcagggtctcgcaaagctgcagtgaaggtgttggccacggctgyattctcatctgaggcttgcccggggaagagtccatgtccaagctcatgcaggttgctggcagaatgcagctccctgtggttgtgtgactgagcactttggtttcttgctagctccctgatggaggcctctcttggctctggagggtacccacagttgactgttatg

SEQ ID NO: 937556 - DNA, 576 bp, Homo sapiens
taactgtattctgtatattcaagaagctagaggaaagattgaacatgttaactaaatacatggaagatataaaagaactcaaatttcaagagattaaaactacaatatatgagacaaagtatactaaacatgtctaatgccagattagacaatgtggaagaaaatagcagtgaacttgagaagataacaaaactattcacaaggaaaaccrgagagaaaacaaatacttcaaaaaaaaaaaaaagaacggagcatcagtgagatgtgagaaaatttcatatggcccaatttctgagtatttatagtctctgacaggttaaagcaaggaaaagaaaaatattggaggaaatagtgtctgaacaatttctatgtgcaaaattgagagctataacccactgatccaaggaactcaacaaattccaagcacaagaagcatgaagagacaaaaccaaggcacattatcatagaattgtttaaaattagtgataaagagaaaatcttaaaagcagagagaacaggcgtattatgtacaagaggagctaaaataaggctgacagcagatttcttgttggtaac

SEQ ID NO: 937557 - DNA, 824 bp, Homo sapiens
tctaaacctgtgcttgtgtctggtctgtctacatacaaaatctttattttgtgctatcttttcattcttgctcactcatgtggattaggttgctcaaagactggagctaatatgataaattccttatagcacccagcacattgctcaatagggacaatagatgcttaatggaaaatgtatttgagttttttgtttactacrtacctgattatagtgtagactttatttctaacttagaactgttaacacattcaaagtgtaaagcaagccctacccacaacaatgtctatagtcagttgtccatggtaatatgggtctataaagctaaactagaaacatgctaagttaaaatcagtttgttattagacatcagttacctaccaaacattctgtaatttcatgtttaaaatctattttctggatcctgttttaattatgtgtgtgtaatatatgatgctactctttatatccataagtgggtgaaaatcttcccttggctgctactcatccccagagaaggagcatgtgggagctttaatttttgtgattagtacattcttttacatgttttgttgaaacagaaaatcttaatcttttcaaaatggttttagatttgtagggagagcaaaattttctttaggaaaaagttctgaatgctttttgatgaaataatttatgtaaatagatacccatggaaggtaatgacatgtattaggagcgtagaacctgccaatactgccctttatttcagtgattggcagccctaggtgttccttataaaaccctctagaatttctcaaagtacagatggcctggttctaatg

SEQ ID NO: 937558 - DNA, 452 bp, Homo sapiens
agggcatcctcctctgtgaactcatcaacaagctgcaggcaggcccaatgaagaaagtcaatgagtcctcattaaactggcctcagcggagaatattggcaactttattaaagctattcaggcttatggtgtgaagccacgtgacatatttgaagtaagtgatctttttaggatggaaacgtgacccaagttcaggctactctggtggccctagtaggttggcaagcacaaaaggatacaaccacggacatcagggttaaatatrcagaaaaacaaacacgacgttaggatgaaggaaaattaaaagctgctgaaactgtaattggattgcggatgggaaccaacgaagtgccagccaggcaggtatgtcagcttacgggactacaggcatctttatgatcccaacatgcaaactgacaaacgttttgaccagaccacagtttgtctgcaga

SEQ ID NO: 937559 - DNA, 616 bp, Homo sapiens
gcattacactttttacttttctgacaaaatatttgatttaagtgcttattattaaaccaattaattaaagctctttcatttataaacatcatacacagaatacatataaatacatagaaagataaaagatagaggactcattttccaagccaggaattgaatcctgaacccaggccaccattgtgaaaagagaaagcatggccacatggttacaaggtcaagcccccaaggacatagaagacaagagggaaacctcatccagtgttttttcagggacctgtagcaaagtttagaactgaccagtttgctgggtcaccttgaacagcagtcttacaggtgtcctaagcccatgttctatccctagggacccctcattrtgacagaacaataaagaaagacacataaagcacaccagattggctacagcttaagactagcctcacaaatccttttttccattaatcaaactttacagaggagataaacagtgatttttaccattcattcaaccagtttgcacagagagagaaacagcggaaaagcattgcctgcagcagggtgggaaggcaaggcgctcagggaggccagagaaagacccacccattgcagcaacatt

SEQ ID NO: 937560 - DNA, 847 bp, Homo sapiens
gtagcaaagggatcttttccagcagtctcatcagctctcaagtttccccttttagggaagaaaaagctccccatgtcccacaatcccgtacatgcctaattctgtcactcacagctattagcaaagagcaaggcagattattccaaagagaatagcagttaacatcctgtagtaccaaacccgttcttagctgagagggactttaatgagagggactttaccaagaggggcctctaaacccctraatcttagaaggcactctaaccctcctaaattgggcttctaacccaaggttggtcaagcatccgtgccttttatgaagaggggcctctaacccactcattcttaagagagactctaactcccctaagttgggcctctaattcaatcccattctttacctggctatatgcaccccacttacctgaaggccgccaatcagtgccatagtctctttcctttgggttgggggatctcctcagcatcgtcccttccatgttcaccagaaagatgtcaccagacaccaccacttacctagttagcctttgggtccctttatggtagccagaaaaatgttacagggaaggggtcctaatccagaccccaagagagggttcttggacctcgcgcaagaaagaattcagagtgagtccacagtgcaaagcaaaagcaagtttattaagaaagtaaaggaataaagaatcgctactccattgacagagcagccgtgagggctgttggttgcccatttttgtggttatttcttgatgatatgctaacaaggcgtggattattcatgcctccccctttcaaaccatatagggtaacttcctgatgttgccatggt

SEQ ID NO: 937561 - DNA, 847 bp, Homo sapiens
gtagcaaagggatcttttccagcagtctcatcagctctcaagtttccccttttagggaagaaaaagctccccatgtcccacaatcccgtacatgcctaattctgtcactcacagctattagcaaagagcaaggcagattattccaaagagaatagcagttaacatcctgtagtaccaaacccgttcttagctgagagggactttaatgagagggactttaccaagaggggcctctaaacccctgaatcttagaaggcactctaaccctcctaaattgggcttctaacccaaggttggtcaagcatccgtgccttttatgaagaggggcctctaacccactcattcttaagagagactctaactcccctaagttgggcctctaattcaatcccattctttacctggctatatgcaccccacttacctgaaggccgccaatcagtgccatagtctctttcctttgggttgggggatctcctcagcatcgtcccttccatgttcaccagaaagatgtcaccagacaccaccacttacctagttagcctttgggtccctttrtggtagccagaaaaatgttacagggaaggggtcctaatccagaccccaagagagggttcttggacctcgcgcaagaaagaattcagagtgagtccacagtgcaaagcaaaagcaagtttattaagaaagtaaaggaataaagaatcgctactccattgacagagcagccgtgagggctgttggttgcccatttttgtggttatttcttgatgatatgctaacaaggcgtggattattcatgcctccccctttcaaaccatatagggtaacttcctgatgttgccatggt

SEQ ID NO: 937562 - DNA, 565 bp, Homo sapiens
cctcttttcgattcttaaaaagagtcagtacaaaggggaaattttctactatttggaggttaagtaatttcattaggattcaattcctaatgtgttgttctttctataatggttttctcttgatcgctgggtgattttaaagtgttcttaaatttccaaatatatgggggtgttaaaagtttggctatcttttagttaatgatttgttattttatttaactttctgcagaaaatgtgacatgtatgacatagacatagatactttggaatttctgaaggcttgctttctggcttagtgcttattcagctttccaaaatagtccttatatgcttgtaaagaatgtgttttatctaactgttgaatgcaaggttctatrtaggtccattgagtcaaacttacatgtaaaatttatgtgtaaactttatatgaaaaagtaagcaaattatggtaataataataataaacctaggaaagtaatgtaaagggaccagcctaccaaatattaaaatcatttaaacagtcgtgataatcagatcaaaatgatactgttcacaaataaggaag

SEQ ID NO: 937563 - DNA, 565 bp, Homo sapiens
cctcttttcgattcttaaaaagagtcagtacaaaggggaaattttctactatttggaggttaagtaatttcattaggattcaattcctaatgtgttgttctttctataatggttttctcttgatcgctgggtgattttaaagtgttcttaaatttccaaatatatgggggtgttaaaagtttggctatcttttagttaatgatttgttattttatttaactttctgcagaaaatgtgacatgtatgacatagacatagatactttggaatttctgaaggcttgctttctggcttagtgcttattcagctttccaaaatagtccttatatgcttgtaaagaatgtgttttatctaactgttgaatgcaaggttctatgtaggtccaytgagtcaaacttacatgtaaaatttatgtgtaaactttatatgaaaaagtaagcaaattatggtaataataataataaacctaggaaagtaatgtaaagggaccagcctaccaaatattaaaatcatttaaacagtcgtgataatcagatcaaaatgatactgttcacaaataaggaag

SEQ ID NO: 937564 - DNA, 705 bp, Homo sapiens
ctcccgggtgatgagacttgcagctatagccagcatggagattgaaactggtcgtgtatgtcattgctgggtgcccagcctgcttccctgagatcgtggtgcagtgggaccctgtattagtctgttcttacactgctataaagaaatactttataaaatacccagccaacttggtaactcatgaagaaaagaggtttaattggctcacagttctgcaagctgtacagaaaacatggctgggaaggcctcagaaaacttacaatcatagcagaaggcaaagaggaagcaggtctgtattacatgactggagcaggaggaaggaagggaggggaggagctacacagttttaagcaaccagatctcatgataacttactatcatgagtacagcaccaaaggggaaatatgttctcatgatccaatcacctcccatcaggtgcctactccaatgctggtattataatttgacatgcgatttgggtggagacacagaaccmaaccatattattccatccctagtccctccaatatcccatgtccttctcacatttcaaaatacaataatgccttccaaacgctaccccaaagccttaactcattccagcattaactcaaaagtccaaagtccaaagcctcatctaacacaaggctagtcccttccacctatgagcctgtaaaatcaaaaacaaattagttacttcatgga

SEQ ID NO: 937565 - DNA, 705 bp, Homo sapiens
ctcccgggtgatgagacttgcagctatagccagcatggagattgaaactggtcgtgtatgtcattgctgggtgcccagcctgcttccctgagatcgtggtgcagtgggaccctgtattagtctgttcttacactgctataaagaaatactttataaaatacccagccaacttggtaactcatgaagaaaagaggtttaattggctcacagttctgcaagctgtacagaaaacatggctgggaaggcctcagaaaacttacaatcatagcagaaggcaaagaggaagcaggtctgtattacatgactggagcaggaggaaggaagggaggggaggagctacacagttttaagcaaccagatctcatgataacttactatcatgagtacagcaccaaaggggaaatatgttctcatgatccaatcacctcccatcaggtgcctactccaatgctggtattataatttgacatgcgatttgggtggagacacagaaccaaaccatattattccatcmctagtccctccaatatcccatgtccttctcacatttcaaaatacaataatgccttccaaacgctaccccaaagccttaactcattccagcattaactcaaaagtccaaagtccaaagcctcatctaacacaaggctagtcccttccacctatgagcctgtaaaatcaaaaacaaattagttacttcatgga

SEQ ID NO: 937566 - DNA, 584 bp, Homo sapiens
taatcttcataggacctacttctaatgattttggtatcctaaattctgggcagtggtgagtaataatgaggtcactttgtagtttagcagactctcactttgtttcttttaatatgtaaattagagttccaagttcttgaaggtaagaaacacctgccactaaaaagaaggttaaaatgtcctcctgaagaaatgttgtatctggctgttattaaaaagcaaaaaattaatggrtgatggcgagatcttggagaaaagggaatccttagacactactggcgagaatgcaaatcagttcagcccctgaggaaatccccagtttggagatttctcaaactaaaatagaattaccattccacccaggaatcccattactacgtatatacccaaaggaaaataaattgttctaccaaaaagacacctgcacttttatgtttatcacagcactcctcacaatagcaaagatatgaaatcaacccaggtacccatcaaaggtgaattagataaagaaaatatggcacatatacaacaaggaatactacacagccataaaaagaacaaaatcatgtcctttgcagcagcat

SEQ ID NO: 937567 - DNA, 686 bp, Homo sapiens
tcattaacctaagtgaattaacacaggaacagaaaatcaaatactgcatgttctcacttataagtgggagctaaacattgggtacgcatggacataaatatgggaataatagacactgaggacctagagccaggagagagggaaaagaagaagggttgaaaaactacctattgggtactttgttcactacttgggtgaygggatcattaaaagccctaacagcttcacacaatataacagtataacaaacctacatgtgtaataaatttaaaaattaaaaatttttaaatgccatatccttatgctgatttctgtgcacatatacatggctcttttgcctcatttaggtcaagaagatgttcctttttgaatacaaatctctctctaaaggatactttttaaccattctcactttatttttcaagccgaccttgcataatgaagtttttgttgctttgaaaataggagtagtaggccaggcgtgatggctcacacctgtaatctcagcactttgggaggctgaggtgggtggatcacctgaggttaagagttcgagaccagcctggccaacatgcaacatggtctctactaaaaatacaaaaattagctgggcgtggtggagggcacttgtaatcccagctactcaggaggctgaggcaggagaatggcttgaacctgggaggtgg

SEQ ID NO: 937568 - DNA, 637 bp, Homo sapiens
gggactagtgcgagagtgacgaggatttctctaactgcaggtgagaagttggccttccctgttatgcaggagcaaattagctggctgagagttgcttgcgtgtcctggggccccgtgctggggccccgtgctgactggtattgaactttaagagatatggcaggaaaaaggatcttggagcatgctggctgcttcttacagacttcagtaaatccttacaagaaagagatgagctttgatgggagctggcacatccaagtggtgagaaagaataaaatctggctttcctacaagaggctttatttggtctctggccaataatcgaagttgaccaacagtcagataatctttctccttacagaattagaaaaaccagctctattccttaatcaggttaattkgggggaaagaaacagagcaagacatgtaggatcctggaaaagcatgacatccacttcacactccaacccctccaagtatcaatctcatgtcccatgtgtgccaaccaccagggtaagatttgctccagaaaaagacatcactgggatttagcctgggcacagagcaggtgagaaagttcacctctctacactttgtttgttaggttgcctaaacaaggtggtggccacattgttga

SEQ ID NO: 937569 - DNA, 617 bp, Homo sapiens
aacaacctggagtttcagggaggcttccattaactcatgctggtccagggctactgcacaaatgcaggacaacatgccatttgtcgaaacgttttaaagatatgattcagctaatgaattgtgagcaaaatatgctctctccttttacctggacagatgcacctttgcaccctagaaggaaggctgggtttgaatatagccttctgggaatctgtgatggtgacttttatgtcaacttggctaagctatggtggcccagttatttggtcaaacccagcctagctggtgctgtgcaagtatattttagatgtgattgacatttaagttactagactttgagttaagtagatgaccttccatcatgtggctgggcctcatctaatctgttgaaggcctcaggggatagactttcccccaggaggaaggaattctcaagactgaagcacaaaaactttgcctgagattccagscaattgccctgtggaatgtggacctaagacagcaatatctggcctaccagcctgccctacaaatttcagccagccctacttgccaggacccataattgcacaaactaattccttattccttaaaataaatctctctctctcccccaa

SEQ ID NO: 937570 - DNA, 637 bp, Homo sapiens
aaagcatctgctgcctttccagcgaaatgctgctgcccctcctcccatcctttctccctcagatcctgggggatctgaaaggagcgagaatcatttctctctggggggtagagtggagcagggagtcttatttgcctcttgaccttgatttcatgggaaaggggaaggacagcrttggcttggagtaggaagagctgcgccatcatcctgcctgggtccctggaagcacaagtcctcttaagacaggcctggctacagcggcgtctggcctcttctcaaagaccttcagtggtggccactcacaacctcacaaagcagtaagttgctctttttttttttcttttctttttttttttttttgagacagagtctcgttctgttgcccaggctggagtgcagtggcacaatctcagctcactgcagcctccgcctcctggttcaagcaattctcctgtgtcagcctcctgagtagctgggattacaggcacatgccacaatgtctggttaatttttgtattttttgtagagacagggtttcaccatgttggccaggctggtcttgaactcctgtccctgcccgcctcggcctcccaaagtgccgggattacgggtgtgagtcactgcacccagcctaagt

SEQ ID NO: 937571 - DNA, 772 bp, Homo sapiens
cctatctgtattgttccaggagtgttctctgtgaccaatagcacatggtagaagtgtgtgttgtgttttcctctgttaggtcttgaggtccctctcatgagagtggctgtaaactctacccctgctgtgatgtggcttcagggatctggccatggatatttatagtgtgccttccatgggatatgtctctattctggcagacaacctaatgcctaagtgctagaccyatgaccaggtgtccctctccctgaaaattagtttacactggcagacacccttgtggctcttgtctgacctctgtccagtttattcctaccaagaaatccattctctggaagatccctgatggaaagaagctgggtttgggtgtgttagttggatgagacttagaggagatgacatagcaaaacacatgaaatgacagaagcagtttatgactgatcgatcccagagagaagaaggcagcatgcctggcaggtttaatgggaagcaggaagccatccagaataatgctttcaaacagtgggtggggagtaagagagagctataaggctccccacccacccacttgggtctgtgggccctagctattattggatccagggcattacccaagcaggtttcctcctgggaagttctaattggtgggtttagaggaaacaggcagttttcatggagttatactgtgattgagagggtagtcactgcagcatatctgtgctctccatgtggggtatgggaatcagtggggtgcatcaagtaggttgtatcc

SEQ ID NO: 937572 - DNA, 630 bp, Homo sapiens
ttcagggagcttgttctgtgacttttgttgctatgaattaaatttgtgaacctctagaagttgtaacagcactctttcaaaatgatagaggccccagctatttgacatggtttcagtcagttcaggcctgagtgcaaaaagattcacaatagcctggagacactgcctggcttgataattacatgatcccctaaagaatgtcatacttaactggaaaatgaaacacttaaaggcaccatcatattctttctcagttttcttttattttcaatattgkgactttgtagaatagcttcttcctttgatctatctataagaatgtttacagataaattccatgtgttcctgtttgaatttgagaggggcttatgctgcatgtttcaagttgattaaatataaactctttaaatccatgccttaaagcaaatatttcagagataaattcctaagaaagatatattttcaactgaaacttataattcatcttcataggaagacagccagaggttatttcaattttggataattttattctgggtttctaaatattctagatggttttccaggcacttgctgtatgtttttgtctatatattcttcagtactttttcaaatacaagttggtggcct

SEQ ID NO: 937573 - DNA, 605 bp, Homo sapiens
cttttccaaaagtcttagcaaatggcacaccaggagattatatcccatgcctggcttggagggtcccacgcccacggagcctcgtttattgctagcacagcactctgagatcgaactgcaaggcagcagcgaggctgggggaggggcgcccgccattgctgaggcttgagtaggtaaacaaagtggcccagaatctcgacctgggtggagcccaccgcagctcaaggaagcctgcctgcctctgtagactccacctctgggggcagggcatagccaaacaaagggcagcagaaacctctgcagacttaaatgtccctgtctgacagctttgaagagagtagtggttctcccagcawggagtttgtgatctgagaatggacagactgcctcctcaagtgggtccctgacccccgagtagcctaactgggaggcacctcccagtaggggcagactgacacctcacacggccgggtacccctctgagatgaagcttccagaggaatgatcaggcagcaacatttgctgttcagcaatatctgctattctgcagcctccgctgctgatacccaggcaaacatggtctggagtggacctccagcaaactc

SEQ ID NO: 937574 - DNA, 623 bp, Homo sapiens
aaaaacaggtttacctaatgaaaatatgcttagtgacttgggataaaccaatagatgttcacaactgatggagagccgtgtaagagagataacgttaaatatttacaataacacaattttcctgcacctgtcgaggatttccccaaaaaaacgcagratgtgggatgcacctaaggcataggaaagagagagggcagaaggagtaagagagaaataggaggaaggagggaaggaaagaaggaagtcaggaaggaaggaaggaaggaaggaaggaaggaaggaaggaaagaaggacgtaaggaaggagaaaacagcggtgttactaaaagcccccaaaaaaatggtttccccctgtgggtaagcctacaatgtggacgattcttgaaaatattgtgctacgtgttatgtcagtcataacagctcacctattgtgcaattccgcttataggaaatgtccacaatatggtaatctatgcatatgggattgatcgcactaggtagttgctacctagggctgagggccagggagagggtttgagacagaaagaggagtgactaatgtctacagggtttttctccggccgggagtgataagacgttctacaatgaattgcgaattaaat

SEQ ID NO: 937575 - DNA, 571 bp, Homo sapiens
taatgaaaatatgcttagtgacttgggataaaccaatagatgttcacaactgatggagagccgtgtaagagagataacgttaaatatttacaataacacaattttcctgcacctgtcgaggatttccccaaaaaaacgcaggatgtgggatgcacctaaggcataggaaagagagagggcagaaggagtwagagagaaataggaggaaggagggaaggaaagaaggaagtcaggaaggaaggaaggaaggaaggaaggaaggaaggaaggaaagaaggacgtaaggaaggagaaaacagcggtgttactaaaagcccccaaaaaaatggtttccccctgtgggtaagcctacaatgtggacgattcttgaaaatattgtgctacgtgttatgtcagtcataacagctcacctattgtgcaattccgcttataggaaatgtccacaatatggtaatctatgcatatgggattgatcgcactaggtagttgctacctagggctgagggccagggagagggtttgagacagaaagaggagtgactaatgtctacagggtttttctccggccggg

SEQ ID NO: 937576 - DNA, 602 bp, Homo sapiens
tacctaatgaaaatatgcttagtgacttgggataaaccaatagatgttcacaactgatggagagccgtgtaagagagataacgttaaatatttacaataacacaattttcctgcacctgtcgaggatttccccaaaaaaacgcaggatgtgggatgcacctaaggcataggaaagagagagggcagaaggagtaagagakaaataggaggaaggagggaaggaaagaaggaagtcaggaaggaaggaaggaaggaaggaaggaaggaaggaaggaaagaaggacgtaaggaaggagaaaacagcggtgttactaaaagcccccaaaaaaatggtttccccctgtgggtaagcctacaatgtggacgattcttgaaaatattgtgctacgtgttatgtcagtcataacagctcacctattgtgcaattccgcttataggaaatgtccacaatatggtaatctatgcatatgggattgatcgcactaggtagttgctacctagggctgagggccagggagagggtttgagacagaaagaggagtgactaatgtctacagggtttttctccggccgggagtgataagacgttctacaatgaattg

SEQ ID NO: 937577 - DNA, 498 bp, Homo sapiens
aacaggtttacctaatgaaaatatgcttagtgacttgggataaaccaatagatgttcacaactgatggagagccgtgtaagagagataacgttaaatatttacaataacacaattttcctgcacctgtcgaggatttccccaaaaaaacgcaggatgtgggatgcacctaaggcataggaaagagagagggcagaaggagtaagagagaaataggaggaaggagggaaggaaagaaggaagtcaggaaggaaggaaggaaggaaggaaggaaggaaggaaggaaagaaggacgtaaggaaggagaaaacascggtgttactaaaagcccccaaaaaaatggtttccccctgtgggtaagcctacaatgtggacgattcttgaaaatattgtgctacgtgttatgtcagtcataacagctcacctattgtgcaattccgcttataggaaatgtccacaatatggtaatctatgcatatgggattgatcgcactaggtag

SEQ ID NO: 937578 - DNA, 604 bp, Homo sapiens
cagctgtataaggaaaaacaggtttacctaatgaaaatatgcttagtgacttgggataaaccaatagatgttcacaactgatggagagccgtgtaagagagataacgttaaatatttacaataacacaattttcctgcacctgtcgaggatttccccaaaaaaacgcaggatgtgggatgcacctaaggcataggaaagagagagggcagaaggagtaagagagaaataggaggaaggagggaaggaaagaaggaagtcaggaaggaaggaaggaaggaaggaaggaaggaaggaaggaaagaaggacgtaaggaaggagaaaacagcggtgttactaaaagcccccmaaaaaatggtttccccctgtgggtaagcctacaatgtggacgattcttgaaaatattgtgctacgtgttatgtcagtcataacagctcacctattgtgcaattccgcttataggaaatgtccacaatatggtaatctatgcatatgggattgatcgcactaggtagttgctacctagggctgagggccagggagagggtttgagacagaaagaggagtgactaatgtctacagggtttttctccggccgggagtga

SEQ ID NO: 937579 - DNA, 498 bp, Homo sapiens
aacaggtttacctaatgaaaatatgcttagtgacttgggataaaccaatagatgttcacaactgatggagagccgtgtaagagagataacgttaaatatttacaataacacaattttcctgcacctgtcgaggatttccccaaaaaaacgcaggatgtgggatgcacctaaggcataggaaagagagagggcagaaggagtaagagagaaataggaggaaggagggaaggaaagaaggaagtcaggaaggaaggaaggaaggaaggaaggaaggaaggaaggaaagaaggacgtaaggaaggagaaaacagcggtgttactaaaagcccccaaaaawatggtttccccctgtgggtaagcctacaatgtggacgattcttgaaaatattgtgctacgtgttatgtcagtcataacagctcacctattgtgcaattccgcttataggaaatgtccacaatatggtaatctatgcatatgggattgatcgcactaggtag

SEQ ID NO: 937580 - DNA, 710 bp, Homo sapiens
gtgtcctggcagcgctagccatgaagggatgatgctttatcagcatttctgttgagttttttgctttttctcacaaactgattccacttttcccacatacgtttgacaattcatttgaactcatttcacggttcgggtgatgggtgcacccaaatctcacaaataaccagtaaagaacttattcatggaaccaaataccaccataccccaataacctatgggaaaaaaaaataaaataaaataaaaaagattcagaaaaaaagaaaataatcactgtacttaccatgacacttagaaatgttggctagcattatttgtgtcacctaataatataattttttttccttatgctacaaactagctctgctattacaatcactactatttgaagtgttactaaatttaattaaatktattgtatccttctggactcagatatgggagtaaatgctaagacaatttcagaatatgatcacatattaaaagcatattatatggggaaaatgtgatttttaaaacatagaaattggtagagaaacagtttttggatctctttaatttccacacattttgcaagtgtggacgctgactttcttgttctaaatgattattttcaagcatgtttgtatagaaaacacccttggaatagaaaaccagtacctccttctggaacaaaggaaaattttatttactgtctagtataatgcaga

SEQ ID NO: 937581 - DNA, 549 bp, Homo sapiens
gtacccacggatgaaggtaccttcccatcagcccctgcgctaggccccggcgaccctggcatccatggttcgagtccagggagcgccttgggccgctaggggtatcccaagtcgagcagaaagcccatgatcggaagttgacgtttgagggaggagaggtgaggaacctgtggcagaaaaaaaaaaagaaaacaagccgcgcctaggagaagctgggcctgggtmccccaaggatgaaaatgccttcccatcagtcactgcgctgggccttgtggacgctggagaaccggttcaggccccgggtgtgcctcgggcccgctaggggtaccacaaggcgggcagaaatcccatgaggggcagttgaggtttgaggaaggagaggtgaggcacctgtggcagaaaaaaaaaaactgcaccacggagaagcggagcctgggtccccaacggacgaaagtgtcttcccatcagcccttgcgctgggcccaggggaccctggcattactggttcgagaccagggtgcgcttcaggccgctaggggtacccaaaag

SEQ ID NO: 937582 - DNA, 549 bp, Homo sapiens
gtacccacggatgaaggtaccttcccatcagcccctgcgctaggccccggcgaccctggcatccatggttcgagtccagggagcgccttgggccgctaggggtatcccaagtcgagcagaaagcccatgatcggaagttgacgtttgagggaggagaggtgaggaacctgtggcagaaaaaaaaaaagaaaacaagccgcgcctaggagaagctgggcctgggtaccccaaggatgaaaatgccttcccatcagtcactgcgctgggccytgtggacgctggagaaccggttcaggccccgggtgtgcctcgggcccgctaggggtaccacaaggcgggcagaaatcccatgaggggcagttgaggtttgaggaaggagaggtgaggcacctgtggcagaaaaaaaaaaactgcaccacggagaagcggagcctgggtccccaacggacgaaagtgtcttcccatcagcccttgcgctgggcccaggggaccctggcattactggttcgagaccagggtgcgcttcaggccgctaggggtacccaaaag

SEQ ID NO: 937583 - DNA, 549 bp, Homo sapiens
gtacccacggatgaaggtaccttcccatcagcccctgcgctaggccccggcgaccctggcatccatggttcgagtccagggagcgccttgggccgctaggggtatcccaagtcgagcagaaagcccatgatcggaagttgacgtttgagggaggagaggtgaggaacctgtggcagaaaaaaaaaaagaaaacaagccgcgcctaggagaagctgggcctgggtaccccaaggatgaaaatgccttcccatcagtcactgcgctgggccttgtggacgctggagaaccggttcaggccmcgggtgtgcctcgggcccgctaggggtaccacaaggcgggcagaaatcccatgaggggcagttgaggtttgaggaaggagaggtgaggcacctgtggcagaaaaaaaaaaactgcaccacggagaagcggagcctgggtccccaacggacgaaagtgtcttcccatcagcccttgcgctgggcccaggggaccctggcattactggttcgagaccagggtgcgcttcaggccgctaggggtacccaaaag

SEQ ID NO: 937584 - DNA, 596 bp, Homo sapiens
accagttagaaaacaaggtttaatgaccctcattggtgggtggaatcatttgctcggacagcttgcagaactcagaaaaacagattgttttcttttttttctgagatacagggtctcagtctgttgccaggctggaatgcagtggtgtgatcaaagctcactgtagcatgggactcctgggctcaagtgatcctcccacctcagcctcccaaatagctgagattataggcctgtaccagcatatctggctatgttcttttactttttgtagagatggggtcttgttatgttgcccaggctggtctcaaatttctgggctcacrtgatcctcccacctcaacttcacaaaatgctgggattatgggcatgaaccactgcatctcaccaatttactttcttttactggttcattttaaaggctaaatctcaggatgttgtcagactcctggcctcaagtgatcattctgcctcagcttcccaaagtgcttggattatatgtaggtgggagccacctgtgttcaatgcccattttctttttctttctttcttttggagacggactcttactctgtcatgcaggctggaatgcagtggtg

SEQ ID NO: 937585 - DNA, 612 bp, Homo sapiens
cccttggaattctccagttttcataattaagaaaaaatcaggtaaatggagaatgttaactgacttaagagccatcaattcagttatacaacctatggaaacataacagccaggattgccttctcctactataattccaaaaaattggcctttaatagtcacagayttaaaagactgtttctttactacccttttagctgagcaatactgtgaacggtttgcatttacaattcctgcagtaagcaacctgcagcctgcgaagtgttttcattgtttcacagatgggtatagtaatggtaaagcttcttattctggatcaaaaggtaaagttttccagacaccctatacttcagctcaaaaagtggagcttgtagctgtaattgaggtattgactgcttttgatatgcctattaatgtgatttctgattcttcatacatggttcactccacacagttaattgaaaatgctcagttacaatttcatacagatgaacaactgataataaaaacaaaaaagggggagaaacagggattaagggatagcccatatacaattgaatctagcattattaactttcaattttttaagcctgcccaaaggccagatgttat

SEQ ID NO: 937586 - DNA, 612 bp, Homo sapiens
cccttggaattctccagttttcataattaagaaaaaatcaggtaaatggagaatgttaactgacttaagagccatcaattcagttatacaacctatggaaacataacagccaggattgccttctcctactataattccaaaaaattggcctttaatagtcacagatttaaaagactgtttmtttactacccttttagctgagcaatactgtgaacggtttgcatttacaattcctgcagtaagcaacctgcagcctgcgaagtgttttcattgtttcacagatgggtatagtaatggtaaagcttcttattctggatcaaaaggtaaagttttccagacaccctatacttcagctcaaaaagtggagcttgtagctgtaattgaggtattgactgcttttgatatgcctattaatgtgatttctgattcttcatacatggttcactccacacagttaattgaaaatgctcagttacaatttcatacagatgaacaactgataataaaaacaaaaaagggggagaaacagggattaagggatagcccatatacaattgaatctagcattattaactttcaattttttaagcctgcccaaaggccagatgttat

SEQ ID NO: 937587 - DNA, 612 bp, Homo sapiens
cccttggaattctccagttttcataattaagaaaaaatcaggtaaatggagaatgttaactgacttaagagccatcaattcagttatacaacctatggaaacataacagccaggattgccttctcctactataattccaaaaaattggcctttaatagtcacagatttaaaagactgtttctttactacccttttagctgagcaakactgtgaacggtttgcatttacaattcctgcagtaagcaacctgcagcctgcgaagtgttttcattgtttcacagatgggtatagtaatggtaaagcttcttattctggatcaaaaggtaaagttttccagacaccctatacttcagctcaaaaagtggagcttgtagctgtaattgaggtattgactgcttttgatatgcctattaatgtgatttctgattcttcatacatggttcactccacacagttaattgaaaatgctcagttacaatttcatacagatgaacaactgataataaaaacaaaaaagggggagaaacagggattaagggatagcccatatacaattgaatctagcattattaactttcaattttttaagcctgcccaaaggccagatgttat

SEQ ID NO: 937588 - DNA, 650 bp, Homo sapiens
ggaaaaacaggtttacctaatgaaaatatgcttagtgacttgggataaaccaatagatgttcacaactgatggagagccgtgaaagagagataacggtaaatagttacaataacacaattttcctgcacctgtcgaggatttcctcaaaaaaacgcagaatgtgggatgcacctaaggcataggaaagagagagggcagaaggagtaagagagaaataggaggaaggarggaaggaaagaaggaagtcaggaaggaaggaaagaaggacgtaaggaaggagaaaacaccggtgttactaaaagcccccaaaaaaatggtttccccctgtgggtaagcctacaatgtggacgaatcttgaaaatattgtgctacgtgttatgtcagtcataacagctcccctattgtgcaattccgcttataggaaatgtccacaatatggtaatctatgcatatgggattgatcgcactaggtagttgctacctagggctgagggtcagggagagggtttgagacagaatgaggagtgactaatgtctacagggtttttctctggccgggagtgataagacgttctacaatgaattgcgaattaaatttgaatgtgcacaaccacaggtatactaaaagccactcaattcatgactttta

SEQ ID NO: 937589 - DNA, 644 bp, Homo sapiens
ctgtgggtaagcctacaatgtggacgaatcttgaaaatattgtgctacgtgttatgtcagtcataacagctcccctattgtgcaattccgcttataggaaatgtccacaatatggtaatctatgcatatgggattgatcgcactaggtagttgctacctagggctgagggtcagggagagggtttgagacagaatgaggagtgactaatgtctacagggtttttctctggccgggagtgataagacgttctacaatgawttgcgaattaaatttgaatgtgcacaaccacaggtatactaaaagccactcaattcatgacttttaatgggggaatcttatgtggcgcactctcatggagaccacggcagacatagtgagagagaaaaaggtgagtaaatatctgaaacggaggcagtaacagagagaatgaaaagccctgtgaatggaagggagagcgaaaagggaaaatggtcctatttacaaatgacagatgtgaaattggggttcacatcaacagtgtcactgccaggaaggagggtcacgctagacatgtcaccggtagtttggcccgcagggacgccgacctgctggagcgtcgtgccagcatgggctgtggcagccacgtgggccagcagggggttcc

SEQ ID NO: 937590 - DNA, 495 bp, Homo sapiens
agaacatatggtatattattgatgaatgaggtgactgtgaagaatctccagaggaggtcacgggagaacacaatgacatgagtgactgtcctgcttggttaggaaagggaaacgtaaagttgtggaattctgttgatgacggatgtgagagtggtgaagccctgcgggatgatgtagaggacttccacatccctggtgaggagctgccccttgggtctgagtttctgggaggggagagggagaagctgggtgaggcaggcatgaatattgaggagtcagggctgggggaccgctcataatctcccgagacctgtgagtctctgggggactcctggktgcatggggctgactcccgcaggaacctggggatggctggagagtaactgggagccacaggagagtccctgaggcctgggggtgaagagatgaaagacgcaggggtggagcaaagtgaggctcgtgagactgtaggtgattcctgggtgtggggggctg

SEQ ID NO: 937591 - DNA, 609 bp, Homo sapiens
tctgtgagtttgtaggtgtttctggggtgtggggtacagactcccgctgaaatctgggcgtaggtggagagtagctgggacagacaggagagtcatgggtggctgggggtgagctgctggatgatggcagtaagaacatatggtatattattgatgaatgaggtgactgtgaagaatctccagaggaggtcacgggagaacacaatgacatgagtgactgtcctgcttggttaggaaagggaaacgtaaagttgtggaattctgttgatgacggatgtgagagtggtgaagccctgcgggatgatgtagaggacttccacatccctggtgaggagctgccccttgggtctgagtttctgggaggggagagggagaagctgggtgaggcaggcatgaatattgaggagtcagggctgggggaccgctcataatctcccgagacctgtgagtctctgggggactcctggtygcatggggctgactcccgcaggaacctggggatggctggagagtaactgggagccacaggagagtccctgaggcctgggggtgaagagatgaaagacgcaggggtggagcaaagtgaggctcgtgagactgtaggtgatt

SEQ ID NO: 937592 - DNA, 628 bp, Homo sapiens
aaatatacccttgaccaatgccttgcaaaatagatttgtaagggcagcacctgcatctttgatgacccctgtaattgctcttctctgtatgtaagatctaacagtgggaaatgcagccgctcaactagaaaatttaaatacaatgggaataattggtttctggggtggcaaaatttaaatacaatgggaacaattggttctggcaggggccaagtggcagcactcaaccatcaaaggccaggtgggtgtaactaccrtaatggacagcagaggcaaagcagcaatcagaatagtctgattcatgtagagctctggcattgggtaattatttatggtgttcctagaagtgaaattgataggaagcttactgcattcctacttaatttatacaagcagaaaacttttaggtcgaatggacaaaagactaatttgaattataaaaacagagaatcacagactctcaatcagcttccagacttgagccagtttacagacccagaaccccttgaataagtgggaggctgggtcccattgaagaaggactccactacattacccacagtttatgtggtgagtcttctgccatccttccccaaggagacctccagccttttaccagggtaactgt

SEQ ID NO: 937593 - DNA, 688 bp, Homo sapiens
cttttaggtcgaatggacaaaagactaatttgaattataaaaacagagaatcacagactctcaatcagcttccagacttgagccagtttacagacccagaaccccttgaataagtgggaggctgggtcccattgaagaaggactccactacattacccacagtttatgtggtgagtcttctgccatccttccccaaggagacctccagccttttaccagggtaactgtcactggggaaagggaaatgatcagacatttcagggactactggacactggctgtgagcagacattgattccaggggacccaaaacatcattgtggtcctccagttaaagtaggggcttttggaggtcaggtaattaatggagctttagctcaagtttgacttagagtgggtccagtgggtctctggactcaacctgtggtcatttccccaatgcataattggcatagacatacttarcaactggcagaacacccacattggttccctggctggtagggtgatggctattatggtgggaaagaccaaatggaagccaatagagctgcctctacctagaaaaataggaaatcaaaagcaatatcacatccctggagggattgcagagattagtgccaccataaaggacttgaaagatgcaggggtgatgattcccaccacatcctcattcaaatctcctatt

SEQ ID NO: 937594 - DNA, 565 bp, Homo sapiens
gcagcttttagtctgggtctcatttagttttaataccaagctaaaatcctatggggaacactgcctgatgtcccttgtatttagttgtctcttcattctgggtggtggaaacactaaatattcccagtccctctatgtgttccagaaatttttcagcctactgatttctggtacttctttgttcatctttgggtagtctcttcttattcatgttctgttcagtactcagcaaaygcttcagagaacccctaagaggaatcttcagaactctctgtgtgcagcatccaactctccagtattttatcacatgaattctggtcaccttggcctccccagattttcctctctttctcttcaactcaacaaaattatttacctatgtttttctcttccctccttgcactgcagtctgtaacctgtgccaagaaagtacccaggaaagcacaggtctcacttgttgttgtttttgttgttgtttctttttctcaaggataacctactgcttaatatttgaaaaattttttcatttatgtattcattgagcttgtatttatttaaggcaaga

SEQ ID NO: 937595 - DNA, 589 bp, Homo sapiens
attgcattgcacagtgttactcttcatagcgagacagtggtatttatctgcaatgagaaatgcctgtatgaataaaatttttagagattaaaagcacctaatcctggaagttctctgagcaaaatattcctgttccacccctttcatatgcctaaatgctttttcccatcaytggatacttagaagcaattgtcctaaaatcccagaacatacccaggttgtttatgtagaaggcagtcccaagaaaatgcaattttcccacaatacaattgatcacttactccattcaccagataaagcataaatgcacaaaccaaaaattcagttgagtagtcaagaattttcagttttaaaatttgtatgcaaactccggtgcttaatacaatatttttataagagagtttacaaaaaagttttctcttatgtcagatacttagacaccaaatatttataacaaaataaatcagaaaattggttgatcacttatatcttttccccaccattagaaaccctatcttctgcatcttcctttttctaaattaccacagcccctgcatcactatttgttagattttatcacattcactta

SEQ ID NO: 937596 - DNA, 578 bp, Homo sapiens
gaattgagaggcacgggtccagtcattctgtgttgctcatcagaggactgaagcaggcccacctggaggtagctgacacttccttcatcatcgccgtttttggagagtggtcatacccgactttaccccagtttctccctgcccattcactccccaagccctgctgtatggcttccccgctgcccacgtctctgggaactgcctttcctcattctctccagtgagctgctagttgctatgtccagtgagttctccagtccctaagcttcttctctgtgcagggtttgagcctgctgataattcctcctatcctcaaattccctccttggtttctttgacccccactctccctgactctcttccttcctcactgctcagccatcttagccggcttcatgcgaaccatccgctgcttgcgtgggcctctcctctccatcccasatctgcctgcgtgggcctctcctctctcactgctcacattctcctgggggtttcaagtatcttcttgactactattatcagctcactgaggatgacctcaggccttcacctccatcccagatcggctatctgattgc

SEQ ID NO: 937597 - DNA, 618 bp, Homo sapiens
gcctgtaccctgcaaagccacagaggcagagctgcccaaggccatgggagctcacctcttgcatcagtgtgacctggatgcgagacatggagtcaaaggagattatttcagcgcttaaagatttgtctgctctgctggattttggacttgcatggagcctgtagcacctttgttttggctaatttctcccatttggaatgggtgtattgacccaatgcctgtacctccattgtatctaggaagtaactaacctgcttttgattttacagactcctaggctgaagrgacttgccttgtctcagatgagactttggacttggacttttgggttaatgctggaatgagttaagactttgggggactattagaagggcatgattgtggtttgaaatgtgaggacatgggatgtgggtggggggcatgggtggaatgatacggtttgtctttgtatccccacccaaatcttaccttgacttgtagttcccataatccctatgtgttgtgggagggacttggtgggaggtaattgaatcatgggggcagatatccacatgctgttcttgtgatagtgagttctcatgagatctgatggttttataagggcctttcccccttttg

SEQ ID NO: 937598 - DNA, 623 bp, Homo sapiens
agaagcaactttggaactgggtaacagacagaggttggaacagtttggagggctcagaacatgaaaggaagatgaaggaaagtttggaactttgtagagacttgttaaattgttgtgaccaaaatgctgatagtgatatggataatgaagtccaggctgaggcggtctcagctggagatgaggaatgtattgggagcttgagcaaaggtcactcttgctatgctttagcaaagagactggcagcattctgccccactctagggacctgtggaaatttgcacttgacagagatgatttagggtatttggtggaagaaatttctaagcaacaaagcattcaagatgtaccctggctgcttttaaaagccaacgytcatctgcacaaacaaagagatgatctaaaactggaactttattgaaaaagaaagcagagcataaaagtttggaaaatttgcagcctagtgatgtggtagaaaagaaaaacctattttctggggagggattcaagctggctgcagaaatttgcgtaagtaaagaggagccaaatattaatagccaagacaatgaggaaaatgcccccaaggcatgtcagagctcttcgtggtagcccctcccttcacagac

SEQ ID NO: 937599 - DNA, 749 bp, Homo sapiens
aagagaatattaaggatggggttcttttgttggttttgggttttctggagttggcttcttaatatgattagacccaaaaatgctagggactctacttctaatagtatggagaacactgatagtccttggcatgaattgctcagagagttatgcaaaataaatgcattttacacttctgattcattgctcataaggggcaatgagtttagtgactctatacataatacctttgaccatatatggagaaccaaggaatataatgaagctggttggttgctcctaagttcaatggacaaagtgattaaagaaaattatgaattcagtgattctgtctcctggcttcagaagcagatactgagcttcaactctgttaagactgccctgagtgagagtcttatctcttgcagagaaagagctgaarttgtggaaaaacagacataaactcttatcatgtgagtggctgacctgcaacaaaaggtgcatgcacagccttgccaggtgtctactgataaaatgagggcattgattggaaaagaatgggacgctgcaacttggaatgggaatgtatgggaggaccatgatgaagctggggacactgagtttgtaaactctgatgaaccctttttgccagaagaaacagcttccctatcgtcagtagtggcaacattcccccctcacccgactcatgctgccatcagcttctccacctttgtctgaggagataaaccctgcgctgcctgaggcaacag

SEQ ID NO: 937600 - DNA, 701 bp, Homo sapiens
aatatgattagacccaaaaatgctagggactctacttctaatagtatggagaacactgatagtccttggcatgaattgctcagagagttatgcaaaataaatgcattttacacttctgattcattgctcataaggggcaatgagtttagtgactctatacataatacctttgaccatatatggagaaccaaggaatataatgaagctggttggttgctcctaagttcaatggacaaagtgattaaagaaaattatgaattcagtgattctgtctcctggcttcagaagcagatactgagcttcaactctgttaagactgccctgagtgagagtcttatctcttgcagagaaagagctgaaattgtggaaaaacagacataaactcttatcatgtgagtggctgacctgcaacaaaaggtgcatgcacagccttgccaggtgtctactgataaaatgagggcattgattggaaaagaatgggacgctgcaacttggaatgggaatgtatgggaggaccatgatgaagctggggacactgagtttrtaaactctgatgaaccctttttgccagaagaaacagcttccctatcgtcagtagtggcaacattcccccctcacccgactcatgctgccatcagcttctccacctttgtctgaggagataaaccctgcgctgcctgaggcaacagtgatggcctccc

SEQ ID NO: 937601 - DNA, 845 bp, Homo sapiens
atcaaaagcatcagatagagttggtgatgacttccttctcaaacccttcattgccctctaggtttttcttccatttcacttggtgtttctaatttttctgtgctcagtcctcctaattattgttcatcagtgaatgttagaacatccaaggactcatcttccatgtcttcttttctttgcctacagtatctttctagcagatgttatcaagttcatatatcttctccacgctgattgcttccatatttacattcctgaccctgaccttgtccctaaattttagtaactacttgagatttcccactgtaggtctgataagcatgtcacgctcagtgggttctaagcaaaactcttagtactacccctttcccaccccttcctaatcatctcctcatctctccaatgtttctatcttagcaaatggcatcattgttcagccagttgctcaggcttccaaatttgaagtcattattgactcttgttcttttttaacatcataccacacatccaatctgtgaagaaatccaacaggctatatcttcaaatggatccagaatctgaccacctcttgccacatccaccatcacctttcacctatgctgttgcagtagcctggactccttgcttccaaaatagcagcmagattcctctttaaaagtgtaagtcagagattatacatccgactctgcgccctcctcccctgacaatggctttccattacattaagaataaagtctgaatttttaaggcagtctctagggccccatatgatctgttcccggcttgcctatctcatctccacccccactcttcgacttgcttactgtgctcatactggcttccag

SEQ ID NO: 937602 - DNA, 695 bp, Homo sapiens
tcctttccatgtttagtgcttccctgaggagctcttttagggcaggcctggtggtgccaaaatctctcagcatttgcttgtctgtaaagtattttatttctccttcacttacaaagcttagtttggctggatatgaaattctgggttgaaaattcttgtctttaagaatgttgaatattggcccccactctcttctggcttgtagagtttcagccaagagatccrctgctagtctgatgggcttccctttgtaggtaacccgacctttctctctggctgcccttaacatttttttcctttatttcaactttggtgaatctgacaattatgtgtcttggagttgctcttctcgaggggtatctttgtggcggtctctgtatttcctgaatctgaatgttggcctgccttgctagattggggaagttctcctggatattatcctgcagagtgttttccaacttggttccattctccccgtcactttcaggtattgcagtcagacgtagatttggtgttttcacatagtcccatatttgttggaggctttgttcatttctttttattcttttttctctaaacttcccttctcacttcatttcattcatttcatcttgcatcactgatactctttcttccagttgatcgcatcggctcctgaggcttctgcattcttcacatagttctcgagccttggc

SEQ ID NO: 937603 - DNA, 837 bp, Homo sapiens
ggggtgtgggggaagggttggattggaggataagattaggcaaaaaactagctggaccatcggtagtgaagggctcctaacttaggtgcttctcaaaggggagctctcagtccagtagctgtttgtcaggggtccatgaagagatgagtggagaaatcaggactgtgtgtttagaaactttcgcagcwatttgacagactcttttctttttttcttttttttttttgagacagagtcttgctctatcacccaggctggagtgcagtggtatgatctcggctcactgtaacctccacctcccgggttcaagcaattctcctaactcagcctcctgagtagctgggattacaggcatgtgccatcatgcctggctaacttttatatttttagtaggacagggtttcaccatgttgaccaggttggtctcgaactcctgacctcaagtgatctgcctgtctcgggctcccaaagtgctgggattacaggcgtgagccaccgtaccccatcagcaatttgacagactctttatgcccatgacgtgtgacaattaaaatttgagacttttattttgtatatgtttaggtttttttgtattaaatttttccaataaatactttttactgttttacacatgtatgttctgttactgaaacttggttaggaaacaaactgatcttcagtccaaatagtctgagaagatagcagtaggtgaagggctttcagaaggaaagtggcatcctgggcttgtccttttgcactgatttccctggtgcctgcggggaggatggattggaagaggtgacaccaggcgctggatttaagttagagggtgatgaa

SEQ ID NO: 937604 - DNA, 595 bp, Homo sapiens
ccaccatgcctggctaatttttgtatttttagtagagacaggatttcaccattttggccaggatggtctcgatctcctgacctcaggtggtctgcccgccttggcctcccaaagtgctgggattacaagtgtgagctaccgcactcggcctcaatatattttttaaataggaatgtatacaaggaggatgtcttcatctagactgaggaggggacccctggactgagaccttagagtaggagagaactaggcggagagagggagaaactgtttcaggcagaggaagcagcatgtgagaagaacctggaggcaggaaggagcttagtgatttctgggtttgaggaaagcccagtagcaggaagtgagcagaggccagatcattcaaggcttcctagaccaggagaagaagttttagatwgtatcttgaaggcagtgggaagctttggagggttttcaccaaagatacgttggtgaaatctagtatataccttcaagatacattagaagatagaattgatagacctggtaatagctataggtggtgatgcccagcattctggctcaggtgaatggcagggacattcactgagatggg

SEQ ID NO: 937605 - DNA, 593 bp, Homo sapiens
aatgtggctactgcaaacacgctgtgcccgggcccggtgcagtggctcacgcctgtagtcccagcactttgggaggccaaggcaggaggatcacttgaggctaggagtttgagaccagcctgggcaacatagtgagaccctgtatctaccaaaaattcaaaaattagccaggttgtggtggtgtgtgcctgtagtcctagctccttggggggctgaagtgggaggatcacttgagccagcaagttcaagactgcagtgagctatgatggtaccactgtactcragcctggacaacagagcaagaccctgtctcctaaaaaacataaagtaaaattttaaaaatacacagtgaattttgaagattcagtatgaaaaaagatattaaaaatttttttatattggttatatgttgaaatggtgtgctgggtatattgggttaatatattattagaattaatttcatttatttttatcttccattgtggctcctagagagtttaagttacatacgtagctggcattatattcctactggacagggctgcataagcatccgtccacttccatttccctctgttaagaggtcccaggca

SEQ ID NO: 937606 - DNA, 745 bp, Homo sapiens
caacctctggcctgtgactatgtttagtggtgataatgaataaagcagtgatcttcaaggaattcatatgtcaaatgagaaaaacatgatgcccaactttacatatgcaaaaaatatactttcagagttcgtgagtaagctggaataagtggatatcaaagcagtttttaacatcaataatgaggctccagttgttcactcatgaattaatggtgaaatagctgaaatgattctgaatccaaggtgatcatgataatagtgatgatgaagaagacatggttaacgccgcagaaaaatccctataagccatgtgatgaaaaagtgtgatgggcttattggaagactagagcagcatttattcataacagaataagaaatcatgtcagtttaaaaaccaaagggagttgaatgcaaaaaaccattgttaataagacagatgactctggagaaaacatttktaaaaagtcatccagcatgatttatagtcctttgggtgtatacccagtaatgggatggctgggtcaaatggtatttctagttctagatccctgaggaatcgccacactgacttccacaatggttgaactagtttacagtcccaccaacagtgtaaaggtgttcctatttctccacatcctctccagcacctgttgtttcctgactttttaatgattgccattctaactggtgtgagatggtatctcattgtggttttgattttcatttctctgatggccagtgatga

SEQ ID NO: 937607 - DNA, 726 bp, Homo sapiens
gtaatgggatggctgggtcaaatggtatttctagttctagatccctgaggaatcgccacactgacttccacaatggttgaactagtttacagtcccaccaacagtgtaaaggtgttcctatttctccacatcctctccagcacctgttgtttcctgactttttaatgattgccattctaactggtgtgagatggtatctcattgtggttttgattttcatttctctgatggccagtgatgatgagcatggatgaaattggaaatcattctcagtaaactatcgcaagaacaaaaaaccaaaygcatattctcactcataggtgggagttgaacaatgagatcacatggacacaggaaggggaacatcacactctggggactgtggtggggtggggggaggggggagggatagcattgggtgatatacctaatgctagatgacgagttagtgggtgcagcgcaccagcatggcacatgtatacatatgtaactaacctgcacaatgtgcacatgtaccctaaaacttaaagtataataataaaagaaaaaaaaagtcatccagcagaatgtctcttcatccctagaagatccacttcctagtctctaaactgcttctgatgtttcttttcacctaaaaaaaataaaatatagtgtatagtaatctttttgtcaaaacacagcatggcaggtggagactaaaagtctgctgttgtgtgttgttgctgc

SEQ ID NO: 937608 - DNA, 556 bp, Homo sapiens
caatttgaataccttttttcttgccaaatggctctggctagaacttccagtaaaacggaatagcaatgctgaaagcagggatctttttcttattcctgattttagaggggaagctgtcagtcttcaacattgagtatgatatgagctgtgcatttgtcacaagtgcttcttaccatgttgaggaagttcccttctattaytgtgtgtctttatcatgaaagaatgctttattttgtgaaatactttttgtgtgtgtttctccgaatgagataatcatgcaatttctccccttcatgcttttaatataatttattacattgattgattttcttatgttgaaacacccctacattccaaatttttgtacatcaaagaacgttctcaggaaagttaaaaggtaattttcagaatgggagaaacttgaaaatcattaatatgaaaagtatcatgtccagagtaaataaagatgtcttacaactcaacaacaacaacaaaaaaaaacccaaaaaaactaattaagaaatgggaaaaggactgcaacagatatttctccaca

SEQ ID NO: 937609 - DNA, 607 bp, Homo sapiens
aacacccctacattccaaatttttgtacatcaaagaacgttctcaggaaagttaaaaggtaattttcagaatgggagaaacttgaaaatcattaatatgaaaagtatcatgtccagagtaaataaagatgtcttacaactcaacaacaacaacaaaaaaaaacccaaaaaaactaattaagaaatgggaaaaggactgcaacagatatttctccacagaagatacacaaatggcttcaaaataagcacatgaaaagatgctcagcgttatctcttattagagagatacacattaaaaaccacaaggagaacgctttacacccatgaatatggctacaagtttaaaaagaagtaaagaagaaaatagaaaacagcaaatgttggttaatatgtggagaaactggactcttgcgcattgctggtggaaaggtaaaatgggtaagccmctgtgaagaagagtttggtggttccttcaaaaggtaaacaaatttaccatctgacccactaattccactccaaggtataatccccggagaattgaaaacagacattcagacaaatactcgtgtatgaatattaatagcagcactattgagaatagccgaaag

SEQ ID NO: 937610 - DNA, 589 bp, Homo sapiens
ctggggcaaattacaacatgtcccacaggtgtccaagtcatccatccggagaagctccaaaaagggcaaatgatgcctgaaatcactttggtctcaaacacgatgtgagaagaaaagaaataacatggaggatagcatgctgagatcttagaagaacctgccagtgctaaatattaaccaaaaaagcgcccatctaaaagcaagggcttgattgtctcacgaccaattctcaaaggccctgttggtctccaaatctgttatcattcttgatttgcccaaacaagaggaagcaaaatttgccaacattaaacatgttttaatgacttctttcacagggaatagagtgagctattgaaggacttcccagcttatgtctytagatgctagaaaatccaaatttcaccacccactgcattgttagtgtggttactttagataaagaatcatcattaagccaggtggggtggctcacacctgtaattgcagcactttgggaggctgaggtgggtggatcacttgaggtcaggagttcaaaaacagcctggccaatatggtgaatccccatctctactaaaaatacaaaaattag

SEQ ID NO: 937611 - DNA, 601 bp, Homo sapiens
gtggctcacatctctaatcctagcactttgggaggccgaggtggttggatcacatgagatcaggagttcaagaccggcctggccaacatggtgaaatggtgtctctactgaaaagacaaaaattagttgggcatggtgatgcacacctgtaatcccaggtacttgggaggctgaggcaggagaatctcttgaacccaggaggtggaggttgcagtgagctgagatygtgccattgcactcctgcctgggcaacagagcaagactccatctcaaaaaaaatataataataaaataaaacaaaaacatacacatatatatgtgtgtgtatatatatacatacacacgcacacacacacacacaaacatgtataccaatgttcaaaacagcattactcataatagcaaaggcctattaactaatgaatggaaaaataaaatttgatatatctctacaatggaatattatttatccacaaaaaggaatgaactctgatacatggatgaactctgaaaacatgctaagtaaaaaatcacaaccacatgttgtatgattccatttagataaaatgtccagagtaagcaaatctttagagactgaaaa

SEQ ID NO: 937612 - DNA, 601 bp, Homo sapiens
gtggctcacatctctaatcctagcactttgggaggccgaggtggttggatcacatgagatcaggagttcaagaccggcctggccaacatggtgaaatggtgtctctactgaaaagacaaaaattagttgggcatggtgatgcacacctgtaatcccaggtacttgggaggctgaggcaggagaatctcttgaacccaggaggtggaggttgcagtgagctgagattgtgccattgcactcctgcctgggcaacagagcaagactccatctcaaaaaaaatataataataaaataaaacaaaaacatacacatatatatgtgtgtgtatatatatacatacacacgcacacacacacacacaaacatgtataccaatgttcaaaacagcattactcataatagcaaagscctattaactaatgaatggaaaaataaaatttgatatatctctacaatggaatattatttatccacaaaaaggaatgaactctgatacatggatgaactctgaaaacatgctaagtaaaaaatcacaaccacatgttgtatgattccatttagataaaatgtccagagtaagcaaatctttagagactgaaaa

SEQ ID NO: 937613 - DNA, 595 bp, Homo sapiens
ctgggatctcttcttttgcctctgaaggccccaaccccatgtaatggagacatgtggttgctgcaaacagtcagactcaagaaattcagaaagtcccacaccccaatgagttaggaactgtagaggggactctggaagcaagtgcaggaagagacaagggagagaggaattgctctgcagaaaggagggtgaagaatttggatcctaagagataatcctgggggaaggaggtgacgaagaacaacaaygagatgcacaaagggaatcaagattgagtgagaggcctggcacggtggctcacgcctgtaatcccagcactttgggaggccaaggagggcggatcacttgaggtcaggagttcgagaccagcctggccaacatggtgaaaccccatctctattaaaaatacaaaaattagctgggtgtggtggcacatgcctgtagtcccagctactcaggaggctgaggcaggagaatcacttgaacccaggaggcagagcttgcagtgagccgagatcacccaccgcactccagcctgggtgacagagcaagactctgactcaaaaaaaaaaaaaaaaaaaaaattaagtgagat

SEQ ID NO: 937614 - DNA, 631 bp, Homo sapiens
aggccctgggctctgtctctcctggcctctctgttgctccctggatgctggctgtgcagatcactgtccgcatgagtctccattcacagtggacctgtgtggaggctttaaaatatgtccacaccttctccgctcaaactgtgaagcctaatgcccccaccccttgagtgtacaccagacttagtaacctgcttctaataaatagaatcggccrggtgaggtggctcatacctgtaatcctagcactttgggaggcagagacaggtatatcacttgaggtcaggagttcgaaaccagcctggccaacatggtgaaaccctgtctctactaaaaatacaaaaaattagctgggcatggtggtgggcacctgtaatcccagctacttaggaggctgaggcaggagaatcacttgaacctgggaggtggaggttgtagtgagccgagattgcaccactgcactccagcctcggcaacagagcaagactctgtctcaaaataataataataataataataataataataataataataataataataaatagaatcatggcatatgatttccaaaatgaggcctgaaaaggcactgggacctcctcctctccttcaggtcacttgcaccagggga

SEQ ID NO: 937615 - DNA, 615 bp, Homo sapiens
gccctagtaaacttgcctggacactgcttctttgtgaaatttgaagagagaactaagaccatctagagaccagggagggctggccgccctgccacacagggcatgtggaggcaggggaaggaggcaccatggagacagtgtctgcaccagttttatccatgaggtttggggccagaagatgtccatatcttgcaagatcactttcctccctcctggccacgagtctctccagcagggctaagggagctggtggcaacatgagggttgaatgcctctctcctcatcttagcttgggttcccccgtctcttcctgagacaaggacttaggtgcaagtagtttgtttcagaggtgatcccaggaagcaggtgagggagttgggaagtgaggctgaggtagggcaagagcctgtaaatggtggcattggggaccctcagggaacccttgacccatcccccataggaacaaggaagtggggrccggggagcatttgtctaccagccacccttcctcactggttgaagggtcctccatggttacaagctcccgggcctcaccactgccctgtggggagggaatacccttggtgggagaaagacacagaaaatcatcggcat

SEQ ID NO: 937616 - DNA, 783 bp, Homo sapiens
ttgcaccccaaaatgcccaacttattgaatcctgcttgccttctgaaatctgaaatcattctgaaattggaaatcattattaggtggtggactttgtaaatgccgaagattctttggaaatcattaaaaataactgcttaattgcccaatctagttatccctccagactcatagtgcacaccaccaagagtaatggatacacataaacaactaataataccacttgaaactgatagaagcaggaggcagacaaatcctaggcagatggggcagatcccggtgaaacccgaccttcaagctgaagacagtttaaagcctagctacaagttccaggtaaatccatggactggyttgagaacctctcttcccatttggtgtgctttcctctgattgatcctcactgttcatttagtttacatatacctgagcttccctaattggttttttacactgttgtgcccacctttgagtggtgtctttgttttagtcttttttgcatagtcacaaaccaatcagcacaggctccccattctgtgtccataaaagccccagaaccagccacgctgagagagagaatgaccccctgacttcatctggggtccaccctcgtgtctcgtctccgctgagaagctgttttgtcactcaataaaactcttctccaccctcctcacccttctattgtcagtataaccttgttcttcttggatgcgggacaacaactcaggacccaccaaacgcaggtacaaagaagcctgtaacactgtggccctccgccctctgctg

SEQ ID NO: 937617 - DNA, 783 bp, Homo sapiens
ttgcaccccaaaatgcccaacttattgaatcctgcttgccttctgaaatctgaaatcattctgaaattggaaatcattattaggtggtggactttgtaaatgccgaagattctttggaaatcattaaaaataactgcttaattgcccaatctagttatccctccagactcatagtgcacaccaccaagagtaatggatacacataaacaactaataataccacttgaaactgatagaagcaggaggcagacaaatcctaggcagatggggcagatcccggtgaaacccgaccttcaagctgaagacagtttaaagcctagctacaagttccaggtaaatccatggactggtttgagaacctctcttcccatttggtgtgctttcctctgattgatcctcactgttcatttagtttacatatacctgagcttccctaattggttttttacactgttgtgcccacctttgagtggtgtctttgttttagtcttttttgcatagtcacaaaccaatcagcacaggctccccattctgtgtccataaaagccccagaaccagccacgctgagagagagaatgaccccctgacttcatctggggtccaccctcgtgtctcgtctccgctgagaagctgtttygtcactcaataaaactcttctccaccctcctcacccttctattgtcagtataaccttgttcttcttggatgcgggacaacaactcaggacccaccaaacgcaggtacaaagaagcctgtaacactgtggccctccgccctctgctg

SEQ ID NO: 937618 - DNA, 653 bp, Homo sapiens
ttcttaagacaacctctaccttacttcttatggggcaaacaatttttgtcttattcatcatttattttctagcatacctcttataaaattatgttcttttgcctccaaataaatacgtacccattcatttcaagttccaactgtgtactcaagatcagtgactgtatttaggtttgtacctgacattgagctgtatgtgccattttctcattgccttctgaaagtggtgccacttagtccctacccttatttcaaaactacccttccataaattaatctctctgggtacttcttatctactaggtcagctccttaattggattaacccctgatctcaagagagtgattctccacactgagtccttggtctcaacgmtgggtcacactcacccttcatcgcaaacaaaggacacctttgccccaagctggagattaagtggaagtagcacacggccatgagggagttggcccaggaagtcatcacaggatttcactagaagaaaaaataaaacaacaggagtaagtcctccatgtgaaggggaaaacagagcatctggaagccagagagtcaaggcacctgtacatctaggggcttcagggctccagtctccctggggcgtgcagtgcagagacgcagcccctctgaggtcata

SEQ ID NO: 937619 - DNA, 795 bp, Homo sapiens
ctgccggccagagtgagcacctacaactgcctctccagcatggctacttggccagacttctgactgaagggcttagggtccccagagagaccatttcaagagacaggaggtggaagctgccaggtttttaaggcctggggctggaaaatggcacagtacctctaccatcttctgtgggtcacagcatctgcccaaataaaggggagggcacacagaagccccccttgttgatggggagtggggagagtctggctgcccatgtaatgggctgattctagagtgttagggatctttgtcatcagtcacctgcacatgcatggaagccttctcctgaggggatgtcagcttagagacacagaactgggacacacagcargtcatttctggtggggaggtgagtggttaagtttgggccctgggtggagggagcagtcagaggaggatgagaagggcatgcaggaggacaggtgaggccactgcttctgcctcaggtttgccccagggcaggtggcatgagtggtttgaatcatgggtctgtcgccaaccataccaccttggggaagccactttaaccctggaatctccattttctgatctgtaaaaggaggacgacaataaaatctcttccttagagatggtatgagggaaaaatgaacttcatcagtaacatctactggaatacagtatcgacttctttccatatggggatacaataggtgctcattaaatatttccttccttccttcttgcgatcctgggcaaggccatggggcctacttcattctgggggcccca

SEQ ID NO: 937620 - DNA, 668 bp, Homo sapiens
ggtataaagagaatcccagtattaaaacgtagaagtccttaggtcagctcctcaaggtacacttaactgtggccctatcagccttgcccttagcctgaccctgagagcagccacagtaagggcatgcctggccaatggcagggccactgtcttcagatagagtagcacccccttctccagatccaagggcccagcttcacctgtgctactgcctgacagaggmaaggggtggagactaagcccacagcacttgagagctgcgtcggagcttttctcatggtatcctccccagacaaaggtcagccctaattgcggagggctctaggtcttttgggcacaggactctggcctagatgcctagtgaacaagaattactgtcacccagggagaaagcatggacgccactttataggtttaacccttgccgtgccacccctcaccgctagcaagccaggtattctccacgggaaagcagactcatccaagagtcagcctgagccagacccaaggaggaagtagagtctgcggactgctttgggctgatctcctggggcagccgtcagcaggcagatttggggagtcactgctgtagggcatctgcactgtggcttcatccctgaggagagaccctaagctgaggctgggagggaagtcagtcttcacaccaa

SEQ ID NO: 937621 - DNA, 723 bp, Homo sapiens
gtgtgggctgtatcccggtggcatccacctgactactgtgcaggcggctggcggcaggtcccggacacattgggacgtggtgtagttttcatgctgtggaaggcaccctcctttccctggcagaaccaaaggcctggctaagcacctgtggggctggtctgcactgctgtactcctccccactccccttccctctgatactgtgggagggtcaccccaattctcttggtctttcctggtgaactttctgttgggccttaggcacctgcaggttggaatgataggctctggtccactttccagccccaggtgaaaaagctcaggtcaaccttttccccttcatttttctttctcccagggctctgcatggacccctttacacacagctctgccgcacaggctgctgccaggtatagaatcactgccggctcagataccaggatgtgaaaaaaatcaggacgagccttagaaaagtaagaggatggtgattaaacacataaataaataaagcaattaggaggaggatgcataaccaaaaagcaaggtaaggagaaagaggaggggacttcrggcaaggcctctccagttactgtcattagagcagaaatctgagagaggtgaggggccagccagcgggaagggcaccccaggtggggaacgacaggtgtgaggttctgaggacaggggtggggctgggctgggcaaggccaaggagggagagaga

SEQ ID NO: 937622 - DNA, 698 bp, Homo sapiens
aataatctgtacaacaaagccccatgacacaagtttacctaaataaaaaacctgcacatgtacccctgaacctaaaatgaagccatgatcctaatggttatggtttattacagtgaaagagtacaggttcaagtcagtaaagagaaaatgtgcataaggcagggtctagaggaaaccagccatgggctcctaattgttctctcatagtggagtygcaagatagtgcttaattctcccagtaatgatgtgtgacagcaaataggaagtgtggccaatcagggcagctcacctgagtcttggcatgcagggttttacttgggggctggtcacgtaggcatgcagcacccacttgcctgaccttagttactcagtctccagctcccccgggtcaagctgataccatgtggcccaaggcaccatcatgaatcacatttttagtgtgatgatgaactctatgtgtcaactggattggaccatgaggtgcccagatagaacatcattgctgggtgtgtctgcaacagtatttctgaaagagatgggcatttgaattgttggattcgataaagcaaacggccctccccaacatgggtggtcattatctaaccccaaaggaggaaggaggaatttatctggcctccctttttgtcctgagtacttgagctgggacatctcatcttatctttgcttgtccttggtct

SEQ ID NO: 937623 - DNA, 698 bp, Homo sapiens
aataatctgtacaacaaagccccatgacacaagtttacctaaataaaaaacctgcacatgtacccctgaacctaaaatgaagccatgatcctaatggttatggtttattacagtgaaagagtacaggttcaagtcagtaaagagaaaatgtgcataaggcagggtctagaggaaaccagccatgggctcctaattgttctctcatagtggagtcgcaagatagtgcttaattctcccagtaatgatgtgtgacagcaaataggaagtgtggccaatcagggcagctcacctgagtcttggcatgcagggttttwcttgggggctggtcacgtaggcatgcagcacccacttgcctgaccttagttactcagtctccagctcccccgggtcaagctgataccatgtggcccaaggcaccatcatgaatcacatttttagtgtgatgatgaactctatgtgtcaactggattggaccatgaggtgcccagatagaacatcattgctgggtgtgtctgcaacagtatttctgaaagagatgggcatttgaattgttggattcgataaagcaaacggccctccccaacatgggtggtcattatctaaccccaaaggaggaaggaggaatttatctggcctccctttttgtcctgagtacttgagctgggacatctcatcttatctttgcttgtccttggtct

SEQ ID NO: 937624 - DNA, 698 bp, Homo sapiens
aataatctgtacaacaaagccccatgacacaagtttacctaaataaaaaacctgcacatgtacccctgaacctaaaatgaagccatgatcctaatggttatggtttattacagtgaaagagtacaggttcaagtcagtaaagagaaaatgtgcataaggcagggtctagaggaaaccagccatgggctcctaattgttctctcatagtggagtcgcaagatagtgcttaattctcccagtaatgatgtgtgacagcaaataggaagtgtggccaatcagggcagctcacctgagtcttggcatgcagggttttacttgggggctggtcacgtaggcatgcagcacccacttgcctgaccttagttactcagtctccagctcccccgggtcaagctgataccatgtggcccaaggcaccatcatgaatcacatttttagtgtgatgatgaactctatgtgtcaactggaytggaccatgaggtgcccagatagaacatcattgctgggtgtgtctgcaacagtatttctgaaagagatgggcatttgaattgttggattcgataaagcaaacggccctccccaacatgggtggtcattatctaaccccaaaggaggaaggaggaatttatctggcctccctttttgtcctgagtacttgagctgggacatctcatcttatctttgcttgtccttggtct

SEQ ID NO: 937625 - DNA, 527 bp, Homo sapiens
gccttgctcactgctagcacagcagtctgagatccaactgcaaggtggcagcaaggctgggggaggagcgcccaccattgctgaggcttgagtaggtaaacagagtggccgggaagcttgaactgggtggagcccaccacagctcaagagggcctgcctgcctctgtagactccacctctaggggcagggcatagttraacaaaaggcagcagaaacttctgcagacttaaaagtccctgtgtgacagctttgaagagagtagtggttctcccagcatggagtttgagatctgagaacggacagactgcctccttaagtgggtccctgacccccgagtagcctatctgggaggcacctcccagtaggggccgactgacacctcatacggccaggagcccctctgagatgaagcttccagaggaacgatcagacagcaccatttgccgttctgcaatatttgctgttctgcagcctccgctggtgatacccaggcaaacagagtctggagtgcacctccagcaaactc

SEQ ID NO: 937626 - DNA, 527 bp, Homo sapiens
gccttgctcactgctagcacagcagtctgagatccaactgcaaggtggcagcaaggctgggggaggagcgcccaccattgctgaggcttgagtaggtaaacagagtggccgggaagcttgaactgggtggagcccaccacagctcaagagggcctgcctgcctctgtagactccacctctaggggcagggcatagttgaacaaaaggcagcagaaacttctgcagacttaaaagtccctgtgtgacagctttgaagagagtagtggttctcccagcatggagtttgagatctgagaacggacagactgcctccttaagtgggtccctgacccccgagtagcctatctgggaggcacctcycagtaggggccgactgacacctcatacggccaggagcccctctgagatgaagcttccagaggaacgatcagacagcaccatttgccgttctgcaatatttgctgttctgcagcctccgctggtgatacccaggcaaacagagtctggagtgcacctccagcaaactc

SEQ ID NO: 937627 - DNA, 556 bp, Homo sapiens
tgaatttctccccagaaaatgggtttttcttttctactgcattgcctggctgcaaatttgtgaagtttttatgctctgctttctcttgaacattttgctgcttagaaatttctgccaccagttaccctaaatcatctctctcaagttcaaagttccataggtctctagggcaaggacaaaatgccaccagtctctttgcatagcaagagygacttttactccagttcccaacaagtttctcatcaccgtctgagaccacttcagcctggactttatcattcataccactatcagcattttgatcaaagccattcaacaagtcttcaggaagttttgaactttcccacatctctctgtcttctgagccctccaagtctctaggaagttctaaactttcccacatcttcctgttttcttctgagccctccaaacagttccaacctctgcctgttacccagttccaaagttgcttccacatttttgggtatctttacagcagcatcctactacctggtaccaatttattgtattagtctgtcctcatgctgctaataaa

SEQ ID NO: 937628 - DNA, 556 bp, Homo sapiens
tgaatttctccccagaaaatgggtttttcttttctactgcattgcctggctgcaaatttgtgaagtttttatgctctgctttctcttgaacattttgctgcttagaaatttctgccaccagttaccctaaatcatctctctcaagttcaaagttccataggtctctagggcaaggacaaaatgccaccagtctctttgcatagcaagagtgacttttactccagttcccaacaagtttctcatcaccgtctgagaccacttcagcctggactttatcattcataycactatcagcattttgatcaaagccattcaacaagtcttcaggaagttttgaactttcccacatctctctgtcttctgagccctccaagtctctaggaagttctaaactttcccacatcttcctgttttcttctgagccctccaaacagttccaacctctgcctgttacccagttccaaagttgcttccacatttttgggtatctttacagcagcatcctactacctggtaccaatttattgtattagtctgtcctcatgctgctaataaa

SEQ ID NO: 937629 - DNA, 731 bp, Homo sapiens
gtggctgacacctgtaatcccagcactttgggaggccaaggcaagtggatcatttgaggttaggagttcaagaccagcctggccaacatggtgaaatcctgtctctactaaaaatacaaaaattagctgggcatggtggctcatgcctgtaatcccagctactcaggaggctgaggcaggagaatcactggagcccgggaggcagaagttgcagtgagcagagattgcaccactgcactcaaacctgggcaacagagcaagactctacctcaaaaaaaagttttcatagtgtggcccttgagttaagaatatctttcacagcctgagcaatgaagtgagatmttttctctactaaaaaaaaaaaaaatttatccaggcatggtggtgcagactggggaggctgaggcgggaggattgcttgagcccaggagttggagaccagcctgtgcaacatagggagaccccatctctacaaaaaatttaaaaattagctggacatggtgacactcacctgtagtcccaactacttgggaggctgaggtgggaggctcacttgagcccaggagatggaggctgcagtgagctgtgatcatgcctctgcattctggcctgggtgacagagtgagaccttgtctcaaaaaaaaaaataaaaattctttcttatccacctggtaacttggaaatgagtacatgaacctctaactgctctctactaagccatatttgagcct

SEQ ID NO: 937630 - DNA, 704 bp, Homo sapiens
aacctccagttagacaatccacatcttcccacacctgcctcaggctccatcaggctactgtgcctcctgcagcaaccaggccagggggaatctggattcctattacacttctgaggaaggtggtcagggagtgtggaggatgtgggtgggagggggtgaggttgagggcaggagtacactgtggtcttctgtcttctacctcattggcccaggtgctgctctccctccggttgtctgctttcagccctgcctgggaaatcaggccggcgccctgatcttcctgactctcattytgtgaggaacctgaacggatgagccatcgctcttgtcccacacgttctgtccaaaaggtgccctcctctctgcttgctcgggggcctgccctctgagctctggcactcaggctgggatgccgcccagtacagaggctctgcagccctgcaggggtctgactgttccacaccagcaggataaaggccacagggcatgctgtggtggaaaagcattcagaggtgtgggctgaaggcctctctttccacagtccctttgaagacaccatggaagtaggcacccccttgacagacaaggtggcccaaggcctggcttcacatgcaggctcttgggtcccagcgggtcctctctgtgcctggtatagccaactgcttcacgcatcttacccggtttcctctcctccacaacccaag

SEQ ID NO: 937631 - DNA, 699 bp, Homo sapiens
tgcacggcggggagatctcggctgacctgtggggcgggaccgcgctgtacgacgccgccgagaacggggagctagaggtcagcgcgggcccggggtgggggcgcgcgccctctgctggcaccgcgctctccgcacggccctgcccgggcgcgggggtcccagctcgtggccgcggccgggtcctcactgcgtgcccccacagtgctgccagatcctggtagtgaacggcgcggagctggaagtccgcgaccgcgacgggtacgcggccgctgacctgtcggacttcaacggccacagccactgcacccactgcctgcgcacggtggagaacctggtacgatccctgcgctgctcctgttgcattctctcttctcgcccctccaccccagtggtgggtgtcgtcaccccttttaccaaggaggaagctgaggttcagagacgtgaagcccgctaccccacacgacctgtcagcccagaaccactgcctgctggggactgagggagtagaggcacaaaggttaasggaaagaggacagggaagaacagggtcaccccaaggggtaaggctggagaaatcacaagacaggccccattgggaacaggcaggctcattcacctacccatagacattagcttgggtataactcacagccaccctctgcagaagagagtgtaagtgtcccgttccacatatgggta

SEQ ID NO: 937632 - DNA, 503 bp, Homo sapiens
ctagaagatagctccttgcattttttgggggagaacacttttgcttcaagggagtgtttcctcccaggattagaaatctttctgtaacctcaggaaacattgctgatgaaaaccaggcatggtgtgctgtacaacttgtagtaataaggcagaagttaaaaggaaaagacaggttccctgtacttggctgactccaagacctgccatagatagagccctagtagatcctcggtaacacgatctgaaaagtcagagccscgaggagtgagttccggagactctctcaacacagtaagccccaacaaagataagaggaaaaaacaacaaatgcctttactaccttctctttcccccttcccatttctaattattcaagttttgttaagttcttgatttcccttcagtgcagctgcaaggtcaccagctatacttgcattgcaagacctgtgacagtttgattagctgcctttgttctgcttctataagccctcttgcctgccccc

SEQ ID NO: 937633 - DNA, 566 bp, Homo sapiens
agccggggtcccctcgctcagcccatgagacaaataaatgaatacataaataaataaataaataaaagatggagtcttgctctgtcgcccagggtggagtgcagtggtgcgatctcggctcacttcaacctctgcctcccaggttcaagtgattctcctgcctcagcctcctgagtaactgggattacaggtgcatgccaccacacccggctaatttttcgatttttagtagagacgggatttcatcaygttggccaggctggtctcgaacccctgacttcaagtgatccacccgccttgacctcccaaagtgctgggattacaggcatgagccactgcacccagccagaagtgggcattaatatgcaggcgccgtatagggcaacatctgtgtgcacctcttacaaatcttaatgctgtgtatatgaggggagtccttcgtgtccccctggggatgtttgaggttgcctgtatgtgttatgtgtgtgcatatttttaagctcagatatgcataggcggattgacacctctgtttgaatgtattcccatgagctcatgccattaat

SEQ ID NO: 937634 - DNA, 857 bp, Homo sapiens
ctgcaaggagctggagcagtgggaggcggcatggaggcgcgaggaggaggtgggcatgggggtgcagggaggccggcgatataagaggaagataatgcacaattatgctagtgagactctcttttccaataatgtttgcacttctcaatactacatttaaaaaggaaataggagcacttgaacggttaagtaagaagatgaacaaaattgaacagaggaaaaataactgtctgaagacatgttgaaaatacatttaaagacagtctgtctgagacaggagctgagctggccaatccatcttttaaataattgaacatcattcaggtgtcaagtatttgacctggagcctggaaggggaggagagagtccaaaaaaaagtcaaaatataaagaaaaaaaattaaagaacttgtcccacaaatcaggcaaccaaggtctaaacttataccctctgcctgggtaaattgttgttgcttctttctgtgactcttaaaagatgtaccatatacmtcatttaatgactttgctttattcatgaaaactctatccccatgggaaaagctgttaaatgaaaaaagatttcttttaagtagaaaaattatgaaaggattccttccaaccctccatacccaaaatatctcaaatgaattatgtatctatcaattatcaatatatatcaaaatataccaattaaaaatatcagttaaacaatacgtcaattgaactatgaaagcaagcttatttaagtagcaaagaataacgtgaaggttagtaagtatagcttatacttaaaatacaatgaattgaaagctcatggcacttcatagagtaggaagaagaaacttaatagaaagtggt

SEQ ID NO: 937635 - DNA, 857 bp, Homo sapiens
ctgcaaggagctggagcagtgggaggcggcatggaggcgcgaggaggaggtgggcatgggggtgcagggaggccggcgatataagaggaagataatgcacaattatgctagtgagactctcttttccaataatgtttgcacttctcaatactacatttaaaaaggaaataggagcacttgaacggttaagtaagaagatgaacaaaattgaacagaggaaaaataactgtctgaagacatgttgaaaatacatttaaagacagtctgtctgagacaggagctgagctggccaatccatcttttaaataattgaacatcattcaggtgtcaagtatttgacctggagcctggaaggggaggagagagtccaaaaaaaagtcaaaatataaagaaaaaaaattaaagaacttgtcccacaaatcaggcaaccaaggtctaaacttataccctctgcctgggtaaattgttgttgcttctttctgtgactcttaaaagatgtaccatatacctcatttmatgactttgctttattcatgaaaactctatccccatgggaaaagctgttaaatgaaaaaagatttcttttaagtagaaaaattatgaaaggattccttccaaccctccatacccaaaatatctcaaatgaattatgtatctatcaattatcaatatatatcaaaatataccaattaaaaatatcagttaaacaatacgtcaattgaactatgaaagcaagcttatttaagtagcaaagaataacgtgaaggttagtaagtatagcttatacttaaaatacaatgaattgaaagctcatggcacttcatagagtaggaagaagaaacttaatagaaagtggt

SEQ ID NO: 937636 - DNA, 533 bp, Homo sapiens
gtggtgagggctgaggcagggtcatggggcaagcgtcactagtgctcaccgcagcgtcgcagggcacagtagtcgaatggggtccttgggtccatcgtgtagcaccagggcccatggctatccccatctgggtctggcagaagttctcctccagttgtgcatgcggttcggaggtaaaygtgaaccgaggcgggagcgggagcgaagtcgtggcagggtagtctcaaccatttccaggctctggtcccagacatcaaagcatgccgccccagggttagggccctggcggggccgggagcaccagggattcactgcggcttgtgcggcgtctcagcggacccgcgctggcactggacacccttgcgggtcttgctgaccgtgccgcggtactgctcccccgcgccgtggtagcagtctgcggccggtgcgggcagccatcaggccgagaccccgccccggccctccggttccaggcttccagccccggctctgtagcccccaagcttgggcctcaccctggggccgcacgtcgt

SEQ ID NO: 937637 - DNA, 531 bp, Homo sapiens
gcggttaagggagccagcctttggtggtgagggctgaggcagggtcatggggcaagcgtcactagtgctcaccgcagcgtcgcagggcacagtagtcgaatggggtccttgggtccatcgtgtagcaccagggcccatggctatccccatctgggtctggcagaagttctcctccagttgtgcatgcggttcggaggtaaacgtgaaccgaggcgggagcgggagcgaartcgtggcagggtagtctcaaccatttccaggctctggtcccagacatcaaagcatgccgccccagggttagggccctggcggggccgggagcaccagggattcactgcggcttgtgcggcgtctcagcggacccgcgctggcactggacacccttgcgggtcttgctgaccgtgccgcggtactgctcccccgcgccgtggtagcagtctgcggccggtgcgggcagccatcaggccgagaccccgccccggccctccggttccaggcttccagccccggctctgtagcccccaagcttgg

SEQ ID NO: 937638 - DNA, 533 bp, Homo sapiens
gtggtgagggctgaggcagggtcatggggcaagcgtcactagtgctcaccgcagcgtcgcagggcacagtagtcgaatggggtccttgggtccatcgtgtagcaccagggcccatggctatccccatctgggtctggcagaagttctcctccagttgtgcatgcggttcggaggtaaacgtgaaccgaggcgggagcgggagcgaagtcgtggcagggtagtctcaaccatttccaggctctggtcccagacatcaaagcatgccgccccagggttagggccctggcggggccgggagcaccagggaytcactgcggcttgtgcggcgtctcagcggacccgcgctggcactggacacccttgcgggtcttgctgaccgtgccgcggtactgctcccccgcgccgtggtagcagtctgcggccggtgcgggcagccatcaggccgagaccccgccccggccctccggttccaggcttccagccccggctctgtagcccccaagcttgggcctcaccctggggccgcacgtcgt

SEQ ID NO: 937639 - DNA, 601 bp, Homo sapiens
tttttttttttttttttttgagacagagtcttactcttgttgcccgggctgaagtacaatgacacgatctcggcttactacaacctctgccccaccaaggttcaagcgattctcctgcctctgcctcccgagtagcggggattatacgaatgtgccaccacgcccagctaatttttgtgtttttagtagggatggggtttcaccatgtggccaggctcgtcccgaactcctgacctcaggtgatctgcccgcctcggcctcccaaagtgctgggattacaggcaygggccaccacacccagtctggactggttatacttttgagtttagtggagaattcagccttctgacctcctgcatgccagagtctaggactaggcacagccttttttctggagtctaggcagcccccctgtgagctcaggggaatggatgggatttagtgtcatctggctgatatcaaggacttacttttagttagtaatcttttcttttctttatggctcactgcagccttggcctcctggtctgaagcaatcctcctacctcaggtcctgtgcagttgggaccacgggtccatgccaccaggcttgctgattttt

SEQ ID NO: 937640 - DNA, 644 bp, Homo sapiens
agctgcgggacaaggtgctccacgagaaggacctgtcccagcagcagatgcaaagcgacctggacaaggctgacctcagtgccaggagggtccctggtgggtgctgcatgaggcaggcgtcactgcagaaggtaaaactggagagttggggagaagggagcatctgttcactaggagcagggccttcctctgtgagctcagccagccttcccaggcaccccactgaggttccgaaggcagttgcccagtgtttatcatraacagcttagcctcctatgacagaacttgtggccgggtgctgtggctcacacctgtaatcccagcactttgggaggccaaggtgggagattacctgaggtcaggagctcaagaccagcctgcccaataggcgaaaccctgtctctactaaaaatacaaaacttagtcgggtgtggtggtgtgtgcctctaatcccagctacgagggaggctgagacaggagaatcgcttgaacccaggatgtggaggttgcagtgagccaagatcacatcactgtattccggcctggacgacacagcgaaactctgtctcaaaagaaaaccacaaaaaaacaacttgtgccccttactcctgccacctgggtaagtcctccagtgctttcccatg

SEQ ID NO: 937641 - DNA, 606 bp, Homo sapiens
gctgctgatctcctctgatcctccatttcatcatctgttaaacggggatgaggataaactacataggcatgttatgaagacaaaatgaggttatgtctaaaatacttagctgggtgcttgacgcatagtaagtgctgagtcagtaatagggtttttgtttgtttgtttgtttttgtttgtttgttttgagatggagtttcactcttgttgcccaggctggagtgcaatggcgcgattttggctcacctcaacctccgcctcccaggttcaagcgattctcctgcctcagccttccaagtagctgggattacaggcacgcgccaccatgcctggctaattttgtatttttagtagagacggggtttcaccatgttggtcaagctggtctcgaactctcgacctcaggtgatctgcccacttcggcctcccaaagtgctgggattacaggcatgagccacygcgcccagcctgtttgattttttgagacagagtctcactcttgtcgcccaggttggagtgcagtggtgcgatctgagctcactgcaacttctgcctcttgggttcaagcgattctcctgcctcagcctcccaagtagctaggactac

SEQ ID NO: 937642 - DNA, 603 bp, Homo sapiens
tggccgggcgtgctgactcatgcctgtaatcccagcactttgggaggctgaggtgggcggatcacgaggtcaggagatcgagaccatcctagctaacacagtgaaaccctatctctcctaaaatcacaaaaaattagctgggcatggtggcacrcgcctgtagtcccagatacttgggagggtaaggcagaagaatcgcttcaacctgggaggcagaggttgcagtgagccaaaatcacgccactgcactccagcctgggtgacagagcgagactctgtctaaaaaaaaaaaaaaaaaagaagtggcagctctgtctgcttctcacagagttgctagggacaactgctgaggcaggcacctgccctcgggctccccgggtgggctgctatttgcctgtgggctctgcctgcccgcctgtccagtccccagggatctgaactgtgacctcccccttgctcttcttgccctttgcattgcctggcttggcctcattaatgtccccaaatctgtgttcttctctccagctcctctggcaacccctgacccccttcattcctcacagccagtcctaactctcctccatcccaaccccaatccctctt

SEQ ID NO: 937643 - DNA, 623 bp, Homo sapiens
agatccctgaggaatcgccacactgacttccacaagggttgaactagtttacagtgtaaacaccaacagtgtaaaagtgttcctatttctccacatcctctccagcacctgttgtttcctgactttttaatgactgccattctaactggtgtgagatgttatctcattgtggtttggatttgyatttctctgatggccagtgatggtgagcattttttcatgtgtttttttggctgcataaatgtcttcttttgagaagtgtctgttcatgtctttcgcccactttttgatggggttgttgtttttttcttgtaaatttgtttgagttcattgtagattctggatattagccctttgtcagatgagtaggttgtgaaaattttctcccattctgtaggttgcctgttcactctgatggtcgtttcttttgctgtgcagaagttctttagtttaattagatcccatttgtcaattttggcttttgttgccattgcttttggtgttttggacatgaagtccttgcccatgcctatgtcctgaatggtaatgcctaggtttttatggttttaggtctaacgtttaagtctttaatccatcttgaagtaatttttgtataaggtgta

SEQ ID NO: 937644 - DNA, 584 bp, Homo sapiens
aatagtaaccagttgagtaagatcaggctaaaatagtgacgattgggtattggaaaggtagaaattattgctcaccttgataagagctagtttaggggagtggtatgggttaacatccgaatgaagtggttcaacagagaatggtagttggtaagtgggaaattgagaatagggacatatttttgtagacaagttttggtgtcttcctttgtttttggattgtatattgttttcatttagatgttacttattgtattccttttcctgttgcaattgtaayggataaccacgtttggtgatttaaataacaacagtttgttctcttatagtcttagaggtcatgagttggaaataattctcacaggactgaatgaagatattaggcagggcaaattctttctgaggacaacgtgggagaatctgtttcttgtcacttccagtatatggaagctgccagcactccttggcttgtggctccattactccaatttttactttcctcaccatgttgccttctctgactttccagtgttctaataaagacgtttgtgtctaaacctggctcaccacctggataatatagg

SEQ ID NO: 937645 - DNA, 602 bp, Homo sapiens
tctcatagtcatttgatatctcctggttaggtgcttgcttggtctctgctagagtccagaaggatgccaggagctgattttctaagggtgagcatttctctacatcagaagtcatgaacttgcctctaaccctaggggtctgtgctacgaatcttctgttagggtgtggcagacacacaaccttgtctacatggatacttcttttgcaccgttgggtttgtgattgggtaaggcccaagcagcaaggtacttacaccactgactagatctctcgtgctctgatccccacttgaaactgatcattttgactgrgtacagtggcttatgcctgtaatcctagaggtttgggaggccaaggcaggaggatcacttgaggccaggagtttgagacccgcctgggcaacatagtgagactccatctctacaaaaataaatttttttaattagccaagctgggtgcggtggctcacacctgtaatcccagcactttgggaggccaaggtgggtggattgcttcaggtcaggagttcaagaccagcctggccaacatggtgaaacctcatctctactaaaaatgcaaaaattaggtaggcgtggtggca

SEQ ID NO: 937646 - DNA, 602 bp, Homo sapiens
tctcatagtcatttgatatctcctggttaggtgcttgcttggtctctgctagagtccagaaggatgccaggagctgattttctaagggtgagcatttctctacatcagaagtcatgaacttgcctctaaccctaggggtctgtgctacgaatcttctgttagggtgtggcagacacacaaccttgtctacatggatacttcttttgcaccgttgggtttgtgattgggtaaggcccaagcagcaaggtacttacaccactgactagatctctcgtgctctgatccccacttgaaactgatcattttgactggrtacagtggcttatgcctgtaatcctagaggtttgggaggccaaggcaggaggatcacttgaggccaggagtttgagacccgcctgggcaacatagtgagactccatctctacaaaaataaatttttttaattagccaagctgggtgcggtggctcacacctgtaatcccagcactttgggaggccaaggtgggtggattgcttcaggtcaggagttcaagaccagcctggccaacatggtgaaacctcatctctactaaaaatgcaaaaattaggtaggcgtggtggca

SEQ ID NO: 937647 - DNA, 787 bp, Homo sapiens
agggggcatggtggggtcaaatggtggggagacatgaggggtaaggctggcgagaaatggggcaggagggagtgtggggggcagacagagtggggtcctcaaagctgttgtaaagagctcagacttggccaggtgtggtggctcacgcctgtaatcccagcactttgggaggccgaggcgggtggattacctaaggtcaggagttcgagaccagcctgaccaatatggtgaaaccctgtctctactaaatacaaaaaattagctgggtgtggtggcacatgcctgtagtcccagctacttgggaggctgaggaaggagaatygcttgaacccaggagttggaggttgcagtgagccgaaattgtgccattgcactccagcctgggcaataagagtgaaaactctgtctcaaaaaaaaaaaaaaaaaaaaaagagctcagattttgtcccaggggtagttgggagccatgcagggcgtcaggcaggtgctggtgttcttgggttcgcatttggaaagatgcctttgggtggtaaggagtgggtagaaggaaatgggatggagaaggcagtgcagaggctacagagaaagatcaggctgggcctggagacctgggaggctttggggtctgtcttggagaatgggggtggtggtatcatctcagttggtgcctggacaccagggggaccagtcaggctcttggactccagctttcagccctgggaggctggaaggccccaaggaattccaggcccccacctgtgtcctcccgcctgggccgcagcacaga

SEQ ID NO: 937648 - DNA, 731 bp, Homo sapiens
caccactgttctcagtagctctaagacctccttatcatgacttacttccttgtattttcctgactctccaacttatttataaacggaaaagagcacatcattcaaagcagtcggttaacttaggtaaggaaagccaacaagcatgattgtgactcaagatagttgctcttgttaagtcactgctcctgctctccctctccctccccctccccctctccctccatctctgtctccctctctctcctctgtctccctctctctccacggtctccctctgatgcctagctgaagctggactgtactgccgccatcttggctcactgcaacctccctgcctgattctcctgcctcagcctgcccagtgcctgggattgcaggcgggcgccgccacgcctgactggttttcgtttttttttttggtggagacggggtttcgctgtgttggccgggctggtctccagctcctaaccccaagtgatctgccagccttggcctcccraggtgccgggattgcagacggagtctcgttcactcagtgctcaatgttgcccaggctggagtgcagtggcgtgatccccgctcgctacaacctccacctcccagccgcctgccttggcctcccaaagtgccgagattgcagcttctgcccggccgccaccccctctgggaagtgaggagcatctctgcctgcccgcccatcgtttgggatgtcaggagcccctctgcccggc

SEQ ID NO: 937649 - DNA, 478 bp, Homo sapiens
accataatatatataatttttacttgtcaattaacaataagtaaatggacagcagtacttaaaagaaaaagatgtacatatttagattattctcttatatggacccaactgttaattgttaaagctagcaaaatggaagttattgtatatatggaatctatatatatagatattatatgccccatatatataatcaatagacgatcgacagcaatccattaaaaattagtgtgggttcctacaaaatttacatttatttttacatttatttattaaataaatattgagtacttctagctcttagtkagttagacagacttggtcttgcccttgtagaccctccttatgttctatttcagtcctttttttttttctttttttgagatggactctcattctgtcacccgggctgcagtgcagtggcgccatcttggctcactgctacctacgcctcccaggttcaagcaattctcctgcc

SEQ ID NO: 937650 - DNA, 595 bp, Homo sapiens
cccagcactttgggagaccaaggggagcagatcacggggtcaggagatcaagaccatcctggctaacacggtgaaaccctgtctctactaacaatacaaaaattagctgggcatggtggtgggcgccggtagtcccagctactcgggaggctgaggcaggagaatcacttgaacccaggaggcggaggttgcagtgagccgagatcgtgccattgcactccagcctgggygacagagtgagactttgtctcaaaaaaaaaaaaaaaaaaaggaaaaattaattttgtcatagaggatgaaactcttaatccttcctttgaagtaattacttttagagagcttgtttggaggttctagcaggggagtgcagctactcatatacccttgcccaaagaacggccctcctctgttggggaaggttgtccgcagcgtctggaaggacgcatgtggacggatgagggaggaaggagacatccacctagccagccagatcagacaaattaaccctggccatcagtggggtgacagatgttgcagccagatcaccctcacatccggaaataattgcttttaaaacgcaatatttgaaaacctg

SEQ ID NO: 937651 - DNA, 681 bp, Homo sapiens
cagggaatttcattcgcaagacagttttgtaagggggtactcttattgcgttcattctgggtataagtgacttgggctcagagcagttgagtcactagcccaggatcactcatgggtttgagcttgggtggctccgtctgtggcttaaccacagcctgctctgcctggtccrgttgcctgtggtatctggctgtcaccttctgtccctgggctctgcctccacagattctggccttccaggaagccaccactgttgaaaacctctaatgtccagtcacaagtgtggtctaacaattcctgcccacgggggctccaaccgcaatggaccccaccagtcccagcttcaggaaccagccctgcatagactcaggagccaaggacctgcagtgggggagacccagagaggcccagcagcctgccccaagtcacacagcacactcaagcatccttgagacaccttgctcttatctttgggtcctcatgccactgggaaaaagggggcacattcccaaagctagtttccagaatgatgggaaggagagcactgagtctttccttgcttggtcctgcgccggggagtgtggtggggtaaagggatcctgatttcctcaggccaggtctgaggagcacagtggccagtctgagttctgttccagatgatggctgtgacctccctccagc

SEQ ID NO: 937652 - DNA, 603 bp, Homo sapiens
tgctgggtcttgtggtgaaggctgcctgggaagaggggctggtgaggagccgctggagttccgacttagagagaattcctgtccaccggtgtggaatgccccgtgccattccttcctccccttggtgcctggcacagggcttgcagatcctctgcttagccccccaacccagtctaccttaactctcctgcctggggatttgcctcttgggatgttggtggaggggatctctatatggtaggaggagggctttgtagtaattcttagccataatgctgtgctattccacaaacctcagccatcttctcccacgcccttacgaggtcctactttatacattcttaccagatgctacataagaaagagcataagagactgagatgtttgactcagagaaggaaagtgaccagctcaaggtcactcagcaagtgtgtagcagaactgggactkgcttcaaccagtttcctgttgggtcattgttcccggcactgaagatagtgcctggcctgaggggctgtcttgtcatttcacatgtacagtgtcttacttttagccctggacttaaagcaacttataagcaaggaccgtgtcttatgcttagtt

SEQ ID NO: 937653 - DNA, 779 bp, Homo sapiens
tatctaacaccatagaaggttcaggggaatgctgccaaggaagaacaggtgccagagttcagatggaggtgctgctacttcttctttttttgagatggagtctccctctgtcactcagcatggactgcagcagcacgatctcagatcattgcaacctccacctcctgggctcaagcaattctcctgcctcagcctcccaagtagctgggattacaggcatgaatgcgccaccatgcccagttaatttttgtatttttagtagagacagcattttatcatgttggccaggctggtctagaactcctgaaccttaagtgattcacctgccttggcctcccaaagtgctggaaatataggcgtgagacaccgcgcccggccagagggactgttacttctaacaaggggtgatggggagaggcttgggctccagcacagcaggaacagrtaggaaacttcctgaaatgctgataagccttaaaaaagagtttgagtgaaataggtgcacatgagagttaagacagaagccccacagttagcaaagaagtggaggcaagactgtgggatgtgtgctcacagagggaggatgggcttgtctgaaggggaaggtgtgagtcagcaggacagaggcaggtctttcctgattcaggggagccaggagcactggcctgacttactgggcaagtttcttttgatgacagtgcctcagcttttcccttcactaatcaggaagaaaaacacccactgttggctctccagcatactgtctccttttgttgaca

SEQ ID NO: 937654 - DNA, 709 bp, Homo sapiens
cagagactcccactccccgccactcctttttttttttttttttttaaacagtttcactcccatcacccaggctagagtgcagtggcacaatcatggctcactgcagcctcgacctcccagtctcaagtgatcctcctgcctcagccccacaagtagctggaattacaggtgcatgctgccattcctggctaatttttgtattttttgtagagatagagtttcaccatgttgccaaggccggccttgaactcctgagctcaaakgatctgcctacctcagcctctcagagtgctggtattacaggaatgagccacagtgcctggcccagagacattttttattgttatgactggaaaagctgctactggcatctagtaagtgctgcgaaacaacctacaatacacaggatgacggccccttacaatgaaagaattattcagcttacttctagaaagctagggaatttgatttttgccatcttcagatcccatgacaagtaagagttaactgattaaatagttccactcgctgggggtgcttctgtggttttcctctccttttaagaaaattagttaagaaatagtgttgcttccgggagtgacttacacagatagagtcaggatcttggggaactaatctgagtcagcgactgaagaattttctctatgcctgaccagtccccaccccacactgccacaaggctcctgct

SEQ ID NO: 937655 - DNA, 846 bp, Homo sapiens
acagatgcctgggagcttcagatattcatgctcttcaggcttcctggcaaaagtagctgcaactctggcaaagcaggaggttagatccccgtaacatatctctgggaagaggctgaatccagggggctgagcagccacggtctgcaggccccacttccatggcgcctcacaggataagatccacttgcttggaattccagccagccacggtagcagcattgkgcctccctgatatggagctcccagggggaaaggtgggctgccatctttactatatgggcaacttaactgttccagcctttgggttttggagcatctgaggtgaccagagactgaagtgaacccccagaacagcacatctgctctatgaaaatatggccagactactttcataagcagacccccaatcccattcctcctcactgagcaagatctcccaaccagggtctccagccacctcctacagatgcattcaggccagcaacagctccatacctccctgggaccaagatcccagagggaggggcaggctgctgtctctgctgttttgcagccttcactggtgatacctccaggtcctggaaaatccgaggtgactagggactggagcgaaccccccagcatactgaaacagccctatagaaaagtggccagactgttacatgggtgctcgttcccctatctccttcacaggtcctccaggcctgggcctctagccacctcccacctaacgaaggagtagcaactcagcaactccctggacagagcctccaggagcaactgaaagcctctctgctactgcttctacgatggaactttccttgccacccttggactaacaaagga

SEQ ID NO: 937656 - DNA, 553 bp, Homo sapiens
atccagaagctagcttaaaaaaaaaaaaaaatgaagtagatggctgggcactgtggctcacacttgtaatcccagcagtttgggatgccaaggcaggcagatcatgaggtcaggagttcgagaccagcctgaccaacacagtgaaaccccatctctactaaaaatacaaaaattagctgggcatggtggcattcacctataatcccaactacttgggagacrgaggcaggagaatcacttgaacccggaaggtggaggttgcagtgagccgagatcatgccactatactccagcctgggcaacagagctagactccatcaaaaaaaaggaagtagatagaccactagctggactaatgaggaaaggagagaagattcagataaacacaatcagaaacaacaagagagatattaccgctgatcccacataaatacaaacagccatcagagaatattatgaacatctctatgcatataaactagacaatctagaagaaatccctagacacatacaccctcccaaaactgaatgagaaataaattgaatccctgaa

SEQ ID NO: 937657 - DNA, 625 bp, Homo sapiens
acagctgggtctaccagtgtccacttctttttctgggcccacagggaaacagcatctcccgtggccttcacgtcagggtggccatgagacttgcattggccaatcaagtgtgaatagaggcagcgagtgtaccttccaggtgggagcatctatgagtcagcgctcagctcccctgtcctccttccctgtcacagtgactgaagaagcacatgtggagatgttgacatcctcagacagtggagcctccatcagtgacagtccctgctgtctgtgatgcctccctgccagtcagaggggacatgtagtaagagcaagaaattacctttgttgtttcgggggkttgtttttgtgccatatcctagactatcctgacagccacaccaatgtgaaagcaattatgaaaatagatgctagtataagaagagaaaagggaatgaaaaacaaggtattaataggggagtactacgagtactttgggaggcaagataccagatgagttatatactctcttacataaatgtctgcacttgccaaatgcttcacagtaagaatgcatggctgtgtcaaggggaaagatcaatgttattaacaagaacacctgggccccggccaaggccgtcctcac

SEQ ID NO: 937658 - DNA, 555 bp, Homo sapiens
aaagcagccagactgttttccacgcaggttcacgtccccgccacttctctctaaacaaggcctcccagcccgacagcccagccacccactgctacctgggctatctggccggcagcagctctgcacttccctgggactgagctcccagtggtggcaggyaggactgccatttttgctactctgcagctttgccccctactgccctgagtcttgggagggagaaaagtgattaagaactaaagtgggccctcagcaagcatagctaccttacagaaaggcagccagacagtattccatgtatatccctgcccctgttaacttcactgggcagggcctcttgtcctgggcccccagcacaaccatcgtgccactacctaaacacttcagttggtagaggctctgcatttctctgcaaaggaaatgccagagaaaacctacagccactctcccattgcagttgcatggaaccactcttactgcccatatgctggaaaaggaacaaatggcctggttgtgtcaccggcacctccaacacaccacagcaacaatacagag

SEQ ID NO: 937659 - DNA, 558 bp, Homo sapiens
ccggttaccaacccgcatgtcactcagtttgcccatctgtcccagtgctaacacacagttctcgggagacgttccccatttccagagtagtagtgtgaaatgcgtgaacctctagtcttaaaattggcgtttgtattagttgggtttcctggygtctctttagcaagtgaagtttctggttccctccttcactgtgtgacctgcctagtcctcctgggtcgcatttacagaagtttatacgagacctagtttccagggaagaactcactgattccacgagggagatggggtaatggatgatggtcttcagccttaagggtacttcagtcttaactgtgtgttacaaagcttgaaagggagggttccctatgaataagaagtgcacttgaaagaacagccatctggtctaacctctcactggtgtttcagaggaggaaaaaaggtcacaggtgaagatcccagttttcctctctcaggaaatattaattctactccctagaatgcacaagaattgcaaagactaggtgatggtagaaggtttggacgaactttcagaaa

SEQ ID NO: 937660 - DNA, 524 bp, Homo sapiens
acaagtttgatcgtctgaagccttcttctctcaactcgtcaaagtcattctccatccagctttgttccattgctagtgaggaactgcgttcctttggaggaggagaaacactctgctttttagagtttccagtttttctgctctgttttttccccatctttgtggttttatctacttttggtctttgatgatggtgatgtacagatgggtttttggtgtggatatcctttctgtttgttagttttccttctaacagacagtaccctctactgcatgtctgttggagtttgctagagrcccattccagaccctgtttgcctggatatcagcagtggtgtctgcaaaaccgtggatttcgttatccgcaaatgctgctgtctgatcgttcctctggaagttttgtctcagaggagtacccggccatgtgaggtgtcagtcttcccctactggttggtgcctcccagttaggctgctcagggctcaggggtcagggacccatttgaggaggcagtctgcccattctc

SEQ ID NO: 937661 - DNA, 524 bp, Homo sapiens
acaagtttgatcgtctgaagccttcttctctcaactcgtcaaagtcattctccatccagctttgttccattgctagtgaggaactgcgttcctttggaggaggagaaacactctgctttttagagtttccagtttttctgctctgttttttccccatctttgtggttttatctacttttggtctttgatgatggtgatgtacagatgggtttttggtgtggatatcctttctgtttgttagttttccttctaacagacagtaccctctactgcatgtctgttggagtttgctagaggcccattccagaccctgtttgcctggatatcagcagtggtgtctgcaaaaccgtggatttcgttatccgcaaatgctgctgtctgatcrttcctctggaagttttgtctcagaggagtacccggccatgtgaggtgtcagtcttcccctactggttggtgcctcccagttaggctgctcagggctcaggggtcagggacccatttgaggaggcagtctgcccattctc

SEQ ID NO: 937662 - DNA, 553 bp, Homo sapiens
tatagaatcccatatgagggacagacaacctagcagcagtgttctggaatcctatgtgagggtcaaacattcagaccacagcaggagtgttctggaaacctgtgtgaggacaaacattcagaccacagcaggagtgttctccaatcctatttgatggacaaatattcagaccctcgtagcagtgttctggaatcctgtgtgagggacaaaccttcasaccccagcagcagtgttctggacacctatgtgaaggacaaacattcagaccctcttagcaatgttccagaattctatgtaagggacaaacactgagaacccagcagcagttttctggaatcctatgtgagtgacaaacttttagaccacagcaggagtgttctggagtcctatgtgagagacaaatactcagaacccagcagcagtgttctggaatccgatgtaaaggacaaacattcagatgccagcagcatttttctggaatcctttgtgagggacaaacattcagaccccagcagcagtgttcttgaatgttatgtgagggacaaacattcac

SEQ ID NO: 937663 - DNA, 589 bp, Homo sapiens
ttttagtctcttcagctttttatttgttaagattaattgtgtcatattaatttgttgttaagcttgttataaaaattaattattgtaaagtaattattgattacttccaagcttcttacatgcagaaataggaacctggaatatgtttctaaaactatcttctcaatgcctatgtgcacagttaaakgatttttttccacaggaatatgatcaagatgaattatattagacttctaaatattgaacttttctttattcgtggaataaactcagaaagttccttcttggtcttcacagtctatttctcttccagtgtaaatgttagtgtttctgtagattctgtacttgtttcttttattctttccttctcttattttcatttggtctgatggattcaggtagcattgaaattctggtaatttccaaatctttatctttagtttgatctctcttctgaaccactggagctatattcccaattgccagttgaacattcccacatatggaacgtcagatgtttcacacatgatatgtccaggtctgtgtcacttctggttatcacattcttttattttttttgcaaatttca

SEQ ID NO: 937664 - DNA, 579 bp, Homo sapiens
cccctggggccatcagagtatctgcatctcccagaagattttggcagaggctattccctatccccctcaccctgcctccatgaccagtggacaggcaagcccactgttgggtgggggtttggggggttgggggtccaggaaagcagtccacttagcctgctgccctaggctgtctattcttcagaaacaaatcactcaaaaacaaaaaaaagaaaaaaaaaaaacctcactgtattaagaaacctaactcagtaacctcagccttcaaatgcttgctttttctccagtctgcmtgaataggagaaaagcagaatgaagcattgaaaatggcacgtattgattggcatggctcaccaaaagagggcacttttactagcctttcaaattacaatttattcaatagtgaaaaagtaactcaatttgagagaggcactccttaggagttgcatttttgccacataaattatgtcattatcattgttcacttgtcattctctggaagccaccgggcaaagcacagttcctggcatgcaggaggcaatcaatgaaggctgttgaattaatgagactataactggc

SEQ ID NO: 937665 - DNA, 642 bp, Homo sapiens
ctcctgggtcgagtgggaagttggagaacttttctgtgtctagctaaaggattgtaaatgcaccaatcagcattctgtaaaaacgcaccaatcagtgctctgtgtctagctaaaggattgtaaacacaccaatcagcrctctgtaaaaatgcacgaatcagtgctctgtgtctagctaaaggactgtaagcacaacaatcagcaggatgtgggtggggccaaataagggaataaaagctggccacctgagccagcagcagcaacccactcgggtccccttccacagcatggaagctttgttctttcgctcttcataataaatcttgctgctcgctcactctttgggtctgtaccacctttaagagctgtaacactcgccgtgaaggtccgtggcttcattcctgaagtcagcaagaccacaaacccactggaaggaagaaactccggacacatctgaacatctgaaggaacaaactctggacacgccacctttaagagctgtaacactcaccgcgaaggtccgcggcttcattcttgaagtcagcgagatcaagaacccactggaaggaataaattccagacacagtactgcctgatcattacctagtgcagacccaagagtaagctctgccatgagcaaaa

SEQ ID NO: 937666 - DNA, 735 bp, Homo sapiens
tggcctacttcagtgtgtattttctaaaaatcaggacactctcctacataaccacagtatacccataagaatcaagaaattaacatggatgcctattaccatcaaagacacagattccattcaaattttgccaatcgttccagtaaattattcataacaaaacaaaccaaaagcaaatttcttccatgttgcattctttcttcatgatctaggatccaatctaagaccatttagtwgtcctatctcttctctttcaagctggaactgttctcaagtttttccttgtcttgaataattttgatattttttgaagagtacagactcataactttgcaatgtcctttaatatgggtttgtctgatgtttccttaagattccaataaggctctgtatttggacaggactaccacagaagatgctgtgcttttctcagtgcatcatgttgggaaacatagtatgtcagtttgtcccattattggtagtgctgactattatcacttggttatgatggaacatgctgggtttctctacagtgtggttattgaataattaataaacagttgatatgcaattttcaaggagatactttgaggctatgcaaatatcctggtcctcatcaaacttttacccactggttttagcatccattgatgttttctgcctgaatcatttatgattgtgaaatagtaatttctgactccatcattccttctctacttattagcctgcattcag

SEQ ID NO: 937667 - DNA, 758 bp, Homo sapiens
gtcttaggtaagcccctctgtgtaaattcccttatctgtgcctggaggctgttcttttgtttgaaagaaatcaactgaggacccaccctaactgcctgtctgactgtgttctttcccttctcctctgtcattaataatgggctggtcaaactcaattaaatgagatttaaatgagacgcttctggaacggttacaagtttggtttatccaattatatcattaaaaagacagatttttttttttcttttaaatttaacttaaaaagttttttttttttttttttttttttttttttwatagtgatggagtctcattatgttgcccagggtggtcttgaactcctggcctcaagtgatcctcccacctcagcttcccaaagtgcagggattacaggcatgagccaccgtgcctggcccaaagacagaatcttattgaatccatgcaaataactacattgctgtgaaaagtaaaagggtttaatgaaggcactttgattgtttgggtcagttttgcagacaaaggcagtcaataccagtgttttctatacacccatcatccttaagttcttgctgattcattagcttataatttatatccagatattctacagggtatctcccctgagttctgaagtaagatttggagcaacataccatccaatgagtatgttcttgcaatttgcataggattagtctgctaaattatagaaagaagagatagatcaatatgtaagaaaaattgtttcctctgcctcctgt

SEQ ID NO: 937668 - DNA, 703 bp, Homo sapiens
aatgagtgattcgcaaatcgggcagcccccagaatcacagcagattctgagagtcttcaggtatgtgttgtgatcagaacaaatttatagacaaaaaaagggaagagatgtacagacattggaagtgaggtacagaaacagctcgattggttacagctcagcgtttgccttatctgaacgcagtttgaacgcttagcagtctatgagtggttgaagtatggccactgggattgaccaagactcagctattgttacaggtgcatactcttaacttaggttttaaatcttgtctgcctattaagctatgttacctaataggcatagctcstatgcctattaaaagtacggagtccccttcaggccatatttagcttctcaggccatgtttagtttgctttaacaagagcaagtcccaaatcatgccgtggttttgttatggtggtaaccatattatggtggtaaatcaggttatactggcaagacaggtcatgggagggggaggcgaagcggcctggccggcaaaggtggtcttgttgtatagatgaaacctcacaggtagcagccctcagagagaatagatggtaaatgtttctttcagttgtctcaaggtatcagactctgagttaatcttgcctagatgtggacaagggaagacctggctgcattaatgcagattctctgcagatgcaaatctctcctgcaa

SEQ ID NO: 937669 - DNA, 435 bp, Homo sapiens
aaggggacacggctaccttctctcagagcagaatgaggtgattctggacggtggcttgtaagaagaccgagtgggcgagggagggagggaggacacaaaggaagagtccaggggctttggccctggggttccagtgccaaaattcaccatcatgcatccaacctgtggrcctgttaatcacactcattaaagaaacctatgaataccatcaggttccaggagaaaccattgcttcatagatgtgtcccctgggcttggctgggctcttctctgagcaatgtgcagggtcaggcagggttgtacacatgcaggggcacctatgctttctcctgctcacacacccaacacctgcccagtgctctcccacccgcttcatgcccctgacaggaggtgaccatgtgaggttcagggatgtgggtggtgagacttgggcct

SEQ ID NO: 937670 - DNA, 623 bp, Homo sapiens
atctaacttaatttttttttttttttttttttttgagtcagagtcttgctctgtcacccaggctggagtgcggtgggtgatctcggctcactgcaagctctgcctcctgggttcaagtgattctcctgcctcagcctcctgagtagctgggacaacaggcatgtgccaccacacccagctaatttttgtatttttaatagagatgggtttcaccatgttggccaggctggtctcgaactcctgacctcaagtgatccgccctccttggcctcccaaagtgctgggattacaggcgtgagccaccgtgccaggcctctcactcaatcttgattccctttgtgcatctcrttgttgttcttcgtcacctccttcccccaggattatctcttaggatccaaattcttcaccctcctttctgcagagcaattcctctctcccttgtctcttcctgcacttgcttccagagtcccctctacagttcctaactcattggggtgtgggactttctgaatttcttgagtctgactgtttgcagcaaccacatgtctccattacatggggttggggccttcagaggcaaaagaagagatcccagtactgggggccctgggagaaaaggtgta

SEQ ID NO: 937671 - DNA, 566 bp, Homo sapiens
ttatcaccaaggcaatggggaaaatgtctccagggcatgtcagagacctttggggtagcccctcccatcacaggcctggaggtttaggaggaaaaaattatttcctgggccaggccctgggtccctctgctgtgtacagtctagaaacttggtgccctgtgtcttagctgctccagccatggctgaaagggaccaacatagatctcaagctatgccttcagagggtgcaagctccaagccttggcagtttccatgtggtgttgagtctgcaagtgcacaaaagtcaagaattggggtttggaaacctcygcctagatttcagaggatgtatggaaatgcctggatgcccaggcagaagtttgctgcaggggtggttccctcatgcagaacctctgctagggcagtgtggaagggaaatgtggggttggagcccccacatgtagtccctactggggcaccacttagtggagctgtgagaagagggccaccattctccagaccacagaatggtagatccaccgacagcttgcaccatgtgcctggaaaagctgcagacactcaacacc

SEQ ID NO: 937672 - DNA, 554 bp, Homo sapiens
catctttatgtccatatgtacccaatgtttagctctcacttttaagtgagaacatgaagtttttggtattcttctcttgtgttagttcatttggaatgatggcctccagctacatccatgttgctgcaaagaaaatacttttattttttatktttttatcagccagtgcatttcttaaggcaatgaaataagtataggagaatgagtaaaaatattcacagacttggcttagtaccagcataatgtcacttccaccttacttcattagtcaaaattagtgaaatgaccaagcccatataggtagggagggcactacaaaataccatgccaaagagcatggtaacaaaaaagagtaaaaaattatattcagggccagttttatcatctacatcagatgtacacagtattgaattatttccctttattaattaagcagaaggatgaaatcttaggtagtttgcctagatgttagctttgggcatattttttacagctctgagttaggtgactatgttctagatgtccaaatctgaaggggaaaaagaagaacactt

SEQ ID NO: 937673 - DNA, 626 bp, Homo sapiens
cctcctttctggctgctttcatgggctggcgttgagggtctgtggcttttccaggctcacagtacaagctgtcagtggctctaccattctgggatctggaggatggtggccctcttctcacagctccactgggcagtgcttcagtggggacttagtgtgtaggtttcaacctcacatttcccttcckcactaccctagcagaggttctccatgagggccccacccctgtggcaaacttctgcctggacatccaggtgtttccatacatcctctgaaatctaggcagaggtttcccaaaactcaaatcttgacttctgtgcacccacaggttcaacactacgttgaagctgctaaggcttggggcttgtaccctctgaagccatggcccatgctgtaccttggtttcttttatccatgcctagagtggctgggttgcaggacaccaagtccctaggctacatacagcaggggggccctgggccctgctcaggaaaccattttttcttcctaggtctccagcccatgataggagggcccttctgcaaaggtctttgacatgctctggagacattttctccattgttttggtgatttacatttggttcctcattacttatgcaaatttc

SEQ ID NO: 937674 - DNA, 804 bp, Homo sapiens
actgctctctgcaaagcttcagaaggaaaatagcagaggtcgtcctatcagagtataagcagaatttgtcttctttcttcttcatattcccttcagtgtcacatgaagctaagtgcatagttgtaactcaatctacttattgaatggaacaagcccagttctggaaaactttctttaaaatgcaagttttttggctgagcacagtggctcacacctgtaatcccagcactttgggaggctgaggctggcggattacttgaggtcaggagttcaagaccagcctggctaacatggtgaaactccatctctactaagattacaaaaattagctgggcgtggtggcatgtgcctgtaatcccagctactcgggaggctgaggcatgagaattgcttgaacccagaaagcggaggttgcagtgagctgagatcacaccatagcacttcagcctggcaacagagcragactctttctagaaaaaaaagcaagttttaaaagtagagaacaatgaagagaagatgttttgtgagcattaaccacatgattatgatagctgcattctctcgtaaatctatttcacttactctttgcaatagccctgagtggtaactttcattcccctcctttttacatatgaggaacttgagttccagagatgtcagcaaagcggcccaaggttgtacaacaattgggctcagagcttggttttgagccctggtaggtcagattcctgtgcattttatacagcacctggctgattccagtaaaggagagcccaggctctgttatgaagatgagatgcattt

SEQ ID NO: 937675 - DNA, 804 bp, Homo sapiens
actgctctctgcaaagcttcagaaggaaaatagcagaggtcgtcctatcagagtataagcagaatttgtcttctttcttcttcatattcccttcagtgtcacatgaagctaagtgcatagttgtaactcaatctacttattgaatggaacaagcccagttctggaaaactttctttaaaatgcaagttttttggctgagcacagtggctcacacctgtaatcccagcactttgggaggctgaggctggcggattacttgaggtcaggagttcaagaccagcctggctaacatggtgaaactccatctctactaagattacaaaaattagctgggcgtggtggcatgtgcctgtaatcccagctactcgggaggctgaggcatgagaattgcttgaacccagaaagcggaggttgcagtgagctgagatcacaccatagcacttcagcctggcaacagagcgagactstttctagaaaaaaaagcaagttttaaaagtagagaacaatgaagagaagatgttttgtgagcattaaccacatgattatgatagctgcattctctcgtaaatctatttcacttactctttgcaatagccctgagtggtaactttcattcccctcctttttacatatgaggaacttgagttccagagatgtcagcaaagcggcccaaggttgtacaacaattgggctcagagcttggttttgagccctggtaggtcagattcctgtgcattttatacagcacctggctgattccagtaaaggagagcccaggctctgttatgaagatgagatgcattt

SEQ ID NO: 937676 - DNA, 670 bp, Homo sapiens
ttatctctttgtcttgtgtctttatttctacaatctctcgtctccgcatatggggagaaaaactcaccgaccctgtggggctgttccctacaaattttgagagaaagttatgatctaacatggaatactcactgagatttggtattacagtagctcattcaatctaagacgctgattataaagtgcaccattattttacaaaccgctaagaaagaaaagaacagcaaccaagatggtgcatctgattggaaagcccacatcaatatgggggaccaagggagctgcaccttcaatgtaaggagaaatgagaaataaacccacctcacagaaagaggaggcaaggaaattccaggtcttctgttggcagtgggtgaaggataggaaatcaaaactcttcctcaagagtttgaaccacacaggctggagctccccarggttggcggtctcggtttacacaatcagtgtggtccaaaggaaacccaaatagaacacaacccgcaagcagacattttaatttaaaggaatctcaggttgggggtgacgggcagtaaacctaaatcttcactggaagaactacattgtaataagacacccgaattccagagatgtgaaaatgtgaaaaattatgagtcttaaaacctatgaaacacagtcaaataaataaaatgct

SEQ ID NO: 937677 - DNA, 596 bp, Homo sapiens
aagcagtctgctttagtctcagatgagactttggacttttgagttaatgctggaacacattaagatttatggtactattgagatggaatgattgtattttgcatgtgagaagtatgtgagttttgggggtccaggggcagaatactatggaagtggtttgtcccctctaaaattaatgctgaaattaaattcccaacataacagtactgagaggtaatggagccgttaagaggtgtttgagtcatgggggctctgccctcatgaagggattaatgcggttctyaagagactggattagttctttcaagagcaggttgttacaaaacaggtcagccagcttcatctttctctttgcacgcacccatggtccaccatgttattacacagcatgaagccctcttcagaaactgagcagatgtagatgcccaatcttggacctcccagcctccagaatcatgagctaaataaacctcttttctttataaattactcagtctcaggtattctgttatagcaacagaaagtggacacctatagaagaacaaggttaagaattacatcagacttatcttcagaaaccatgcaagcaagaaaag

SEQ ID NO: 937678 - DNA, 596 bp, Homo sapiens
aagcagtctgctttagtctcagatgagactttggacttttgagttaatgctggaacacattaagatttatggtactattgagatggaatgattgtattttgcatgtgagaagtatgtgagttttgggggtccaggggcagaatactatggaagtggtttgtcccctctaaaattaatgctgaaattaaattcccaacataacagtactgagaggtaatggagccgttaagaggtgtttgagtcatgggggctctgccctcatgaagggattaatgcggttctcaagagactggattagttctttcaagagcaggttgttacaaaacaggtcagccagcttcatctttctctttgcaygcacccatggtccaccatgttattacacagcatgaagccctcttcagaaactgagcagatgtagatgcccaatcttggacctcccagcctccagaatcatgagctaaataaacctcttttctttataaattactcagtctcaggtattctgttatagcaacagaaagtggacacctatagaagaacaaggttaagaattacatcagacttatcttcagaaaccatgcaagcaagaaaag

SEQ ID NO: 937679 - DNA, 528 bp, Homo sapiens
actgtacaatacgtacctcccttttcacctcaccaccacatccatagagcaggcccctttgcaataataaggcagtactgaaagaacttacctcttagattttatttaaggagagaaaagacaacgggggagaagaaaaaaaggcaccagaggaaattttagcctctgtcacctacaactacagcaaacagtaaacmcaaccgattcctacccagataaacataaaaggccaatctacctcagtaacttttaccaaatacatcatgactaacttagaacaaaaaaagtcacaaggcatgctaaaaagaagaagcacaatctgaaaagacaaagcaaatatcagtatcagatttatatatagcagatatttggaattatcagaccaggaatttaaaataacattaatatgctaagggctccaatggaaaaagtgcacagcatttaaagtaacgtaagcagaggcagagaaattcttagaacaaaccaaaagcaaatgctcaaaatcaaaaatagtgtaacagaaatgaa

SEQ ID NO: 937680 - DNA, 528 bp, Homo sapiens
actgtacaatacgtacctcccttttcacctcaccaccacatccatagagcaggcccctttgcaataataaggcagtactgaaagaacttacctcttagattttatttaaggagagaaaagacaacgggggagaagaaaaaaaggcaccagaggaaattttagcctctgtcacctacaactacagcaaacagtaaacccaaccgattcctacccagataaacataaaaggccaatctacctcagtaacttttaccaaatacatcatgmctaacttagaacaaaaaaagtcacaaggcatgctaaaaagaagaagcacaatctgaaaagacaaagcaaatatcagtatcagatttatatatagcagatatttggaattatcagaccaggaatttaaaataacattaatatgctaagggctccaatggaaaaagtgcacagcatttaaagtaacgtaagcagaggcagagaaattcttagaacaaaccaaaagcaaatgctcaaaatcaaaaatagtgtaacagaaatgaa

SEQ ID NO: 937681 - DNA, 504 bp, Homo sapiens
tttagtgcagtatcatgctatataggtttgcagcctaggagcaacaggctataccatatagcctagttgtatagtagcctgtattaattaggtttctctgagtacaccctatgatgtttgcataactacaaaatcacctaatgagccatttttcagtgcatattcctatcattaagtgatacatgactgtattgtgaattacctaagtttacctatcatttgatgttttacttaattttattgtggtcagagcacataatacatatgattttaatgtgttttagttcattgaggcttgttttatggtatattatgtggtctattttggagaatgtttcataaatayatgagaagaatatatattctgctgctgctgggtggggtgttctgaagatgtttgttaggtttagttggtttatagtgttcaagtcttccatttcctttttgatcttctgtctggttgttctcttatttaaagtaggcatttaagtctccaactattac

SEQ ID NO: 937682 - DNA, 703 bp, Homo sapiens
taggggccaggcacggtggctcacgcctgtaatcccaacactttgggaggtcgaggcaggcagatcacgaggtcaggagtgcgagatcagcctggccaatatggtgaaaccctgtctctactgaaaatacaaaaactagctgggcctggtggcacgcacctgtagtcccacctatttgggaggctgaggctggagaatcgcttgwacccaggaggcagaggttgcagtgagccgagatcacaccactgcactccagcctggcaacagagtgagacgctgtatcaaaaaaaaaaaaaaagaaaaaaaaagttgcatagggctgggctgcatgtggtggctcacacctgtcatctcagcactttgggaggccagggtgggcagatcacttgaggtcaggagtttgagaccagcctggccaacacggtgaaacctggtctctaccaaaaaatacaaaacttagttgggcgtgatggtgtgtgcctgtagtctcagctacttgggaggctgaggtgggagaatcacctaaactcaggagggggaggctgcagtgagctgagatcatggcaccgtactccagcctgggtgacagagtgagaccgtgtcttacgaaaaaaaatattgttgcatagttttgccctaagccagccacactcactagcctatttcctactgacactcacccctacagacccttaaccccacc

SEQ ID NO: 937683 - DNA, 634 bp, Homo sapiens
agaagttgtaatgactcaggaaagggaatagggttgtctctttccctatgggtagaggtagatattttaggaaaaaagagagagagagaaaaaggataaaattttgttatgatccccccaaaacttgttatgtaagatatatatctactgataggacattttgaaaattagtatcagctttatatttgggcacatgatttcactgagatggttcttgggcagagcagattaaaatgatgttcctgaaatgaaactmgagtctccaaaataattggctcattttaagcaaaatattattgatgatcaacagtgactggcacataataattgtttaaatatttgttggctaagtcagggaatgaatgatatgctttggcaattactgacagtatataaaggtctcagggaagtagaagacgtccacacctcagaagcatcttcttgaaacccatctcaagtctctcctcttgacaactgtgttgcaactactacggcaactcctgtggctatggctgcagctatggctgtggctatggctctggttatggctgtggctatggctccagctatggctgtggctatggaactggctacagctgtggctatggctctggctctggctgtggctatggaa

SEQ ID NO: 937684 - DNA, 634 bp, Homo sapiens
agaagttgtaatgactcaggaaagggaatagggttgtctctttccctatgggtagaggtagatattttaggaaaaaagagagagagagaaaaaggataaaattttgttatgatccccccaaaacttgttatgtaagatatatatctactgataggacattttgaaaattagtatcagctttatatttgggcacatgatttcactgagatggttcttgggcagagcagattaaaatgatgttcctgaaatgaaactagagtctccaaaataattggctcattttaagcaaaatattattgatgatcaacagtgactggcacataatrattgtttaaatatttgttggctaagtcagggaatgaatgatatgctttggcaattactgacagtatataaaggtctcagggaagtagaagacgtccacacctcagaagcatcttcttgaaacccatctcaagtctctcctcttgacaactgtgttgcaactactacggcaactcctgtggctatggctgcagctatggctgtggctatggctctggttatggctgtggctatggctccagctatggctgtggctatggaactggctacagctgtggctatggctctggctctggctgtggctatggaa

SEQ ID NO: 937685 - DNA, 616 bp, Homo sapiens
gacaaatggacagaagtaggcttcagaagctgggtaatagcaaactcctctgagctaaagcagcatgttctaaaccattgaaaagaagctaagaatcttgaaaaaaggttagcggaattgctaactaaaataagagtttagagaagaagttaaatgacctgatagagttgaaaaacacrgcaggagaactttgtgaggcatacagaagtatcgatagctgaattgatcaatcagaagaaaggatatcagagactgaagatcaacttaatgaaataaagcatgaagacaagattagagaaaaaaaaaataaaaggaacaagcaaaacctccaggaaatatggggctatgtgaaaagaccaaacccacgtttgactggtgtacctgaaagtcacagggagaaaggaaccaagttggaaaacactcttcaggatattatccaggagaacttccccaacctagcaagacaggccaacattcaaattcaagaaatacagagaacaccaaaaagatactccttgagaagagcaactccaagacacataatcatcagattcaccaaggttgaaatgaaggaaaaaatgttaagggcagccagacagaaaggttgggttactca

SEQ ID NO: 937686 - DNA, 616 bp, Homo sapiens
gacaaatggacagaagtaggcttcagaagctgggtaatagcaaactcctctgagctaaagcagcatgttctaaaccattgaaaagaagctaagaatcttgaaaaaaggttagcggaattgctaactaaaataagagtttagagaagaagttaaatgacctgatagagttgaaaaacacagcaggagaactttgtgaggcatacagaagtatcgatagctgaattgatcaatcagaagaaaggatatcagagactgaagatcaacttaatgaaataaagcatgaagacaagattagagaaaaaaaaaataaaaggaacaagcaaaacctccargaaatatggggctatgtgaaaagaccaaacccacgtttgactggtgtacctgaaagtcacagggagaaaggaaccaagttggaaaacactcttcaggatattatccaggagaacttccccaacctagcaagacaggccaacattcaaattcaagaaatacagagaacaccaaaaagatactccttgagaagagcaactccaagacacataatcatcagattcaccaaggttgaaatgaaggaaaaaatgttaagggcagccagacagaaaggttgggttactca

SEQ ID NO: 937687 - DNA, 562 bp, Homo sapiens
agcctggctgctaaggctgtatgacccagcagagatattggtggtaaaaaataaaaataagttctgttccaagatggccgaataggaacagctctggtctgcagtgcagctcccagcatgatcgacgcagaagatgggtgatttctgcatttccaactgaggtacctggttcctctcattgggactggttggacagtgggtgcagcccatggagggcgagccaaagcagggcggggcattgcctcacccaggaaacacaaggggtcaggggatttccctttcctcgtcaagggaagccatgacagactacctggaaaaacagggcacttccgcccaaatactgtgcttttcccacagtcttagcaaccagcagaccaggagattctctcccgtgcctggctcrgtgggtaccacacctgcggagccttgctcactactagtgcagcagtctgagatcaacctgtgaggaagcagcctgacagggggaggggcatccgccattgctgaggcttgagtaggtaaacaaagcagccgggaagcttgaactgggcggagcccacca

SEQ ID NO: 937688 - DNA, 747 bp, Homo sapiens
acatgatgatatagtttggatatctgtcccctctaaatctcatgttgacctgtaattcccaatgttggaggtggggcctcatgagagctaactggatcatgggggccgatttttcatgaatagtttagcaacatccccttggtgctgtccttgtggcagggagtgctcaccaagatctggctgcttaaacgtgcgtggcatcttcccctcttctctcttgcttctgttttcaccatgtgacatgtctgctcctgctttgccttctgccataagtaaaagctccctggccctaagcaaatgctagcaccacccttcctgtacagcccacagaacgggctaatatacaggagaaagaagaaagttgcaggaccgaagcccttaaatgctgagatmggatgagttccagtacacaaaaggaaagaattggcccaaataggagaaggaaaaggttatccactcttgaaaaagacaggctaaattgatgagtaaaggtgaaagcataagaatggattttgcagtgggaagatgaggaagttctctaatgactcttattttctcagtaaaataggaagcgaactgacacgctgagaatgagaaagaagaaagtggtttcggaggtttgaggagagtggaattaccagggagtctcaagggctcacttgaggtttgtggtccaagatttaagatgacaccagtcagcatggctgtgtgttctccactagccacacacagctgctcagaggcagg

SEQ ID NO: 937689 - DNA, 377 bp, Homo sapiens
tcagaaaggggttccccagagaggagaagaccaccttcccactccatcccctttccagctcctcatcctgctgagagccacttccaccctcagtaaaatcctctgaattcaccaccctcaaatttgttcatgtgacctcattcctcctggacattggacaaagacctgggtrcaggtgcgaagggctgtcacactgaccctccactgagctatttaacacttaagccatccacggatgacaaagctaaaggagcacactgtaacatacatcttctggggctccaggggtcacaggcaacccctagacgctgccatggggccacacagagttccactcctgccagcacccagtagcattcatcccagcctctgtacct

SEQ ID NO: 937690 - DNA, 674 bp, Homo sapiens
tctctgtgatgggacatgtttatagtagcaaaggacccacagcactgtcccccttgatgtgttagctcaatgtagacaaagaaccctgccgtcctcacgggctggttagcagagccggctgcagcccctgcgaccccctgaacatctctcgtggtgcagcctcctggggaagcctccttctcgcaggcacgcaggcaggaccatcgtgagctctcactgtgttaccccagaggagatgctggaccaggaacccatggagggcgcagcacaagagtgcccgggacaaagacctagatccctagcacgacggctggggatgctgccatgctccaaattctgaaacttgtccaacaacaggatttcagttcgtatttcggctgccatttccaatagaccacactgcatgaccgacacctaatcagagtgaaagcagcttagaagagagggacttgctgcagccggcaaagggagagtccagggggttcccggatggaasaagcactttgtggtctttagccaggctggcccaggcctcatcagcttcctagtgcgcaccccgtctgtgcactgtgtgtgtgtagatggtgagtaaactgttgagtaactgctccgctgggtttcgacatcgcctgtcgtggtcaccagtgtgaactctggagccagcctcctcctcc

SEQ ID NO: 937691 - DNA, 623 bp, Homo sapiens
aggaaaaagaaaagaaatcagaaagaagtaacaagtcacaaacggaagaaaaaaaatccgtaaaaataaaggcagaaattaaagagaacacccaaaacaattacacaatagagaacatcaacaaaattaaagctgtttcataaaaaagaactgacaaaactaatgaagaaaacagcagacaagaagtcaccaaatcatgaaatggaaaaataaatactatgcaaacacgacagagtttaacataacaataaaataataaaatgaggctgggcgcrgtggctcatgcctgtaatcccagcactttgggaggcagaggtgggcggatcacaaggtcaggagatcaagaccatcctggccaacatggtgaaaccccgtctctactaaaaatacaaaaattagctgagtgtggtggccggcgcctgtagtcccagctactcgggaagctgaggcaggagaatcgcttgaacccgggaggcagaggttgcagtgagccgagttcataccactgcactccagcctggcaacagagcgagactccatctcaaaaaaaaaatgataaaataaaatggcaactatctgacaacctacataaaagaggtaaatttctgaaaaaagaaaaaatc

SEQ ID NO: 937692 - DNA, 722 bp, Homo sapiens; identical to SEQ ID NO: 923130

SEQ ID NO: 937693 - DNA, 598 bp, Homo sapiens
ctgcaaacctaattttatggtaagaagtaagatatttctggcatctcggggttttgtgcctcaactgtcagaagaataatttagctggactcttaggagatctgtggttgtggggccttttctcaatgcatcctactcagtcttcattcagccttcacaaaaccatccacccatttggctttccaggatcttagctgttttctaattttaacaaaaaaatggaggatatagtttttaaatttttttattgtctttgtattttagctaagaagagtagtctgacagtacagttttatcttcaaacaagaaactgctatcaagtgtagcggttatacttgcattttctataactgagctaataaatcatgataccttaatattttttattcattggaatactatttatcttcatgctatatttgcatttytcacataaatttagttcatcaggtgacatattcagaaactgcaatatgagttcatgccaatagtctatctgtcccagatattacataaatttcggcacatatttcacttaaaacataaacactgtttataaatgttctacatagctatcttcttttcaagactctgagta

SEQ ID NO: 937694 - DNA, 668 bp, Homo sapiens
cttatgccatcctcccccaacccaaggcagtgcaactcacaggaacaaaagtgtccccttccttctgcttagggggtggagagtaaagagtaaagacgactctgtcttgtattgtggatacctactcagccacagtaggagagggtactgggcagaggcattcaaggccctagctccagataacatttctagacacactctgggccaaaaggaaatccattgcttttatgaaacaatccagttctggcaagattcatcacctgctgtctaaagagctcttgggcactgaataacctgcaacgatccccagagagtacacaatgggccttgggccctgagacatgctggcttcagatgtgacccagaagattcccagcaatggtggctattataaaagacttccatttgagaaaagcagaggsaaaagtaaaggggaaattttcttgcaccttaggtaccagcttgcacacagtggggcagagcaataagcaggcacttggggtccctgagtccaggcccgggctcctagcatttctaggcctgtcctgggccagaagggagcccgctaccttgaagggtgagtcccaggctgtgcagcgtttaccacaagctgtctgaagaactcttgggcattaagtgaacactagcagtggcctggcagaactcca

SEQ ID NO: 937695 - DNA, 449 bp, Homo sapiens
tgcatgtctgaatgctagtgattctcattagaggatgggaaggtggaggtaacaaaaaaatggatatttaacttgtaaaaaccaaaaatatgaataatatcagtataatatttctctttgtgataattttactataccataactgagatttgctaatttaaaaaataaactattttatcatattgggttatttgtttttgacattacatttctgataggaaattgtaggttttgatcactatcttgaagttttaaagtttaaaaagggcttcaagaacatttttattttgacgatgataggamactcccatctgaataatgtacatgaggttcacacagagcctggggtctgccgttccagggcacgggcatgttctgtgagtgtgtgaatgttgtctttcacaatcttgctgatggatgttaaactaaaaggagttttacagggttca

SEQ ID NO: 937696 - DNA, 625 bp, Homo sapiens
agctgggtctgaaaagcctgagaggtgctttgtcctccccacccccaccccgtctctctggtacttttaaaattttgttttagctcctgggactcaaggaaatctatcaaaacatagctgaacataagctagaggaacacatgcttcactgagcacacatgacaagaaatagcctttgcaaaaaatgtttgaaaaaaaaatctcagaacaaatggactrctatagccttcagcaatcaaaatcaaaacagcaaactctggggagggggataatctgatttccagaaagaccacattattattatcaaatgcccaatattcaacaacataaaatcactaagtttacaaaaaaaatccatacagaaaaatatgactcatttaaatggataaaatgaaatgacaaaaactatccctgagaaagctcggacattggacttactttaaaacaactctcttctgtatgctcaaaatgccaagggaaaacatgaaaaaagaagtaaagaaaatcttgaaaatgatatataaaaatgagaatatcaacaaagagattagaattataaaagagaaccaaacagaaattctggagctaaaaaatacaataactgaaatgaaaaattcactagtgg

SEQ ID NO: 937697 - DNA, 586 bp, Homo sapiens
cagcatcctctcattcccgtttcaatgtgtctgacagttggtaaatgtttaagatacagcttctttatgaagactcttgcattttaatataagattctaaaaatctgatgttttcaatacccaaaggaattagactctaattcctttgcaagtggatagaggatagagaagttgcaagtggatagaggaggaactgttcccygcacctctattcctgattttgcaaagtgaatattgtctatgtgagatgctcatacaaagactcatcagagacaagcaacgtacaggttagcaaaggaatcaaataaactatctgtcagaaactgaattatgaccttagaatagttttctccctgatcctaggaatctgtcgtttttgtcttcaaaaccctatttcttccttccttttataatagcagcctcattttcctttagtggttcgctttctcccactctctcctgcaattccagaaatgactatctgaccagacctagagtccaatagctccctcccttcccacagtgattggtggatctggaataaacatgtgactctaattgagccaatgggagcttgtcctgagac

SEQ ID NO: 937698 - DNA, 739 bp, Homo sapiens
cccccaacaagagagtcagcctgttctttgaagctttgaagccagacattgacttctctctagctatgaaagttctggatggcatattcttctaatataaggctgtcttgtttaatttgaaaatctgttgtttaaggtaaccaccttcatcagttatcttagatcttctgcataacttgttgcagtttgtatatcagtacttggctgcctcaccttgcacttttgtgttatggagacagcttctactcttaaccctcatgaaccagttttctgcttyaaacttttcttctgcagcttcctcacgtctctcacatcatagaattgaaaagagttggaatttgctctggattaggctttggcttaaggaaatgttgcaactagtttgatcttctatccagaccattaaaacttcctctgtatcagcaataaggctgttttgcatttttatctgttatggatattcactggagtagcacttttaatttcctttatgaacttttcctttacattcaccacttagctaactgtctggtaccataggcctagcttttggcctgttgtagctgtttataggcctttctcactaagcttaatcatttctagctttggatttaaaatgagagatgtgtgactcttcctttcagttgaacactaagaggccattttttgcctaatttaaatattataatgtttctagaagtaagaagtcctgagaagaaggagaaagataggggagatc

SEQ ID NO: 937699 - DNA, 790 bp, Homo sapiens
agcaatcactatctatggcagctattagccttatgaaatctatttctgaaataataagacttgaaagttgaaatgacttcttgatccatggacagaatggatgttgtgttagcaggcatgaaaacaatgttaatctccttatacatctcctgatacagctcttgggtgaccaggtagatgcattgttaatgagcagtactactttgaaagcaatcttttttttctgagcagtaggtctcaagagtgggcttaaatatccagcaaaccatgctgcaaacagctattctgtcatccaggctttgttgttccatttatagagcacaggcagggtagatttagcataattcttaagagactgtattagtccmttctcacactgctaataaagacatacctgagactgggtaatttataaaggaaagagatttaattgactcacagttcagcagggattgggaggcctcaggagatttacaatcacggcggaaggggaagcaaatatgttcttcttcacatggtggcagcaagaagtgccaagaaaatggggggaaaaacctcttataaaaccatcagatctcatgacggctatagtgagaactcactcagtatcacaagaacaggatggaagaaaccacccccatgattcaattatctctgcctggtccctcccacgacacatggagattaagggaactacaattcaagatgagatttgggtggggacacagtcaaaccattgcagggtcctaggatttttggaatggtaaatgagcattggcttccactgaaa

SEQ ID NO: 937700 - DNA, 635 bp, Homo sapiens
tgcacaccactaccggtcagctaatttttgtatttttagtagagacagggtttcaccatgttgaccaggctggtcttgaactccaggcctcaaatgatccacctgcctcggcctcccaaagtgctgggattacaggggtgagccactgcgcctggcccaatggaagtacttttgacagcatcatttcttttgtccatttaaatgaataccaaggactgtgcattctccccaggtcacctctcctatctgtccmtgcagtatctggcccccagctctgtccatgcctttgttgccttgtgctcacaccacggtaacttcctccagcttgtaacctgcctccaggctctgtcatagacaattccctcctttgctgccaagtcaacttcctaaagcacagattccaaaagtcacatactgctcagaaatctttgctagctcctaattgcctacaggataaaattgaaccgactcagcttgtaatttatgacctggcaccaccatctacgttgtcttgatgctgtcattctctgctgtgtttgaatcaggaggaacctagatcttctctgatctctgaaaaataagttcctggatatgaaaggggatactttccttggtggtagtcccagtgaagaccc

SEQ ID NO: 937701 - DNA, 758 bp, Homo sapiens
cacactgtaaccccagcactttgggaagctgaggcaggtggatcacctgaggtcaggagttcaaaatcagcctgaccaacatggtgaaaccatgtctctactaaaaatacaaaattagccaggcgtggtggtgcatgcctgtagtcccagctacttgggaggcttgcttgaacccaggaggtggaggttgcagtgagctgagattgcactattgcacttcagcctaggcaacaagagcgaractccttctaaaaaaaaaaaaaaaattaaaaaacaagtctcaataaatttaagaaaatcaaaattatatcaagtactctctcggaccacagtggaataaaactgaaaatcaactccaaaaggaaccctcaaaaccatgcaaatacatagaaattaaataacctgctcctgaatgatctttgggtcaacaatgaaatcaagatgaaaaataaaaaagtatttgaactgaactgacattagtgacacaacctaccaaaacctctgggataaaacaaaagcagtgctaagaggaaagttcataatattaaatcaaaatgtatgtaatacatcaaaaattctgaaggagcacaaatagacaatgtaaggtcacacctcaaggaaaaagagaaacaagaacaaaccaaacccaaacccagcaagagaatagaaagaaggatcagagaagaactaaaggaaattgaaacagcaacaacaacaaaacaaaagtgaaacaaaaactggttcagttctttgaaaag

SEQ ID NO: 937702 - DNA, 572 bp, Homo sapiens
tgctaacactccataatcacctctctatttcaatattcagtttttttgagacagagtctcactttgttgcccaggctggagtgcagtggcacaatctcagctcactgcaacctccacctcttgtgttcaagtgattctcctgcctcagcctctggagtggctgggattacaggcacaygccaccacgcccagctcattttgtgtgtttagtagaaacagggttttaccatgttggcaagaccggtcttgaactcctgaccacagatgatccgcctgcctaggcctcccaaagtgctgggattacaggcataagccactgcacttggccataatattcattttcataatcaatatccattcaggtcttcctgagggcactgtgccccctccttatgtggtcactggagacagagcaaagagaaaagcaaagtctctgttgtgagaatccaggccaccctctccccttggccacatggccccttgtgtctctttcctgccttcctttcacctcacagtctgatgcctttcttttcttttcttttctttttaaccttaaatatgtccaattttta

SEQ ID NO: 937703 - DNA, 701 bp, Homo sapiens
ttacatttatagatatacacagatattataatggctaatttggaataggtcatttacttgtcagttataggtaatgttaatatacataaattctgtatatgtgaagagttgcgatctcaaaaagatctagaggcaaaatcgactctaatttttttctttacatgtgttgtacaygtgagcaactcagctctgattcaacggctttttcctctgcttgtaaacgagctaatatgataggttataaataggggatgccaaacttgcattttaagtttttactgagccaggagagaaccattaatattattaaatgattggccagtatcctcaaggaactttgaatttttaaatacgaaggaaggcttgagggaggaagattaactaacatttgttaaacctatggatttattcaatttacggttagctcttagcaaaattgtaagagaaatttgcctctagggagataatctattggctttcttctccctttatgatctcctttctctgcctccacccatttcaacatatcaactccttatttcctgggtagcttccatcaccaatctctgcactaacaatctactctcttagcaataatcaaatctgtaatatattaatattaactatagtcaccatgttgtacaaaagatctcttacatttcttcctcctgtctaaaattttgtgccctttgaccaacatc

SEQ ID NO: 937704 - DNA, 701 bp, Homo sapiens
ttacatttatagatatacacagatattataatggctaatttggaataggtcatttacttgtcagttataggtaatgttaatatacataaattctgtatatgtgaagagttgcgatctcaaaaagatctagaggcaaaatcgactctaatttttttctttacatgtgttgtacatgtgagcaactcagctctgattcaayggctttttcctctgcttgtaaacgagctaatatgataggttataaataggggatgccaaacttgcattttaagtttttactgagccaggagagaaccattaatattattaaatgattggccagtatcctcaaggaactttgaatttttaaatacgaaggaaggcttgagggaggaagattaactaacatttgttaaacctatggatttattcaatttacggttagctcttagcaaaattgtaagagaaatttgcctctagggagataatctattggctttcttctccctttatgatctcctttctctgcctccacccatttcaacatatcaactccttatttcctgggtagcttccatcaccaatctctgcactaacaatctactctcttagcaataatcaaatctgtaatatattaatattaactatagtcaccatgttgtacaaaagatctcttacatttcttcctcctgtctaaaattttgtgccctttgaccaacatc

SEQ ID NO: 937705 - DNA, 579 bp, Homo sapiens
tccattcctatatcatgatccaggtccctgggatctcagaattccctataaggctgatttaaatctgcttctaggttggctcttccctaggtctggcctcctgagatcagactgcttgtcagtattcacacctttgggtctgtccaggcagtggccaaaggagactatctgtgaggggcatggggagagcttagatgtgtgggctgggagacaccacacatggtgcatggccccttgcagtgtggacagggtaaggggcggagaggggaggtgggtgatttagtttttctgcayggccaggtgctgccacaatctgctctggaatctgagtagtctcagagctctaaattgatcctgacctctcaggtcatcatgaaagtatatttgtccatagggggctaaaaggtatttaatggcttgtttgcttgatgtagaacttgtcagtagttagacgtatggtttgtgggcctccactggtactcttgtcttggctctgaaaatgtcagggcaagtctgttttcttctctccacctattcaaatcccaccttctctcttcctgttcaggtcctgcttccttc

SEQ ID NO: 937706 - DNA, 625 bp, Homo sapiens
cgagtatctgtttgatgtttgcattcttgtgggctaggaaacaaggcacgggtccctaaaattaacatctcggtgtcacttcttggactgacaagacacagacttgcacatggtttcagccccattccacccagactgttccacgtacattatctcagaaactctgaaaggaagtgctcgttctttgttagkgccaaccatttttgtcataaatggcaaatgattggaatattatcagttaattcatgtttcaattttcagtgctattttaatgaacaagcactttgtaactagctcattattacaagtctccatttttctttctacattaagactccagatggaaccattctttgactgatggatggactcatgtatgctacaaacctgagtttgaaggagctgagtaacaattctaatggttttgcttttctcttgaaaaggagtatttattatggtctcttaatgattaagaattaattattgaaatcaagacatgaatagctaaggttttatttgttatcactatttgctgggctattatctgatttggaaaaaaaaaaaaaagtagagaattgactgaggtcttcttttttctgtgtttaacctccttccagttacctga

SEQ ID NO: 937707 - DNA, 506 bp, Homo sapiens
ccctcctggtcccagtgatagtgggcccatcctctggaatcaggcttcctaggtttaaatcctaactccatccttagtatctgtgtgacctgtagcaagttacttaacctctctgtgcctcaatttactcatctctaaactactgataatgtaayatacctcagtagggttgtgggaaggaattaaatccattaaactatataaaataatttaggaccatgtattactctgttttcgtgctgctgataaagacatacctgagactgggcaattttacaaaagaaggaggtttaattgggcttacagttccacgtggctggagaagcctcacaatcatggtggaaggcaaggaggagcaagtcctgtcttacatggatggcagcaggcaaggagagaatgaggaagacgcaaaagcagaaacccttgataaaaccatcagatcttatgagacttattcactaacacaagaacagtatggggaaaccacccccatgattcaattatct

SEQ ID NO: 937708 - DNA, 712 bp, Homo sapiens
agagtgaacctatagaccttcacagagctaaacttcttaaaacaggacatgtagagttcttcagttattcatttttccctcacgatctcactagctctactcaagaacaaagcagcagaccttcacagcaagtattacaactaacaaaacacagtatggatccaaacagcagtaacaacattcattacaaacagcaaagtccacaacatagaaaagaacacaagtaattaccactacagtctccggcagcctgcttttattctcttatctggccccacccacatcctgctgattggtagagccgagtggtctgttttgacagggcgctgattggtgcgtttacaatccctgagctagacacaaaggttctccacgtccccaccagagtagctagatacagagtgtggattggtgcattcacaaaccctgagctagacacaaggtgctgattgctgtgtttacaaagtttgagctagatacagactgcygattggtgtatttacaatccctgagctagatacaaaggttctccacgtccccaccagagtaactagatacagagtgtcgattggtgcattcacaaaccctgagatagacacaaggtgctgattggtgtgtttacaaaccttgagctagatacagagtgccgattggtgtatttataatccctgagctagacataaaagttctccacgtccacaccagactcagg

SEQ ID NO: 937709 - DNA, 644 bp, Homo sapiens
cctgtctgttagaaggaaaactaacaaacagaaaggacatccacaacaaaaacccatctgtacatcaccatcatcaaagaccaaaagtagataaaaccacaaagatggggaaaaaacagagcagaaaaactggaaactctaaaaagcagagcrctctcctcctccaaaggaacacagttcctcaccaacaacagaacaaagctggacggagaatgactttgacgagctgagagaagaaggcttcagatgatcaaattactccgagctacaggaggacattcaaaccaaaggcaaagaaattgaaaactttggaaaaaatttagaagaatgtataactagaataaccaatacagagaagtgcttaaaggagctgatggagctgaaaaccaaggctcgagaactacatggagaatgcagaagcctcaggagctgatgcgatcaactggaagaaagggtatcagcaatggaagatgaaatgaatgaaatgaagcgagaagggaagtttagagaaaaaagaataaaaagaaacgagcaaagcctccaagaaatatgggactatgtgaaaagatcaaatctacgtctgattggtgtacctgaaagtgatggggagaacggaaccaagttggaaaacactctgcaggata

SEQ ID NO: 937710 - DNA, 644 bp, Homo sapiens
cctgtctgttagaaggaaaactaacaaacagaaaggacatccacaacaaaaacccatctgtacatcaccatcatcaaagaccaaaagtagataaaaccacaaagatggggaaaaaacagagcagaaaaactggaaactctaaaaagcagagcactctcctcctccaaaggaacacagttcctcaccaacaacagaacaaagctggacggagaatgactttgacgagctgagagaagaaggcttcagatgatcaaattactccgagctacaggaggacattcaaaccaaaggcaaagaarttgaaaactttggaaaaaatttagaagaatgtataactagaataaccaatacagagaagtgcttaaaggagctgatggagctgaaaaccaaggctcgagaactacatggagaatgcagaagcctcaggagctgatgcgatcaactggaagaaagggtatcagcaatggaagatgaaatgaatgaaatgaagcgagaagggaagtttagagaaaaaagaataaaaagaaacgagcaaagcctccaagaaatatgggactatgtgaaaagatcaaatctacgtctgattggtgtacctgaaagtgatggggagaacggaaccaagttggaaaacactctgcaggata

SEQ ID NO: 937711 - DNA, 727 bp, Homo sapiens
acacagaaagatctcttccctgtattattttaactgcttcagatactaagactgctactgctaccattacccataaacaatgaggccaaccctttgccactacatcaatttccttactcaggtataccacgggttgcaagctcatccctcagacctgcgtaaggactcctagagctattcctgtttcttctgtgacatataaagaaaagtcttgccccgttggcaagcttacaactggggtttgggttagggccttctttagggcctggaaagccacttctgyttcaggtgtccatcttactatatgggtattggctttctgagtttccttaattaatgtacataatggcctggctatttcactgtatctgggaatccatattcggcagaaggctgttatgccaaggaaccctcttagttgctttagggttttgggatgaggataagccagtatacgctggatacgttcctctctgagggccctggtgactttggataattttagccctaagtatttaacctgctgtgagcagagctgagccttttgtttggagccacaggtagcgaggaaatttaagagcgcttgggtggcttgatgccacaaggtttctgaatgggtggctataattaaatcatccccatactgaagaacaagaatgtccagctatgacaattggctcaagtcttgggctaatgcctggccaaatagacgggggctatccttgaa

SEQ ID NO: 937712 - DNA, 614 bp, Homo sapiens
gtagccttgacctcctaggctcaagtgatcctttccagctcagtcttgcaaagtgttagtgtgtctggaattggtgggttcattggtctcactgccttcaagaatgaagctgagaacaccctgcagtgattgttacagctctctaaagtggcatgtctggagtttgttccttctgatgtttggatgtgtttggagttccttccttctggtgggttcgtggtctcgctggctcaggagtgaaactgcagaccttcacggtgagtgttacagctcttaaggtagcaygtctgaagttattcgttcattctcggtgggcttgtggtctttctgtcttcagcagtgaggctgcagaccttcatggtgactgttacagctcataaaaagcagtatggatccaaagggtgagcaacagcaacatttatcgcagagagcaaaagaacaaagcttccacagtgtggaaaaagacccaagcggctcgccactgctggctcgggcagcctgcttttattctcttatctggccccactcacatcctgctgattggtagagccgagtggtctgttttgacagggcgctgattggtgcgtttacaatccctgagctagacacaaagg

SEQ ID NO: 937713 - DNA, 755 bp, Homo sapiens
cgattccaaagtttatactactgatcctgactcatataatccagatgtatctctaccaggaaatcctgacagttccaccttgaaaacagactccaaatctgggcattttcaatgcttctgcttttaacatataatctactgtactgttttggactggatcactaccacagcctcctaataaatctccctgctgccatgtcattccattaccatccactcttctgcagcagcgacagtaatcttctaaaatggaaatcatttcacgacattcccctgatccaaaccctccaatggcttctcatcccactaagacttcatcttcataatctatgggatcaggcccttgactaacactttcaaattacctcctatractctcccctctgctcacttagctccatcataagggcctccttgctgtttctcaaacagaaaccaggcttgttcttgcctcaggggctttgtaggtacctttacctctgcctgaaatgatgttcttcccgtaagtatccatatggcttgctcacatcaaatcaagtcctttttcagatataacctcatcaaagaggtcttccacaaaaatcctatccaaaatagcctcccccatctatctctttccccttacccttatttatataaaaggatatacccccaccatctaatattatttatttattatctaacctcccacatacacacatgcacatacacaggatcctttagggcagggattttgtcctgatgatcactgtatt

SEQ ID NO: 937714 - DNA, 543 bp, Homo sapiens
agatgactagaacaaacttctcaaagtctatcttgttttttcaataaaaaacttttgagtttaaataccaaaagtaaagtcaactgaagatagctatcaatgagaagggatgaatttgaacgtgtaaacagtaagataagcaaagcaagaaaaactagtagccaccaaacacaggatgtgtcatattcatatctctgaccccattaatttaaactgytaagcaaaacaaatacaactgctcattttcaaaacactttgtaaaagaaaacaaaattaactattataatactagggtgattctcattttgctcctgaagaaactgatgagaaagtttaatggcctttgtaaggtagcagttgagctttgacaaagttgggatttaaaaaatagctccctgccctgtcttcaccaggatacctctctccctggatccttcaaacgggtacagatgaatcaccaagagggctggtaatctggctgccacatgaaaacaagtgagcttgagatgttctcagagtccgaggttgttggttcagtctgag

SEQ ID NO: 937715 - DNA, 566 bp, Homo sapiens
tccttcttaggtactagattgttatttggcatcaaatcctgctagaaagtagacattatgaactggatgttgtctaatcatgttttctgtccttggagaaacctataccattcagttttatgtatgaaaatttcccaggataaaaattaattttaaaaaaattactattggaacccctctgaaagaatagyagataatttgggggtcattttatatttttgccttatctttttaaatgacaaatgatattaaggaaggaaagtaaattattaaaagttccttcttgattttaattttccttgctgtccttatccccattatggatatttgagtgtttgatataactttttccttagaattatgagtaagatcagaaacgttccaccttccttgaatgagaggatactactctcttgaaagaaagacgattttatttttaacagtttaaaaagtgttcaacattttagtcacatttacttctctttgatcttgctttcttgtaaataatgctggtgtgtgggatccaaataagggtatttaaaaaccagttttacatgcacacatgc

SEQ ID NO: 937716 - DNA, 620 bp, Homo sapiens
atttttttttgagacagggtcttactccatcgcccaggctggagtgcagtggtgcaatctcagctcactgcagtctccgcctcccaggttcaagcgattcccctgcctcagcctcccaagtacctgggactaccaggtgtgtgccaccatgcccagctaatttttgtatttttagtagagatggggtttcagtcctagcrcagtggctcacacctgtaatcccagcactttgggaggcccaggtgggcggatcacaaggtcaggagatcgagaccatcctggctaacacggtgaaaccccatctctactaaaaatacaaaaaactagccaggcgtggtggtaggcgtctgtagtcccagctactcaggaggctgaggcaggagaatggcatgaacccaggaggcggagcttgcagtgagccgagatcaagccattgcactccagcctgggcaacagagtgagactctgccttaaaaaaaaaaaaaaaaaaaaaaagatggggttttaccatgttggcctggctggtctcgaactcctgacctcaagtgatccacccgccttggcctcccaaagtgctgggattacaggaatgagccaccacatggggcccattccgtgct

SEQ ID NO: 937717 - DNA, 585 bp, Homo sapiens
agaggccctgcgacgcaccctgctaatcggatttttatgtggacaagggagacaagatatgtaattttcaaacagtgaatggtgataggacaaacatctttgtgatctctacagaatgctccaaaaagacgaaagattatctggctttctgagttttgtgtgaaaatcattattttgtcaaatcttgccttatattgtctttcaaatccttcagaaggtttcccagggctgagatttgcctctgaattttctgaagctttgatgtcttgattgtcaaaagagctgcttttatagttttgctctcattagttttccttcccttgtctgacttgtctgttgcttctcaggggctstgtgaattacaccttttctgttccttattgctcttcaaagcaagtctcagccccatctcctggtgacacgggcagcagttggctctgtcttcactccacctggcgggcatgtgtcctcatcgtgatctgtggatcctatctggagcgagccaaagtttagtttttaggggcagtttatgttttttatcttttctagcggagtttaagctcaaggtcatgaatggttaggaca

SEQ ID NO: 937718 - DNA, 585 bp, Homo sapiens
agaggccctgcgacgcaccctgctaatcggatttttatgtggacaagggagacaagatatgtaattttcaaacagtgaatggtgataggacaaacatctttgtgatctctacagaatgctccaaaaagacgaaagattatctggctttctgagttttgtgtgaaaatcattattttgtcaaatcttgccttatattgtctttcaaatccttcagaaggtttcccagggctgagatttgcctctgaattttctgaagctttgatgtcttgattgtcaaaagagctgcttttatagttttgctctcattagttttccttcccttgtctgacttgtctgttgcttctcaggggctgtgtgaattacaccttttctgttccttattgctcttcaaagcaagtctcagccccatctcctggtgacacgggyagcagttggctctgtcttcactccacctggcgggcatgtgtcctcatcgtgatctgtggatcctatctggagcgagccaaagtttagtttttaggggcagtttatgttttttatcttttctagcggagtttaagctcaaggtcatgaatggttaggaca

SEQ ID NO: 937719 - DNA, 547 bp, Homo sapiens
agagagaagaatcaaatagacacaataaaaaatgataaaggggagttcaccactgatcccacagaaatacaaactaccatcagagtatactataaacacctctatgcaaataaactagaaaatctagaagaaatggataaatttctggacacatacaccctcccaagactaaaccaggaagaagttgaatccctgaatagaccaataacaagttctgaaattgaggcagtaattaatagcctaccaaccaaaagaaagtccaggaccrgaccgattcacagccaaattctaccagaggtacaaagaggagctggtaccattccttctgaaactatttcaatcaatagaaaaagagggactcctctttaactcattttatgaggccagcatcatccagataccaaaacccagcagagacgaaaaaaaaaaaaaaaagaaagaaaatttcaggccaatatcgctgatgaacattgatgcaaaaatcctctataaaatactggcaaactgaatccagcagcacatcaaaaagcttatccaccacgatcaa

SEQ ID NO: 937720 - DNA, 667 bp, Homo sapiens
tgccaaggggtggagcactggtgtgcagagatttggttgccttctctgtgctgtgcaagcaggagtggttgctcaggtttggggaggatctgctactctctgtgcctagattcactcccatggcagtgtgagcacaagggcaggatgctggtggggatggggctgcctggctgtatcccagccaaggctccgtctgcaatggtggtgtgcaggggaggggaacagatgaactgcactcctgcacgctggaagggcaaggaaagcaaaacctgtccatgtgaccatgtgctagcaaaatgatgtggggagatgccatgcgcctgggggaagctgcagtgcagggaagaattacgcaggctggtgtgtagccacaggggccaccttgctggagctctgtgctggtcaggcatagtcaaccaattcagttgctatgatgtggcacccggggttgtcctgcaaacacawgtggcctggctggaaccccaggagaggccaccagaccaagtagtgctcaggtcagaccaaccccatctgatggacaagactgccctgcagagggtccaacagttcacctagggctaaagtcacttatgggagcaagtcaagcctaaggggacagccttccctggctgtgctccactacagatggtcccacaccaaaccctct

SEQ ID NO: 937721 - DNA, 667 bp, Homo sapiens
tgccaaggggtggagcactggtgtgcagagatttggttgccttctctgtgctgtgcaagcaggagtggttgctcaggtttggggaggatctgctactctctgtgcctagattcactcccatggcagtgtgagcacaagggcaggatgctggtggggatggggctgcctggctgtatcccagccaaggctccgtctgcaatggtggtgtgcaggggaggggaacagatgaactgcactcctgcacgctggaagggcaaggaaagcaaaacctgtccatgtgaccatgtgctagcaaaatgatgtggggagatgccatgcgcctgggggaagctgcagtgcagggaagaattacgcaggctggtgtgtagccacaggggccaccttgctggagctctgtgctggtcaggcatagtcaaccaattcagttgctatgatgtggcacccggggttgtcctgcaaacacatgtrgcctggctggaaccccaggagaggccaccagaccaagtagtgctcaggtcagaccaaccccatctgatggacaagactgccctgcagagggtccaacagttcacctagggctaaagtcacttatgggagcaagtcaagcctaaggggacagccttccctggctgtgctccactacagatggtcccacaccaaaccctct

SEQ ID NO: 937722 - DNA, 647 bp, Homo sapiens
tagccagtatataaagcaggcagaaaaatgtgaaaagcttagaccggcatagcctcccagcttacatctttctcccgagctggatgcttcctgcccttgaacattggactccaagttcttcacctttggactcagactggcttccttggtcctcagctttcagacggcctattgtggggccttgtgatcacatgagttaatactacttagtaaactcccatatatttatatatatatatatatatatatatatatatatatatatatatatatatatatatacaccagctaatacatctaccctcaaggcctcttagggatgtattgrgtgcttccctagtcagctcccttttccgttcctcatgatgaaactcttttcctttcctcatgatgaaactctccaacatctccaatagaacagactggagacttctagtgacttttgcctgacaatgccttattctcactttccgaaatccagttcatcagaggaaatgtaagtggacatcccattggctaatctctcacctttttcatagccatgaactatgttatttttcatgcacactatacctaaaaacccatcatctgaatatcagaactggtcctaaattggatgcttcagtgggagatttgtcttcagttgc

SEQ ID NO: 937723 - DNA, 462 bp, Homo sapiens
gttttcacaaatgtataatgacatatatccaccattataatatcatacggaataatttcaggggacttccaccctggaagtcctccatactttgctaattaatttctctttccctcataatcccaggcaaccactgatctttttactttcttcatagtttgccttttccagagtgccawacggttggaatcatacagtatgtagcctttttagactggtttctttcacttaataatacacactaagtttcctccatgtcttttcttggctcgatagctcatttcttttagcaccaactatcccattctctagacggaccatgatttatttatccatacatctactgaaggacatcttggttgcttccaagttatggcaattataaataaagctgctataaacacccacgcacatgtttttgtgtggacatagttttcaactcctttgggtaaatccaaggag

SEQ ID NO: 937724 - DNA, 462 bp, Homo sapiens
gttttcacaaatgtataatgacatatatccaccattataatatcatacggaataatttcaggggacttccaccctggaagtcctccatactttgctaattaatttctctttccctcataatcccaggcaaccactgatctttttactttcttcatagtttgccttttccagagtgccatacggttggaatcatacagtatgtagcctttttagactggtttctttcacttaataatacacactaagtttcctccatgtcttttcttggctcgatagctcatttcttttagcaccaactatcccattstctagacggaccatgatttatttatccatacatctactgaaggacatcttggttgcttccaagttatggcaattataaataaagctgctataaacacccacgcacatgtttttgtgtggacatagttttcaactcctttgggtaaatccaaggag

SEQ ID NO: 937725 - DNA, 578 bp, Homo sapiens
tacggttggaatcatacagtatgtagcctttttagactggtttctttcacttaataatacacactaagtttcctccatgtcttttcttggctcgatagctcatttcttttagcaccaactatcccattctctagacggaccatgatttatttatccatacatctactgaaggacatcttggttgcttccaagttatggcaattataaataaagctgctataaacacccacgcacatgtttttgtgtggacatagttttcaactcctttgggtaaatccaaggagcacagttgctgggttttatgataagaatatgtttacttttgtaagtaaytgcaaactgtcttccaaagtggttatactgttttatatttccaccgacaatgaatgggaattcctgttgttccacatccttgtctgcatttggggttgtcagtgttctagagtttggccactctaatagttgggtagtggtatctcaatgttattttaatctgtattcccctgatgtcataagatatggagcatcttttcatgtgcttatttgccatctgcatatcttcttcagcgagatgtctg

SEQ ID NO: 937726 - DNA, 569 bp, Homo sapiens
tgcaccaacatgcccagctaaattttgtatttttagtggaaacagggtttttccatgttgtgtaggctggtctcaaactcctaggctcaagcaatccccctgccttggcctcccaaatgctgggattacaggcataagccacctcacccagctragagagagtccttgctttgacagttcctacattttctaagtgtgttcctcctgccccacacaggaactagacacccctttgtaatttcctctatattgttgcatccggataggactagaaagcattttctttttcgcatgaagccagctgtctccctgccccattcctccacctgaactaatttgttagcttatgggagacgcattatcacaggtattagggaaatgctagctagaaaaactggaaggtctactagggactgacattgtgaccacagtgctattttaagccactggagtacaatggtggtatctgtaggaactgaaactatttgttcaaaggaaaaaagcatttagtgactgttctatttgtatattctatgacttgtgaacattaaaccaaagaaaacaaggtt

SEQ ID NO: 937727 - DNA, 569 bp, Homo sapiens
tgcaccaacatgcccagctaaattttgtatttttagtggaaacagggtttttccatgttgtgtaggctggtctcaaactcctaggctcaagcaatccccctgccttggcctcccaaatgctgggattacaggcataagccacctcacccagctaagagagagtccttgctttgacagttcctacattttctaagtgtgttcctcctgccccacacaggaactagacacccctttgtaatttcctckatattgttgcatccggataggactagaaagcattttctttttcgcatgaagccagctgtctccctgccccattcctccacctgaactaatttgttagcttatgggagacgcattatcacaggtattagggaaatgctagctagaaaaactggaaggtctactagggactgacattgtgaccacagtgctattttaagccactggagtacaatggtggtatctgtaggaactgaaactatttgttcaaaggaaaaaagcatttagtgactgttctatttgtatattctatgacttgtgaacattaaaccaaagaaaacaaggtt

SEQ ID NO: 937728 - DNA, 569 bp, Homo sapiens
tgcaccaacatgcccagctaaattttgtatttttagtggaaacagggtttttccatgttgtgtaggctggtctcaaactcctaggctcaagcaatccccctgccttggcctcccaaatgctgggattacaggcataagccacctcacccagctaagagagagtccttgctttgacagttcctacattttctaagtgtgttcctcctgccccacacaggaactagacacccctttgtaatttcctctatattgttgcatccggataggactagaaagcattttctttttcgcatgaagccagctgtctccctgccccattcctccacctgaactaatttgttagcttmtgggagacgcattatcacaggtattagggaaatgctagctagaaaaactggaaggtctactagggactgacattgtgaccacagtgctattttaagccactggagtacaatggtggtatctgtaggaactgaaactatttgttcaaaggaaaaaagcatttagtgactgttctatttgtatattctatgacttgtgaacattaaaccaaagaaaacaaggtt

SEQ ID NO: 937729 - DNA, 596 bp, Homo sapiens
ctcaaaaaaaaaaaaaaaaaaaaaaccacaacaaaaaacaacccacacaatttaatgtcttattgatggcaactcaatttgtttgtaggttgtttttttttttttttttttttttggaaatggtctcactttgtcatccagggtgaagtgcaatggctcaatcacagctgtctgcagcctccacctcctgggctcaaacaattctccttcctcagcctcccaagtagctgggactacacatgcaagccaccacacccgactaatttttgtgttttttgtaragccagggttttaccgttatgttagttcattcttaggctgctatgaagaaatatccaggactgggtaatttataaagaaaagaggtttaattgacccacagttctgcatggctggggaggcctcaggaaacttacaatcatggtggatgacacctcttcacagggcagcaggagagagaatgagtgcaagaaggggaaacagcagaagcttataaaaccatcagatttcatgagaactcactcactgtcatgagaacagcatgggagaaaccacccccatgattcaattattaatacctcccaccgggtccctct

SEQ ID NO: 937730 - DNA, 596 bp, Homo sapiens
ctcaaaaaaaaaaaaaaaaaaaaaaccacaacaaaaaacaacccacacaatttaatgtcttattgatggcaactcaatttgtttgtaggttgtttttttttttttttttttttttggaaatggtctcactttgtcatccagggtgaagtgcaatggctcaatcacagctgtctgcagcctccacctcctgggctcaaacaattctccttcctcagcctcccaagtagctgggactacacatgcaagccaccacacccgactaatttttgtgttttttgtagagccagggttttaccgttatgttagttcattcttaggctgctatgaaraaatatccaggactgggtaatttataaagaaaagaggtttaattgacccacagttctgcatggctggggaggcctcaggaaacttacaatcatggtggatgacacctcttcacagggcagcaggagagagaatgagtgcaagaaggggaaacagcagaagcttataaaaccatcagatttcatgagaactcactcactgtcatgagaacagcatgggagaaaccacccccatgattcaattattaatacctcccaccgggtccctct

SEQ ID NO: 937731 - DNA, 749 bp, Homo sapiens
tgctgctgttctcctctccttcccctttttgatggcttcggcagtgtaagactgccacctctttgggtttttgcactgcatgcaataactccatgatttccttgtggtatttaatgggtgtccccccagaggttaggaactccctttctttccatattgcagcatgggcatgtaggattagataagcatacttgctatctgtatacaaatttgttgtttttccctttcccagttttaaggctcgggtaagtgccactggttctgctaactgggcgctggtccctgggggaagaggcttactttcaagtactgttacatcactaactgtggcataacctgcccttcatatcccattctccacaaatgaacatccattggtatataggttaaggtcaggattagctaaggggacttctaagagatcctcttgggcagcataagtstggacaataatttgttggcagtcatgctcaactggttccccatcctctgggagaaaagtgacagggttgagggctgcacacgtgcatatttggagcactggtccctcaaggagtagcgcctggtatctaagtaggcagttgtctgatagccatgaacttcctttggcacctaatatgccatttacatcatgagtagtccagacagtgagatcctttccttgtattattttgatagcctctgacactaagacagccaccgccgcaactatctgtaaacagtgaggccagccttttgctactgtatca

SEQ ID NO: 937732 - DNA, 749 bp, Homo sapiens
tgctgctgttctcctctccttcccctttttgatggcttcggcagtgtaagactgccacctctttgggtttttgcactgcatgcaataactccatgatttccttgtggtatttaatgggtgtccccccagaggttaggaactccctttctttccatattgcagcatgggcatgtaggattagataagcatacttgctatctgtatacaaatttgttgtttttccctttcccagttttaaggctcgggtaagtgccactggttctgctaactgggcgctggtccctgggggaagaggcttactttcaagtactgttacatcactaactgtggcataacctgcccttcatatcccattctccacaaatgaacatccattggtatataggttaaggtcaggattagctaaggggacttctaagagatcctcttgggcagcataagtctggacaataatttgttggcagtcatgctcaactggttccccatcctctgggagaaaagtgrcagggttgagggctgcacacgtgcatatttggagcactggtccctcaaggagtagcgcctggtatctaagtaggcagttgtctgatagccatgaacttcctttggcacctaatatgccatttacatcatgagtagtccagacagtgagatcctttccttgtattattttgatagcctctgacactaagacagccaccgccgcaactatctgtaaacagtgaggccagccttttgctactgtatca

SEQ ID NO: 937733 - DNA, 753 bp, Homo sapiens
gttctcctctccttcccctttttgatggcttcggcagtgtaagactgccacctctttgggtttttgcactgcatgcaataactccatgatttccttgtggtatttaatgggtgtccccccagaggttaggaactccctttctttccatattgcagcatgggcatgtaggattagataagcatacttgctatctgtatacaaatttgttgtttttccctttcccagttttaaggctcgggtaagtgccactggttctgctaactgggcgctggtccctgggggaagaggcttactttcaagtactgttacatcactaactgtggcataacctgcccttcatatcccattctccacaaatgaacatccattggtatataggttaaggtcaggattagctaaggggacttctaagagatcctcttgggcagcataagtctggacaataatttgttggcagtcatgctcaactggttccccatcctctgggagaaaagtgacagggttgagggctgcacacgtgcatatttgragcactggtccctcaaggagtagcgcctggtatctaagtaggcagttgtctgatagccatgaacttcctttggcacctaatatgccatttacatcatgagtagtccagacagtgagatcctttccttgtattattttgatagcctctgacactaagacagccaccgccgcaactatctgtaaacagtgaggccagccttttgctactgtatcaatttccttact

SEQ ID NO: 937734 - DNA, 782 bp, Homo sapiens
taacaggctttaatccttttaaagcatgctgtgggatgggatactggcgttgagaggggtaagggtgattaggttttaatgggatggtaaggggtgcatcatccattgccaaggagggagtagaggtgtcctatacttgtgggttaaggtggggggatacgagaggaagacacgaaggaggctttgggttgggaagaagggtggcaatgagatgtggctgtagtccaggaataataagggaagcagataatttggttaaaatgtctcggcctaataagggaactgggcaggtggggttaaataaaaaggaatgtataaaagaatattgtccaagttggcaccagagttggggagttttaagaggtttagaagcctggccgtcaatacccacaacaattatgggggcaagggaaacagtccttgaaaagaaggtaatgtggagttggtagcctcagtattgattaagaaggggacagacttaccctccactgtaaaagttacccaaagcrtctgtgatggtcctgtaggcttctgaggtgatcgggcagtatcagtcttcagccactaagctgagaagatctgggaaggagtcagtcagagagccttgggccagagttccaggggctctgggagtggctgccaggcgagctgaacagtcctattttcagtgggtttccacacagatgggacacagcttaggaggggtcctgggctgcaggcattccttggcccagtggccagatttctggcacttgtagcaagctcctggggtaagagggttt

SEQ ID NO: 937735 - DNA, 768 bp, Homo sapiens
ctggtcctgggctttcatttattggtaggctatttattactgcttcaattttggaactcattattggtcggttcaggggttcagtttcttcctggttcagtcttgggagggtgtatgtgtccaggaacttatccatttcttctagattttctagtttctgtgcatagaggtttttacagtactctctgatggttgtttgtatttctgtggggtcagtgctagtattccccttatcatttctgattgtgtttatttgaatcttctctcttttcttctttgttttgtttttgttttttttttttttttgagacggagtctckctgtcgcccaggctggagtgcagtggcgtgctctccgctcactgcaggctccgccccctggggttcactccactctcctgcctcaacctcctgagtagctgggactacaggcgcctgccacctcgcccggctaattttttgtatttttagtagagacagggtttcaccatgttagccaggatggtctcgatctcctgacctcgtgatccgcccgcctcggcctcccaaagttctgggattacaggtgtgagccactgcgcccggccctctcttttcttctttattagtctagctagtggtctattttattaattttttcaaaaaaccagctcctggattcattgatttttttgaagggtttttcttgtctctatctccttcagttcagctctgatcttggttatttcttatcttctgctagctttggggtgtgtttgctctttgttct

SEQ ID NO: 937736 - DNA, 768 bp, Homo sapiens
ctggtcctgggctttcatttattggtaggctatttattactgcttcaattttggaactcattattggtcggttcaggggttcagtttcttcctggttcagtcttgggagggtgtatgtgtccaggaacttatccatttcttctagattttctagtttctgtgcatagaggtttttacagtactctctgatggttgtttgtatttctgtggggtcagtgctagtattccccttatcatttctgattgtgtttatttgaatcttctctcttttcttctttgttttgtttttgttttttttttttttttgagacggagtctcgctgtcgcccaggctggagtgcagtggcrtgctctccgctcactgcaggctccgccccctggggttcactccactctcctgcctcaacctcctgagtagctgggactacaggcgcctgccacctcgcccggctaattttttgtatttttagtagagacagggtttcaccatgttagccaggatggtctcgatctcctgacctcgtgatccgcccgcctcggcctcccaaagttctgggattacaggtgtgagccactgcgcccggccctctcttttcttctttattagtctagctagtggtctattttattaattttttcaaaaaaccagctcctggattcattgatttttttgaagggtttttcttgtctctatctccttcagttcagctctgatcttggttatttcttatcttctgctagctttggggtgtgtttgctctttgttct

SEQ ID NO: 937737 - DNA, 768 bp, Homo sapiens
ctggtcctgggctttcatttattggtaggctatttattactgcttcaattttggaactcattattggtcggttcaggggttcagtttcttcctggttcagtcttgggagggtgtatgtgtccaggaacttatccatttcttctagattttctagtttctgtgcatagaggtttttacagtactctctgatggttgtttgtatttctgtggggtcagtgctagtattccccttatcatttctgattgtgtttatttgaatcttctctcttttcttctttgttttgtttttgttttttttttttttttgagacggagtctcgctgtcgcccaggctggagtgcagtggcgtgctctccgctcactgcaggctccgccccctggggttcactccactctcctgcctcaacctcctgagtagctgggactacaggcgcctgccacctcgcccggctaattttttgtatttttagtagagacagggtttcaccatgttagccaggatggtctcgatctcctgacctygtgatccgcccgcctcggcctcccaaagttctgggattacaggtgtgagccactgcgcccggccctctcttttcttctttattagtctagctagtggtctattttattaattttttcaaaaaaccagctcctggattcattgatttttttgaagggtttttcttgtctctatctccttcagttcagctctgatcttggttatttcttatcttctgctagctttggggtgtgtttgctctttgttct

SEQ ID NO: 937738 - DNA, 588 bp, Homo sapiens
ctcctttgcattgggttacaacatgcttctttagctcagtgaagttcatttttatccacattctgaagcctacttctgtcatttcagccataccagcctcagcccaattctgaccgcttgctggagaagtgctgcactcatttggaggaaaagggacactctggctttttgagttttcagcgtttttttgttggttctttctcatctttgtgggcttatctactttcgatctttggagttgctgacctttggatggggtttttgtgggcctttttgcttttgttgtttgtttgtttgtttttcttttaacagtctggccactctttcataggctgctgcagttttctgtgggtccattctggactctagtcaccttggtttttccctwacctggaggtatcaccggtgaaggctgtgaaaaagcaaagatggcagcctgccccttcctctggaaggtcctccatcccagagggtactgacctgttgccagcctgaatgtgcctgtaggaagtggctagagatcccggtctttcagtcaggaggaatgggatcagagatctgcttaaagaagcagtttggctgcttttt

SEQ ID NO: 937739 - DNA, 751 bp, Homo sapiens
tacaccaagtccccaggctgcacacagcatggggaccatgggccaggcccgtgaaaccactttttccccctgggcctctgggcctgtgatgggaggggttgccatgaaggtctctgatatgccctgcagacattttcctcattgtcttggggattaacatttggctcctcgttacgtaatgcaaatttctgcagccagcttgaatttctcttgagaaaatggggttttctttcctatcacattgtaaggctgcaaattgtccaaacttttatgcactgcttcccttataaaactgaatgcctttaacaacacccatgtcacctgttgaatgctttgctgcttagaaatttcttccgccagataccctaaatcatctctctcaagttcaaagttccacagatctctagggcaggggcaaaatgccgcctgtctctttgctaaaacataacaagagtcacctttgctccaattcccaacaagttcctcatctccrtctgagaccacctcagtttggaccttactgttcatatcactatcaacatttttgtcaaagctattcaagaagtctctaggaagttgcaaaccttcccacattttcctctcgtcttctgagccctccaaactgttcccatctctacctgttacccagttccaaagttgcttccacattttgggatatcttttcaggagcgcacctccccactggtaccagttgcctttattagtgcatttttatgctgctgataaagac

SEQ ID NO: 937740 - DNA, 683 bp, Homo sapiens
ttaccatgtaactaacaccctccaccttgaccctcctgtactcactagacaggagcaccacggcggagaagcaagacagcaggacggcctgtctccaagtcatctttgcagaggtaggggctccgtccaggacccacaaggcagaccaggcgtcctgcaccctttgggtccccacttctgaggcaggcagcccaggcgagaggaaggaaggcgggggagggaagagagaggcaggaggctgggataccactgggggagaggaggagggggctgggctgccctttccattggctgctcctagatggagcaacggagatgtttttggcacctggcaaatgtctccagaagcagagcttgtagttagggccctgggtgggayggtcttggagtggcctttccaatgtccgtgtctggggatctgctgctgggaaggctcatcctaacagtcagggttccagtgaccaaggcctgtgtcaaggaggtcctggcacctgctccagggacgttagggccccggtcctcagggttgaagcatgggtgggggcaaggaggaagagaggatcaatgggggagttttgatctaaatgtcagtcaagaagggctcataatgactggaatacccatcagggtgacacacagacgtgtgggtcatgctgacagcgaccagagaacaccttacctga

SEQ ID NO: 937741 - DNA, 610 bp, Homo sapiens
gcagacaccaaaaataacaaaggactaatttacaaatataataagtggtggggtagtgattcaaacctagctgtgtatcttagtttgggctgctatcacaaaaatataagccaggtggcttctaaagaacagaaattgatwcctcctagttctggagggagcctgggaggtccgatataaaggtgctggcagatgcaggtcctggtgaaggccttcttcctcaatggtggcaccttctagctgtgtcctcatgtggtggaaggggaaaacaagctccctcagacctcttttataatgggactaatctcataaaagagggttctgatcttatggcttaaatcacctctcaaaaggctttacctcttatcattatcacattggcgattaggcattaacatatgaattcaaggaggtggtaaacacaatccatagcattctgcctgactccaatgtctgtgtacttagcgtctgtatgctacttcatttttttccttatttctttcctttgtatgttcttccttgccttcatcttaccttgattagggtgataagctctaagaaggtgaatttagggtttgggcctggaataaagggcccttgtgatagtggg

SEQ ID NO: 937742 - DNA, 610 bp, Homo sapiens
gcagacaccaaaaataacaaaggactaatttacaaatataataagtggtggggtagtgattcaaacctagctgtgtatcttagtttgggctgctatcacaaaaatataagccaggtggcttctaaagaacagaaattgattcctcctagttctggagggagcctgggaggtccgatataaaggtgctggcagatgcaggtcctggtgaaggccttcttcctcaatggtggcaccttctagctgtgtcctcatgtggtggaaggggaaaacaagctccctcagacctcttttataatgggactaatctcataaaagagggttctgatcttatggcttaaatcacctctcaaaaggctttacctcttatcattatcacattggcgattaggcattaacatatgaattcaaggaggtggtaaacacaatccatagcattctgcctgactccaatgtctgtrtacttagcgtctgtatgctacttcatttttttccttatttctttcctttgtatgttcttccttgccttcatcttaccttgattagggtgataagctctaagaaggtgaatttagggtttgggcctggaataaagggcccttgtgatagtggg

SEQ ID NO: 937743 - DNA, 597 bp, Homo sapiens
gggactaaaggtacacaccaccacacccagctaatttttaaaaaaaaattttgctatgttgcccaggctactctcaaactgttgaactcaagcaatcctcctgccttggcctcccaaagtgttgggattacaagcgtgagctaccgtgcacagccagtaatttaaaatattaaattcatgttatgtttgattaaataatagataatcataaaatckctaagtcatttgtaagctaaaatactaaaacaataataaacataagtttaagtttatatactttgacatcttatttttatatgatatagaaaagctaaatatacttaatgaacaataatttaaggatgcatatttctaaaaaattataaaatagttttcatctataaatactgatacaaaacagttcaaaattatttgctagggttttcactagaacttaggttactaagagtttaaattacagttaatatatgtaattaaaactactagatgtaagacaaacaattctgtataaagtgtataaacaagcaagatgtgcttttagtgaggaaagctataaagtgtgtgtttgttaaaaagacttttttttgtctagtttga

SEQ ID NO: 937744 - DNA, 561 bp, Homo sapiens
aagaaaccccatctctaataaaaatacaaaattagccgggagtggttgcgtatgcctgtaatcccagctactcgggaggcagaggcaggagaatcgcttgaacccaggaggcagaggtagtggtgagccgagactgtgccattgcaatccagcctgggcaacaatagcaaaactcagtctcaaaaaataaaaagtaaaacaaaacaaaacaaaacaaaaaacagctctcataaaacatgaggggatgtcattagaagaggggagatttaacatattattggagaatcccataaatgayttgaagccagtaagtcagaaaccttggaccaaacaaattcttagaaaaatatgatagaaagctgaagaagaaatagcaagcttaaatagcctaataaccatagaaataaaattagtgttaaaaattatcacaaaaaattaccatcccaaatgactttgtcagtaaattctatgtaactttgaaggaaaggattcccattattctgcattttccagaatatggtaaaaaatagaaataccctaatatcatgagaccagcagaag

SEQ ID NO: 937745 - DNA, 543 bp, Homo sapiens
agaatattgccatctttctatcaggatccacatctaattccactcacagatctgaagccctttaattaaaaagtaggccagttgctaccttgaaggtccctgcaaatactgtctttaaatatccctctgatctttcactaatagggtctgtgttatttatagaataaccaagggaaaatragaattgtcagacttctgaggaatattaaatttgggaactgagctggattgaaagcaagggaacaaacatatctttaagtttttttttgcaagagtgggggtaggtttagggaggtaataaggagagtttaaaccaaagtctgtctcaaaatggtcctacagacccacctgtggctatagacccatctgtggctgcttccttctgatccaaatgttgtggttctctgacctacaagagcaagagccattattttaatagggccaagtggaagtccatgaagaaaaatctctcctagtctagtcaaagttgtaaattagaagcaacattatacctcagaaaacctaaggatgtttatgtggttt

SEQ ID NO: 937746 - DNA, 469 bp, Homo sapiens
aagccaaacatagttttactatacaacccagcaattgtgctcttaggtatttacccaaatgaattgaaaatgttatgtccatagaaatgcctacacataaaagtttatagcaggtttattcataattgccaaaaattgaaagcaatcaagatatccttcartaggtgaataggtgaatggataaacaaactctggtacatccatgcaatggaatattattcagagataagaagaaatgatctatcaaaccacaaaaagagacaaaggaaccttaattgtgtgttactaagtttaagaagccaatgtggaaaggctaaatgctgtatgattccaggtatataacattccggaaaagacaaagctgtacagatagtaaaaagattggtgtttgccagggttatgggggagaagagggaaatacctggggcacaggctatttttagggcaatgacactgttctgtatgatgc

SEQ ID NO: 937747 - DNA, 567 bp, Homo sapiens
tataacatatccaagtctcttgagcaccccttaaagaacttggaagatttacttagtatgtatagcaggtcttaattctcccaagttaaacctcttgtggccagcttactgaagctgtgaaaatggagatgctttattgagaatggaaagggaatttgtaattgtctttcatctccccaggctaccattccaaatatgacagcaaggactgggaatttcaagagtaaagaaggtggcattttgtgtttcagatgccttgatttttgtcacactcagtttcctgtgagctgatccctttyatgctgtttagaggttgacttcaaaatgacaactaattaaaagtagaaaatttggtatcttttgaacatgagtacttctttagagatgagaggggtagatgccctagatttaaaatgatttaactctttggccaaattgagcatcctcatgggttactagtaaatacagctcacagatagttttctataaagatatatcttaatctcctttctggatctaacaaagtggtatatctctgtccccagggtgtttttcccatggacatta
